United States Patent Application Publication US 2019/0348154 A1 - sequence listing, part 102

SEQ ID NO: 379344 - DNA, 1527 bp, Salmonella enterica
atgaagcttacccataaaaaaactcaaaatcatcatgttaatctgaacaccagagcaattttgacgttttttcaacaaatcatatctttcatatatggcaaaaccagcgcggcggttgagcttatctttgcaaccctccaggggagcatggctctggcctgccaggatatgtatgatgttgaaattgaagatgatattatcgttcctgtatcgcattttcacataatactggcaaggtccggaagcaaaaaaacgacagtatacaggctcattatggcgcaaattcatcagactgaacgtgagctggcagaggtgttttcagtcagactgaaggagtatgaacggcaacacgtgctatgggatgaagaatgtaagagccttaagaaatcgtttcagaaagctgtacgccagaaagagggagtggagacagccagaaatgaactggatgaatgtctcagaaatgaaccggttaagcctgtaagggtgcatctgacggtaacggatcccacgccggaagcccttctgaaagagctggggcaatactccagtctgggtatcacctctgacgagggaagtgctctgtatgaaagcatcatgcgccgtaagatcgcaattcataatacgctatggtgtggtgatgattatcggatcagtcgtgcgtcaacgggtatcacagatattaaagatccccggcttggtatgctgttgatgacacagccggagccacatgactgcacactgaaatcactgggtaacgcaatacgagctacgggaatttatgcgcgtacgttaaccatggatcttacgttactcaccagacagattgatattgatgagctggtttctggcgatgagtccgatctggaaaagttttatgccattcagaaaaaacatttacttgccgggattgaacgcagaaaaaaaaatcaaccccgaatctgtatgacttttgctcctgacgcaaagaagcggttgcgttatgttggcagggacgtaaagcgtctgatgcagcaggggggaaagctgtaccattataacgactgggctgcgcggtactgcgaacataccgctaggagtgctgctgtgatgcagttgtttatcacccctgactcaaccgttattacgctggaaacactggaagctgcgttgttaatatcggaatggcaccttaatcattttattgtaaaaatggatgtggtcaggggaccttcccattctgaaagagtactcagttggcttgaaaaccatcttgttaaaaatgggtcttatgattttttaaggcgtgaaatgatgcaagagatacatcgttcactcagaaaaaaagctgatcttgagcctgttctggaacagcttgctgaggagggtaaaatccagttgtgggaggacgaaagtgggacgcattacatcaaatacctggcttccgaaatggcaccttcagaactggatacagaacacaaggctttgaaaggtataccagaatatcatgggggaggtagtgctatcagtagcgtcccgctgaaaggataa

SEQ ID NO: 379345 - DNA, 180 bp, Salmonella enterica
atgtcatctgtttacaccagacaatcagagccacaacagcgcattctgcgcatgagagaactgacgaagatagtcggtctgtcccggtcaactatctatgaaaagctaaatcccgaatccaggtattacgacgaaacgtttccaaaaaccgtgagacttggtgctgcttccgttggatga

SEQ ID NO: 379346 - DNA, 1851 bp, Salmonella enterica
atgcacacttttgccagtctgatgtacgatgtttatcggtcttttggcttattcagtaaagggaacaggcgggctgctatacggggggctgcgaccttttccagccatcagcgctttttcggtaatcgtgaggatgaaagacatcaggaacagaaacactatgatgaaatcatcggggttcttgatgcagaacaggtgttcagcacaactcaacgaagggagattttttacaaatacgagcaactttataatgccctgatggctcgccccgtctttactgaactgagccgggaacaaataaaaaagcgatatgctctgcatataatccccagattaatcgcacttgacatatataaaacgtacaaagacgaaaacaaaaactgtttttatcaccatatacaccagttcttgctgaaagattattgcccatgctggcaggataaaaagaaagggggtttatctgctgtccagaagtatctgaaaagtttagcaagaaaacaaaagttctctcatacagattcagaaaacctggcgcctcttttcaaagtaattgaaaatatccgcccaggtaatacacagaaaaaaagcacgctggaagcatcaattatagactgcattaaggcgtattctggtattgttgacgatgatacgcttaacagcgtcagagtcagtcttgataatataaaaaaagcccattactccctgaccgtactccttaatgtcgaacgaaaactccctgtcattaacatcatatcacggtactacagaaactatgtagacaatggaataaaacccgggaatatatcagcaatgttatgcagactactgtatgagccagaaccccatgattttatccatcatgataccatgattaactcaattgcggattattatcatgagagagtaataaaaccgttctccctgaatataaacgaggaatgtttacagagtatcagcgcattaaaaaacatcattttcaacttcaatgataaaaccattatctccgaagcacagttaactgacatcgctgtaaaattaaaaaaagaaccccataaacagtttattcaaccgtatattgaactctggaaggttatagatttaatcagtaaaggcgaaacagaggaagcatttgagaaagtcaaaactatttctctggacgatttacctgcaggatatctggcatccgcttttttagttatccatattgcattacgtataaaatttgagaggaaaaacgttaaaaatggtgttttctcattatctgtaacatccatcctggaaaatcaggggatttacactgactatatccccgtcagtcagacttatacagaaacccacagtgacgactctgttataaaaagtactctcctttctgaatccattttatcagatgccaacaatctgaccatcatccgttcggtaaggatgtataataacatggtcaggagaataagtgactggaatgaccttgagctggaaggcatttatcctgagtctgtttacgggcttctggataaagttgacactatcctgggtaagatactcaacattatcttttctgaaaaaattacttccagtcaagatttatcctgcatcctgaaaaataataaaattctgacccgaggtgaactgaatgatagccttataggcatactggttaactgtcctcttttggcgtgcgtacgggacatcgagagtctgataaaatatcttcgctgccctggggaggaaataaggaatatgattctttcagttgataaaaaattgtgggatttgatatatggagccctgacgattctggaggaagaaagaaaaatacagactgggaaaacacaggggggtggaaaataa

SEQ ID NO: 379347 - DNA, 1524 bp, Salmonella enterica
atgattacattggaagaaaaaaaactaagagaaatattagctgttgatgaaattacttttgcaattcctgcacaaagtttcgctatcgaatgctcaataagtgctgaggaggcattgcccgttgttactgagttcgcgcttcgcatcgcttatgtttgtggtacattgagtcctgtacaaattcaggatttttttggattcacaaaaaaagaaactgatgcaataattcagacattacttaacgaacgcctcattaaatggaatgaagatgagctgttagagctaacttcttatgcattaactcgttttcaagatagctcagatcatctacctcggttctttaaaatccaagaatggagttctgaagttatttttgatctaataagttttagtccagcaggacgccccaacagattgaaacgtgtaaattcattagtggagttagcagcacgaaatattgagaggcaatctaaaacaattcaatatgcagagcaagcctttcaagagcactttcatagtatttgtaagaagaataaagcagagatctataagattagtgcggtagatgctggcgagcattttagcattccactgccgtgtatgttttatctggatttggatggccaagttaatattcgacgtgatatagataatgaagcttttaataatagacttgaaatatcagaggctattactgatgcactttcaaaacaagaacgtccgcaaaacaatagttttatggattttattcattattttgattattcgttatttgaacgttatgtttcgaatgatgcttttgatttgcgtcgatatgttcaagatgttcatttaacacgtattgtttgttatgataatagacgtgtcaccccattacttggagcattttatctacaacataatgccgatttaattatcactaggcttggagatgagatactaaaacaggaggaaatgttagttaataaggaggttagtttaaaatctggtgaggatggtgaaaaaatagataccctccctgtttcagaaaaaactatcgttcaaagcgggttgtggcttgccccccaactatccctttgggctagaactcgcggggcaagagagtttgttcagaagattgaccgtctgttggattctaggaataaaaaaaagagcaatcctgttggtacttatgtaatgatctctggtcggaataatgcagctaaagatcgtgcatttaaatatagagatcagtttcaatatttatttaatctagatatatgtcttatggatgggaaattagagttgttacttatacctggtttaattgtatgtgttctttttcatttccatttggaacatcagccggttagcatcccaatagggtttatctcgtctgaggtggaacatttgaaaatagcaagttcattgatatctgaatcaacgagatcaaaacaaatattttcatctatgtatgatagtgaaaacgttcctgttgcctatcaaggattacaaaatttgcttgacataatatctacggaataa

SEQ ID NO: 379348 - DNA, 2160 bp, Salmonella enterica
atggataagcgtcatgagaaattgcgaataccttacagaaaagagggagagtctttagactatgaatcagatgcaaaagttgaggcattacaagaaataaacggtgaactgattcgtgtagggaatgttgatataagagagactacccaatctactctcgtacttgaaaatccaaagattcgcattcagactaatattggcgacactttgaaattacgaagtcaacaagatctatcatcttttattcgtaggcgtcatgcagttacacgtattttaaatgctgaatcggctatcccctcattaatcaactactttgaaccattaacttgccctcatccacaatatctacaaccagagccaaatgattctgatcttgatgcttataatcgatatgataaagatggagagctatctttttcactcaatcgacagcaacgagatgccttttctaaactttggtcatacggcccattgagtcttttgcaaggccctccaggcactggtaaaacttcattcattgcttcatttatccattatgctctctcacaaggagcccaaagtatacttcttgcaagccagtcacatgaagcagttaataatgctgcagaaaaagtaattgaactttgtcagcacagcaatctgcccctagatgttgttaggttcggtgcagaaggaatggtctcagaaaaacttcatccatatcattcatcttccattttgcaaaattatcgagacttattccgctcagaaatgcgagttagaatttcagcaatgaaccgaaatttaggtctccctaacaaatttgtagaaagatggttcgatattgaatatcaacttaagcgtttgaatcgtgaaatagaaagattaaccacaaaactaaataaaaatgaaatatcagaagctaataataatcctctgatagctcgaataaatcagcgacttgaacgatttaaaaaaattgcatctgaaaagtttggttatgcgggggagggaactccagaggaagtgattaatcaattaagccgtgagacaatgaatcagtttggtgtaacttctttagatgcagtgtctagactggagcaagtaattgcaatgtctcaagagtgggtagatcgcttaggcactctgagaggtaactttgaagaatttcttgcgaagacccgatcacttgtatgtgggacttgtgtgggtctaggacgctcacaatttggtgtagcaaaaaatcgctatgattgggtgatagtcgacgaagctgctcgtgcgacacctggcgaattggctatagcaattcagtcgggtcgcagggtgttactggtcggcgatcatcgtcaattgccacctttgtatcctgaaccagtggtgcgaaaaatatcgatagaactaaattactctgatcgcgcggtactaacacgtagtgattttgaacgtgctttcgaatcagattatggtaaacaagtcggagcaacattacgtactcaatatagaatggccccaccaataggtgaaatggtttcagcttgtttttatcccaaaccgttagaacctggacgtggaaatccagaaccttggtttaatcaattacctaaaagattaagttctattattacttgggttgatacttccgatgctgggggagaatcttatgaaagagcaaaacatcctggatttgacaatccttatgaagctagagaaattattgatacgctgcgttcaatatgtacagcagaatcattcatcaaatatttaattgatgaaacttcagatgaggaaaaaccaattggtgtaatttgcatgtatgcaaatcaagaacgcctattgcaacgtttacttagcgaacaagattgggctactggttatagacatcttattaaaattgatacagttgatagttatcaaggtaaggaaaatcggatcattatcgttgcaacgacgcgcaataataatcagtgtattcaagggttccttagcagctcggagcgaataaatgtggcgatttcgcgtgcaatggatagattagtaatcattggggctgctcgtatgtggcgtgagaggcatcaaacttcagcgttaggccgtgtattaaaccacattgaaacacatcgtgatgggaataacttcaatttggttcaggcattagccattgaggagggacagaaatga

SEQ ID NO: 379349 - DNA, 780 bp, Salmonella enterica
atgcaattacaacatggggatctgcaccctaacaatattctaatagaagtgggagatgttcgcttcattgatgcacttgatataccttgttcaggtgagaatataatattcactcctgcatatgtacctacagattacgaatctttgcctatggaggaacgtgattgctacgctgtggccaaagtgtgtaatgagattttagaacacgacgttaactgggaagggattgatccatcagctttacttaatgagatcagaagttgtatggggcgggattttaaaatttattctcttgaccgaataaatgatgaaatagagatgttaatcaaccctccacaaataaatgagggagtgaggttgtcagtattaatgaggcaactgacctccagccagaaattaataaatgacaatggtgtataccatatcagtattagtgaagaacgagtccgttcgccaaagcagcagcctcatattatcgtagcttttgccggagtacgtaaacagttacaaatctatcttaaagcgacccaattagattttgcatttttacgaactaaagatatagcccatagcttatttgtacgaatggcatcacaagccattacacaactcgaagctaatatactattcgaaccctcatccgcggatgaccctagcaagttattagaacatgtaaaaaaatacctgaggttatctctgcaatatcgagaattcagaatagaattctcggtggcgatttttcttctgatgaggaagaaattgagaactcagaaactttaa

SEQ ID NO: 379350 - DNA, 1740 bp, Salmonella enterica
atggtagaagttttcaatgcatctagttttagccaaaaatggcatggctatgctggtttcatgatgatggatacaacttatagagatcgagagattgatttagttcttctgacgcatgatagactcctaatcgtggagcttaaaaagtggcgcggaaaaattgaaccaatgcatgatcattggttacgtgatggtgatgacatgggacgttcaccagttaaagtccttgccgataagtggaaaattttatcatcaaagattaaaactcgtctaagtgcgccagcaacagaagtatacattgattacagagttgtcatgtgtgggagtgctgacttttctgaaattccagaagatgaaaaatcatttgtatgtacacttgaacagtttttaaaaattgccaaatctggggggtaccaaggcgaatttggtccacaaaaagcgcgtaagccttgtgaatatttgcaggtgttcacaccattttttagaggtaaggatttcaagccttcaagtttttcattcaataatttccaaattgttggagaagcaacttttcctcatcctgatggattgtacaaagaatacaaatctgtcaaaaaagatgaccaacgacatgaagcattattaaggcgatgggatttctcagcattatctggcatagccgatactattgatgaacgagcccgtatagcattgcgagagcataaagttctaggtttcattcatgagcaaaatgaacaacttgatagcgtagttttgcaacctctatcgcatccaactcgagatgatatagatgctgacttctgtgaactatatagactaccgtcgagacaattaagacttaatgaattcattcaacgttttggtgaagatctagagttctgtgaaagggttaactttgtaaaggtacttttatcccacgcagccgatttacatgacttgggcgttgctcatcgggatattagcgatcatactttttggttagaacggccatctaaaatatctatatcaggtttcctgaccgcatattttcctgaattaggaacagttggttctcttcgtgatcagcttcgtgcaagcaaaactattttacctgaggattccgaaattggacaaggtgaagcgagcgatccattccgtagagatgtttatttattggctgtagttatacatcatattttatttttacaagcccccaagcaagaagactctttatttgtttggaatagtccaactgattttgaagttgatccacaacttagcacttggtttgaaactgctttggatttaattcccgcaggtcgattttcagatgcgcgaacgatgcttaattcgtttaataccttatctttaggatatccggaaaaaacaggtattgacttacgtagattcgagccttatcgaagtgagttgattccaatggttatttatcctattgaggaaaatataaagcagggcataagtcatttatataaatcgactttttctggtgagagtgtttcggttaaagtatggtatgggcggaaaccagatataaagcgaccggaagaggctttacaacttcagaattttctcgataaagctcgcctaataaaatcccagccctgttcttctcttgctgaagttattgattttggtgtttcagatgcaggaacctatttagtccaaaaatggttgaatggggaattcctaaatgacgctgtcaaatcatgtcatgttggtcgtgaattgatattactatga

SEQ ID NO: 379351 - DNA, 222 bp, Salmonella enterica
atgtccaggctgactgatttaatagctaaagcaaaggccaaagacccgcaactaggcgctgatcttgatcgagaaatcaagatcctgtcgtcacgtcttccctttgtcgtaatccacagtacacagggcagtcgtcactgggaatcgcttatgttgaagctgaacagtacaagattgttcgtcccgatttcctgttctttgccgaacaggatggcaaaatag

SEQ ID NO: 379352 - DNA, 876 bp, Salmonella enterica
atgactaaacctcacggccttcaggccctggaacaaccgctgtcggcgcttcccgatacgcttcgtcagcttattcttgaacgtattcagaacctcacccactacgagccggtgattggcatcatgggcaagagcggtgcgggtaagtcttcgctctgtaatgaactcttccggggtgaggtctcccccatcagtgatgtgaacgcctgtacccgtgacgtgctgcgcttccggttgcgcagcggtcgtcacagtctgatgattgttgatttaccgggtgtgggagaaaacgggctgcgggaccaggaataccgtgccctgtaccggcgtatgctgccggagctggacctggtgctgtgggtcattaaagccgacgaccgggcgctgtcagtagacgagcagttctggcatggggtgatgcaaccttaccagcagcaggtgctgtttgtgctgaaccaggctgacaaaatcgaaccctgccacgaatgggatatccgcaccagtaccccctcgccacagcagcagactaacctgaaggcgaaacaggccgccattaccacgatattcactccccgtcatccggtctgcatggtgtcagcgttgaccggttggggcgtggaagcgatggtggcaaccatgatgcgctgtctgccggaccatgccaccagcccggtggcgacacaactgcacgggaggctctgcaccgggccggtcaggtcacaggcccgtgatagcttcggtgaggccgtggggcgggtgttcgatacggcagaatcatcgtcgtttctgcctgcgccgctgaagactgtgatacgtaccgtgcgtgatgcggtggtgtccgtggcccgcgcggtctgggactggattttcttctga

SEQ ID NO: 379353 - DNA, 189 bp, Salmonella enterica
atgactctgtttattcaccgcctggtagatgattatttccaggcagacataacctgtcctgaccagcaaaagataccaccagtcgtaagcgcgtcaccactgccgacgttgcatccacacagtcttcttgcaccaggcgtttcgctacgtatgacggacacaacccgtcagtcccatcctttacagtaa

SEQ ID NO: 379354 - DNA, 714 bp, Salmonella enterica
atgtctcaggctgagcgtcgttatgaccgcttgtctgtccggctatcgctgattatcagccgtctgctcgcgggtgaaacgctgaatatgcgcaaactggccgctgagtttggcgtgtcggttcgcaccctgcatcgtgatttccgcgagcgtctgatttacctcgacatcgagtatcaggatggctgctgccgtctgctgaccgggggccgtcaggagattcgggaggaggcagcaatgcagttcgcccgtcagtcaggcactggcacattgtttcctgatatggaccaccatctggtcagttcgttgctgagtagccaggactcctcgccatgccttatctggcatcagggggcaaccataccactttcccgaccgggcatcttcacacgactggtcagggcggtatcagaacaccagaaggtaaccctgcttactgacgggagtcgttgtgacagccttgccccatatcggctgattttcagcaccggtgagtggtttctggcgggagaacatctcggccggataaccgtttttgcgctgcacaccgttcactccgtgacgtttcacccggaaaccttcacaccagacggacatttcacccgcattctgtcccgcccggactttttacaggcgttacctcattttcatattttacattcactgctcgctgacgacagttacgggcaacttacccataaggaacaggtatga

SEQ ID NO: 379355 - DNA, 567 bp, Salmonella enterica
atgaaattattcaccacggcggcgctggccgccagcctctgcattacctctgtgcctccggtcctcgcagatgacatcatgggctccgtcaggtcctggcagtacatgcaggccgacggctggaaatcggccgacggtacggataacaacacactgcataacgccctttatcaggctgatgtaataggcaattatccctggacgaaacagtttctgctgcgtattcgtggcggcggtgcctattaccttgccgacaagaaaacgcacacggtacgcaggctaaatctgaaaccggccagcggctacacctctgacctgacttcggtgtaccagggcgaagaccaggggaaaggctgttatttcaccattatcgatacgcaatatcaactggagctggccgaagaacctcacagcaatcaggtgctggccgccttcccggaaaattgcgtcaacaaaaaacaacaggcggccctggcggccagaagctctgaagccgacaggaaactgcagcaatgggtggcgcagcagagcctggcagaattatgtcgtcgtacaggcaactgctga

SEQ ID NO: 379356 - DNA, 453 bp, Salmonella enterica
atgaatatattcaatacgcgtctgacgacctttctggtggttatcggcactctgctggcatccggctgcgacagcaaggaagatgctggcgtgaaggcgattgcccggtttaaggacctgactccgccgccgttcagcgacgtggtgtctcacaaatccgatgtcgtgcaggaatgggtaaaaaaggatgccttcggcacaccgctatacacggtaatgaaaacccgccagtcgccggaaggctgtgagtccggtaattattactacattgctgatatgcagcagaaaacggtgcagccgctgatagccgccctgtgtctcgcgggcaatattactctgagcttccggatcgagactgacagctatacgggtgaaaaatcagtggtgtattcgcacgatggcaaggaaatggggaaactctatctgccggataaccaggagaaccatccatga

SEQ ID NO: 379357 - DNA, 453 bp, Salmonella enterica
atgaagaagctgaaaggtgttatctctgctgcagtcctgagtctgtatttgctgacaccggcccatgctgatggcggttttcagggtgccatcaaaggcggcattccggcctacacccgcgatatgcagcataacaaacccttctggtgtaaccagtacaaactggtgagaaagatgtgtgaagtggtttcgcaatcggaaaacgggcgcgttgccattgtcagaatggtccccaccgactggaaatgccccaacggtatctggggggtggttgaccgttctaatggtgacgccatggagttgattccgacggcgaaaatgtccctggagcagtactgcagcaaggcattcagtgcaggttttgtcaaaccacagaacaggaaatcactggccgacgtcgtgatgtactacaacggcaagccagtcggttctttcgaatacattgaagagtga

SEQ ID NO: 379358 - DNA, 540 bp, Salmonella enterica
atgaactggcattatgagaaaaatggcgtgcgtcacgacaatgtgaccgaagccgacataaccgaacgtattcagcgcggggagctgaatgcctcaacgctggtatggcaacagggaatgacggaatggcagccgctgtcagtcacgccgctggcagatgtcctgaaacaatgtgcggttccccccgcgctgcccggcaatcgtatccccggaggcgtggtctggacgctggcctttgcgcccctgattgggtatgccctggagatgtggacggccgggctgagcggaatggaatttgaagaggcgtatgccgccgtgacggaggggcaatactggtttatcacactgatactgaatattgcgctggggtatctggatgaacgacggctccgtaaatccggcgttgataccgctgcctttggctggctggcctggctggttccgttttatctgtggcgcagggctaaagccctcggtcagaaaccggcttatttctgggtctggttggttatgttaatactggtgttattaactacctga

SEQ ID NO: 379359 - DNA, 414 bp, Salmonella enterica
atgaaaaatattatcaccattttaatggttgcagttatcagtttctttaccggtaatgtatctgcaaacacggctgtacctttaccgcacaaccttactgacgtcactgacggtacggagttctggtgtcaggggaccgataccactgatggaagatgtaaatacctgggtacatccaaagacatgcaatacggtctggtacacgctatgggcggtacggcgtgttgggatggtttctacggcgtgattaacttttacaccggcaaagctcagaccatcaaatacaacgacaatcaaagttgtgaaggcgatatcaaagccagtttcgttacgctgaaaaacggtaaactgggcgttaaactttacgacaacacaattcacgaagttgtcggacttgaccaaattaaaatctaa

SEQ ID NO: 379360 - DNA, 276 bp, Salmonella enterica
atgatgacaggcgctttttactataaagtaacagatatgccagactgtacatcacttttattgcctgaaggcgaaggccctttctcacgcacgcaggcgattgccgtcacaacagcttaccgcaatgtgtttattgaagatgaccagggcacacatttccggctggtcatacgcgacagttataatcagttgctctggtgggcatggaattttgaagcccgtgcctggtactggctgaaccgctatctgctcagccacggaataccccgacactga

SEQ ID NO: 379361 - DNA, 492 bp, Salmonella enterica
atgaagctgtccatgaccgtggaagccgatacaatcaacgtccgggcccttaatgggggccggatcgtcgtggatatcgacggtattgaactcgccagcctgatcgatgtggtctgtgataacggatattcacttcgcgttgctgacgagcccggaaagctgattgttgaagatccgcttccgcccgtcgcccgcgttaacggcattcagtgcagcaccgcacatatcacggagaaagacaatgctctgctgtttaccctttcacaccagtatgaagactttggcgagtcggagtggattttgtataccggctccggctacttactccacctggaggcatggtcatttccggttctgcggcttaaacggctggggctgtcgaaagcctgtcgacggttagtggtgacgctgatacgccgttacgccgctggtattctccacctggatgctttcggcgaactcctgccaggctttgccaccttcgactggtaa

SEQ ID NO: 379362 - DNA, 915 bp, Salmonella enterica
atgcgcaaggtgtcgatatctatattattcatgctagtttcactgacttgggggactacatggttggccatgcgaattgccgttgaaactatccctccagtgtttgcaaccggaatgaggtttatgtttgcagcaccttttttaatcatcattgcatggttaagaaaaaaaacactgttgtttcctcccggacaacgattattccagtttgtgatatgcatcttttatttttgcattcctttctcactaatgatttatggtgaaacctatgtcaactctgggcttgccgccattatctttgcgaatatgcctgtggccgttttgatagcatcggttttgtttctaaatgaaaaagcgaaactaatgcagatcgcaggcttaactatcgcaatcactgcattgacggggatacttcttgaagaaacgaatacaagtacagagagtcactggcagggtatcactgcgcttatttctgctgtgttaatccatgccataatatatacacaatgtaagaaaagaagttgtactgtctctgttatcacatttaatgcgctcccgtgccttttagctgggttgatactttctgcgacaggatggttttttgaaagaccacaagtatcaaccttctcagtacactcaatattagctaccctgtatctcggggcttttgccggagtttttggtatcctgtgctactttgcacttcagcaaaaggctaatgccttccaggcttcgcttgtatttcttatctttccgctgattgcggtaagtctggaagactatatttatggatatgctatttcaacacactcaatgctgcttattataccattagttatcgggatatttcttactcttgtcgccagaaatatccctgtaaccagcagatgccgggataactcatcacagaaataa

SEQ ID NO: 379363 - DNA, 465 bp, Salmonella enterica
ttgcttttacaggcgttcgaacaactcctcaaggaacgcaacgatatagagttagttgtcgttggtaactatatgagtaaaagtaaaggtgaaaaagcaacctatcagcgtgaggtgcgggaattagcagaacggctaaaaccacactgtcatatggttggaggtgtaacgcctgaagagatatacaactactattcgttagcagttctggttgttattccctttcaattccaggaaccgttctgcatggttgcaattgaagtaatgggggcaggaaagcctgtactggtcagtacacgcggcgggatgactgagctcgtaaaagagggggataccggcttccatttgcaggagccaatgaccccggagaccattgccagggacattaataaagcgctggcatcccctgatttaaacgatattgccttacatagacaacgttgtgtggaagagaaattcccgtga

SEQ ID NO: 379364 - DNA, 255 bp, Salmonella enterica
atggttatgcatatgcataatgctttcgaacctgatgggttagatcaaaacgttaaaacgatcgtccccagcgtgtttttgaagaagcattatcaggcgtacctgccggatgctgatatcgctatcgtccctaatggtattgacctggaggcctatcagaaaaacgctgtaccactgcaaaagtctgacctgggaataactccggaaaaaaaacgattttctttgcaggccgtatatcaccggataagggagtga

SEQ ID NO: 379365 - DNA, 513 bp, Salmonella enterica
atgctacacgagcatatgccctcatggttccctctcgcgatggatttagcactcgttacaggtcaacgtagggaggatatcgtaaacatgaaatttaatgatgtttttgacaaccgcttacacgtaactcagattaaaaccggaatgaaaatagctattcccctatccctgacccttgaggtgccagggttacgtccgggaacggttatcgatcgctgccggctggtaagcagaaccgatttcatgatcagtgcaggaatcaggaaaaatagcccgaccgggaatattcacccggatgggctcacaaagaaatttgtaaaagccagaaaaatttcaggtgttaaattcagtgataacccaccgacatttcacgagatccgtagcctggctggtcggctgtacaaagacgaacgcggcgaggaattcgctcaaaaactactgggccacacctcagagaacaccacgaaaccctatctcgatgaacgcaataataaagcttacgtgatgctctga

SEQ ID NO: 379366 - DNA, 1014 bp, Salmonella enterica
atgatgctgtctgttgttgctggacacattgcaaatttcccatttggggaggtattctattactatcaagttgccggattttttctgctatcgggttatttctttcattacgacaagtatgctgacagatttagtaaatttttaaaaagcagatcaaagcttatttgtcagtaccttatttattctgcgataatcatatcgacgcataatttacttactgagtttgggttacaacctacaaattacatttattactcacctgctgattatgtcacagcatttatacggtctataacaataccatctgaagcactggcaggtgcaatgtggttcataccagtattgattttaatgcagtttgttttttattggctaaatagagtggttaaagaaaataaactgctaattggatcttcagttttaattttattcttcattggttggtggattgtaaaaagtaatgcaattgctaataatccctacataaacactcacattccaaacgcacaatacttcgtctatttgccgtttttctacataggctatgtatttaaaaaatttggattcaaatccttgagcagcataaatgctatgctgccagcgctaatcgtcatagtccttagttacattgtaatacggccaactatgtatttatacggaagcattgatccgtattgctttatctttttatcgcttattagcatttctctcgtaattggtatttcttaccacataaaatctaacatactcgttagatttttcacaacaataggcgagaatacagtacacattctcgctatgcacttcttctttttcaagatagcaactcttctattaaccattgtagggctcaagcaaattgatgatcttcatcgcattgacggcccatctaatgggtcaatcattgaaacaataacatatctttcattcggtatagttttcccattagttcttgtatcattagtaaggaagataagaagtaagatttttgtaaataaatattctccggcatag

SEQ ID NO: 379367 - DNA, 204 bp, Salmonella enterica
atgaaactgaatcggcctacactgctaattactctgaatatactgtcgttgccagtagagacgacggagttcagcgccgattctcttaaaaacagtgaccacctcagtgtggatttatccgccttcagccgggatggctatattgcgccagggaattacctgcttgatatttacgtgaatgacagactcattcacaatcaataa

SEQ ID NO: 379368 - DNA, 174 bp, Salmonella enterica
atggcgattattcttggtggagatgatagcgcgtcactgaaattgatgagtgctggaaagtgtgtgctgggactgtggtatcatgggcaaggtaaaagagcgtacttacatttaccggtattccattcgcttggagaaatacattctctctaccatgaaatgataaaaaaataa

SEQ ID NO: 379369 - DNA, 153 bp, Salmonella enterica
atgttgtactcatttttgacagcattgttacgagataagttgagacattatgaaatgaaaaatccacgcaatggcgtggattttatagggttttaccgctgtcatgagattcagcaaaacctcatgagacaacgaatgttatttagacgttga

SEQ ID NO: 379370 - DNA, 1473 bp, Salmonella enterica
atgaatacaactgcacctacgggcttgctgcagcaacctcgtccatttttcatgatcttttttgtagaattatgggaacgatttggctattacggcgtccagggcatcctggcggtctttttcgttaaacaattgggtttttctcaggaacaggcctttattacctttggcgcttttgcagcactggtttatggcctgatctccatcggcggctatgttggcgaccatctgttagggactaaacgcaccctggtcctgggcgcgattgtgctggcgattggctattttatgaccggcatgtcgctattaaatcccgatctgatttttatcgcactgggtacgattgccgtgggcaacgggttatttaaagccaatcccgccagcctgctctctaaatgctatcagcctaaagatccccggctggatggcgctttcaccctgttttatatgtcgattaacatcggttctttgttatcgctatcgctggcgccggtgattgccgataaatttggctatgcggtgacctataatctgtgcggcgctggtttaattgttgcgcttctggtgtacttcgcctgccgtggcatggtgaaaaatatcggttctgaaccggatcataaaccgctacgttttcgcaatttgctgctagtactactcggcaccgtcgtcatgattttcctctgcgcctggctgatgcacaacgttaagattgccaatctggtgctcatcgtcctttctatcgtcgtcactattttcttctttcgcgaagcgtttcgtctggataaaaccggccgcaataaaatgttcgtggcgtttattctgatgattgaagccgtgctgttttacattctgtatgcgcagatgcctacctcgctgaacttctttgcgattaataacgtgcatcatgaaattcttggattcgccattaacccggtgagttttcaggcgctgaacccattctgggtggtcgtcgccagtccggtactggcagcgatttacacccgactgggtagcaaaggcaaagatctgactatgccgatgaagtttacgctcggcatgttcctctgcgcgctgggttttctgaccgccgccgccgccgggatgtggtttgccgatgcgcaaggactgacgtcaccgtggtttatcgtgctggtgtatctgttccagagtctgggcgagttgctgattagcgcgctgggactggcaatggtcgccgctctggtgccgcagcatctgatgggctttattctgggaatgtggttcctgacccaggccgccgccttcctgctcggcggttatgtggcaaccttcactgccgtaccggaaaacatcaccgatccgttgcagacgctgcccatttataccggcgtctttagcaaaattggtctggtaacgctggcggtcaccgtggtgatggccattatggtgccgtggttaaaccgaatgattaatacgccaggtaccgaacagtaa

SEQ ID NO: 379371 - DNA, 672 bp, Salmonella enterica
atgaacgcccgcctcatctctgcgccctcattatcccctgaagagcaaaaaaacaggttagctgaattttttcgcgaatactggggaacgcaacaaataaacgattaccatacagatacaacgttccacgtgaaccataaaaaacagtattgcgatctacgatggtcagaaaaatatattgatgtcgattattggtgtagccgcgaaatacaccataaagagtggtctaagttcctgatcgcaataaccaccgcactgcataccccaataccaccttattaccttgattttaatcttaaagggcgccgaacaactctacgaaaaagacatcgccgcacagagagtaaaattggatgttttatctatccttataaagaagatccggatgggggatgggattatagtgttgactgtctgatgatttacgagtccgattttgagatactggccgctggaattaataagctatacccacgaaatcatgaggataagtcctttgattacacaagctggaatgaatttacacttgctgaatgcgagaaaataatctcgcactggctgataattgcgcgcagcaacggagagtacgcttcctttattcaatatgttatagaatggatacaaccgcttctgcatctatatgatagcatcatgattgaagggaatttatga

SEQ ID NO: 379372 - DNA, 168 bp, Salmonella enterica
atgggcatttttatgctgttctgcctgatgacgctgcgcttatcaggcctaccaatcgtaggtcgaataaagcggttgcgctgccatccgacagggttttactttatagcgctaacaggcgatccagcgacggcgcaaaatagtagccgccagttaccggtttggtga

SEQ ID NO: 379373 - DNA, 1014 bp, Salmonella enterica
atgaatgtttttatcagtatttgtataccgtcttataatagagctgagtttttagagccactactggatagcatatataatcaagattattgtttaaagaataatgattttgaggtcattgtttgtgaagataaatctccacagagagatgagataaactctattatcgaaaactataaagcaaaaaataataaacaaaatctttatgttaatttcaatgaagataatttaggctatgataagaatttaaaaaaatgcattagtttgacgacaggtaaatattgcatgatcatgggcaacgatgatctattagcagatggagcgttatcaaaaatagtgaaagttttgaaggctaatcctgaaattgtattggctacgcgagcgtatggttggtttaaggaaaatccgaatgagttatgtgatactgttcgtcatttaacagacgatactttatttcagccgggggctgatgccattaaatttttcttccgtagagttggagttatttcaggctttattgtcaatgctgaaaaagcaaaaaaactatcgagtgatttatttgatgggcgtttatattatcaaatgtaccttgctggtatgctaatggctgaaggtcagggatactattttagcgacgtgatgacattgtcgagggatacagaggctcctgactttggtaacgctggaactgaaaaaggagttttcaccccgggggggtataaaccagagggccgtatacatatggttgaaggcttgttgctaattgcaaaatatatagaagatacaacaaaaattgatggcgtttatgctggaattagaaaagacttagcgaactatttttatccttatattcgagatcaactcgacttgcctctttatacttatattaaaatgataaataaatttcggaaaatgggattttcaaatgaaaagcttttctatgtgccttggtatttaacctccactttcaaaaaatgttatgaatatacttcttgctgcgatattaggcgttaa

SEQ ID NO: 379374 - DNA, 1200 bp, Salmonella enterica
atgctgccatttccaccaggagcaatcctaagggatgtactcaatgtattttttgtggcgttagtgctagttcgatttgtcattgataggaaaaaaacttatttcccgttggtttttactattttttcatggtcggcggtaatactatgggtaatagcgttaactatattctcaccggataaaattcaagcaattatgggggggcggagttatattttattcccggcagttttcatagcattagtgattttaaaagtatcatacccgcaatccttaaatattgaaaaaatagtttgctacataatttttctaatgtttatggttgcgacaatatctattattgatgtactaatgaatggagagttcattaaattgctcggatatgatgagcattatgcaggagaacaattaaacttaattaatagctatgatgggatggtccgggctacaggcggttttagtgatgctctcaattttggatatatgctcacattaggtgttttgttatgtatggagtgtttttcccaaggatataaaagattattgatgctcattattagttttgtgctatttatagcgatctgcatgagtcttactagaggagcaatacttgttgctgcgcttatttacgcactttatataatttcaaatcggaagatgcttttttgtggaataactttatttgtaataattatacccgttttagcaatttctactaatatttttgacaactatacagaaattttgatcggcaggtttacagattcgtctcaggcatcgcgtggatctacacaggggcggatagatatggcaattaattcattaaacttcctgtcagaacatccatcaggtataggtctgggtactcaaggttcaggaaacatgctttcggtaaaagataataggttaaatacggataattattttttctggatcgcccttgagactggtattattggcttaatcataaatattatttatctggcaagtcaattttattcttcaactttactaaatagaatatatggcagtcattgtagcaatatgcactatagattatattttctctttggaagtatatattttataagtgcagcgttaagttcagcaccttcgtcatcaactttttctatatattattggacagttttagctttgattccatttttaaaattaacaaatagacggtgcacgcgataa

SEQ ID NO: 379375 - DNA, 1011 bp, Salmonella enterica
atgaataataaaaaggttttgatggatattagttggtctaataaaggggggattggacgttttactgatgaaatttctaaactactatgtgatatatctaaggaggaactatatagaaaatgtgcttctccgctggccccattaggtttagcagtcaatatttttctgcgaaagaaaactgatgtggtttttcttcctggctatattccaccacttttttgttcgaaaaagttcataataacaatacatgatctaaatcatctggatttaaatgataattcctctctttttaagaggttattttataattttataataaagcgcggttgtagaaaagcatataaaatatttacagtttcgaatttttcaaaagaaagaatagtagcatggtcaggtgtaaaccctaataaaatagtcacggtatataatggggtatctagtctatttaatgccgatgtaaaaccattgaatttaggctataaatatttgctatgtgtaggaaacagaaaaactcataagaatgagaagtgtgttatatctgcctttgccaaagcagatattgatccatcaataaaactcgtttttactggtaatccttgtaatgatttagaaaaactaataatacaacatggtttaagtgaacgtgtaaagttctttgggttcgtgtctgaaaaagatttaccatcgttatataagggctcgttaggattagttttcccttctttatatgaaggttttggattacctgtagtggagggcatggcctgtggtattcctgtattaacttctctaacttcatcattgccagaggtggctggagatgcagcgattcttgtcgaccctctttcggaagatgctattactaaaggaatttcgaggttaattaatgattctgaacttcgtaagcatttaatccaaaaggggcttttgcgggcaaagaggttcaattggcaaaacgtggttagtgagattgaaatggtactgacagaggcatgtgatggaaataaatga

SEQ ID NO: 379376 - DNA, 1158 bp, Salmonella enterica
atggaaataaatgaaataaaaatatctctcgttcatgagtggttattaagttatgcaggctccgaacaggtatcatctgccatcctgcatgtttttcctgaagcgaagttatattcggtggttgattttctaacggatgaacaaagaagacattttctggggaaatatgcgactaccacatttattcaaaatttacctaaagctaaaaaattttaccagaaatatttaccactaatgccactggctattgaacaacttgatttatcagatgctaatatcatcattagtagcgcccattccgttgcaaaaggtgttatttccggaccagatcagcttcacattagctatgttcattctcctattcgatatgcgtgggatttacagcatcagtaccttaatgagtctaacctgaataaaggaattaaaggttggttagcaaaatggcttcttcacaaaatacgaatttgggattctcgaaccgcaaatggggttgatcattttatagctaattctcaatatatcgcgcgtagaattaaaaaagtatacagacgtgaggcttcagttatatatccgcctgtagatgtggataattttgaagtaaaaaatgaaaagcaagactattatttcacagcatcccgtatggtaccctacaaacgtattgatcttattgtcgaagcctttagtaaaatgccggaaaagaaattagtagttattggtgatggaccggagatgaaaaaaataaagagcaaggctacagacaatataaaattgctcggttatcaatcttttcctgttttaaaagagtatatgcagagcgccagggcgtttgtttttgcagcggaagaggactttggaataatacctgtcgaagctcaagcttgcggtacccctgttattgcctttgggaagggtggggccttagaaaccgttcgcccactaggtgtagaggaaccgactggcattttcttcaaggaacagaatattgcttctttgcatgaagctgttagtgaatttgaaaaaaatgcatcattttttacatctcaggcttgtagaaaaaatgcagaaaaattttctcgatcaagatttgaacaagaatttaagaactttgttaatgaaaagtggaatcttttcaaaacagaacagattattaaacgttaa

SEQ ID NO: 379377 - DNA, 1398 bp, Salmonella enterica
atggccggtgggattggtagccgtttgtggccactttcacgtgaagagcatccgaaacagtttttaagcgtagatggtgaattatctatgctgcaaaacaccattaaaagattgactcctcttttggctggagaacctttagtcatttgtaatgatagtcaccgcttccttgtcgctgaacaacttcgagctataaataaactagcaaataacatcatattagagccagtggggcgtaatacagccccagctatagcgctggccgctttttgttcacttcagaatgtcgtcgatgaagacccgcttttgcttgtccttgctgcggatcatgtcatccgcgatgagaaagtgtttcttaaagctatcaatcacgctgaattttttgcaacacaaggtaagctagtaacgtttggtattgtacccacacaggccgaaactggctacggttatatttgtagaggtgaagcaatcggggaagatgctttttctgtagccgaatttgtagagaagcctgatttcgatacagcgcgtcattatgtagaatcagagaaatattattggaacagcggtatgttcctatttcgtgcaagtagttacttacaagaattaaaggatctgtcccccgatatttaccaagcatgtgaaaatgcggtagggagtattaatcctgatcttgattttatccgtattgataaagaagcattcgcaatgtgccctagtgattctatcgattatgcggtaatggaacatactaggcatgcagttgtcgtaccgatgaatgccggctggtcagatgtggggtcatggtcttcactgtgggatatttctaagaaagatccacaacgtaatgtattacatggcgatatttttgcatataatagtaaagataattatatctattctgaaaaatcgtttattagtacaatcggagtaaataatttagttatcgtgcagacagcagatgcattattagtatctgataaagattcagtccaggatgttaaaaaagttgttgattatttaaaagctaataatagaaacgaacataaaaaacatttagaggttttccgaccgtggggaaaatttagcgtaattcatagtggcgataattatttagttaaaagaataactgttaaaccaggcgcgaagtttgctgctcagatgcatctccatcgtgctgagcattggatagtggtatctggtactgcttgtattactaagggggaagaaatttttacaatttcggagaatgaatcaacatttatacctgctaatacagttcatacgttaaaaaaccccgcgactattccattagaactaatagaaattcaatctggcacctatcttgcggaggatgatattattcgcctggagaaacattctggatatctggagtaa

SEQ ID NO: 379378 - DNA, 1437 bp, Salmonella enterica
atgaaaaatatatataatacttacgatgttatcaacaaatctggaattaattttggaaccagtggtgcccgcggccttgttaccgattttacacccgaagtttgcgcagcatttaccatttcctttttgacagtaatgcagcaaagattctcatttacaacggttgcgctcgcaattgataatcgtccaagcagttacgcgatggctcaagcttgtgccgctgctttgcaagaaaaaggaattaaaaccgtttactatggcgtaattccaacacctgctttagctcatcaatcaatttccgataaagtacctgcaatcatggttactggcagtcatatcccttttgaccgtaatggcctgaaattttatagaccagatggtgaaattactaaagatgatgagaatgctattattcatgttgatgcctcatttatgcagcctaagcttgaacaattgacaatttccacaatcgctgctagaaattatattctacgatatacctcattatttccaatgccattcttgaaaaataagcgcattggaatttatgagcattctagtgcgggtcgtgatctctataagacgttattcaaaatgttgggtgctacagttgttagtttagcaaggagcgacgaatttgttcctattgatactgaagctgtaagtgaagatgatagaaataaagcaatcacatgggcaaaaaaatatcagttagatgctatattttcaactgatggtgatggagatcgccctctgatagctgacgaatatggaaattggttaagaggagatatattaggccttctgtgctctctcgaattagctgctgatgcagtcgctattcctgtaagctgcaacagtacaatctcatctggtaacttttttaaacatgtggaacgaacaaagattggttcaccctatgtgattgcagcatttgctaaattatctgcaaactataattgtatagctggttttgaagcgaatggtggctttctgctaggtagcgatgtttatattaatcagcgtttacttaaggcattaccaacacgtgatgctttattacctgccattatgcttctgtttggtagcaaggacaaaagtattagtgagcttgttaaaaaacttcctgctcgctatacctattcaaacagattacaggatataagtgttaaaacaagtatgtctttaataaatcttggtctgacagatcaagaggattttttgcagtatattggttttaataaacatcatatattacattctgatgttactgatggctttagaatcactatcgataacaacaatattattcatttacgaccttcaggcaatgcccctgagttgcgttgctatgcggaggctgactcgcaagaggatgcatgtaatattgttgaaactgttctctctaatatcaaaagcaaactgggtagagcttaa

SEQ ID NO: 379379 - DNA, 1299 bp, Salmonella enterica
atgaagatatcatcaggcgcaattaatttttctactattcctaaccaggttaaaaaattaattacctctattcgtgaacatacgaaaaacgggctcacctcaaaaataaccagtgttaaaaacacgcatacatctttaaatgaaaaatttaaaacaggaaaggactcaccgattgagttcgcgttaccacaaaaaataaaagacttctttcagctgaaagataaaaacaccttaaacaaaacattgattactgttaaaaatattaaagatacaaataatgcaggcaagaaaaatatttcagcagaagatgtctcaaaaatgaatgcagcattcatgcgtaagcatattgcaaatcaaacatgtgattataattacagaatgacaggtgcggccccgctccccggtggagtctctgtatcagccaataacaggcccacggtttctgaaggtagaacaccaccagtatccccctccctctcacttcaggctacctcttccccgtcatcacctgccgactgggctaagaaactcacggatgcagttttacgacagaaagccggagaaacccttacggccgcagatcgcgatttttcaaacgcagatttccataatattacattcagcaaaatattgccccccagcttcatggagcgagacggcgatattattaaggggttcaacttttcaaattcaaaatttacttattctgatatatctcatttacattttgacgaatgccgattcacttattcgacactgagtgatgtagtctgcagtaatacaaaatttagtaattcagacatgaatgaagtgtttctacagtattcaattactacacaacaacagccctcttttattgatacaacattaaaaaatacgcttatacgtcacaaagccaacctctctggcgttattttaaatgaaccggataattcatcacctccgtcagtatcaaggggcggaaattttattcgtctaggtgatatctggctgcaaatgccactcctttggactgagaacgctgtggatggatttttaaatcatgagcacaataatggtaaaagtattctgatgaccattgacagtctgcccgataaatacagtcaggaaaaagtccgggcaatggaagacctggttaagtcattgcgggatggccgcttaacagaggcatgtatccggccagttgaaagttcgctggtaagcgtactggccccccccctatacgcaaagtgcgcttatcagcgagtggctcgggcctgttcaggaacgtttttttgcccaccagtgccagacctataa

SEQ ID NO: 379380 - DNA, 1170 bp, Salmonella enterica
atgaccactattaccagtaaattcactaaagagcgcctgattgattgggctgtagtagctgtagctgaaagggggcgagatttaaaggatgccccggagtcagtagaagctgcggcgaatttaaaattagctgaaatagcgttggcagcgcttaccgctgaacctgtggcgtataaccaggtacagcgtgacatgatgaaggacattatcgtcaggaagatgggagggaatctggcaggagaaaaattggttatggatgacatccacgccgtaacgatggcgctgattgatgctggattcagaaccgccccgccagtgcaggaaacaggcgtttacaaggatatgctcaatatcatcggcctgctggaaaaaaacgaatgggctgaacactgcacgaacacagttttaggttcactcctggaatcagaaataacgcgtttggttagtaaagagcagcaagcgccagaacgcgaacgtattcgccgcaagcacgccgagtggtcagataagacgttcggcgatgttggtccagtcggcccgcttaaacatctttcgaaagaagcgctggaagccgctgccgacccatcagacccgcttgaatgggctgatatgcagtttttattgtgggatgcccagcggcgcatgggaatttccgacgaattcattacgagggcgatgattgaaaaactggagataaacaaaacacgccagtggcctgaaccgaaagacggcgagccacgactgcatatcaaagagcagccagagtcggtagtgccggaggaatgccctgccgagttgccatacgcgcaggttaaggaagtcgctgacctgttcgccctgtgctggcaatcgggagaagtggttacttatacgcctgacccagaaaaggcgatcatctggctaaacaactactcgggaacttgcgttcaggaatacgtgaagcttgaacgactgcaagaagcgctggctggcaactctccggtaactccggatggttacgcacttgtccccgttgaaccaactgacgaaatgattgttgccgcaatggacagcgatgatgtgacctataacgaaagtgacgatactgttttttatgttcaccatcgcgagatatacaaggctatgctcgcagcagcaccaaaaccggagaccggaccatgtacaaaataa

SEQ ID NO: 379381 - DNA, 1059 bp, Salmonella enterica
ttgatattattcaacgctgatttttttagtaaaataatcagttcacctgaaggaatattctcttctttaaaattcacatcattagttatattttttatacttttaatttcttcgcttataaaaataagaaagtttagtctcgttgacgccgcgctattgatagcatctcttattatgattcctgcatatgccttaagcgataaaccagtggatgagggtacaacaagatatttaattcctgtcattatttttggttcaattttcttatgtcgaaatgcgaatgtaccaaagatatcaaatatagttttatggtttttttcaatttcaatttctgcttattcattaatatatgtaaatcagcctgatttcttatttcgcaatgacagaaccacatcaaaatataggcttatatctaattttttgactcaacacaacttatctaatggatatgcaacattctggaatgcggcagcggtgagtgtggaaaagaaattcaatatagcccctgttaacatcgacatagaaaataaaaaagttttgccatctttttggttaacaaaaatatcatattttaacaatggaaataactttttcattgttgataatgaccaacaaaaaaaagtcatagaagaattatatggcaaaccagaattaacatatatggtgtgggattcccccatcctggtttacagtcattctattaatatttatgatggcgatatagaaggaagtgccaatgtagtaaaaagtgacttcaaggttggggacaataatcaaatatgcaatgctggcgtacaaggcatggttgcatatgggccctataagactcttggtcgtgggtggtattctttaaaaattaatgcacatggcgatcagtatgaagcattaattttttcttatataacaggaaaaaaaatcaagatgtctgagaataaatataaaaatggttcttatattttcgaaataaacgaagatatgccatctgcagaaatacagttattcgctcaaaaagattcaaatgtatgttttgagtcatactcacttcagcatataaaataa

SEQ ID NO: 379382 - DNA, 531 bp, Salmonella enterica
atgaccaaaaaggggctttcggtaatattagtttttttgatattttcatatatttttaccgcattaagctataaatttatcccaagctctgacagcatgagtggtattttagaggctgctgacattgcaaacggaaacataacactaaaaggatggtacttatctacagtaactttctattttactgacttagtctggtttgctcttgctataaagctttttggttattctgaatggataacatacgttatacctggattaatggctggtagcctgttcgcttcatgctatgcactgggaacaatttctggctacaaaaaagcatgggctttgctactgttccttgctttccctggtgctgctgtcagttacatgctttctgtagcgataatccatgtccctacatatacttatatcgttgtttcatatatattaattgatttttattgtcgcagaagaaatagattatatttatttctatcatcaataatcgcatctttaacgatttttcgtattttttattcaagttaa

SEQ ID NO: 379383 - DNA, 240 bp, Salmonella enterica
atggaaaaatatgaactgccgctggtgttttttacggtattaagccagatgtctgtcgggatggctttggtactgacatggcgtacgctgcgtggtgaagtggaaggccagcgtttctattggttggccaccgggctggtgctggcactggcgtctattgccgcgattctgcatctggcgcatccctatcgcgcttataatgcgctgattaacctgcgacatgcctggttaagtcggtaa

SEQ ID NO: 379384 - DNA, 1701 bp, Salmonella enterica
atggcggtggaaaaactgattgtcgaccatatcgatacctggactacggcgctgcaaacccgctccacggcggggcgcggcagttcgggcaagattgacctgtacggcattaagaagctgcgcgagctgatcctggagctggcggtgcgcggcaagctggtgccgcaggatccgaacgatgaaccggcgtctgagctgctaaaacgcattgcggcggaaaaggccgagctggtgaagcaggggaaaattaaaaagcaaaagccgctgccggagattagcgaggaggagaaaccgtttgagctaccggaggggtgggagtgggcaagattaccacaaatatacatccctcagtcagaatcatcacataaagttaagtcatctgatattatagatgaaggccgtcaccctgttattgaacaaaatgctgaatttatatctggttactctaacaactcagagctattaattaatattaacaatcccgttataatatttggcgatcataccagaaatataaaatatattgattttgattttatcgtgggtgctgatggtgtgaaaatactttcccctgtcattattaacgaaaaatatttttactggcagcttaagtcttttaaaattgaatcaagggggtattctaggcattataaaatgttaaatgagaaattattttctctaccacctttatgtgaacaaatccgaatagtaactaaggtcgaagagctaatgtccctctgcgaccaactggagcagcattccctgaccagtctggacacccaccaacagctggttgaaaccctgctaaccacgctaaccgacagccagaacgccgatcaactggccgaaaactggtcgcgtatcagcgagcatttcgacacactgtttaccaccgaagccagcattgacgccttaaaacagaccattctgcaactggcggtgatgggcaaactggtaccgcaggatccgaacgatgaaccggcctctgaactgctcaaacgtattgcgcaggaaaaagcacagctggtgaaagacgggaaaatgaaaaagcaaaaaccgttgccaccgattagtgatgaggaaaaaccatttgaactgccagatgggtgggaatgggttaaattgggaaatatactccatgatataaaatatggaacttctcaaaaatgtaattataatatttcaggctatcctgttctaagaattcctaacattgtaaaaggtattatcgatcttgccgacataaagtatggtgcattaaccgattctgaattaaaagatcttacactaaataaaaatgatctcttatttataagatctaatggcagcactaatattgtcggtcaaagtacattagttcaacacgatctaaaagatcatgcttatgctggctatataattagagtacggctacataacgaatatattaatgccagatatataaacatggtaatgaaatcaaatttaatacgtgagcaaattgaaggtcctattagaacaactacaggtgtcaaaaacattaattcaaatgaacttatgggacttcttgtacctcttccaccaaaaaatgaacaagggataatcattaaaaaaattaatgaaatagatacaactttatctaatttgaaagttagcatccaatccgcccaacaaacccaggtccacctggccgacgccctcaccgacgcagccatcaattaa

SEQ ID NO: 379385 - DNA, 1290 bp, Salmonella enterica
gtggatgctaacggccagctcctgtcccgctatgaaaacggcatctggaaaaatatccctgccgccactttttcacggaatgtggctgatttattccagcgcttacgcgccccgttctcgtccgggaaaattgcctcggtggtggagaccctgaaattgattattccgcagcaggatacaccggcgcgccgtctgattggctttcgcaatggggtactcgatacccaaagtggccagttcagcccgcacagtaaatcgcactggctgcgtacgttgtgcgacgtggatttcaccccgccggtggacggagaaacgctggagacgcacgcgccgaacttctggcgctggctcgaccgtgcggccggtaaaaatccccaaaaacgcgatgtgattctggctgcgctgtttatggtgctggcgaaccgctacgactggcagctctttcttgaagtgaccggtcctggcgggagtggcaaaagtattctcgccgaaattgcgaccctgctcgccggggaagataatgccacgtcagccgacatcgacacgctggaagacccgcgcaagcgtgcctccctgattggcttctcgcttatccgtctgcctgaccaggaaaaatggagcggtgacggcgcaggactcaaggccatcacaggcggcgatgcggtctcggttgacccgaaataccagaacccgtactcaacacatattccggcggtgattctggccgtgaacaacaaccccatgcgcttcaccgaccgcagcggcggtgtgtcacgccgccgggtgattattcacttcccggaacagattgccccggaggaacgcgacccgcagctcagggataaaattgcgcgcgagctggccgtgattgtgcgccagcttatgcagaaattcagcgatccgatgaccgcccgcgcactgctccagtcgcagcagaactccgacgaggcactcagcatcaagcgcgatgctgacccgacgtttgatttttgcggctatctggaaatgctcccgcagaccaacgggatgtttatggggaatgccagcatcatcccgcgtaattatcgtaaatatctctatcacgcgtatctggcctatatggaggctaacggctacaggaacgtgctcagccttaaaatgttcgggctggggctgcccatgatgctgaaagagtacggcctgaattatgagaagcgacacacaaagcaggggatacaaaccaacctgtcgctgaaagaggaaagctacggcgactggctgccgaagtgtgacgaacccgcagcaacataa

SEQ ID NO: 379386 - DNA, 696 bp, Salmonella enterica
atgaatcgtattattagaatgttaggtgtagataaagcaattcgttatgttatttttggtaagataatatctgtattaacgggtttactgttaataatgttaatatcacaccatttatctaaagacgcacagggctattattatacatttaattcagtagtggcactacagataatatttgaattggggctatcaacggtaatcattcaattcgctagccatgaaatgtcagcgttaaaatatgattattctgaacgagatattataggtgaaagtaaaaataagcaacgttacctatcgttatttcggttggcaataaaatggtatgcagtaatagctttgctaataatattaatagtcggtcccatcgggtatgttttttttacgcaaaaagaaggcttaggtgtaccttggcaaggggcatggttattattaacaatagttacagcttttaatatttttcttgtttctgtactttctgtcgctgaagggagtgggttaattactgatgtgaataaaatgagaatgtatcagtcgctgttagctggtatattggcagtaagcttacttattagtggctttggactatatgctacgtctgcaatagctatttcagggactatcatattctccatattttcatataagtattttaaaaaaattttcctgcaatctttaaagcataaaaataaataa

SEQ ID NO: 379387 - DNA, 882 bp, Salmonella enterica
atgcttgatgtgaataagaaaatcctaatgactggcgctactagctttgtaggtacccatctactacatagtctcataaaggaaggttatagtattattgcattaaagcgtcctataaccgagccaacgattatcaataccttgattgaatggttgaatatacaagatatagaaaaaatatgtcaatcatctatgaatattcatgcgattgtccatattgcaacagactatggtcgaaacagaacccctatatctgaacaatataaatgtaatgtcctattaccaacaagactgcttgagttaatgccagcgcttaaaacgaaattctttatttctactgactctttttttgggaaatatgagaagcactatggatatatgcgttcttacatggcatctaaaagacattttgtagaactatcaaaaatatacgtagaggaacatccagacgtttgttttataaatttacgtttagaacatgtttacggtgagagggataaagcaggtaaaataatcccgtatgttatcaaaaaaatgaaaaacaatgaagatattgattgtacgatcgccaggcagaaaagagattttatttatatagacgatgttgtttcggcctatttgaaaattttaaaggagggttttaacgctggacactatgatgtcgaggtggggactggaaaatcgatagagctaaaagaagtgtttgagataataaaaaaagaaacgcatagtagtagtaagataaattatggtgcagttgcgatgcgtgatgatgagattatggagtcacatgcaaatacctctttcttgactcgattaggttggagtgccgagttttctattgagaagggtgtgaaaaaaatgttgagtatgaaagagtaa

SEQ ID NO: 379388 - DNA, 234 bp, Salmonella enterica
atgggcaaatatctcctgtttcaccgccatcacgtcgttaagttgttgctctggatcggtatggaaggtggtgacatccactatgtcatcgaatgtgcatcctgctgcagtcagtgttgctttcaggttttcaaaagcaagcctcacttgtttttgaaaatcaggctccggcgttccatctgtgtgactgcctaccttttttttaaactcttgctctatggagtatcgagctag

SEQ ID NO: 379389 - DNA, 1623 bp, Salmonella enterica
atggttatttttgatgaaaaacggcatttgtatgaagccttactgaggcacaattatttccctaaccaaaaaggttcaataagtgaaatacctccgtgcttttcttccagaacattcacaccggaaatagcagagctaatttcatctgatacatcagggcgcaggagtctacaaggttatgattgcgtggaatattacgccaccagatataataacttcccaagaacgctgtcaatcatccatccaaaagcgtactcaaagctagccaagcatatacatgataactgggaggaaatacggtttataaaagaaaatgaaaacagcatgatcaaaccagacatgcatgctgacggtcgcatcataatcatgaattatgaggacgcagaaactaaaaccataagagagctaaatgatggttttggacggcgatttaaagttaacgcagatatatcaggctgctttacaaatatctactcacactctatcccgtgggcagttataggggttaataatgcaaaaatagccttaaatactaaagtaaaaaaccaggataaacattggagcgacaaacttgactactttcagcgtcaagctaaaagaaatgaaacacatggtgttcctattggtcctgcaacctcaagcattgtttgtgagattattttaagtgctgtggataagcgtcttagggatgatggatttttatttagacgttatatagatgattacacatgctattgcaaaacacacgatgatgctaaggagtttttacatttactcggtatggagctgtctaagtataagttatcactgaacttacataaaactaaaataactaatctcccaggaactttgaatgataactgggtttctttgcttaatgtaaattcaccaacaaaaaaacgttttacagatcaggatttaaacaagctaagttcttctgaagtaattaatttcctagattacgctgtacaattgaacactcaggttggtggtggaagcatactaaaatatgctatttccttggttataaataatttagatgagtatacaatcactcaggtgtatgactaccttctaaacttatcatggcattatccaatgctcatcccatatctaggcgtacttatcgaacatgtctatttagatgatggtgatgaatataaaaataaattcaatgaaattttgagtatgtgtgcagagaataaatgttctgacggcatggcctggactctttatttttgcatcaaaaataacattgatattgatgatgatgttatagaaaagattatatgtttcggcgactgcttgagcttatgcttgctagatagctcagatatatatgaagaaaaaattaataattttgttagcgatatcatcaaactagattatgaatatgacattgacagatattggctccttttttatcagcggttctttaaagataaagccccaagcccttataatgacaaatgctttgatattatgaaaagttatggcgttgactttatgccagatgaaaattacaaaactaaagctgagtcatattgtcatgtcgtcaataacccatttctagaagacggagatgagattgtaagctttaatgattatatggcgatagcgtag

SEQ ID NO: 379390 - DNA, 1722 bp, Salmonella enterica
atgaatagctcgcttttacaaaacggtattttaagaagtgctttgaaagttggagttatttcatctatttttgctcaaatggcaagagttaatttagtatatgctggtgaagttagcggtgcctacattgatggaaatcgttatgggaaaggagaagtcggagagattttattaattgaaggacaacaatctatcgttttaggcagactgattgaggtcaaattacctgagcgcgaaagaggagagatatcagtagagtctcagggaaatagaaaagttgatgcaattggaactatacagcttcttggcacaattgatgcctcgagttttcgtgtcgactcggggataaaatgttaccctcgattaggtgatagagtatattctgcaccgttagatttcatttcattaatacccgaactaataaacagaagcttaagtgatgacggtgaaaaccgaataggtatagtgttaggaaatatatcaggaggttcaacaagcattgttactgttgagccagataaactatttggccgccactgcgcaatactaggagctacaggtggggggaaaagctggacaactgcaaaaatattagaagaatgtgcaaattataataattcaaagactataattctcgatgccacaagcgaatatagatcctttaactctgaggactgttatcattatcatttaggttcacctattaatcaagccaatgattctatagaatttagaatccccccaactgatttcatggaatcagattttatcgctatgtttgatccttcaggtaaagttcagggaccaaaactgaaggaagcgattaaaagtttaagattagttgcgatcgaccctactattgcaaccaatggtattctaaagaaaataaaacaacctaaaactgattatcgtcgctcaatgaatactggtaataattcaaaactagttgataatccctctcaaccatttgatatcactaaattaattcctcagatagttcaggagtgctgttttgataatggcgaagactcatggggtaatgcagccacgcaagatttgagctattgttcctctcttttaaccaggatacaagccgtaacatatgcaagctcactgaaagcggtttttcatggagatgaaaacgtcgcaaaactgggagatatattagaagactttttaagttcaaataaaagagttcttcgtttatgtctaagcgatgttagctatgaattttttgcaagagaaatattagccaatgtaattggtagaaaactattaactctcgctaggcttgaaaaattcagagaaaagccacttctagtcatcgttgacgaggctcataacttcttggggaaaagggttggatcagaagaccattctattaagcttgatgccttcgagatgattgcaaaggaaggaagaaaatatggcctaaatatttgcctaacaactcaaaggcctagagatataaccgagggtgtattaagccaaattggtacgttactagtacatagattaacaaacgatagagatcgagatgtagtggaaagagcatgtggtgaaatagataaatcagcggcttcatttttaccaagcttaaagcaaggtgaagttgcgcttgtaggagtagatttccccatccctatgacaattcaaatagcacagccgacttatccaccagagtccgattctccaggttaccgtaacgtttggaaaaaataa

SEQ ID NO: 379391 - DNA, 1287 bp, Salmonella enterica
atgcctactacaccggatgggtatgtttcatatttaaaaccaagcagcaataaatggaaagcactaaacgacgactcatatctttattggcgagaccttcaggccaataaagttatacaggatgcaggagctcctgttcctcctgcgctaccattatctgaagtggaaaaaaaagacttaaaagaaaaccaagcatatataaatgaatttttgctaaaatcattacaattccctaacttatcatttttcgcaggcagcggtacttctctaggtgatgttggtgggccaagtatgtgggatctatggaagtgtgctatgtggatagatccaacaacagacgaagagggcaaactaaaaccaattgcattaagtgtatgtgaaaaagttaaatatcaagacattgaatatcctaacattgagcatttcctttcaaattgcgaagcttttctggcattccaccatgacggtgaagtgcttgcatttttaaatgaagttaaaacaataatattaaataagtgtagagatttcctagaaaatggaagtagcgatctatcctcatatgtaagtcttctccaaaaaatggggaggcggagagtaagagatccaaggttaaaagtattcacaactaattatgatttaacatttgagactgccgcatcagaattaggtatgatggttgtagatggactttcctatacaggcgttagaaggttcgatggtaaatattttaattatgatgtagttcatagagatgaaaatgaacatgaattcatagatggagtattcaatttattcaaattacatggttctgttagctggatacgaaaaaacggacaaatatatgaaaatcaaaaaccaacagcaacaaatgcctgtttgatctatccagcgaaaggtaaatatcaacaagcttttattcaacctcatcttgaattactttccaggcttcttgatttcctcagaaaaaagaatagctgtcttattatttctggctttggatttaatgatgaccatctttcagaacctatttattctgcgataaaatccaatcctagcatgagattaattgtggtggattttaaatgcgccacacatataaacaacaagggtgagaatgggtctagtaaatattggggtttacttaaagaactttcattatcgggctatgatattcattttttgaatgcctctttcaaagatttcgttaatttaatacccaacttaagagcactgacacctgcagaacagttagcaaaagctatcaagcaagtgggaggaaacaactaa

SEQ ID NO: 379392 - DNA, 729 bp, Salmonella enterica
gtgactggccccaccggtagcggaaaaacggtcacgctatacagcgcgctacaaacccggaatacgccgggtatcaacctctgtagcgttgaggatccgatagaaattccactggatgggattaaccagacgcagatccatccccgcgccgggctcacctttcaaaatgtgctgcgtgcgctattacgccaggaccctgacatcatcatggtaggtgaaattcgtgacggcgacaccgcagaaatcgccattaaggcggcacaaacgggccatctggtactttcaacgctacatacgaactccaccagtgaaaccctgatacgtttgcagcaaatgggcgtagcacgctggatgatctcatcggcgcttacgctggtggtagcgcaacgcctggtaaggaagctttgcccgcactgcaaacagcgcctgagcgatcccgtagtgctatcgcccaatctttggcccagcgcgctaccgcgctggcaggcaaacggctgtcagcattgctaccacggcttttatggccgaaccgcgttattcgaagtgttaaccgttaccccggcattacgtcagttaattgcgagcggcgcatcggcgcaagcactggaagcccacctccaacagaccggtacagggacgctttttgaaaatggctgtcgcgccgttgagcaaggcatgacgtcctttgaagagatactgcgcgttctgggaatgccccatgagcgttaa

SEQ ID NO: 379393 - DNA, 651 bp, Salmonella enterica
atgaaagacgctcagctcaacaccttgtgtcaacgtcatcaggctgtactgatcaatagcgccagcaacagtatcactgttgcggtggtcgacgcgccctctcatgcgttactggacgctctgcatttcgccacgcaaaaacagattgatattgtgtgctggactcgccagcaaatggaaaatcatcggcataagccggatcaggcaccctcggcaaacgccgcgaaaggcggagaaaccgcagcccagcttctcaatcagacattacgctcggcgatggcgaaacgcgcctctgatatccatctcgaacccggcgccagccgctaccgaataagactccgcatcgacggcgttcttcatattctgcaggacatcgccaaagagacggggcttgcgctgacggccagattgaaagtcctgggaaatttggacatcgactgccgcaggacgggcaatttaccgttgacctgtcgggagacagcatctcttttcgtatcgccacgcttccctgtaaagaaggcgaaaaagtcgtcttacggttgttgcatcaggttgaacaaacgctggatctggacacgctgggcatgtacggggcacaacttaccgcttttagacaagccctacagcaacctcaggggctggtactggtga

SEQ ID NO: 379394 - DNA, 231 bp, Salmonella enterica
atgagtccgaccattgaacttctttgtggccatcgttctattcgccatttcaccgatgaacccgtgactgacgcgcagcgagaggccattattgccgccgcgcgcagcacgtccagttccagttttttacagtgcagctctattatccgtattaccgatcgggcgctgcgcgaggcgttagtgcccctgacgggcgggcaaaagcatgtggcgcaggccgctgagttctag

SEQ ID NO: 379395 - DNA, 810 bp, Salmonella enterica
atgtttacccgtctgtttttcttactcgcgttggtttcttcaacatccggggcggcaggctcatccattctgagtcttatcaacaccattcaaccaaaaacttatctgaacgcacctgtaccgttaccgctaaaacctgaccaggtagaaatatctaacgtttcttttagcgccgacggcttaagactgccagtaacgcgcttttacgtcatctgtcaggatgagttttgtggactctacaacgccgctgggcaggcaatcattccgtggcaaaaaatctatattgagcattatgacagcgaaacagatctgttttacgtctcaacatcgttcaccggtaaccataccggtttgtatagcgcccgccagcagcaatttatctacccgcccgtctattccagcattgagttagccgaaagcagcgccatagtttttctctcgacttaccagaatagcgctcagctaagcggcatgggcgatgcttacggcaatgtgattattgcgccgcaattttcgtcgatacagatgataaaccagcgacccgatgcgtttgtcgcgggaaagcggatgaacggcaggattttatacggccttcttgatttttcaggaaacatcattattccctttcgctacgatacggtctctaatacagattatcggtacaatatcaacttcatcgccgttgctaaaaacgggcgctggggagtgatcgataaaacaggcaacctggtcaggccgctgcgctacagccgggatgacacagaaaaatggttaacgcaacgcggcgcgcgtccatggtttggcgactaa

SEQ ID NO: 379396 - DNA, 456 bp, Salmonella enterica
atggaaacattatctgttgtaaataccgtcgcaaatcggctgcgtgaattaaatcccgatatggatgtacttatttcatcggcagatccgaaagcgtatgtcccaaacgtacagcagataacggtattaatccactaccgcgaatcggtttttgccgaaccagaaaatacggatgccacggtacaaaaacaactaatccggatttccgccaccgttattgttccgcaaataagtgacgcgataaacgcgctggattgtctacatcgctcgttggggggcattgaacttcccgactgtgatcgtccgctctggctggaaagcgaaaaatatatcggcgacgccgcaaacttctgccgttactccctggatatgaccgccagcaccctgtttatcgcggaacaggaaagcaaggactcccccctgctgacaatcgttaattatgaggaaattcaatga

SEQ ID NO: 379397 - DNA, 123 bp, Salmonella enterica
atggcggggtcagaatgtgttttgcccggcggcgcttctgcgcttaccgggcctgtgttgatgcacattttgttaaatggcgaagatcgcgttttacgtaaagttaaaatgaaattgctgtaa

SEQ ID NO: 379398 - DNA, 516 bp, Salmonella enterica
atgcaattaagaaatgtcacacgttattacccagaacatatgccgtttggagaaaatatacaatactttattgatgaaaacggcttagatttttataattcaatagatacttttaaactaaaatacaagctatgtattcaccctgacacaaaagttattcactctgtgagtgaaaatatttcaacgttatatccagcaggctttgatattgttgaatccgacagtttaccatatgatgatatcatttctggaaaatatcaatttgtagataacaaaataatacccaggacatataatgaagtagaacttactcaaatcaccaatgcagaaaaatcaaaaaaactgaaactagcaaatgaaaaaataagaccattacaagatgctgtagaccttggaatagccactgacgaagagatacaaaaattgggtgcatggaaaaggtatcgagttgaaatcaataggattgataccagtaacttactcgacattagctggcctttacctccagatgtataa

SEQ ID NO: 379399 - DNA, 864 bp, Salmonella enterica
atgttgttaatcaccgatctggatggaacattactcacctcgcagaaaacaatcagcccgcgcacgcgccaggcgctgattgcgttccgccagaacggtggtctactggcggcatgttccgccagaccggtctcctcaatggtacgcctgctacgccaacaacaggttgataggttgtttagctggtgcgccggttttaactgcggacaccttctggagatggcggagcagcgcattattcatgctgccccgctgaccgccacagacctgtggaatattgaccagcatatttctctttcccgctatcaccaccatttttttagtgccgaagcaattcaccatcgtgacgataggctgattgcgcactggacaacatatgaggctcgcttatttgggttaccgcttataactgaaactgcagaaaatatctttaatcgtcgcaacatatataaaattacccttgttgccgcatctccggagatagataatctgtgtacagaagtgaataatcacctgccttgtggatattatgcggttgtcacgggagaaaattatattgatattcaaagatccgatgtaaataaagggtgcataatagaacaattaattcatcatttaaatatatcttctgacaaggtggtcgcgattggcgaccagcagaatgatgtcagcatgtttgccgccgccggaatcagcatcgcaatgggcaacgcgccggatgcagtaaaacggcaggccggctatgtgactgccacgaatgatgaggagggtatcgtccgtgcgttggagtggttgcgttgccttacgcatccagttaccatgcgccaaaggttgacggcggcgaaagataatgaatccaattaa

SEQ ID NO: 379400 - DNA, 171 bp, Salmonella enterica
atgcataaccaaaagacatgcgcttaccacctgtgtggaaagccgattgagcaaggcaaagaagtaaaaaacgagctgacgctgattcgcggcgcgcagctgacacatgaagagcgcgattactgctctgtacgctgtgcctcatacgaccagatggcgcacgaaagttaa

SEQ ID NO: 379401 - DNA, 666 bp, Salmonella enterica
atgaacatcgacaaacaggcgctacgagagcgctattcaccaaaacctgcgcctgaatgccacatttgcggtgctgaaatgactatacagcgcatgtctgccagtcgaattacctatggctgcacgggcgcgacatatgacgataaaggttgccactacgcagaaggccgcagtatcgcagatgaccattatgaacagtctcgcgtcactgtcgtcgatgtgagcgacccggatgtactggcgctgctggatgaactggagcattacaaatcacgcgaagagcgagttacaaagctggttctggacaactcgacaagctgggatgctctctacaagaagctggaagccgccaacagacgtagtgccgaactggatcgtgactgttggacatatgaaaacaccgtcaaaaccttactggagagagcggaatctgcggagtccgcttgtacagaagcagcgcgaattctcaaaagcggtgagcgaatggctttaacgcgtgctgtcaacattctgctgtctgtcggagagtgtgccacctcttaccaatatcctgttgtgttacctgaaccgattggctggaaatcaccgtctggtcatgaggttttgaagaagaaagacgttatagcagcgcttatgtccgcaggcgttccggttgagggagattga

SEQ ID NO: 379402 - DNA, 231 bp, Salmonella enterica
atggctaagacacaaatgcagttagctaatcgtgcatggcgtaccgaaacaaaggctttgggatggcatcagggacaaagctggaaaggtggccgtaaagcgtggaaagcattctgtcgggagaatgccgcaatcacagttgaagaacacctcaaaacagatccgccatttgaggaccaggctgacgccaattatcacgtagctgaagaattaacgtactggacgaactaa

SEQ ID NO: 379403 - DNA, 276 bp, Salmonella enterica
atggctcggatttttttacgctatcccacggaatgtgtgaacgacgcggggcgaatggttatccgctatgcgccgcatgagatagccggatttaggtttgatgatggtcagtgggtaagcgccactgatatagcacgacttggtaattatgagattcgctgcaacaaatgcaagtctaacgactggacagaaaacggtcgattcatcaacgaatatgaatgcggctgctgcggtgcattcattgctgtggagcctaaaaacgaatggcaaaattaa

SEQ ID NO: 379404 - DNA, 264 bp, Salmonella enterica
atggcaaaattaacgaagaaagaacaagcctggattgatgaggttaacgcggtgctggcccgttgcccgtcaccgaaaaaaatcggtttttacaccatcggcgattcgaatattcacctgtatgacctgcgcaaatacaacgaagttgaaaaggcgctggacactggcaaagcggcagactggtcccctgcgtgccgtgtagcaggtgcgcatattgaaggggctattgatttcccatctccagttgaaagcacggcaggctga

SEQ ID NO: 379405 - DNA, 159 bp, Salmonella enterica
atgaccactattaccaaagaatggctacagcaaaccatcgctgaatttgaaaacactcgtgacgatattccgtttggcctgagcgatgacgacgccaaaattcttattgtgctgaagcagacactggcagcgcttaccgctggacggtcgaggagctga

SEQ ID NO: 379406 - DNA, 813 bp, Salmonella enterica
atggatgatgataattttgatattattgattttagaaatgaaatagatagtttaaacccttctaataagaaaagattagcagaacagttcgctcttgcagcattagggagcataccttggattggaggttttttaggtgctattgcaaattttaaaagcgaagaaggcaatataaaattaaactcattacaaacaaagtggcttgaagaacatcataaaaaactagaaaatttaaattcaactttaaatgttatagcaaagagatttgaacaactaggcgaggatatcaacgaaagacttgagtctgaggagtatcttgatttagttcgcaaaagttttcgagtatggaatgatgctgatacacaagaaaaaagacagctagtatctaatatgataactaatgctgtcagttctaaaatatgttctgatgatattattcgtttatttatagattggcttaacatttatcacgaagttcattttcaggttatcagaattatttatcaaaatcctggcgtaacgcgttatgaaatatggatggaattgcatgaaataattccgcgcgaagattcggctgaggctgatctctacaaaatgttaattagagatctgtcaacaggtggagtgattaggcaagcacgtaataccacagaagatggtcagttcttaaaacaaaggcatgctccgcaagctaagcgaggcacatcaacgcttgagtctgctttcgagaacacaaaatcttatgtactgaccgaactaggaaagcaatttgtgcactatacaatgaatgaagtagtgaccaaattggattga

SEQ ID NO: 379407 - DNA, 534 bp, Salmonella enterica
atgatgcatttgaaaaatatttctgtgggtaatccaaaaacgctggcgcaatttcagttaactaaacgttccggcgttatctggctatactcggaggacgggaagaactggtacgaacaacagaaaaactttgcggaagatacactgaaaatagcctatgaccagaacggtgttattgtgaatatcagcaaggatgtttcaacaataaaccctactggtttgagcgtcgttgaattaccgaacatcacagcaaacagacgtgctgatatatacggcggctgggtgtttgatggtgagaaggtaattaagcgagtttatacatcggaggagctgcgccagcaggcagaagtgaaaaaactgaagttactcgaagaagccgagaccgttattacgccactggcgcgtgcagtaaagcgtggtatcgcgactgatgaggagcagaagcgactggaggtatgggaggaatacagcgttctggttaatcgggtggacacatcaaaacctgactggccggaaagaccagccagccagtag

SEQ ID NO: 379408 - DNA, 1269 bp, Salmonella enterica
atgccatttacgaccgttttctgcattttcagaaacgttggtttaagagaaaccataaatcgcgcagccggcgccatgcaaaaagaccagaatggcggcgatattcctgacaaaacgcgatttgcgagaactatcggcgctgtgacttctaccagcgttacatttggtgattcgggatggttcaaaatcgccactgttttcatgccgcaggccacatctactgcggtgattaaattgtatggcgggtcggggtttaacgttggttcatttgagcaagcggcaatcagtgaattagtactgcgtgcaggtaatagctctcctgtaggaattactgcaacattatggagacgttcgcctgctgcagtgaacgaggtggcatggattaacacatcaggtgatagctacgatatttatattaatatcgggcggtatgcattcggtttaattgcacagtgtgattacaccagtaatgcaaatgtcacgctatacaccacccctgaatattcagaaacaaagcctgccaacgctacgaacggtcagacatatacgctgtataacagcatgatgaaacccactcccgaagatgtcggagcgctgtcagttaatggaggacggctaaacggtgcgttaggcattggtactgataatgcgctgggtggcaattcgattgtattaggcgataacgataccgggattaagtggcacagtgacggcgttttaggcctttatgccaataatgccctggtcggttatatcgacaactccgggctgcacatgtcagttgatgttctcactaatggtatcttacgtgccggcaacggaaaaacactgacgttatcgagtggtaacaactccgcgatgaacgccggtttcagtctgtggggaaatggcacagaccgcccaacggtcattgaactgagtgacgatcagggctggcatttctacagtcagagacgacaagacggcggtatcgaactgagtgtaaacggcaatatttaccctgctaattacagcaattttgacgcccgttatttaacatcaggaaacgtatatacaaaaggcgagtcagataatcgttatgtccagaatatccagcgtggcgctccagtatggcctggcaaagtagatgaatatggacctgcagaagcgcctgctggttgctttttaacacaagccagacatgacccaacaacagcatacggtgtgacatttgggtatcgaccgctgcaaatgtgggttggtaatggctggcgtaccattaatggatga

SEQ ID NO: 379409 - DNA, 1170 bp, Salmonella enterica
atgaacttaaaagagcgtcttgacgagctgatcgcccgtggtcacacgatgacaaaaatgatcgcgcaggcacaatttggcgatgacagcccggaagcgcggaccatcacccgtcgctgggggattaccgaagcggcagaactcatcggtgtgacaccgcagactatccgcaacgcggaggaaagcggaaaactgcctccggcagataccgtagttcgtggccgggttccgcagcgagctggctacactatcgggcaaattaacgatatgcgagaccatttcggtactcgcccgtcccgtcctgatggccagtctcctgccgtactggctatcgcagcacacaaaggcggcgcgtttaaaacatccacatcggtgcatatggcgcagtgggcagcattgcagggattacgcgttctgcttattgatgcgaccgatccccaggctacggccagcctgtatcacggatatgttcccgacctgcatatccatgctgaggatacattattgccgtattacctcggtgaacgtgataacgccgaatatgcaattaaaccaacctgctggccaaaccttgacattatcccttcatgcctggccattcaccgtattgaatcagagatcgaagttctggaagccgctggcaaactacctgtgccatcacatctgctgctgcgcgctgctatcgaatcagtctgggacagctacgacctgatcgtgattgacagcgcaccgaacctcggcatcggcacaataaacgtggtctgcgccgctgatgttatcgtcgttcctacgcctgcagaattgtatgactacgtatcgtccctgcaatttttcaccatgttgcgcgacctgattgcaaacgtggatcttggtggtttcgaacccgacgtccgagttctggtaacaaaatacagcagcgccgtgggcaatcagtctgcctggatggacgagcagatccgtaacgcctggggtggcatggttttgaaagaggtcgttcgcctgactgatgaagtcgggaaggggcaggttcgtatgagaactgtatttgagcaggcagctaaccagcgcagtactccaacagcatggcgtaatgcggtagcaatctgggagccagtttgccgagaaatttatgaacgactgattaaaactcgctgggagaataataaatga

SEQ ID NO: 379410 - DNA, 231 bp, Salmonella enterica
atgttgacgcgttttggcgatggcgttatggttatttcgctgcagcaaaatctgcagccgggcctcgcaatcccgaataaccagacgacgcacagcacgcgccagcgtgtttttttgtgtgtagcacctgtgcatatccagattatggtggctcaggcggggcagctttcgggctggccggtttcgtttggtaccggtattgcgaaccccgtctgggctaccacctcatag

SEQ ID NO: 379411 - DNA, 165 bp, Salmonella enterica
atgtaccagttcaagttcgcggctatctgccgtactgaccgtaaaaatcacattcaccacctgtcgactatcgctgattgtgagcgcgctgcgcgccgccagctttccggtaaattcattctgttttttcaggcgcgcctgccggtagcgggaggtgctgtatga

SEQ ID NO: 379412 - DNA, 228 bp, Salmonella enterica
atgaaacaggtgcaattaaacgaatttggactggctgaatcactggaatccgcgctggcgcagattaatgcgctggccagcgtggcccagcacactatttccagtgccggcggctccgcctatctcaatgaagcggcacaactcctgctgacaattaaaaatttgtccgccgatgcggagcggtatcgggctgaatgggaagacctgatccccaggatacgccgctga

SEQ ID NO: 379413 - DNA, 1182 bp, Salmonella enterica
atgctgtacgctgtccgggtccgcctgtatccgaacgctgcgcagcgcgagttttttgcgcgaacgtttggctgctgtcgctgggtgtacaacaatgcgctggcgtactgtcaggcaatgtatgaggctggttcgccacgcccgtctgcatacgacctgatgaaacgtctgcctgcactgaaagccgaacatccctggctgggcgaggctgacagccaggcgctgaaacaggcctgcgcggacctggacagcgcctacaggaattttttccgccgggtaaaaaacggcgaaacgccgggcttcccccggttcaaatcgaaacatcgcggcgatgccacctatactgcgacggctgcggccagtattgcgctggagccacgccagctgaagctgccgaaagcggggtgggtgcgctgccgtggcgtcagggagtgggatgggcggattaaacgcgccactgtccgacagacgccgaccgggaaatattacgccacggtgctgattgataacgggcgggagctgccagcgcagccgacgaaaaacctgaatccgctgggtattgacgtcggctgcagaacagaaggattcacgcaccagtttgcggccctgtcgaccggagagatagttaccgcgccagcagaatataaacgccagatgaagcgactgcaccgggcacagcgtcggctggccagaaaacagaagggcagcgccagccggatgaagcagaagcgccgtgtggcgcagctgcatgagcgaatcagcgcggtgcgccgtgacttcctgcataaactgacccaccgcctgacctgcgagaaccaagcactggcagtggaagatctgaatgtgcggggaatgatggcagcgccaaaaccgaagccagacccggataaccccggtgcgttcctgcctaacggcgccagccgcaagcgtgggctgaaccgttcgctggccagcgccagcctgggtgagtttttccggcaacttgagtacaaatgtgcatggcgcggcgtcgcgctgctgaaagttggccgctgggagccgtccagcaagcgctgcagcagctgtggcgagattaatgaacatttgacactggcagaccgccggtggcagtgcccggcgtgcggcgcagaacatcaccgtgacattaatgccgcggtgaatattgctgccagggcagtgtaa

SEQ ID NO: 379414 - DNA, 1857 bp, Salmonella enterica
atgactaagcttaaaggaagcgggataggtgaaataattagtaatcttgttacggaagtggacgagattgaaaggtccgatattcctcaaggggataaaacgagaaaatttaaatcactcgcatcaaaagtgaaaaattcactttacatggataagcgtaagtatcgcggaaacggattgaaaaaccgaataacagcaaatacttacaacacttacatgacccgtattagaaaacaatttgatgacaggcttcaccataattttgcgcaaacaattagccgcttggctgaacgctatcctgtttatgccgatgagttaaacagctggttagatgcgccggcagcggagattcgtcaaaaattgggagcgctgcagaaccggttaaaggagatcatgccgcttgctgaagcactgtcttcaattaagccaggatctttatcggtgaaaaagtattcccgtttaattcaaaaataccctgaatgggccctgtacatcggctcactcggaacagacgaatggaaatcagcacaagaggagatgtatcaagctttccagcaaggtgagcgccttcttgatgatctgggtagcctgaaggtaaaccatgaaattttatatcatctgcagctgagttctgccgagcgcgcatcgatacagaaacgctgggatgaggtcttgggtgaaaaaaaacgatcgacagttctgattgactatccgtcatatatgcaacgtgttatcgatatcatcacgtcagaattcatccctactggaacatcaagggctagcctcgcaccgatggcatttgcactagcggctgtgtcaggccgcaggatgattgagattatggttcagggcgagtttgaagccgttggccgctatcaggtcaagttttacggccaggctaagaagcggactggcgaggataccgggcgaaccatctataccctctgcgatgcagcattgttcgtagctcgtttagagcaattgcgtaacgcgccagctgcagcagattttgacgatatcatggggccaggagatgatagctaccgttctgctaacgccagaattaacaccattttggccgccccatttaacgcatttgcgaaagattttttcggtgatgaccgccgtgtatttaaagatacgcgcgccatctatgcccgtatcgcatatgaggcctggttccgatacgacgcccgctggcagaacgtcgatgaggatgtgtttttctctgaaattttggggcatgacgacgaaaatacccaactacactataaacaattcaaactgcataacttttcacgtagttggcgtccaggaaaaggccaggaaaatagccgcctggctgcactacagcaactggatggagaaatgccggggttcgcgcgcggtgatgctggagttcgtctccataatgcagtgaagcagctggtggaggagacgccaaacgcggtgataaataccaacgtattgaggaaggctggttttaacccattgctagtaaaaagatatttggattttgcagctggcgcgctggggcaaactgtcggggaaaatgggtggtatgaaacaaacgaagatctgccgcctatcgtcctgaataatgacgaccatccggaagattttgaaggggaagatattgatgataccgaaatcaaaacagcatctgatgaggagaactatggcgatagtaacacaacggtgcatgaagaccgcccgcggtttgctgcgcctgttcgcacccctgatggaggctggtcggtgcggttcgaatatcaaagtgttcagtacgcatggaacggccaggctgagaacatgcgggatgccatgttaaaagcatggcaagcttataatcagtaa

SEQ ID NO: 379415 - DNA, 327 bp, Salmonella enterica
atgtcgactactaattttttggactcactggactatgagcagctgaagttctgccgcgatgagtgcgaggcgcgaatcagggccattaaggaagaagaaaaaaaggttgcctgggcagtgactgatggcgggatcaactttggctggttccgaaccgaggactatccgaaagcggttgaatgtcttgctgcagcagctgctgaacgttgggcagatgccgataaagaaaacccgggaacgcggtacgaactgaatattgccatcgagggtgagcgcctgccattgtcggagtacaacgcgttattcgctgatggtcagtgggggtaa

SEQ ID NO: 379416 - DNA, 3975 bp, Salmonella enterica
atgaaattaacggatttttttcaacataagttcaattctgatccctttgccattctggattcgggtgccgatgagttatcagacctcgctaaagcagctggtatcaactggcacgaatgcgcgcatgaagttcagttaaccactacccgtggcccatcagctgaacgattttctaaatatgctggtcatgctcctgctgtcaccgaactgaagctaaaaggtaaagttgatatatattcccgcatggaagtcagtaaggacggcataagatacccgttcgtgaacttcgttcataaaggttccgatgcaggcgtatggagtggatatcagtacctgctttccgagttccgccgttatcaacagcaatacggtgggaccacggtcccactgtctcaacgagaaattgaacagcgtcaacgtgcagaagcacgtcgtaaagaacgcgaacgccaggctaaaatcgcgtcgttgatggaatcacaacgacgtgatgcagacctgaatgagtacctccagtttagccaggcatttgctgaagcaccgctggaagacggttcctggccctatgcagtaaagaaaggtattagctcggttttttcatcatgtaacgttcggcgagtaacatattgggaccgtggtcacaacaataaagcgcataaaaaacaaagttttatggctataccgctatctcatattgatagccgttatgacggtcgaattgttggctggcaacgtattactcaaaacaatgtgaaattacagacacgcgctgtcgacggcggtgagttctcaggatcgtgccatatcattggcagtttacgtggttcatcccgcgtttgtgttgttgaaggtttcgcaactggtgcatcggtttatataactgcaaagaaacgatttgatgcggtaatcgttgctgtatcagctaataacgtcctcaaggtcgtcgaacaaatttacaatctgtatccaggcatggaagtctggtgcgcactggataacgatcaaaagtcagccaaaaacgggaagggcaacaccgggttgaaagttggtattgaggtaatgaagaaatttcctcaaacacgttgtacctatccaatttttaacgatgatgaatcagaactcagcgacttcaatgatctgatgctggccagaggaataacggagacaaaccgacaactgttctcaaaacaaaaccgcctggtgttacctgcaaatatttttgatgccgaaatgctggcgttaactgttgcccctgtcgctgatcgccgcgccttttcacgccagcttatccgctgtattgatgcggggatgacgcaatgcccatccaaattatcgccgcaagaacttatctcgctgataaaaataaagctggaatacgttggcgcagataaggcgttatttggcactgtttataatagagtaaagcgtgcatttaaacagaaatgcgacaaagcgcaggcgttccgctctttcagcgaacgcgtcacaaacccagcaatacgtcctgaccatatcacgtataagcggttcgacacccctcatatgaccagggaagtgctggactatataaaatcactgaacggccctgtgatagtccgcgccggtatggggtccggaaaatctaaacatctgctccgcccaatgatgcatagtgcgcagcgcggcgtttctgtagcgcaccgcgtctcattgattggtgggttatgggacatgatgacccgttctgatgatggacgccggatgcacgccgatattctccactatcaggaccctggctatcaggaactggcaccatatgccagtaagctgacaatctgcatcaacagcatcgttaagggttgctggcagccgctgatgaaaagtcacgatttttttggactggatgaggcaacgcagggtctgcgggcaacgttgtctggtaaggcgatggcacaccctgttgatgtgtttaataaactaatcgatgccattgcatacagtgaagatcacgcgttactggttgatgccgatgccagcgacatcctggtcgacatttgcgaactggctatggccagacgcgaaacgtctggtttatcaacgtggacacagatccatgtcgtggagttgcctgttgacgtcaaatataaaaacgccacaggcgagcgtgtcgctcgccgggttctctataccgataccgaccgtatcatggttgaggtactgaaagccgttaacgccggggaaaaattcctgttagctacggactcgactaattttgccgagcagctgctgctacaacttcgtgaccgctggccagaaaaaaaatggctgtacgtcagtcaggatacaaaaccagatcaggaagttgttgagtttaccgatgcaccaaaccaacgcgcaaaactttacgatggtttgatttatagccctgcgatcagttctggcgtgtcgattgaagagaagcatttcacccgccatttcggctgtttctgcggccaggttgtaccgtcagacgctattcagatgctacgccgcgatcgcaccgctaccgaatttatggtcgggttaaacaaattaccaggcgttcgcgaagaaagcgcagaaaacattaaacgcggctttcttcaggctctactggaaacagccgaaattaacgacgaatttactgatgccgttctcgatggcgatcgattgtctctgggcctcgctgatactacctatatacgaatgaaatttaaggttgcggcaatggaagcgcaggcccgtaatgatttcgcaaacaacatgatctgcattttatacgcagatggctacaacgtaagccacctggcagaagatgaaacggctagtgcaaaaggaaaagagctacgcaaagaatcaaaagggcgcgtctgggatatgactgttctgcgccatcttgaagctgaaacacctgatgaaaacgagcataacgagttactagccaggcgttctctttcggaggctgaacaggcgcagctggcccgctgggagattgaaaacgagctgatgctcgatgtagacgaagactccctaaaattcctgcttgaagggggtaaaaagcggctgactctggccgagttgatgacaatggacgaattaactgctgcacgtatcgatcgtgaacagcaggcgttttcgttcacgtatcagttccgaaaagggcctcgtaatgaatacgtgacaatcacggcaattaatcgcgagacagcagacgctcaattcgacaggatgcagcctggaattacaggttataccgttcacagccgaccgattctggaagtcacccagcgaacgtatgcgtcactacaccgtaaggtggcccgcgaatatttctctacctgcggtattgatcctgatactggcgccggtgaggcaactcaggaagggatgaaagctgcgatggaaaaacttatggatgcaagtactgctgaccggtttaacaacgtcttgcggtttggcggttatatcaatccaaaaggacgccctaaacgcccggaaacggtatttaaacagatttgtgagtcattcggttatgccacccaaaaacgccgcctgccacgttctcaggggcttggttacgtatggtcgatagttccggcatcctgggaatttatccacggcattctggcgcgtagagccgaggcatcactatcgtttgttcagatgaagctggatgtggccacggcggaaattgcggatctcgattgcagatcaactatagatattagatctcaagttggatctgcagacactacatttattgattcaacgctaacgacgattgaagaggctattgccgctatgccggtgccgtttgcatggctaagaacgacgctgacgatcgaagagttggtgcaactagcgacaatgccaccacggctgatacaggcgacggtcgctggcctatttatggctgacaatatgacgcaactttctgatgggcagtataacgagctgaagcgcctgcaggcggtttaa

SEQ ID NO: 379417 - DNA, 642 bp, Salmonella enterica
atgctttttatgaaaaaacgtggtgaatggcttaaagaacgccgcgaggaactgaaaagcctcgataaaagaaagtattccatgcgagcagtggccgaacgcgttggtatttccagcgcaggtatgtctcacctggaaaacactgatgctatgccatcgctggatctggctatgaagttagcaaaagagctggatcggcctatagagtggatactgaacggcacagttacatatggccagcgtggaattcctatcgttggaacgactctcacaggtcccaacagcgaatggcttgattcaatgggacgctccggtagctataacgagttcgtcgatatcaccgttccgaataagcgtctttatggactaaaagtatctggcgatcctggttgtggttataacgagggtgaagtcgtggttgttgaccctgactgtgagctaataaccggtgaagatgtcgttgttatgactcatgagaagtctggctcctgcgtcaaaattctggccagtatgcgttcagggcagtacttttttgactcaccaacggacagaaaccaaagattgataagcgatcttgacgacattatttcgatccactctgtgatttttgtggctaaatctcacacaataaaatcgaagtaa

SEQ ID NO: 379418 - DNA, 603 bp, Salmonella enterica
atgtcatctgtagttatcaaagctactctgcagatgttagccgaaacaggctccagtgttgctgtatttgctacagaaaagctgattcctgcccttgagattcaggggttggttgatatgggttcagaaggtgtacgtgttgatgagtacatgcgctggcgtagccgttgtattaaacgagcacaacgagtcctggcaggagaaacacctatgcctgcggactggatcattacatggatgtctgttctcccggaactctataaaaataaatgttcacaaaagatagcagcaatgcagggactgcaatgggttcgcttgccgcgttataaccggatacgcatcgaatctgttgatgcggaaattgattcaatcacgatgaaatttggagaagttctggcctcatcatcgcctgctcatgatggggtttatgacaataatgatgataaagccgcgctgaagcagctgcagaatcgattgacagaaatggcggcctatataagacgagaaattatcaatattgagatggctaccggcatttctcctgattatgtggagataggcgagaaaagtccgttgtcgggaggccgccgtgttacagcttaa

SEQ ID NO: 379419 - DNA, 666 bp, Salmonella enterica
gtgttacagcttaattatgtacgtgattctattactgctgcgcttctggcgtattcaaaatcacaacgaaaccagattgtggtaatgagtgaaatggccggggcttcaaggaaatatcttgagaagcctgttcgtgagattgaaataaacgggaaagtagtagttgttgatgcggaaccagtcagctatcacgaaggcaaaaaatttaaaacgagtacgctgcctgtttctcccgatattttcagacaggctagctggcgacgggctatgtatcagttaccagaacaatatatcgcatggttaagttattgctatggtgatgcactgtcattcgaccatcagacaatattgagcgttcatatctggaatgcgttgcaagtttatcaaaaagaaaacggccttccgaaaatgaatagcactaccacaaagaaattaaagattctggcatggctagcaatacaggaaacaaaaaattttgttaatcgcggagagtataaatattcgcaggaagagttaagtggattttgtggtatcagttatgacggctggcgccagaatcataaagagcgctgggaggttttgttatcaagctgtattcagcttgatcgtgaggctttgattcatgtcgatcaattacggaaaaaagcaggttgccacaggcggtga

SEQ ID NO: 379420 - DNA, 306 bp, Salmonella enterica
atgtcgatcaattacggaaaaaagcaggttgccacaggcggtgatattccaccatgtttgtgtaagcagacaatgcacaggcaagcgactaagccaaagctagttcattcagataaacgaaatcaatacataatgttctgcccttcatgcggattcagaacacaccctgactggtgcaagaatgctgttatagctgaatggtgtggagctaataagggcggtgacatacatattcaggagctatggctaaaacggtataacgaacagcagaaagaaagtattgcaactaaaaaacatgtcttttga

SEQ ID NO: 379421 - DNA, 939 bp, Salmonella enterica
atgaaaaattttcgtaccgcattcccttatgtcacggagatcactgtcccggatgatattaatgagctactggataaatatagttttgatggcctgtcagacagtgatcgccgtgggcatggatgggggctaattggcgatgacagaatgctaagtgtcgacggtaagtatctcttgcggtactgcgccagtcagcgtaaggctaacccacttgctgttcataaactggcaggagaacgccagcagaaagcaattgatgaaggtagggaaataaccctggcgcttatggaagagtttttatttcaggctgaaagtgaagtaattaaatatgcacctgtaactacagtttcagtatttcttcttatatggccatcaaagaggttgctgcttgcgtcaggtagcactgctgcaaaatgtgaagaagccttaagtatgttacgaaaaacacttggcagtttaagttcttatccgtggggattgtgttccaccatttctcaggttgttaccgatgtgatgaccacagataatagcgtttataaattgccagataatttagtaatttccccatttggtaagaccatatttaccggagaagactcatcattaaaaattgttcttgatggagtacagaatgatacagatgacgcaaaaagtatgctaaatggcatgatggcgcgttcggttgaaatgtcattaatagatcgtcctgcgaacggacagattaaaaatatggcaaattttattcttcatatgcctcctgctggtaatgctcatttaaaatgttttgattacgatgatgatgttgaacgtgatgatggaatctcttcccttatcgctgaaatgcatctggtttctgcctatgtagttactattttatcggcagtggaagattttaccggaatgaaatcgaccggagctaatgttattcaggaagaataa

SEQ ID NO: 379422 - DNA, 615 bp, Salmonella enterica
atgcaaaacaatcataaaggcattctgaatatggtaatgcaaaaatggcttaatagtgactatttgataatcgatacagagactaccggtcttgataacaatgctgaaattattgagattgcaattattaatatgcatggtgatgttcttttgaactcgctagttaaacctacctgctcaataccaacagcagttacaaagataaataatattactgatgagatggtagctgatgcgccgttatggcgtgacgtgtttcctgtaatattgaatatcatagatgaaaagaaatggttagcatggaattctaaatttgactccagattaattattcagactggtgttaaaactggttattttgaagatcttcctgccagtaaaatactggatatagccgcaaaaattaataattcgcagattgacgcaaaagcgatttatgaccagtggtatggagagtttgacagtaagcggaataactttaaacgacagcgtctgaccaccgcagcagaacgtcacaatgtgtcagttaacggcgcgcacagggcgttggccgactgcatgatggttcttggcgttttaaatgctgtatgccagccccaggataagggggaatga

SEQ ID NO: 379423 - DNA, 249 bp, Salmonella enterica
atgggaacaaaaaccatttgggatgggaaagaccttcctcctgtcggctgtcaggtactaatcaacctggcttctgttggtatgcgtccgtatgaagttactggctatgaggtgaggcgttctgtagaagaaacgcaatacccatcctggctttatgtggtgaaaatcaaagttaaatcgcccgatggaaagtcagaaaacgagcgatttcttaatgaagttttcccactggactggcgtgaggattga

SEQ ID NO: 379424 - DNA, 231 bp, Salmonella enterica
atgagactgaaaatgtacacgcctgatgactcggtgattattgaaagcaatctggtaacacagttctatccagaccacgaaagcggcggcgagttaacagtcatcgagactatttcagccactggagaaactttctctgtgaaggttaaacactcgtttcttcaggtaacaagtgcgctggctacagcctggagcatcgacgagaagaaagcggaaggagctgcatcatga

SEQ ID NO: 379425 - DNA, 189 bp, Salmonella enterica
atgagcaagaaagcaggatgggccaggccgattaacgccagtaaacatcatttcttcgcagaggatgaagtcaccagcatctgcggtcgctggatgtatttcggacacgaccgagaatcagacactttcgaaagccctgatgactgtgctgcgtgtcgtcggaaactgaataaggagcagccggcatga

SEQ ID NO: 379426 - DNA, 480 bp, Salmonella enterica
atgacaatcgacaaacaggcgctgcgtcagaaagcagtgaaggccggtggcgaggaatggcagtcacggaaaatgccaggcctttccggtgaatacacagtaatagtcaaaggtagtctcgaaaaacatcctggctggacaacttgccgcccggtagctgatgaggttatcgataaaaagactatggatttcatcgccgcagccaaccccgtcacgatgctggcgttgctggatgagttggacagcgccaacggctacgccagcgcatacgaggctgaaaagtggcattaccacggactggcagaatctgagggtgagcgagcagatcgggcagaaaagcaagtggaagaattaacgatgtggattaagcgcctggcctactcgcttagaaacaccagaccagacagcaagttatatatcgatgcaatggactatttgagcagcaaagggttaatcagtgtggaggatgtattgagatga

SEQ ID NO: 379427 - DNA, 624 bp, Salmonella enterica
atgattttggatcatcgcagcaatacagcaaaggagcatcgtgatacctggagaacggacccgcgcatgattgcgggtttgtttgaactactgcggccctgttatatagacggctgcgccagcgatgaaaatcatctcctgccagaatactttactaaacaggaaaactgcctgcagctgaactggaggctggaagccaaaaagcgtggagtgccgccggctgtttatgttaatcctccattttctaaggaggatacaacggtagcgactccccacaatggtatggctaactttttcagaaaagccagagcagaagcggagcgtggtgtttactctcaatggctgtttcgtgctcgccccggtgaaggctggtttccgtggcttttggccagccgtatttggtttatcgttggtcgcgttggatttgtcagttctgaaacactgaagcttgatgatcaacagacagagaaccattgtgttgctgaatttatcccggatgagcttccatttatggctaccggactggcgctgaaccgggatgacatcatttctactggggagaaagttatcactaaatgcaaatatccaataattacagcacgatacgcgcaattaatgagctaa

SEQ ID NO: 379428 - DNA, 237 bp, Salmonella enterica
atgcgcctggagattctttttgatagagaagcaaaaattccagtaaaaacaatggatgcgctataccatcaggttgagaagcgcctttcccctttatatccccgtcttacattacgtatcgcaaaaggcagcagctccgccgtacaggtttctggagcaaaaactgacgaagaacgcgagagtgttatgtcaattttacgggagatttgggaagacgatagctggcttccagagtga

SEQ ID NO: 379429 - DNA, 249 bp, Salmonella enterica
atgaacggaaatgagctttgtagttctgatttattagctgaaaaattgaaacatttgtcgtcaatgcttcagatagccaggcgaacgctggacagtaacgaaggatgcatttacctgaatgaggtcagcgatatgatgggagcggcaggcatcatgacgcaagaatgtgaggtattgcggcggcagatagacgccgagctgtaccagaaaaatagtaaatattttgacttcttcaaccagtcccaatag

SEQ ID NO: 379430 - DNA, 282 bp, Salmonella enterica
atgaaaggtgtatctctcgacgaattaagaaaaaaaatgctgaataccccggaagctgtccggggttatcaggatgcagatcgtgagcttgctcttatcgaaatgctctacgaaatgcgggaaaatgcaggactgacaaaaacagaagtcgcacaacgcctggatatccgcccatcggccatatccagacttgagcgaaacccgctaggggccagcataaaaacgctatcccgctatgctgatgcctgtggggcaaaaattgatataaaagcgctctactaa

SEQ ID NO: 379431 - DNA, 312 bp, Salmonella enterica
atgttcaacgtgataacccacgaagcagccgtttccgaactaactgacctaccggacgagttgcgaggtcgaatgtttcgactaatagaaagactgagtgaaactggccagctgaaaatgccacatagccgggtgataggaggagggatttttgaactgagggttggggataaaaatattgccagaacgttgtatgcttacgcagccgggcacaatatctacctcctgcactcgttcataaagaaaaccgaaaagaccccgtcagcagccatagaactggcgagaaagcggctaaaggagatgattaaatga

SEQ ID NO: 379432 - DNA, 222 bp, Salmonella enterica
atgaactacgcaggtagtgaggaagtcagaaaggacctggaaaaacttactgaagcgctgtacgaagtatatcgccaggctgctgaatttgagagcaggtataaatggaataaagccaccctggtagagcgattaactggcgccgcagttggaattgcaaaagacgagctggctgatgtgtataaaaaaattgtagcaattgagcatcagttccaggactaa

SEQ ID NO: 379433 - DNA, 234 bp, Salmonella enterica
atgaaatttaaacaagtacgcgaagaaatgacagatgtagcagtaagcatggaatatgtaatgaggggatattattggttaagccttgacgacctggcggatgcctgttgccgtagcaaggttgagatcgaatttatactggaacagatgatctgtttcgggatggtccaccgtgataagtggggtcggtattcattaaccccggcttacaggaactatcaagacgctgcgtaa

SEQ ID NO: 379434 - DNA, 1062 bp, Salmonella enterica
atgaaaaacactgtaaaaataaacagtgcaaaacttgtacatgcagattcactggagtttataaaaacacttcctgaaaacagcatcgatgccattattacagacccaccatattaccgtgtaaaaaataacgcctgggacaatcagtggcctactgtggctgattatctggcgtggctggatgagtttttcgcggagttctggagagttctaaggccagctggatctttgtatgttttttgcgggccaaagttgtcttcggacaccgaattattgttacgtgaccgcttcaacgtgctgaaccatatcatctgggctaaacccagcggaaagtggaaaagggcaaggaaagaagatttaagggcatattttccggctaccgaacatattctttttgccgaacactatggttctgaaggatttgcaaaaggtcagtccggatatgcgacgaaatgccaggagttgaaagggaaagtttttcagccactgatcgattatttccgtaatgcgcgccagcgcctggggattaccgcagcagaaataaatgccgcaacaaatacgaagatgtgtagccattggttcagcgcgagtcagtggcagctgcctaatgagcgacagtatctggcgttgcaagcgttatttaacaagaaagcggaagaagcaggggtaaatggactgattgaaccgcataaggttttacgggaagaatacggggtgttatctgcgcactacagtgcgttagttatggaatacgatgaactgcgcaaacaatatgaaaatttacggcgcccattccgcgtgactaaggaagtcccgtatacgaatgtgtggacctatccaccggttccgtactatccgggcaaacacccttgtgaaaaaccgatagagatgatgatagatatcatttctgccagtacacgtcccggcgatgtagttgccgactttttcatgggatctggctccacgataaaagcagcgctgcaacttggccgtcaggctataggtgtggaactggaagaggaacgatttttacagacggtctccgagatcgaaaatctataa

SEQ ID NO: 379435 - DNA, 309 bp, Salmonella enterica
atgaacacagctatcgaatatggaaatcctgatctctggctggttttactcatgttggcagccggagcagtttccagcgccttgttatccactaatccgctgaatattcgccgtctcataggcgacgttctgcgcggagtaattgttgcaatcactctttggacctacggggcgcttggccatgcctcaatccttcaggtaatagttcttgccggtttatccgcagtggcgtggccgcatacggttaacgaaattaccggctttgcaaaacgaataattagccggtttttcggcgggagaaataaatga

SEQ ID NO: 379436 - DNA, 492 bp, Salmonella enterica
atgaattatggacttgtgagtaagcgagatgctttgcggtatgccgaagctgtatgtgatgttatcggccacgggaaaaataacgcggcagttgcactttgcgttgaaaccgcagcagcagagacattgcttggcgattacaaagatccgacaccaacgggcgcaggtacggggctgacgcaggtcgatctggggacatttgaatggcttcgtgataagtacaaaaacagccgttactccagcgcacttcttaaagaatttggtatcgatttaagcagaactgtttatcaggagctaagaacgtccccattgctcgcaatgttgttttgccgtcttcgataccttgccgttccggagtccatcccggcaacaagggtagagcgggccagctactggaagaagtattacaacacttccgcagggaaaggtacgccacaggattacatcaataaatgccagcgtgctggcgtcgatgcgctttttatttcatag

SEQ ID NO: 379437 - DNA, 465 bp, Salmonella enterica
atgaacagcttaaaacgaatggctaaggcctggttgctgatgaataccgtgtttgccgttcttatcatcgcgacgcagccagcgttggcgagcgatgaatttagcgtggattcgattataaaagctcttcctgctggctgggccagcgtagtaaccggggtattcattgtcctgtatgcagtcgcgcagctgcgcgccgtactgcctccatcagtgacgaataaaattccggcggtaattatgaaagtcctcgactttgttgctgcaaattatgctcatgcgcgcaatgcagatgcgattaataaagccgcccatgatgcagggaaggaaaatggtctctcagacgatgagtatcgggtaatggtggaaacagcgaaaaataaaggagagttgcgtggaagccggattgagagtgctggcgattatcctggagatgatcgtccaggcagtaaaagtacgcaatga

SEQ ID NO: 379438 - DNA, 195 bp, Salmonella enterica
gtgctggcgattatcctggagatgatcgtccaggcagtaaaagtacgcaatgaaaatgagcggcaggcgcggattgactatgcgcgtaataatccagctgattatctgcgtcgttttggccgggtgcgcgaggtcaacaccagtggtgccaacactgagtccggaaccttgcgtagcggaaaaaccgacgattaa

SEQ ID NO: 379439 - DNA, 267 bp, Salmonella enterica
atggcgttttttaaaagaatgtcgacagaaacaatccgccagaaatttacgcactatggtttattctggggatgcgtacctgtttacgtaaatatgaggaatagtaattgtcctgatgtggttacccgaaactggattcctgaatggacgctggacattgctgactggattagtgctgcgcctattttcttaataacactaattaatccatcgtatgaaccaatgtttgcaattaaattaacaggcctgattgaggatatggaatga

SEQ ID NO: 379440 - DNA, 165 bp, Salmonella enterica
atgtgccagttcaaattcgcggcaatctgccgcaccgatcgcaaaaataacgtccatcatttttctactgttgccgacagtgaatatgcagcccgccgccagctttctgtgaaattcgttctgtttcttcaagtccgccagttcgtttccggaggtgtggcatga

SEQ ID NO: 379441 - DNA, 225 bp, Salmonella enterica
atgaatcagattcgcatgaacgaagtgggactgtctgaatcactggaatccgtactggcacaaatttctgcgatcgccagcgtggcacactttactgctaccagcacctgtgactccgtgtataccaaggaactggcaaagctgctcattaccacaaaaaatctggctaatgaggcggaacgttatcgcgcggagtgggaacaactcatcccacgacgcaggtaa

SEQ ID NO: 379442 - DNA, 1209 bp, Salmonella enterica
atgttgaaacgacaagcctttaaattccagttaagacccaatggtcagcaggagcgcgatatgcggtgcttcgcgggggcttgtcgcttcgttttcaatcgtgggctggcgctccagaatgaaaatcatgaagcgggagataaatatattccgtatacaaagatggcttcatggctcattgagaggaaaggcgatgcagagacacaatggctgaaagaatcaccatcacaatcgcttcagcagtcgcttaaagatctggaacgagcttacaaaaacttttttcagaaaagggcagcattcccccgatttaaaaagcgtggtcagaatgacacattccgctatccgcagggtgtgaaactggaccaagacaactctcgtatatttctgcctaaactgggctggatacattatcgcaacagccgcgaagtcactggggtggtaaaaaacgtcatagtcagccagtcatgcggaaaatggtacgtcagcatccagactgagtatgaagtcactgaaccgaagcataaatcaacctcaatggtagggctggatgtcggagtcgcaaaactcgcaacgctttcagatggcacggtatacctgcctgtcaacagtttcaaagcaagccagcgcaagctggcgatactccagcgccagttaagccgcaaagttaaattcagcgctaattggcagaaacagaagcgaaaaatccagcgtctgcactcacatattgccaatatccgccgcgactaccttcataaagtcaccaatgaaatcagcaaaaaacacgcgatgatcgtcattgaggacctgaaggtcagtaatatgtcgaagtcggcaaaaggaacggcagaacagcacggacgaaacgtcaaagcgaagtcaggcttaaaccgctcgatactggatcagggctggtatgaaatgcgtcgtcagcttgagtacaagcagttttggcgcggcggacaggtacttgctgtgcccccggcatataccagccagcggtgcgcctgctgcggtcatacagcaaaagagaaccgccagtctcagagtaaatttgtttgccagatatgtggctacactgcgaacgccgatatcaacggcgctcgtaacattttagcggcaggacatgccgcacttgcctgtggaggagcggcgcagtcaggccgcccagtgaagcaggaacccgccgaggcgagtcaggcttcggtctga

SEQ ID NO: 379443 - DNA, 363 bp, Salmonella enterica
atgccagcgcgagctaaacgtccatgtcggcacaaaggatgcgcggcaatcaccaacgatgccagcgggtattgcgatcaacatcgtcagcaacacgccagtgatggttggcgcaattatcaggcggggcagagcaggcaggagcgaggatatggtcgcccgtgggaaattatccggaaacgtgttctccagcgcgataaatatctctgtcagaaccatcgtcggcagaacattgcgaagaaagctaccagtgttgaccacatcatacctaaagctcatggtggcactgatgatgattccaatctggaatcgttatgctgggaatgccatcgggccaagacagccagagagagactgaactga

SEQ ID NO: 379444 - DNA, 270 bp, Salmonella enterica
atgaaaatctcattggtcggtggtccttatgatgcgacggtttacgacatcgatgtcgacagaaacggaatgccgaaacttgacgtgctgtatatgccacgtcggcagactattgcagaaggacacattgaagttctggctaatgctccgatggctccagtaaaggatttgcgctaccgattagtccgggttactgagaaagaattggttaatggacgcctgtgtgattttccaacgaaatggcattgggagtatcactatgaaggctga

SEQ ID NO: 379445 - DNA, 207 bp, Salmonella enterica
atgaaggctgatgattggattaatgttgaagaacagttgccagaaagcaaagaaggacagtggtcgaaagaggtaattgcgcttagtgatactggtgatgtgttcaaactatcctgtatgggatcatattggcaaaggtcgaaggcattcattgagtccagttcaacaaagataacgcactggatgccactgatatatccagaataa

SEQ ID NO: 379446 - DNA, 435 bp, Salmonella enterica
atgggatcaggggtgagatcgccgggggccggacgtaaaccgaaagatacaggaatgcaggttagctccctgaccagagcagtatctcctcccgatgagcttcttggtgaaatggctatcgatgcctggaagagaacgtgcaagatcctgattaaccgtggcacgttcgaaatggaagattgttatcttcttatggaatattgcaacacggtgcaacttctttacgacgctaaccaggaaataaaaaatgatgggcttggtgacgatactgctgccggagggcaaaaattaggagcggctgttaaagccaggagcaaatatatcagcgaactgatccggcttagtgttgtattaaagctggaccctaatagccgcatcaggaaaaaacagcccggcgataataaaaatagcggaaacgaattcgacgaattttaa

SEQ ID NO: 379447 - DNA, 1710 bp, Salmonella enterica
atggcggcatacccgaacgtcaatctggcgaacgcttatgtgcgcgatgtattaagcgggaaaatcgtggcatgtcggtttatcaagctggcgtgccagcgccactttgatgacattaaaaaatcgcttgataaaaattatccctatcggttcgacagggatttggctgaacgggcctgcaggtttgttcagttgttgccccactccagcggggaattggccgggcagaagttaaaactggaaccgtggcagtcctttgctttctgctcaatatttggctgggtcacgaaaaaagataaaaaacgccgatttcgcgaagcctacattcgggtagccaggaagaatggtaaatcgttcttcgctgccggtattggcacctacatgttttgcgctgatggtgaaaacagcgcggaagtctattgtggtgctacaacaatggcacaggcgaaaaaggtattcaccccagccagacagatggcagaccggctgccttctctgagggctaaatttgatatttcggtttgggtggacagcctgacccgtcctgatggttctgtatttgcaccgatggccgggaaacccggcgatggtgatagccctcattgcgcaattatcgatgagtatcatgaacatgataccgatcatatgtacgaagcaatgacgctgggtatgggcgcgcgctcacagccactgacgctaattataacaacagcgggcgtttcgctggaatctccctgctatgataaggataaagaggttaaggaagccctgagcggtatcattcagaacgaacgtctgttcgggctgatttatgagctggatgaaggtgatgactggaccgaccccagaaatctgattaaagcgaacccaaatctggatgtttctgttaagtacagtgatcttgtcgaacaactggagattgcaaagcaggttccccgtaaggttaatgcctttaaaacaaagcgcctcaatatctgggtatccggtaaatccgcgttttttaatatggagcactggaaagctgcagaagataaaagtctgcaactgaaagacttcaaagacgacacctgtaatctgggctcggatctggcgcaaaaactggatatgaatgccgtagtacggttatttacgcgagaaattgatgggaaacgacactattactgcataaagccaaaattcctggcgcctgaagatacagttaacagtaccgatcctaagttgcttaaaacagcagacagatatcgtaaatttgttgatatgggggagctggaggcgaccgatggcgctgaagcagattaccgggaaattctggccagcattatcgatatgcggagtgttacccgtattgatgaaatagatatcgacccggcaggcgcgacggcgctgcgtcacctgttagaggatgagggtttcacttgcgtcgagataacccagaactacaccaacatgtcaccggcaatgaaagagcttgaagccgctctcgccggtggacgattccatcatgatggcaaccgtattctgacctggtgtatcagcaatgttatcgggaaatttatacccggtagcgatgatattgttcgcccgacaaagggagacaaacaaagcaaaatcgatggagccacggcgttatttaacgctatgagtcgtgcaatgctgaacgaaagcagcggtggaaaatcggtatacgatgaggaagacgtagcgtgttaa

SEQ ID NO: 379448 - DNA, 1260 bp, Salmonella enterica
atgttcattccccagatgttccggggtaaatcacgatcgggaggtggtttttgggaagcgatgctgggaggggtcagttcaagccagagtaaggcgggaataattataactcccgaaacagcgatagcattatcggctgtacgggcgtgtgttacgcttcttgctgaatcagtcgcacaactaccgtgtgaactgtaccggcggcgcgataacggaggccgggaacgggctactgaccatcctgtttatgatctgattcattcccagccaaataagaaagacacgtcttttgagtattttgagcaacagcaggggttgctggggctggagggaaattgctactcgatcatcgacagggacgggaaaggatatccacgcgaattgattcctgtgaatcccaaaaaggtcattgtcctgaaagggccagacgggatgccatattatgaactaccagaaattggcgaaacattgccaatgcgcatgatgcatcatgtgaaggtattctcgctggatggttatatcggtagctcccccatccagacgaacgcggacgtgcttgggctaaacctcgccgtggaagaacatgcttctcaggtttttcgccgtggctgtacgatgagcggcgttattgagcgtccacaagaagctacgcctataaagagtcaggagaagattgatcagcttctggctaaatggactgatcgttattccggtatgcgtaatgctttttctgtggcgttgctccaggagggtatgagctacaaacagttatcccaggataatgagaaagcacaactattacagtccagacagtggggcgttgaggaggtttgccggttatataagatcccgccacatatggtgcaaatgctggcgaaggcgaccaataacaatattgagcatcagggattgcagtttgtcatgtacacgctgcttgcctggctgaaacggcatgaaggcgcgctgatgcgtgatctgctgctccccagtgaacgtggcgagctgtatatcgaatttaatgtatcaggattgctgcgtggagatcagaaatcacgttatgaatcatacgcgcttgggcgtcagtggggctggttatcagttaacgatattcgccggatggaaaacctgcctccgattcagggaggtgataaatatctgacgccgctgaatatggtcgacagcgcgagtatttattccggaaataagaagccaacagcgcagcaaatgacggaaattgaagccattctggcaagaacttaa

SEQ ID NO: 379449 - DNA, 351 bp, Salmonella enterica
atgaaatatattttcggtttaggcgtggacatgcttgttctcgttagcattattgtggggtttcacttcggtaatgagtctcttctgaatattcctcattttattgggtggtttgtcggcattgtaaatttattggctcatttgagtaagaaatcaaaagagggtatggcgaaaaaatatcagtcacagcctcttttatttcgcatatatgacgtcctgactgacgttatttttgtgagtttctgtgcctatcaggggtggatgtttatggccgcagtatatgctacggctgcgtgcctgaaagctgagtttaagcattcaatggaaaagacttatgcaaaagttgattaa

SEQ ID NO: 379450 - DNA, 918 bp, Salmonella enterica
atgcaaaagttgattaacctgcctcatctggcagatcaggtatttggcgtgccacattatgctacgcgccagacaatggactcggttaaagcggtgcttatcccccggattcagggtgctgttaccgatgcaggaattactatggcgctgactccggataaccagcctgagccagcaatggaacagccagcaggtggtatcgctgtcatctccgttcatgggattctggttccgcgccgtgggcagataacggcgatgtgtacggaactgacgagctatgaacgaatccgcagccagctttatatggcgctgaatgaccctgcaattagcgaaattgttctggatataaattcaggaggcggagctgctgtagggtgtaaagaactggctgattatatatttcagtcacgtgatataaaaccaattacagcgatcgtgaattacagcgcgtattcagctgcatattttattgcgtcagcctgcagcaaaattatcgttagtaaaacaagcggagtgggttcaatcggcgttatctttgagcatatggaagcatcgaaatgggaagatagcgttgggctgaaattcaccactatttatcgtggtgataataaaaataatggtacgccacatgagccgctgagtgagcaggcacatttgatgttccagggaatgatcgatgatatgtacgagatatttacggcatctgtagctgaatatcgcggcatgaatcagcaggctgtaattgatacccaggcaggactttactttggtgccgatgctattactgccggtctggctgatgaggtgtcagatccgcagtctgctattaacgctattgcagataaatacaaaaaaccgcagcaggcaacgtcaattaagcttcaggccgcagtaatggaccagcaagcaaaaatgtaa

SEQ ID NO: 379451 - DNA, 1287 bp, Salmonella enterica
atggatcatattgaagaattacgtcgtgaacgcgcgggtattaatcagcaggttcaggtactggcagcagttgaagccggcggcggtacgttgacggcagagcaactgacggagttcgccagcctgcagcagcagtttggtgatatcagcgccaaaatcgaccgtctggaagcggctgaacgtgcggcagctgttgtggcaaaaccagttaaagcgacgcagcaggcacctgctgtcagcgttaaaacagagcctaagcaatataccggcgccgggatgacccgtcttgttatgtcgattgcagctgcacagggtaacgttcaggatgctgcaaaatttgcggcagaagaactgaatgacccatctgtatcgatggctattaatacggcggcgaattctggtggagttcttatcccgcaaaacctccacagcgaggtgatcgaactactgcgtgatcgcaccatagttcgtaagctgggcgcccgctctattccgctgccgaacggcaatatggcgttgccgcgtctggcaggtggggcgacggcgagctataccggcgaaggtaaggatgccaaaacgtcagaagcacgcttcgacgatgtgaaacttaccgctaaaaccatgattgcgatggtgcctatctctaaccagctgattggtcgcgccgggttcaacgtagagcaactggtattgcaggatattcttaccgcgatttctgtccgtgaagacaaggcctttatgcgtgatgatggcaccggcgataccccaatcgggatgaaggcccgcgctacggaatggaaccgtctgaaggaatgggattccgctgccgacattaacctgaatacgattgatacgtatctcgacagcatcatcctgatggcaatggatggtaacagcaacatgattagctgtggctggggtatgtccaaccgtacctacatgaagctatttggcctgcgtgatggtaacggtaataaggtttacccggaaatggcccagggactgctgaaggggtatccaatccagcgaaccagcgcaattcctgcaaatctgggtactggtggtaaagagtcagagatttatttcgccgactttaacgatgtcgttattggtgaagatggcaacatgaaagtggcgttctcgcaggaggcgtcatatcaggatgcagacgggaatctggtatcagcgttctcgcgtaaccagtccctgatccgtgtcgttacagagcatgatatcggcttccgtcatccggaaggtatggtgcttggcactaaggttctgttctaa

SEQ ID NO: 379452 - DNA, 372 bp, Salmonella enterica
atggcaggtaagtcaccaaaaaccacagttaaaaatgaaggtgctgcggatactgaccaaaccagtacccatgaagatgggaccacggtcccaacggaagaaaccacagttaaaaatgaaggtactgcggatactgaccaaaccaatgcccatgtagatgggaccacggtctcaacggaagttaacgtagaacgtaaggctgtaacatttctgggaccatatcatcgctattcccgcggtgatgtagcctgtttcgatgttcagtatgcggaagcattggttgagcgacgaattgccgtctggccagaagatgcgaaaaaagtattaagtccccagtcgggagccagtgatcatgatactgacattggatga

SEQ ID NO: 379453 - DNA, 324 bp, Salmonella enterica
atgatactgacattggatgaagctaagacgcagctccgtctggagctggattttaccgctcacgatgagttgttgtcatcgctgattaatgccgcacaacgaagcatagaaagaacctattactgcaggctggttgagagtcaggaacagctcgatgcgctgggtgatggtgaaaatggctacgttattgatgacgatattaagctggcagcgaaaatgatggtctcgcagtggtatctcaatccaacaggaactggtgacgagtctcctgccgatctgggcgttgaatatctgctgtttccgctcatggagcataccgtatga

SEQ ID NO: 379454 - DNA, 345 bp, Salmonella enterica
atgagtgataaaccacttcgtcccggtgagctgaactgccggataaaactgagccatattgaaaccgggcgtgggccgcttggtgaggagcttcctgccagagaggttctggatggtgaagcatgggctaaaaaggagctggtttcaggccgtaaggttcgaacgctggatcagcaacaggtggttgaaacctgtctttttacgttgtacccgcgtgcagttgatattgactggaaagttgccacgacgaaccgaatttatacggtcaggaacgttgagcgactggcagatcgcatcgttataaccggggaggcagatacacgtcatgatcgagtcagcaattaa

SEQ ID NO: 379455 - DNA, 390 bp, Salmonella enterica
atgatcgagtcagcaattaagacggcgctggaacggattacagggatggcggcttatccgcttttacttccggatactgtacaggaaggcgtgacgtttcaacgaatttccgatccgggaatctactccggactattgcgaacaggtttgattgcaggccgctttcagatctctctttacctcctggattcctatacagacctgttgcgactggacaggaaaatctggtccgaatggaagcagatagtacacggccagcttgacggttttccggttcaatatgttgatcgaggagggattcgtcaggataaaacaaccctgacaaacgggcgtaaccagtaccgactggttcgtgacttcacctttgtttatccggagtcagcagaatga

SEQ ID NO: 379456 - DNA, 405 bp, Salmonella enterica
atgatcactatggatgtaaaaggcctggacgagctggagcgacagcttatcgcgctcggtgaaaaggtcggcacgaaggtgttacgtgacgcgggtcgtgaggcgatgaaagtcgttgaggaggatatgaagcagcatgcagggtatgacgaaaacagcccaggtcctcatatgcgggacagtattaaaattcgcacacgaaaaggagcaaaaaagttcgccagtacagtagtaagtatccgggtcggaccgagtaacgagcactacatgaaggcatcaccacaggagtttggcactgtaaagcaggtggctaaaccgtttatcagacccgcattggattacaacaaagcggaagttctccgcaccctttctgccgaaattaaagaccgacttcaaaacaggtag

SEQ ID NO: 379457 - DNA, 474 bp, Salmonella enterica
atggctgatcaaaaaacatcgccagaatatgcgatgctgcctgccggaacgatcgtcaagtacggcgaggttggggacgctgaagcagcactgaaacctctggttaactgtaaagcacttggagcgaccggacagacaggaggctttgtcgattgcaccacgcttattgatacaagtaagcaatccatttccgatttgccggaagggccggaaaaatcgctgggatttattgacgatccgacgaacagtgattttgcagcgttccttaatgcagcagagcagcgtaaaactgtccagttttatatcgaactgcctaatggccggacagcatcaatgattctggctttggcaggctggcaggttaacgaaatcaccgccccggccagcgaggttattcagattactgttcagggtaagcaaaatcatattaagtggggaacaaaatccgcagccccgtcggcaccagggagttaa

SEQ ID NO: 379458 - DNA, 363 bp, Salmonella enterica
atgtctgaatttaacctttcaaaactgaaaacagcgctgcttaaaactaaatctgagccagttgagacggaaatctttggcacaaaagtttatttgcgccgactgactgcagctgaattgattgatcatgaggatgcgctgattgaggcccagacagaaggcaattcccgtaaggcgtctgagcttagtgtgcagatcgttgtcgacagtctggtaacaccagatggtgagccaattaaagatagcgataaacctacagcacaggaactgctggcggcacacgacaacgttgagcttctggatgctatcgataaggtcaaaaaacattccatcggtaagctggaaaccgccgaaaaaaactga

SEQ ID NO: 379459 - DNA, 3303 bp, Salmonella enterica
atgggtgacgttgcctctcttgccgtcgggctgcatctcaatgcagctaattttaaatcacagctgatgagcgcctacggtgacgccgacaaccagtcacgccgttttaaccgtaatgcccaggctgatgctaaaaaaacagaggatgcataccggcgtgtttctgagtccgtaaccgggcttgctggcaggctggcaggatttgccggagctggtttatcactcggtgcaatcatcaatacgactcgtcagtacgcacagtcattatctgatttgcaggctattactggcgccagtactgcgcagatgaagttatacgatcaggcggcacaggaaatgggccgcacgactgaatacagcgcatcgcaggctgctgaggctatcaaactgatggcctcggcgaaaccagagcttctgagtacctctgaagggctttctgctgctaccaaaagcgccctgacgctggcgcaggcagcaggtacgacgctcccggatgcaaccagaacactggcactgtcattaaatcagtttggcgccggtgcggaacaggccgatcgctatattaacgtactggccgcaggggctaagtatggctcgtctgaaatagtggataccgccgctgccattaaaaatggtggcgtggcggcagcacaggcaggcgtagggttcgagcagcttaatgctgcaattcaggtacttgctgcgcgagaaattaaaggtggcgaagcagggacagctttacgtaacgttatcctcaaccttgaaaaaggggcggacaaaagcctgaaaccatctgtcgttgggttaagccaggcgctggctaatcttgcagggaaaaacctgtcgacggcacaggcggttaaactttttggtgtggaaaacatcactgcggcatcgatactggttgataaccggagcaaactggatgaactgaccactgcgctgacaggaacgcagacggcacatgagcaggctgccatcagggttaataacctgaacggtgatctcatggggctaacctccgcgtttgagggattaattctgaaggttgggcagagcggagatggcccgctgcgcagtggtgttcagaccattacagaagcgctgaacgggctggcggataattttaatacggtcgccaacgtagcgctgtatacgttgattcctgttatagctacaaaattgactgcaggagttcgcgggaatattagtgcctggcgtgaaaatcaggtggcagtgaaggccgccgcacaggcacaggcagatatagccaggaaaacgctggagagtacagctgcgattctggcgcagaataatgctgaatttggccattatcgtgaaatggaaaaaacggccaaattatatggtttgaatgtcagttaccagagtgattttaaccgcctgatcaggcaggaaactgagcagacattactggccacacaggcaaaatatcagctaaatatagccaataaacagttgtctatatcagcgcgcgctgcttcagttgctattgggttggccaaaggagcgctggcattggttggcgggccatttggagcagccatgctggcagggtcagcattgttatattttcatcaaaaggccaaagatgcccgccagtcggcaataaacctgaaagatgctgttgttgaaaccaatgaagagctaaaaaaactatcgcttaaccagctcaacgtgaaacagctggatattgatgaacagtttgagaatcaggttattcagcgaaataaactgattaaacagattcaggatgcggacagccgtattgatggattgagcggcttcgatccgtttggccagcttaaaggcgtacagaacgataaaacccgctacaaaggggatcttgatgccgttgagcaggggttaaaactcctcaaagaacgaaaaaaaattatcaaagaggcgatagaacaggctaaatcagggaagaccggccccacgcctaagccgaatgaacccggaaaaaatgagacaggacgtgacaaacctaatacaacttggagtggagaaggcggggatactgataaggagaaaaaggcaaatgttaaccagtatgaacaactgcggcgtgaaatcgaggcggcgcacgcgaccagtcttggccgtatcaacctacaagagcaagaaagttctaggaagctggctgaagcggcgaaaaaaaatggcgtcagcgatgctgatctccagaaaaccctgttactgaatgcggaaaactaccagaaaaagcgcctcgaactggcggagcagtatgcgccagtcagagcgtcgctgaataaagagcgcgaagcaagtcaggagttaaaatcccttttagatgctcgccttcttacggaaaaagagtatcagacggcccgaattacgttggcacaaagtacggcccgtgaactgttacaggcccaggctgatgcggcatctgcaccattgcttaatatagccgggacagtagacccattggcagatcttcgcaatcagctaacccagcgccaggcactactgcaggcatattatcagaacgatgcgatcagcaaagagcaatacgaaatgctgaagcaaaaagccgctaaggattctgctgattcacaatatcagacggctgtagaactgtatcgctcgcaaggtgatctcaataatctgagtattggtctgtttgagactgcgcaggaacgaaccagtaatatgctaaccgggttattgatgaatacgcagtcgttccgggatggcatggttagtatgtttgcatcactggcgcagtcagttattaaaaacctgacagatatggccgcgcaggccctgctgactaatacaatcctgaaatccatcatgggaattggatcaggaatatcaggcggtttaggtgaaagtaccggaacggctataagtagttttgccagcagctttgaatttaacgccaatggcggtgtttacgattccccgtcgctgagttcgtttagtaacggtatttataatacccctacgttgtttgcttttgctaaaggtgccggggtatttggggaggctggcccggaggcaattatgccgttatccagaacggcggatggtgtacttggtgtcagagcgttgcgagatgctgatgccagcagccgtgatggtcgcgccagtcaaatggtgtattcccccgtttatcatattgctatccagaatgatgggaaaaacggagaaatcggtccacaggctgccagaaaccttatccagatgatcgattcacgggtacagataacgatgcagtccatgcgtcgtgatggcggaatgttgagcgggtga

SEQ ID NO: 379460 - DNA, 696 bp, Salmonella enterica
atgcaggatattccattgtcaacgctgactgaaattacccggacagaacaatctgcacaggtagttttatgggaaatagatctgacagaaattggtggcgatcgttattttttctgtaacgaggcgaatgaaaagggagaggcagttacctggcagggacggaagtatgatgtttatcctatagagggtagcggatttgaaatgaacggcaaaggtgcagctgcgcgcccgtcactcaaggtctctaatctttacggtatggtgaccggtatggtggaggatttgcaaagcttagccggggcgatggtaatacgccggaaggtatacgcgaggtttctcgatgccgtgaatttccacagtggcaatcaggaggcagacccggagcaggaatctgtcagtcgctgggtgattgagcagtgtagtgaactaacgtcggttagtgctacatttgtcctggcaacgccgactgaaactgatggcagcgtttttcctgggcgtatcatgctggccaacatatgtacatggatttaccgttctgatgagtgcggttatgctggcccagcagtagctgacgagtttgaccagccgacagcagatcccgcaaaggatgcctgcagtcgctgtgaacgtggttgttcattgcggaataatacagaaaactttggaggtttcctgtctattaaccgtttgtcatag

SEQ ID NO: 379461 - DNA, 528 bp, Salmonella enterica
atgaaaagaaattcaataattattgtggttatatttattatagccgtagcagccccttttttacttacctctaaaggcgatgcagaaaaggccgcattaataagcctttgcagtgacatgacaaaaggaatgatgaaatcaccaggtagttatataatggattttgctaaaattaatgtaaaagatgggaatactgaggagggagctaatggatataaaagcgccagcgtaaaaaatgcaattctttctggtgaaatgccttatcgtgtagcggatgttctgattaattatgaatcaaaaaatccatttggagtaagtctggctggcaatgcttattgtagatattcaatgattggttctgctggtagtgcaagttataaaatattgtctgttaatataaatgatatgaatctatcagaaattgacataatgtctctttctgaccttagagaatataaaataaacgaaaacacttattttaatagaataaaatatctgctatataaaatcaaacagctagttaattaa

SEQ ID NO: 379462 - DNA, 3396 bp, Salmonella enterica
atgggaaagggcggcggaaaagggcatacgccccgcgaggcaccggataacctgaaatccacgcagctgctgagcgtcatcgatgccatcagcgagggaccgatagaaggcccggtgaacggtctgcaaagtgttctggtaaaccagacgccggtggtggaccgcgacggtaacacgaatatccacggcgtgaaggtggtataccgcgtcggtgagcaggaacagaccccgctggagggatttgaatcgtccggcgccgagacggtgcttggtgtacaggtcaaatacgacaatccggtgaccagaaccatcacggctgcaaatattgaccgcctgcgttttacgttcggcgtgcagtcactggtggaggccaacagcaagggcgaccgcaatccgacatcggtcaggctgctgatacagatccagcgtgacggcgtctgggtcactgaaaaagatattacgattaacgggaagaccaccacgcagtacctggcttccgtgatggtgaataacctccctccccggccattcggtatccggatggtacgtgtgacggcagacagtaccacggaccagttacagaacaacacggtctggtcgtcgtataccgagattattgatgtccggcagcgctatcccaataccgcggtgattggcctgcaggtggagtctgagcagttcggcagccagcaggtgacgcgaaattaccattttttcgggcggattattcaggtgccgtcgaattacgatccggtagcgcgaacctacagcggcatctgggacggcacgttaaagcctgcatacagcaataatccggcgtggtgtctctgggatatgctgactcatccccgttatggcatgggacagcgaatcggcgcggcggacgtggacaggtgggcgctgtacgcaataggccagtactgcgaccagatggtccctgacggattcggcgggacagagccgcgtatgacctttaatgcgtatctggcgcagcagcgtaaggcgtgggatgtgctgaccgacttctgctccgccatgcgttgtatgccggtgtggaacgggcagaggctgaccttcgtgcaggacaggccctcggatacagtctggacctatacccgcagcaatgtggtgatgccggatgagggtacaccgttccgttacagcttcagtgcgcggaaggaccgccataatgcggtagaggtgaactggactgaccctgataatggctggcagacatccacggaactggtggaagacacggtcgccatcagtcactacggacgcaatctggtaaaaatggatgcgtttggctgtaccagtcgcgggcaggcgcaccgcgccgggctgtggctgataaaaacggagctgctggaaactcagacggttgattttagtgtgggggcggaggggctgcgccacgttcccggtgatgtgattgaggtttgcgacgaggattatgccggcatcagcctgggcgggcggattctgtccgttgaccgcgcccgccgcattctgacccttgacagggatattaccctgccgtcgtccggcaccacgctgataagcctggtggatggcgaaggcttgccggtcagtgtggacgtgcagtctgttaccgacggtgtgcaggttcaggtcagccggataccggacggcgtggcggaatacagcgtctgggggctgaaactgccgtcgctgcgccagcgtctcttccggtgtgtggctgtccgggaaaacgacgacggaacgtatgccatcaccgccgtacagcatgtgccggaaaaagagtccatcgtggacaacggggcatcgttcgacccgcagcccggaacgattcacggcaccgttcccccggcgatacagcatctgaccacagaaattctggcggaggaggggcagtatcaggtactggcgcgctgggacacaccgcgagtcgttaagggcgtctcgttttcgttgcgcctgaacgtggcggcggaagatggcagtgaccggctggtaagcagcgcaggaacgccggatacgcagtaccggttccgggggctgacgccggggcgctataccctgtccgtcagggcggtgaacagccagggacaacagggagacccggccagcacacagttcagcatctccgcgccggcggcaccatcatttatcgaactcacccctggctatttccagattacagccacaccgcgtcaggcggtatacgacccgacggtgcagtatgagttctggttttcagacgcgcagattacggatatccatcaggtggaaaacgccgcacgatatctgggaacggcgctgtactggatagcggccagtgtgaatatcaggcccggcagggattactatttttatatccgggcggtaaatcaggtcggtaaatccgcattcgtggaggcgaccgggcaggccagcaacgatgccgcaggctatctggattttttcaaagggcagataactgaaagtcacctgggtaaggagctgctggaaaaagtagatctgacggaggataacgccagcaaactgcagcagttttcgaaggagtggaaggacgctaacgataaatggaacgccatgtggggcgtcaaaatagagcagaccaaagacggtaaatattatgtggccggacttggactgagcatggaagacacgcctgacgggaagataagccagttcctggtggcggcggatcgcattgcttatattaacccggcaaacggaaacgagacgcccggattcgtcatgcagggcgaccagataatcatgaacgaggtattcctgaaatacctgagcgcgccgaccattaccagtggcgggaatcctccggcattttccctgacgccggacggtcgtcttactgcgaaaaatgcggacatcagtgggcatattaatgctatttcgggtgcgctgaataacgtcgttattgctgaggactgcacgattcaggggacgttgcgggccgaacgtatcctcggcgatatagtcaaagcggtgggtaaagagttcccgtatttcagggagccagccaccggagcaaagcgttacgccagtggcacactgaccgttcagatagatgacgaccagtcatttgaccgccagattattatcccccccatcaattttcaggggagttattacggacgcaatgatacgtgggatacgtgtacgctggaagtgcgccgcaatggcgcgctgatttacagcggaacgagcagcagcgttcctgagtcatacggcgccacgctggatatgcccgccggaggcggcattgtcacactgacatttagtgtcagtaccagggggaacagcacaggatggccgaattccagaataagcgatctgattctgatggttgttaaaaaatccactgcagggattcgtatcagttaa

SEQ ID NO: 379463 - DNA, 1092 bp, Salmonella enterica
atggcgccggctgcgcgatttatggtttctcttaaaccaacgtattcgataagaccgtcaacgctttttcctgacagcgccgtcagtgtatcgtccagcggctgcttgcccgcaatcatgttagtgatagtggtagcaaaattaggatcgttacccagcgcgtcagccagttctttcagcgtgtccagcgcttccggcgcagaaccaaccaactgtgccactttcgcagccacaaacgctgccgtggcaatttcaatacctgcagctgtggtttccggcgttggtgctgttggcgtaccagtcagtgccggactgtccagcggcgctttggtctgtacctcgtccatgacagcatggaccgcctttggcgtggctgccagcgcttcgctgtcactgtccgtggcactgcttaacttaacgataccttttttcgtcaggctggcatcttccagggaaatcacgtccgcgatgtcttctgcccgttttgcggcatcttctgctctggtggctgctgctccggcagcagtactgctttgcgccgccagtgatgcgctggtatcagatgcggcggcgtgggcagatgcctccgatgctgatgacgaggcggctgttgcgctgcccgctgctgtacttgctgacgttgctgcgtttgtctcagatgtttttgcttcggctgccgatgcggctgccgccttttccgacgctgccgccgcagtggctgacgcacctgcatcaccggcactggaagccgcctgcgtttctgacgtcttcgaggcggtttcggatgctccggcgcgcgctgctgatgtctgcgccgccgtcgcgctggcggctgcggcagcagctgaatctccggcggcagtacgggaggcgtctgcattcgcttcagatgttttcgctgcggttgccgatgcggctgccgccgttctggctgtgtcagccgacgccgcgctggctgatgcctccccggcttttgtggtcgccgtacctgcgctgctctccgcagacgctgcggatgaggctgcctgtgtggctgatgcgtctgccgctccggctgcattcactgctgccgtggcgctttccgccgcctga

SEQ ID NO: 379464 - DNA, 606 bp, Salmonella enterica
atgtcagaagattatgtaattgaatgggataagaattttgcagacgacctcaacgtcgtcgccaacgtttttttatcacacaacccaaccttatggcccactattttctctcaactttcgacgcaacctgaaatctttgaagacgaagatgaagacgaatatgggttgcaggacgtcctggattgtagcggtggcgatctcggaaataacgagctggcacaggcatttttacaagttctacgcggcgaaggatttattcacctcgttgactggaaaggtgaagatgaagaaggcgaactggctaattttgccgcagatcgcttttatgaactcacaaaaaacctgacggattctgaggaattaagaaatcttcttgtcgaaataacccaagaggatgaaatctccgatgtctgtgaagccggggaccgttaccttgacgagatctttgaacgcatccagaccgaactcaataagaggggcttccagatttttgatctgaatgaaggatctgacacctataatgtggtcgttctgccaatgagcgaatataaaaaaatagaggacttcaacacgccgtggctggaagtgcaggattttttaagctaa

SEQ ID NO: 379465 - DNA, 1080 bp, Salmonella enterica
gtgagtcgaaaaaagtacgatgctaaccttccgaggtacctcacctaccgtaaggccagtaaatcttttttctggcgtaacccggtaactgacaaggaatttccgctcggtcagatcgcccgcagggacgctatcacacaggccatagaggcaaacaacttcatagcgcaaaaccacacgccagtggcgcttattgaaaaactaaaaggaacggactcattcactgtgtccgcatggattgatcgctatgaggttttattacagcgccggagtctgtcggttaatacctacaagattcgcagtaatcaattagcgaccgtacgcgaaaaaatgggggaaataatactggcagaagtaacaaccaggcacattgccaagtttcttgagtcgtggataaccgagggaaaaaacactatggcgggagcaatgagatcagttctatctgacatgttcagagaggctattgtcgaagggcatattgtgaaaaacccggtggaagcaacccggataccagagattaaggtggccagggaacgcctgcaactggaaacgtataacgccacacgagcggcagcagagcatatgcctgcatggttccctctcgcgatggatttagcgctcgttactggtcaacgtagggaggatatcgtaaatatgaaatttagtgatgtttttgacaaccgcttatacgtaactcagattaaaaccggaatgaaaatagccattcccctatccctgacccttgaggcaccagggttacgtctgggaacggttatcgatcgctgccggctggtaagcagaactgatttcatgatcagtgcaggaatcaggaaaaatagcccgaccgggaatattcacccggatgggctgacaaagacatttgtaaaagcaagaaaagcctccggcgttaacttcagcaataatccaccgacatttcacgagatccgaagtctggccgggcggctgtacaaaaacgagcacggcgaggtgttcgcccaaaaactcctgggccacacatcagcgaacaccacgaaactctatctcgatgagcgtgatgataaagcttatatgatgctctaa

SEQ ID NO: 379466 - DNA, 576 bp, Salmonella enterica
atgacttttaaaatgagcgaacaggcgcagacaattaaaatttttaatcttcgttcagatacaaacgaatttattggcgcaggtgatgcatatatcccgccgcacactggattaccggcaaactgtactgatatcgcccctcctgatattccctccagtcatattgctgtatttgacgctgaaacccaaacatggagtctgcaggaggatcatcgcggcgagacggtatacgacacaacaaccggtaatcagatgtatatctccgaacctggcccgttgcccgaaaatgccacatcagtttcaccaggtggtggatacaaaaaatgggatagtaagactcaggtctgggtgaatgatgaagctgcggaggccgcagccagacttcgtgaagctgaaggaacgaaaaacagactcctgcaaatagcgtctgaaaaaatcgcgccattgcaggatgcagttgatcttggaatcgcaacagatgatgagaaagcgcagctcggcgaatggaaaaaatacagggtactggtaaaccgggtggatacctcaaatcctgattggccggaacaaccagtctga

SEQ ID NO: 379467 - DNA, 1452 bp, Salmonella enterica
atgaagcttaacgataaaccccgtcaactggcagtaccctttgcgagtgccggggataaaaataatatccccgataaggcgacgcagcagaccaaagagagcggtaacgcggcgtatgattcgggttttcctccggtgaccatgaccccgatttcagcgggaggtataccgccacacggtaaggattttaacggtctgatgcacgatattaccgcagcaatacggtacgtccaggctggcggtttgtacacgtataatgccgatttcgccggggccattggtggatatgcaaaagatgccattctcgccggagtctcaacaacagcggtctggctgaataccattgacgataacctgaccgatccggaaggtgccgacagcgcaggctgggtaaacctgctggcagatcccctgaagctgtttctgtggcagaaaaacaatctgtcagaccttcagaataaaggaacggcacgggataatcttcaggtctacagccaggagcagacggatcttaaatacctcgccaaagaccagaacggtagcgatattccggaaaagccgctgtttgtacaaaatatcggagcgcttcctgccaacggtacggctgttgcagcgaacagactggcatcacgcggcgcgcttccggcactgactggtacgacaaggggcagcgatagtggcctgataatgggcgaggtctacaacaatggctatccgacgcaatacggaaatattttacgtctgaccggaaccggtgatggggaaatcctcattggctggagcgggacaaacggtgtgccagcgcccgcatatattcgcagccatcgagataccgccgatgctgagtggtccgaatgggcaatgctctacaccacactaaacccacctccggattcgcatccagtaggggcgccgatagcatggccgtctgatgctaccccagccggttacgccctgatgcaggggcagtccttcgataaatctgcttacccgttactggctatagcgtatccgtccggcattatccctgacatgcgaggctggacaataaagggtaagcccatcagtggacgtgctgtactgtcgcaagaaatggacggcaacaaatcgcactcgcacaccgcgcgggcgcaggatactgacttagggacaaaatctacctcatcctttgattacggcacgaaatcgaccaataccacgggcaatcatactcaccagttcggcggttatatcaattcatactggggagattccaatcacacctcatttcagcctggaggtggtgcatggacacaggccgctggcgaccatgcgcatacagtttatatcggaggacacgagcacaccatgtatatcggtccacacggtcacgtcgttattgtggacgcagacggtaatgcggaaaccacggttaaaaatattgcatttaactacatagtgaggctggcataa

SEQ ID NO: 379468 - DNA, 438 bp, Salmonella enterica
gtgagcataaaattttatctccgcgatgatcgtattcgtcgcaatcttatcgactacatcaacagccagcctgtgaatgctgattttccgcttgtcgtcagcttttcagacccgaagcgtacccttcctcaaaattcactgtttcacgccatctgtggcgatctggctaatacccgtgtgcagtgggccggttcatcctggtccgtaccatcgtggaaggcaattctggtgtccggtcactctgttgcaacaggtggacagggaaaggtgattgcaggtctggaaggcgaactggtgccaattcgtgaaagtaccgccgcgatgggaataaagcgtatgaacagtctgattgggtacagccaggcgtttgcggtatctcagggtattcagctacgcgaggttcgctatagcggggattatttcgggcggctggtatga

SEQ ID NO: 379469 - DNA, 168 bp, Salmonella enterica
atgaacgaacaggagttacttactgtcattcgtattaccggacgttatgaagttgtaaccaataaggatggtacattcgttgttactccgctgccgcccgaatcattactgataacccgtgaatctcaccatcagtgtcaggattacttcagtaaaaagagtcggtag

SEQ ID NO: 379470 - DNA, 495 bp, Salmonella enterica
atgatcacccctgaaacagccagtcaggcgctggcgtcatggctggcatatctacagataacccaggaaaccgccacgcaactgatcacccgcgcattcctggagcagccggcgcgaccggaaatagcggttcaccgtatcgagcgtgacgacggaacggtggattacgacgcatggcgccgtaaccggataaacatttttcagcgctggcggaaacgggaaacggcggaacactgcgagaaattctctgcgctgatccccgctattctggaggcgatccgcgaaagtgcgccggaactgcataaacgaataacggcagggcagagcattgaatacctgctttcacagcttttaaaaaaaccgcagtggcaagcgcggtacttcttggcgcgccgctggcggattttgagcgggagtgtgacgaggccatatatgcgttacaggcgttacgtagcggttatcgccagcagtaccagagacatgaccagtgagtaa

SEQ ID NO: 379471 - DNA, 258 bp, Salmonella enterica
atgactggtttagacaaagcaattcaacgaatgggcaaccagcgccgccttgcattggcgttgaacatgcgaccctcctcgttaaataaatgggttcatcagtatcatgggcgggtccctccagagagactgatccagatttaccaactaacaggcgtcacgcctcatgagttacgccctgatttacatccaaccccaacgagtgggattccagaggatgctatcaccgcaggcgaaggaggggatgaacaaccatga

SEQ ID NO: 379472 - DNA, 156 bp, Salmonella enterica
atgaaagcaatcgacttaggcaacaatgaatctgtggtttatggcgtatttcccaataatgacggtacgtttaccgccatgacgtttaccagaagcaaaactttcaaaactgaagctggcgcacgacgctggttaacaagaaaccattgtgagtaa

SEQ ID NO: 379473 - DNA, 204 bp, Salmonella enterica
atgaacttcagagaattaccgatatcagtccagaacatcgcagctcaactgctggcggacagaatgccgtgtgccacgaacaccagtgaaaacgaaccagcaatggcactggcccagaatatcagcgatgccttcacccggctttataatccgatgaaaacctacaccattaactatgaccctggtcgtcctggccctgtatag

SEQ ID NO: 379474 - DNA, 243 bp, Salmonella enterica
atgtctgatattcctgaaatgatttttcccgtagcattaactcaccctatgaaaatttttctcgaccccaatacaggagagctggtttttgaatgtttccagctagtcggcggtacgactcagaagtttcgttttctaatggaaccgagggcagcactaacgcttctgtccgtgctccctgacattcaaagagacgcggctcatataatcgaagaaaaagccaggctaaattccttgcaataa

SEQ ID NO: 379475 - DNA, 288 bp, Salmonella enterica
atgctcgatagcttttttgaacggctctacattttctgcggcgagtatcaggttctggacagtggtattctgagtatccatctccagacacgcgatttcttttttctggtctgtatcgacgtgataaagatattctccatcgccaatatactgtgccagaacgcgatggcggaacggcagtgtcgcaaccacggtcagttgagggtttgctggcgggttatgagattcctgtatcccgttttctccggcaggagtgccagcaccgtcggcgagttctgtttcatctga

SEQ ID NO: 379476 - DNA, 267 bp, Salmonella enterica
atgcacaccgctttttcttccccgtcttctgcccctgccgcgccgctgatgccggtctctgatgccgttcaggagcgctttatccgcctgcctgaagtgatgcatctgtgcggcctgtcccggtcaaccatttacgacctcatcagccgggaagctttcccgaagcaaatctccctcggcggtaaaaacgtggcgtgggcgcagtctgaaatcaccgcatggatgactgaccgcattgccgaacgcaaccggggctatgacgcatga

SEQ ID NO: 379477 - DNA, 375 bp, Salmonella enterica
atgggttggataggtgtagatcttgatgggacgttagctaaatacaaatcgggacagggctcaaaaattggagaccctgttccacagatggttagtaaactgaaagactggcataaggaaaaacaagaggtaagaatatttactgcgcgcgcagaaacgctgcatggtaaaaacgaagtaataaactggctcaagaaaaacaaccttccttcattcactgtaacaaatatcaaagacagtaaaatgattgagctatgggacgataaagctatccgggttgaaaaaaatcagggaaaagcttgttcaggatgcgcaagcagttctcgggagtaccattctgcagttaacaatgactcgtatctcaccgactgttga

SEQ ID NO: 379478 - DNA, 1359 bp, Salmonella enterica
atgccaaataactaccatcaatacatcgaagacgttagtgatgatataaagacatgtcttgaagggatggggtgccaacccatactttttgttggctcgggattaaccaagagatatctttctggcccaaattgggaagaacttctccagcaacttgctaatgaatgccctaacatcgataaaagatttgcctattataaacagaaatatcctgagctgattgatatcggcagtgtgttctctgattcttataacgaatgggcatggagtgatggagaaaatgaatttccagcagagttatttgatgcaggcaatgaaccaagcatttattttaaatacaaagtatctagtattttcaattcattattacaagaaaaagaaatcatagacaatggtgaaattgaacttctgagaaagattcaccctcattcaattatcaccacaaattacgacaaattacttgaatcgatataccctgaatttacccccattataggccagaaaatcctttacgctaatcacggtagtattggcgaaatacttaaaatacatggttgctgttccacacctgaaagcataataataaatcgcgatgactacgatgacttcataaagaaaaagaaatatttaagcgcaaaactgcttactttctttgctgagcaccctcttctatttataggttacagcgcagaagattcgaacataaaaaacatactatctgatattgatgaactactttcagaaaatggagatgtcattccaaatatatacattttagaatggacgggcaaacaaaatgaaagtgaatacccacgccgtgaacggttgattcaagtatctgcaaacaaaagcattagaataaaaagtatagtggcaaatgatttctcttgggtattttcggcgtttggtgcgaatagagcacttgataacataaaccccaaattattaagggcacttttagctcgcacttacgacctcgtcagaacggatatacctcgcaatcctgttcaggttgattaccgggttttatcaagcattagcgaatcagaaggtgagttagcgaaattatatggcatagccacatcgtcagatggtatggcatttaatgccagttatccttttactttaaccacgctagggcaatcacttggtttcaaaggctggcatgatgcaaacaaattattagaggtagttaaaaacatcacaggtgtagacatcaagacattcgataacaaataccactatgcaataatgaatggtgatgagatccagtctcatagatattcaaactatcttcgagaactcctcgagaaagttagggatggagaggagtttgagttaggaataaaggctccataa

SEQ ID NO: 379479 - DNA, 417 bp, Salmonella enterica
atgccaataataaccgcaaaagtatcagatgaacttttggcctatatagacctggtttcaggaggtaatcggtcagattatctgcggcgctgccttgaagctggcccaggtgatcgggagtccgggttgaaaatagttgccgaccggctgagcgacgtaaatcgcaaactggattatctttttgaccgtgcttcagatgcggattttggcccactgcgcgatgagctgaaggcaataaccgaaacgctatctggcgtaaaattcccaccggcaggacagatgatgttgcatgaatcactcgctattgaaacgctaatcctcctgcgctcgatagcagaaccgggcaaaaccaaagcggcaaaagcagaggttgaacgtaacggctacaaagtctgggaaccaaaaaaggagcgctga

SEQ ID NO: 379480 - DNA, 420 bp, Salmonella enterica
atgaagcccaaaagtatcagggcggcacttcagttgatgttgccggaaatagaagaaatgatgtcactgggagtttccagggcggaaatttataaagcagtttctgaacgcttcggcctggaaggtgtgaacgttcgtagctttgatacgtccctatatagagcgcggcaaatccggaaaaatggaatgcacaatacacatggaaggatgccgaacaatgaagatagtgtattgcacaatacacaaaatggaggtagcgagaaaggtgcagaggaaagtgtattgcacaatacacaaacgccgcctgagcctgaaccgcaaggaagtgaaaaaaaagaaagtcccggcattattgataaagagttcttcaataaaatcagtgaagatttcgaccctaagatgttcaacaaaaaattctga

SEQ ID NO: 379481 - DNA, 717 bp, Salmonella enterica
atgaaagtagcggtaattaattacagtggcagcgttggtaaaaccttaatttcatcctacctgttagccccgcgtctgactggagcaaaattctatgcggttgaaactatcaaccagtctgcttccgatctggggattgagaatgtttccatttttaaaggtgatgacttttcacggttgattgaagatattgtttttgaagatgccgggattattgatattggtgcgtcaaacgtagaagcgttcctgatggcaatgtcccgctttgacagtggcgcgaatgaatttgataagtatgtaatcccggttacgcctgataataaggccattgatgaaagcatgaaaacagcacatacgttaagtaaggcaggtgtaagcagcgataaaatcatctttgttccaaaccgcattagtccagatagtgaagtagaggatgtactggcgccggtatttgaatttgtcaaacgaacgaaaattggcaaaatcagcaagaaatctgttatttataacagtgaagttttcgaatatctcgcgtatcaccgtatctcattcgaagcattgaccgctgaagatccagaagaatttaaagcccgcgctaaacaaacaacggatgctgacgagcgcaaaaaactggcccgccgttatacctacatgaaacaggcaattcctgttaaagctaatctcgataaagcatatgcggctttaatgggagaataa

SEQ ID NO: 379482 - DNA, 369 bp, Salmonella enterica; identical to SEQ ID NO: 97156

SEQ ID NO: 379483 - DNA, 345 bp, Salmonella enterica
atgaatgaccgacagcgtgaacaagcccgtattcgccaggcccggcgccgcgcgcgactcaaagaggaaggcgctagcgtgacagtcacgctaacaaaacaggaagaagcaatgttacaggagctttgccgggttcgccgtccaggacgaacagcctattcaacgaatgagtttttccaactgctgctgatccgaaactggcaacagtggcaggagcaaaaggcgcagctggggaaatgccaggcttgcggaaagctgaaagcggagggaggttgcggcggcgaacggcagagcgaaacctttaactgctggctagccgtcgaagcaaacgagcttaatgtgtag

SEQ ID NO: 379484 - DNA, 321 bp, Salmonella enterica
atgaccacacaaacccttgagcagactcttgaagattttcgtcgccagtgtgagagttttgcgcgcaaacagcagccccgctgcggcctaatttatgaactgtatcagcgccgcctgagcgcggatattgacggctatcttgctggcgttccggccgagtatcgggaagaactgatcgcggtagcgcggcgtgaatttgactatctgacccaagacgagatcgcggaagaaatccggcaggatcgggaaaacgattattgcagccacggtattgagcgtaattgttgcccgctgggctgcggagatctagacgattactga

SEQ ID NO: 379485 - DNA, 180 bp, Salmonella enterica; identical to SEQ ID NO: 97153

SEQ ID NO: 379486 - DNA, 510 bp, Salmonella enterica; identical to SEQ ID NO: 97269

SEQ ID NO: 379487 - DNA, 285 bp, Salmonella enterica
atgtatcactatctcgtttttgtccctctcgcattaattattagcgccgctgcgcttgccctgccctggtttatcgttcgtgcgggatacagggatctggtgcagatcacctgcgcctgcgtctctattctgggcctgtgtgcggcgacaggggttttcagctacttcgataataagccgcttgcgtttctgtacggttgcggcgcgctggcgtgctttttgtacgcggtagactgcgcgataccgttgtatatgacgcgtaaaaagccacgtaagcagctgtaa

SEQ ID NO: 379488 - DNA, 297 bp, Salmonella enterica; identical to SEQ ID NO: 97149

SEQ ID NO: 379489 - DNA, 678 bp, Salmonella enterica
ttgcttaacgtgagttttcgttccactgagcgtcagacccctattacgtcgaaaaaaaggtctgctgttactgttgttgattctggtctgcacgatacttttgcttcatggtgtcactacgatttactgatgtggtcgaaaatctttaaaagcgaacccccggacgtcacccctccggggccgttctgctgtgctgcgcatcgagccgctacgcgtctcgccccgctcacgcgggcagctgccactgacgcctccggcctgcggcctccgcgctccgcttggcaaccccttcccctgctgccgctcatttccctttcagcctcctatcatgattcgtctcctgcattatccgtggattgtgcagctcagtggggcgctggccgtgacggtgcggtgtcccccgtaaccggccgcgcggcggccgctaactcgcagtacggcgccgcgacccgcaggcggccgccgtacccgcgcgcaggcgcgcggcgcccactgcgcacccccgtgggggacgtgcggcagctgcgtggcggcgggctgggttatggcttagcagggaggggggttggcctgttgctccggtcagtcccgcagtttccggcgatttgcggccggtgtccggtggagtccggcgcggtcgccttccatgccctgacgggcataaaaacaggtaaataa

SEQ ID NO: 379490 - DNA, 240 bp, Salmonella enterica; identical to SEQ ID NO: 16823

SEQ ID NO: 379491 - DNA, 405 bp, Salmonella enterica
atgttagcgacacttcaacaccctaccgtctggcaattgccagatcggttaatgcttttggaactgttaatgttcgattaccgaaattccgatcaggagcgctacggccagcaaatctatcaccactatcgtaaacagggtaatcatcgctgggatacttctgttcatcaggatagcggcggccaatacgcgattattttccggcactccttcagcaaaaaacaggctgatggcgttaagcgaacgatgatccgcgatgaaaccgttatacgggcaggtacggcgcaggagctgacagaagcgacatttcccgacttccaggatagcgatattctgaaggcgtcggatttctttaagtcgcttatccagcgcaaagcggcagacgtaacacaaaccgatatttga

SEQ ID NO: 379492 - DNA, 426 bp, Salmonella enterica; identical to SEQ ID NO: 16821

SEQ ID NO: 379493 - DNA, 441 bp, Salmonella enterica; identical to SEQ ID NO: 97223

SEQ ID NO: 379494 - DNA, 1266 bp, Salmonella enterica
atgtttgcgctgattgatgtcaatggcatgtacgccagctgtgagcaggcatttaggccagatctggcaaaccgagcagtggccgttttatccaacaatgacggcaacattgtggcccgtaattacctggcgaagaaagcgggcctgaaaatgggcgatccgtacttcaaagtcagacccataatcgagcgtcataacatcgctatttttagctctaattacactctttatgcctccatgtcggcccggttcgcggccgtagttgagtcccttgcaagccacgtcgaacagtattcaatcgacgagctttttgttgactgcaaagggataacggccgccatgagccttgacgctttcgggcgccaactgcgcgaggaagtcaggcgacacacaacgctggtatgcggggtcggtattgcccgtactaagacgctggcgaagctgtgtaaccacgctgcaaaaacatggcccgctactggcggggtggttgctctggacgatggcgccagactgaagaaattaatgagcatcctgccggttgcggaagtctggggcgtcggccatcgtacagagaaagcactcgccacaatggggatcaaaacggtgctggatttagccagggcagatacgcgcctaatccgtaaaacattcggcgttgtgcttgaaagaacggtacgggagttgcgcggcgaggcttgcttcagcctggaagaaaaccctcctgcgaagcagcagattgttgtgtcgcgctcattcggccaacgcgtagaaaccctgacggacatgcagcaggctgtcaccggatttgcagcgcgcgcagctgaaaaactgcgtaatgagaggcaatactgccgcgtcataagcgtctttatccgtaccagtccttattcagtgcgtgatacacagtatgccaatcaggcaaccgaaaaactgacggtggcaacccaggacagccgcacgataattcaggcagcacaagccgcgctggcgcggatctggcgggaagatattgcgtatgcaaaagcaggggtcatgctggcagattttagcgggaaggaggcccagcttgatttattcgactctgctacgccttcagctggcagcgaggctttaatggctgttcttgatggtataaaccggcgtggaaagaaccagcttttttttgcaggccagggcatcgataactcctttgccatgcgtcgtcagatgttgtcacctgattacacgacagactggcgctcaataccaatagccaccatcaaataa

SEQ ID NO: 379495 - DNA, 792 bp, Salmonella enterica
gtgaatttgcctacacccgaaacctacgatgaacttcagagagcctacgattttttcaatgagaagctattcagcaacgagctgccgccatgcctgataacgttgcagcgtgagaagcgaacgtatggctattgttcctttaagcgtttcgtcggccgtgagagtgggtacacggtagacgagatcgctatgaatccggtgtatttctcgatcagaaccataaaggccacgctttcaacactggtgcatgagatggttcatcagtggcaattccattttggcgagcctggccgccgtggctatcacaacaaacagtgggcggcccggatggaacgggtaggactaatgccttctgataccggcgaaccgggaggcaggaaagtgggccagagcatgacccattatattattgccggtggccctttcgatatggcctgtgatgaactgctgacaggccatttccggctttcctggatggacaggtttccgccttaccagcctaagcctggcgctgtgctaagccctacaggaaaaggctatattgacgacgaggaagatgatagcgaacacgaacaggaggtggaggaagggcgcgacccggttgaactcgacgacgagatcatagaggccatgcgatttgtaaccccgccgcctgaagcgccggtgaacaaaacaaaccgggaaaagtacagctgcccggtgtgtcatatcaatctctggggtaaaccggggatagtggtttactgtggtggcgagcactgtaataaagccgcgttagtagtcttaaaataa

SEQ ID NO: 379496 - DNA, 342 bp, Salmonella enterica
atggctcagaaaaacagaatttcagaaacagaatggaaacagctgctgccgcaaatggcttcctttgcacacatcacaacagatattggctattccgtgcttgtcaaaggtgagaaatcatcagacgtagccacgcgagtaggccgttccaagcaaaacatttccagcaccgttaagcgaatctgggatttgtaccagaacaccactcttaaagccgagaacggcgaaccattaaaattagttcaggtctggataccagcaagccttgctgaaactgttttaaaagaagccgcgaagtacagcattaataacatcacgacctccgaaatggaaaaaaaataa

SEQ ID NO: 379497 - DNA, 720 bp, Salmonella enterica
atggataagttgctgaacaaaaagataaaagttaagcagtctaacgagcttaccgaagctgcttactacctctcgctaaaagcaaagcgcgttctctggttatgtcttatgcagacgtatttcacagcttcagtaagcgaagatgatgatgagatggctgtactcggtgactctactttcaaagtaaaggtggctgactatcagcaaatttttcaggtaagccgtaaccaggctatcaaggatgttaaagaaggcgtgtttgagttaagccgttctgcggtaatcttttacccgaaagaagggagttttgactgcgtcgcgcgcccctggctaacagaggctggcagccgatcagctcgtggtatctgggaaatcgaatttaaccataaactcctgcggtacatttacggcctgacgaaccagttcaccacctactcgctccgcgattgtggcagtcttcgaaatccacggacgatccgcctttatgaaagtcttgctcaattcaaatcttcaggcttatgggttactactcatgcttggttaaatgaccgtttccttttgccggaatcccaacagaagaacttggcagagttgaaacgatctttccttgatcctgctctcaagcagataaatgagaaaacacctttacttgctaagtatagtattgatgattcaggaaaatttctgttctcaataattgataagcaaaatcccgtctga

SEQ ID NO: 379498 - DNA, 1290 bp, Salmonella enterica
gtggacgcgaacggccagctcctgtcccgctatgaggccgggatatggaaaatcattccaccgtcagactttgcccgcgacgtggccgggttatttcagcgtctgcgtgccccgttctcgtcggggaaaattgcctcagtggtggagactctgaaactgattattccgcagcaggacgcaccagcgcgccgtctgattggttttcgtaacggcgtactcgataccgccaccggcactttcagcccgcatcataaatcgcactggctgcgcacgctatgtgatgttgatttcaccccaccggtggagggcgaaacgctggaaacccacgcccctcatttctggcgctggcttgaccgcgctgccggtggcaaaccggaaaaacgcgatgtgattctggccgcgctgtttatggttctggcgaaccgttacgactggcagctctttcttgaagtcaccggccccggcgggagcggaaaaagtattctggccgaaattgcgaccatgcttgccggggaagataacgccacgtcggccaccatagaaacgctggaatcaccgcgtgaacgtgctgcgctgattggcttctcgctgattcgcctgcctgaccaggaaaaatggagcggtgacggggcaggactcaaggccatcaccggcggtgatgcggtctcggtcgacccgaaatacaaggatgcttactccacccatatcccggcggtgattctggccgtgaacaacaacccgatgcgatttaccgaccgcagcggcggtgtttcccgtcgcagggtgatcctgcatttcccggaacagattgccccggatgaacgcgacccgcagctcaagaacaaaatcgcccgtgagctggccgtgattgtgcgccagctaatgcagaagttcagcgacccgatgacagcacgtgccctgctccagtcacagcagaactccgacgaggcactaagtatcaagcgcgacgctgacccgacctttgatttttgtggctatctggaggcactgccggagcctgaggggatgtatattggcaatgccaacatcattccgcgtcagccgcgcctgtatctgtatcatgcctatctggcgtatatggaagcccacggctacaggaataccctgagcctcaccatgttcggtaaggggctgccagccatgctgaaagagtacgggctaggttatgagaagcgccgaaaaaatcagggcatacaaaccaatctcgcattaagagaggaaagcaacgccgactggctgccgaaatgtgatgaccttgtagcaaaataa

SEQ ID NO: 379499 - DNA, 597 bp, Salmonella enterica
atgataatcggctatgcgcgtaaatcgacacatcttcaggatgtaacgcatcaggttgatgaactgacaaaagcgggttgcgagcaaatctatcatgaacagatctcacgcggcggcactaaacgcgccaaaaatggtgccccggaactggagaactgtctgaaggcattgcgcgaaggtgataccctggttgtttgggcgcttgatcggctcggcggttcattgagccaggtgattacgttgcttgacgacctgaaaaagcgcggaatcacctttatagccatcaaagacagaatagatactagcgctcctgttatcggggaaatctatactcatctgatggctatattctctaactttgaacgcaaccgcaatattgaacgaacgagatctggactcgcagctgctcgcgcaaggggccgtgtagggggaagaaaaccgtcactttcggaagatgatattaagcaaatgaaaattctgcttgctgatcctgaaatgacagtaggagctgttgcgaagcgcttcaatgtttctcgcatgactatttatcgctacacgacaaaaggcaaccattcagagaaaataaatgatgaataa

SEQ ID NO: 379500 - DNA, 138 bp, Salmonella enterica
atgctctacgctgaccgtaacgcgaacggcatcatcatcaatatgctgcagggcaaatgtcggctgggtgctattcgtcatgttatcgccctggatgccggtgtcgtccgcgctatccagtacgatgaccggcactga

SEQ ID NO: 379501 - DNA, 552 bp, Salmonella enterica
atgacccccattgcattcaaatatttcggggctatatatgcagggcagttagggatgtctttaacattatgcaatatggtaatggctacgggcctggcttggatatccactaaatatccaaaatggggagtaatggtttccaacaaacagcttgcggaactgagtaaatcgttcaaaagtgcagtaatgcaatcatccttttttgtcttgacaggattaactggtgtatacatttcattatggttattgaaattatctggttcaaacattggcgagcggtttttgggattgcaggattttttctttttatctttagcaattattggtaatcacattgtagcttgctttgcaacctatataagagcgcataaaactgaaaaaatgacattggcatcatgtataatggctctcttgactataactacaatgttgtttgttgcatatttagagtactcgaggttctacatgttaatgtatgcagcactaacgtggttatattttgttcctcaaacttatataatctttaaaagattcaagagttcttatgagtaa

SEQ ID NO: 379502 - DNA, 438 bp, Salmonella enterica
atgcacggtgagcgcggtcgcatagccctccgcaatccacaggcgttttcccgcctgttttttcccttcgatggtgtggcacgctccttttaccgccccgcctttcagggtgcgtttgagaccgtcagaattaataagctgaacgttaaccagcgccccggcatcgtcatacagcgggacaaccacatcaccggcgcgaaacgtcacgccgccggttttatgcatgacggtgagcgtcagacattccagagcggggaaacccttgcgggtgaggtaggcgttgccggtggccggtcgggttttctccatgaacctgacggccagcgcggccgctgcttttcggtcagcctccgttccggcctctgcggctgcaattacctccggggcaaccggcgacaggttgccggtcacggcattcaccttttgggctgcctctga

SEQ ID NO: 379503 - DNA, 270 bp, Salmonella enterica
gtggcctgtgcatggctgaccctgtgcgaacgtcagcaccgctacccgcaactcaccctcgacacactggaaagcgccattgccgccgagctggagggattctacctgcgccagcacggcgaggaaaaaggccaccagattgcctgtgcactactcgaagatttaatggaagccggaccacttaaagccgcaccatcgctgtcctttctcggactcgccgtgatggatgaactttgcgcccgccatatcaccgcaccggtactgcactga

SEQ ID NO: 379504 - DNA, 366 bp, Salmonella enterica
atgcacggtgagtgcggtcgcataaccctccgcaatccacaggcgttttccggcctgttttttcccttcgatgatatgacatgcccctttgacctgaccgcctttcagggtgcgtttgagaccgtctgcattgataagctgaaggttaaccagtgcgccggtatcgtcatacagtgggacaaccacatccccggcgcggaacgtcacgccgccggttttatgtgtggcggtgagcgtcaggcattccagcgcgtgaaaacccttgcgggtgaggtaagtgttgccggtgtctggtcgggttttctccatgagcctgacggccagcgcggccgccgctttgcggtcggccacagtttcggcctctga

SEQ ID NO: 379505 - DNA, 315 bp, Salmonella enterica
gtgaaaattgccatattgtccagggatggaacgctctattcttgcaaacgtctgcgcgaagcggcgatgcggcgcggccatctggtcgagatactcgatcctctttcctgctatatgaatattaatccggcagcgtcgtcgatccattacaaggggcgtcgtctgccccattttgacgccgttattccccgtattggttcggccattaccttttatggtaccgctgcgctacgtcagtttgagctattgggtagctatccgctgaatgaatccgtcgccattacccgcgcgcgcgataagctgcgatcgctataa

SEQ ID NO: 379506 - DNA, 396 bp, Salmonella enterica
atgttgagtatttttaaaccagcgccgcataaagcgcgcttgccagcggcggagattgatccgacctatcgccgattacgctggcagattttcctggggatattctttggctatgccgcgtattatctggtgcgcaagaactttgccctcgcgatgccctacctggtagaacagggtttttcacgcggcgatctgggctttgcgttgtccgggatttccatcgcttatggtttttcgaaatttataatgggttcggtgtccgatcgctcgaatccgcgcgtttttctgccggcagggttgattctggccgcagcagtcatgttgtttatgggctttgtgccgtgggcgacatccagcatcgccgtgatgtttgtgctgttgttcctttgcggctag

SEQ ID NO: 379507 - DNA, 879 bp, Salmonella enterica; identical to SEQ ID NO: 369410

SEQ ID NO: 379508 - DNA, 264 bp, Salmonella enterica
atgcgcgaacattattttttaacaatgctacagtcactcagttgtgatagtattgacaaatatactcaaacgatgatttgccttgaaactaccgtactgtgccatttacttaacaatgccagcaggcaacttatccatacagattttaccagcatcttttcaatttatgaaaaaaaaataataaacgataatagttatattaagttaaatcaaaaggagtttaaactaatattctctaacatacttattcacatctctcattga

SEQ ID NO: 379509 - DNA, 1044 bp, Salmonella enterica; identical to SEQ ID NO: 372400

SEQ ID NO: 379510 - DNA, 963 bp, Salmonella enterica; identical to SEQ ID NO: 372422

SEQ ID NO: 379511 - DNA, 582 bp, Salmonella enterica; identical to SEQ ID NO: 370530

SEQ ID NO: 379512 - DNA, 582 bp, Salmonella enterica; identical to SEQ ID NO: 370530

SEQ ID NO: 379513 - DNA, 423 bp, Salmonella enterica
atggcgcggctggcgctggggctgcgcacccgcctgcagaatgatgccggcaatgttgagggctggctcatgctggggcgcaccggtatggtactgggtaatgccggtaccgccaccggggcctatgcaaacgcttaccgtctggacccgaaaaaccgcgatgcggcgctgggctacgcggaggcgctgacgcgctcgtccgacccggaggataaccgccgcggcggggagctgctgcgtcagctggtgagccgcgaccacacggatatccgggtgttaagcctgtatgcgttcagcgcctttgagcagcagcgctttggcgaggcggtggcggcctgggagatgatgctgaagttactgccggcgggtgacgcccggcgggcggtgatagagcgcagtatccggctggcgcaggagaaataa

SEQ ID NO: 379514 - DNA, 990 bp, Salmonella enterica
gtgagagcgttactgacccctgaaattgctcctcgtatgggcgttgtattgttcaggccgggatcggaactgatgcccctgtttatgcaggggcgtgttctgcttgaaccagagccggagcaattttcatctttcgccagcggcgcggtcccggcggtatcacagccgctggcggatgatcctgctgttcgtgatgtgttctgtaatgagtcggttatctatcgtgctggtggtctggatagtctggaaagctggctactccgggggaatggctgtcagtggccgcattcagactggcacagcgaacagatgacaaccatgcgccacgctccgggggcaatccgactgtgctggcactgcgataacctgctgcgcgaacagtttacggaacggctgaaatcaatagctgtggagaacacgacaaaatgggttttatcggttgtttgtcgtgatctgggttttgacgatatgcacgcagttactctcccggaactgtgctggtggatggtacgcaataacctggcagaagtcttaccggagagcgctgcgagaaaagcattaaggatgccgaaggcaattgtccagtcagctacccgtgaaagtgaaattgttccctcggtgctggccaccagcattgtacaggataaggcgaaaaaggtactggcgctcagggttgatccggaatcgccggaaagcttcatgttacgtccgaaacgccgtcgatgggtcaatgagagatatacccgctgggttaaatcccagccgtgcacctgctgcgggaagcaggcggatgatccgcaccacctgataggctacggtcagggagggatgggaacaaaggcgcatgacctctttgtgctgccgttgtgcagaacgcatcacaatgagttacatgcggacaccgtggcattcgaagagaaatacggctctcaactggagttgatatttcgttttatcgatcgcgcgctggcaattggcgtgctggcctga

SEQ ID NO: 379515 - DNA, 999 bp, Salmonella enterica
atgaataagaaggtactgaccctttctgccgtgatggcaagtctgttattcggcgcgcacgcgcacgcggctgatactcgtattggcgtgacgatttataaatatgacgataactttatgtccgtggtgcgtaaggctattgaaaaagatggcaaatccgcgccggatgttcagctactgatgaatgactcgcaaaacgatcagtccaaacagaatgatcaaattgacgttttattggcgaaaggggttaaagctctggcgattaacctggtcgacccggcagccgccggtacggtgattgagaaagcgcgcgggcaaaatgtgccggtggtgttctttaacaaagagccttcccgcaaagcgctggacagctatgacaaggcgtattatgtcgggactgactctaaagaatccggtgtgattcagggcgacttgattgccaaacactggcaggcgaatcagggttgggatctgaataaagacggtaaaattcagtatgttctgctgaaaggcgagccggggcacccggatgctgaagcccgtacgacgtatgtggtgaaagagttaaatgataaaggtattcagaccgagcaactggcgttagacaccgctatgtgggataccgcgcaggcaaaagataagatggatgcctggctgtctggcccgaacgctaacaagattgaagtggttatcgcgaataacgatgcgatggcgatgggcgcggtagaggcgctgaaagcgcataataaatcgtcgattccggtctttggcgtcgatgcgttaccggaagccctggcgctggtgaaatcgggcgcgatggccggtacggtactgaatgacgccaacaatcaggcgaaagcgacattcgatctggcgaaaaacctcgccgaaggcaagggcgcggctgacggcaccagctggaagattgagaacaaaatcgtgcgcgtgccttatgtcggcgtggacaaagacaatctgagcgaatttacccaaaaataa

SEQ ID NO: 379516 - DNA, 249 bp, Salmonella enterica
atgaacgaagctgtactactgggtgaaggtttcaccctgatgtttttagggatggggttcgtactgagctttctgttcctgctcatctttgccattcgcggcatgtctgccgtcgtcaaccgcttcttccctgaaccggctccggcgccgaaggcggcacctgccgccgccgcgcccgtcgtggacgacttcacccgcttaaagccggtgattgccgccgccattcaccatcaccgccaccacgtttaa

SEQ ID NO: 379517 - DNA, 531 bp, Salmonella enterica
atgatcctcattatttatgcgcatccgtatccgcatcattctcatgcgaataagcggatgcttgaacaggcagggacgctggaaaacgtcgaaatacgttcgctttatcacctctatcccgatttcaatattgacgttgccgccgagcaggaggcgctgtcgcgcgcgagtcttatcgtctggcagcatccgatgcagtggtacagcgtccctcctttactcaaattatggatggataaagtcctcacccacggctgggcttacggtcatggcggtacggcattgcatggtaaacatctgctgtgggcggtaacgaccggcggtggtgaaaaccactttgctatcggctcccatcccggatttgacgtcctttctcagccgctacaggcgacggcgctctattgcggcctcaaatggctgtcgccgtttgccatgcactgcacgttcatttgcgatgacgacaccttacaggcgcaggcgcgtcagtataaacagcgtttactggcatggcaggaggtgaatcatggatag

SEQ ID NO: 379518 - DNA, 633 bp, Salmonella enterica
atgatacaggtgaaagctggcgagaataccgggggaagagaggctatacataggttaatggctgcctacgattttaagtccagacaacaactgtgtgatcacctaggtgcatccaaaagtaccatggcaaacagatacttaagagatagttttccggcggagtgggtgattcagtgtgctttagaaacgggagtttcgttactgtggctcactaccggacagggagagccaggttcaaatattgaccataaaaaagatatcaatttcgtgaactccgccaaagttaaacctctttcggaacttgtttcccctgaaattgacaaggcaactctcaacggtggtttgttggttgaggcaggaaaagcaatcattgataccagcctgcttccctcagactcaggcgacctattgttagttaatactgctggagattcttatttagtagaccgcagccagactccaccagttaatggcatatggttggtagatatcgacggaataaaaagtatcgttaagttaacacgtctaccaggaaacagattggtggtgcatcaagacgaatcatcctttgagtgcagcctagacgacattgaggtagtgggccgcgctttaaaaataatcaagagcctctaa

SEQ ID NO: 379519 - DNA, 732 bp, Salmonella enterica
atgtcaatcagatatcgccttgtttttcgtcaagaaaagaataataggctaaaaatgaaaattaataatgtagcgttaacaatatctcttgctgtaatcctaactggttgcgtgccacatgcttctaaccgaaatatcactactattgaagtggtgaagcctgctattgggcaaagtgctaccgcctacatgggcgatcccattatcacatctgctactggatttaaaacggacgtactagaacttggtgcggctaatggtgcattgtcttctatcgctgctggtacatattgcagtgaggggaatggaatttaccgcaattatcataaccctcaagctgttgcgttaaaaaatctctatgggcaaatcggtaactatgttgattatgttagttacgatgctgcaaaaaatgagatatcaccgccaaatggcacttcttatactgcatcagaaatttctatcaaacatgttcctgatgggctgtgtcgagtgagtaactcattggttaagactatcgaatacaatggaaatgcaggcggtgtaatgaagttcacctatcgtgaatttgcaaacgatatggctcgtgcagcatttacaacagatttttctgtagattctaagggaagtgatgttatcgcttacaaaggtgccaagttcaaagtgaacaaggctgataactcgtctatttcttatacaattatttctggctttgacaaggctgtcacgttctag

SEQ ID NO: 379520 - DNA, 1665 bp, Salmonella enterica
atggctaatttgttagattggaatacacttcatcacaaagtacaagcatacttggatcctgagaatggaatcgataaaccacaaaaagcttttccaattttgatggtggcaacgttactaaatgtatctgatgaagaagctgaagatgccataactgatggttcaatggatagaggtgttgatgctgtttatgtcgatgaccgtgatggcaggaattctatccatatatttcagtttaaatattctgatacctttgagaatactaaaaagaattttcccagcaatgaaatcgataagttagtgtcattctttgatgacttgttggatttaaataaatctctcgagaaaacttgcaatccgatattatggaataaaattaaagaaatttgggctgcacttgagaaaagtaatccttccattgaagttcacttttgtggtaacacaatggaaatgcagaacggagaaaaagaaagagccaatgcgtcattaagtaaatataaatatttcaatgttcaccatcatagtttggacactattgttaattattttgttgaaagaaagaatagcgttattgatgagcagttacagatagtggataaggactattttgaccgtaccgatggcagtattagagggttaatatgtactgttgaagcttctgaaattgtaaggataattacaaaccctgaaaatccaaaggaggttaggaaagaaatttttaatgataatgtaagagtttatttaagtcgaacaaataaaataaacagacgcataattgaaactgcattatcagatcgcagcccattattttggtatttgaataatggaattactgtaacttgtgactctttttcttatataaaagggaaaagagctccattggtagaattaaaaaatatccaaatcgtgaatggagggcagacatctaatgcattatttgaagctagcttaaattccgaagaaagactggaagatgttttaatattagtaaggataattgaaactaaatctcaaccagttagtctggctattgctgagtcaacgaacagtcaaactccaattaaaagtcgagaccttcgttcaaatgatgatattcagaaaaaattagaggaagcttttgagggcatggggcttttttatgatagaaaggatgggcagcattcgaaccagcctaaaagtgtcagagttgatgctttgagtgccggacaagctcatttagcttattcgctagatttacctgaagtagctaaaaaggatagggggaggattttctcagatctttatgaaactgtatttacagatgaattaatggctgatgagcttctggcttctatcaaagtactttcagttattgaaaataagaagaaattattgcaatcctctatcaggaaagaggagaagttcaattctgcgcatatgtttttaattgatggtgcttatcatgtgttatttgcggtaggacaaatctgtgatgctaaaggcgttgatagattgaattatcaaaaagcaattacgtttgttcctgctgcgataaaatatataagtgcaatggtcgaaaaagcccagcgtgatgatgcttcattttcatttaataggtacttcaaagacgcaaagactaaaaccaagattgctgcttatattcagggtatggaaaaaggtttgtaa

SEQ ID NO: 379521 - DNA, 429 bp, Salmonella enterica
atgacgcgtgcgctggcagtagtggtagcgctggcattcgttgcgctgggctggcagtcgtggcggcttaacagtgccagccacaccatcgaaacgcagctcgcggcgctgaaaagcaaagcgcaggaactgacgaagaaaaatagccagctgatcggtctgtccattctggctgaaaccaacaaccgggagcaggcgcggctctatgccgaagcagaacagaccagcgcacagctgagacaacgacaacgccggatcgaggaactgaaacgtgaaaacgaggatttgcgccgctgggctgacgctcctttgcctgctgacattatccggctgcgggagcgtccggccctcgccggaggtgcagcttaccgtgagtggctgtcccagagtgacgcagtgccgcttggacaggtcagcgccgcgcagtaa

SEQ ID NO: 379522 - DNA, 852 bp, Salmonella enterica
atgcttactgttggaatatatggattcaatatcaccaaagtgactcatttctcttttggcactatgtttccgacgtgtaaatccatctcagaaataataaaaaaaatgaaatcccgcgatgaattacaccttacagcatttctcgaactagatataaatgacgccaacgaatgccgagatatactatttcatctaacagcaatattatccttcattgaacagcgccccgtatcatttggctactcattaagaaagcatgaaagcatgggcaatcttgatgacgactaccctaaactcattaacatagcgtatagcattaagagcacgggaataataatcaaagaagattattattcaaaaaactccagaagatattttatagaggctgcattaaataaaataatcattgaaaaagatcgtcactactccaccttacttcataagaacgtacaggtcttttccacccctcaaagatacattgatgtatcatactaccttttattttcaggcttagagtccatagctcgccagcgagagaatgaccttagtaataacgcaccgtcagtattgtacaaatatctttcgaaatttaaatttgatataaaacagcaagacaacaaaagaccaccgcgttcattggacatttatagtggtttaaggaatgcactattccacaatggggaatatcaaactgcccccatgaaaagaaatggtactgaatgcacattccttcttaaggattactactcctatttcaggcgtctaaacagccttgtaattttaaaagaggctaattttgaagacggtaaaattaattgggattttgtgaactacagacactattttaaataa

SEQ ID NO: 379523 - DNA, 606 bp, Salmonella enterica
atgaatagtctgttgccgccgggttcgtcgccgcttgagcgccgactggcgcagacctgcagcgggatttccgatctgcaggtatcgctgcgtgatttgtggaacccggcaacctgcccgatcagattcctgccttatctggcctgggcgttttctgttgactgctgggatgagagctggacagaaagcgtcaagcgccgcgttgtgcaggacgctttttatatccatcagcacaaggggacaacccgcgccgtgcggcgcgtggtggagccgttcggcttcctgatccgcatcattgagtggtggcagaccggcgaaacgccgggaacgttccgtctggatattggcgtacaggatcatggtatcaccgaagacacctatctggagcttgagcgcctgataagcgatgccaaaccatgcagccgtcatctggttggtatgtccatcaacctgcagacaggtggcccgtattttgtgggggctgccacctacaccggcgaagaaatcacgatctacccgtatatcaacgaaaccattatttccggcggcaccgcttatgagggcggggcggtccatgttattgacacaatgagagtgaatccatga

SEQ ID NO: 379524 - DNA, 1854 bp, Salmonella enterica
atgagcgcaaaattttataccctgctgacggagatcggcgcggcgaaactggcaagcgccgccgcgctcggtgtcccgctgaaaattacccatatggcggtgggcgacggtggcggtgtgctgcccacacccagcgcgcaacagaccgcgttagttgctgagaagcgtcgagcagcgctgaatatgctgtatatcgacccgcagaacagcagccagattattgctgagcaagtgatcccggaaactgaggggggatggtggattcgtgaggtcggcctgtttgatgaaaccggcgcactgatcgccgtgggtaactgccctgagagctacaagccgcagctgacagaagggagcggacgtacgcagaccgtgcgcatggtactgattaccagcagcaccgataacatcaccctgaaaattgaccctgcagtagtgctggcaacccgtaaatatgtagatgataaggcgctggagctgaaggtatatgtagacgacctgatggcaaagcatcttgctgcgccggacccgcattcacagtatgcgcagaaggacagccctacactcacagggattccaaaggtaccgacgccagcggcgggtaacagcactaaacagattgcaaacacggaatttgtggcatcgtctatcgcggcaatagtggattctgcgcctgcagcactggatacgctgaacgagctggcagcggctctggggaatgacccgaactttgccacgacgatgataaacgctctggctggaaagcaaccgctggacaatacactgacgaatttaagcggaaaagatgtagctggtcttcttgcatacctcggtttaggcgaaacgataaatctggccactggcgccatgcaaaaagaccagaacttgaatgatgtgccagataaagcgctggcccgtcagtccctccagcttggcaacagcgctacactcaacgtcggcaccacaccagacactgtagccgctggtgacgacatccgtatttccaccgccaaaagagctatagacgacacccagaccggtcttggtgctcagcccgttatgtgggtaagtaccgccgatgatttgagcattctgccgtctggtgctcgccggtttgccagcaataaagctccggcaacaatattgccggtaaacgattatgttttcctggaagtgattgccaaacgcgattgcgtagacggctgcgccgttctgataacagactcagttggtaacacctggattggcgcgcgctgggacgcaaccaatgattccgggtttacctggcgtcccctgatgtcgtgtccgcccggcgttccccttccgtggccgtctgacaccatccctgctggttacgccctgatgcaggggcaagcatttgataagaacgtttatcccttactggcaatagcatatccatccggcactattccggacatgcgcggctggacaatcaaaggcaagcccgcgagcgggcgcgctgtgctatctcaggagctggatggcaacaaatcgcacagtcacagcgccagagcgcaggataccgatctgggaacgaaaggtacgtcgtcatttgattacggaacgaagagctctaatacaacaggcggtcataaccattcggcgggcggcacatacggtggtgattcaatcggtggaaaaattcgcgtccagcatgatggcaatgaccagttaacaagctggaatggcgatcacgcacataccacatggattggtccgcatgaccacactgtatatatcggcccacacggccacgtcgttattgtggacgcagacggtaatgaggaaacaacggttaaaaacattgcatttaattacatagtgaggcttgcataa

SEQ ID NO: 379525 - DNA, 576 bp, Salmonella enterica
atgacttttaaaatgagcagcaaagcgcggacaattacgatttataacctgcgttcagatacgaatgaatttattggggcaggtgatgcgtatataccgccacacacgggattaccggcaaactgtacggatattgcaccccctgatattcccgccagtcatattgctgtatttgacgctgaaaccgaaatgtggagtctgcatgaggaccaccgtggcgagacggtttacgacacaacaaccggcaatcaggtttatatctcctctcccggtccgctacctgaaaacgtcacatcagtttcacctgatggtgaatatcagaaatggaatggtaaggcgtgggtaaaagacgaagtggctgaaacagcggccagacttcgtgaagctgaaggaaccaaaagccgtcttttgcaaacagcagcggagaaaatcgcgccattacaggatgctgttgatcttgaaatcgcaacagatgatgagaaagtgcagctcgacgagtggaaaaaatacagggtgttggtaaaccgggtagataccacaaatcctgactggcctgatgtacctgtaagccagtaa

SEQ ID NO: 379526 - DNA, 801 bp, Salmonella enterica
atgaaattagcactgctgggacgtcaggcactgatgggagtaatggctgtagcgctggtggcgggaatgagcgcgaagagctttgccgatgagggtttgctgaacaaagttaaagaacgcggcacgctgctggtagggctggaaggtacctatccgccgtttagctttcagggcgaagacggcaaattaaccggttttgaagtcgatttcgccgaggcgttggcaaaacatctgggcgttaaagcgtcgttgaagccgaccaaatgggacggaatgctggcgtcgctggacgctaaacgtattgatgtggtgataaaccaggtcacgatttcagacgtccgcaagaaaaaatatgatttctctacgccttatactgtctccggcattcaggcgctggtgaaaaaaggcaatgaaggcacgatcaaaacggctgccgatctgcagggcaaaaaagtcggcgttgggctggggactaactatgaagagtggctacgtcaacatgtgcagggcgtggatatccgtacctatgacgatgatcctacaaaataccaggatctgcgcgtaggccgtattgacgcgattttagtcgatcgtctggcggcgctggatctggtgaaaaaaaccaaaggtacgctggccgtcaccggtgatgcgttttcgcgtcaggagtccggcgttgcgttacgtaaaggcaacgaagacttgctgaaggcggtagataacgccattgcggaaatgcaaaaagatggcaccttaaaagcgctctctgaaaaatggtttggcgctgacgtgacccaataa

SEQ ID NO: 379527 - DNA, 651 bp, Salmonella enterica
atgcccgctgatatccgcatttttcgcagtcagctttccatccggcgtcagggaaaatgccggaggattcccgccactggtaatggtcggcgcgctcagatatttcaggaacgcctcattcatgattatctggtcgccctgcatgacgaatccgggcgtctcgtttccgtttgccgggttaatataagcaatgcgatccgccgccaccaggaactggcttatcttcccgtcaggcatgtcttccatgctcagtccaagtccggccacataatatttgccgtctttggtctgctctattttgacgccccacatggcgttccatttatcgttagcatcctgccactccttcgaaaattgttgcagtttgctggcgttatcctccgtcagttccaccttctccagcagttccttacccaggtgactttcagttatctgccctttgaaaaaatccagatagcctgcggcatcgttgctggcctgcccggtcgcctccacgaatgcggatttaccgacctgatttaccgcccggatataaaaatagtaatccctgccgggcctgatattcacactggccgctatccagtacagcgccgttcccagatatcgtgcggcgttttccacctgatggatatccgtaatctgcgcgtctga

SEQ ID NO: 379528 - DNA, 534 bp, Salmonella enterica
atggccgctgatatccgcatttttcgcagtcagctttccatccggcgtcagggaaaatgccggaggattcccgccactggtaatggtcggcgcgctcaggtatttcaggaacgcctcattcatgattatctggtcgccctgcatgacgaatccgggcgtctcgtttccgtttgccgggttaatataagcaatgcgatccgccgccaccaggaactggcttatcttcccgtcaggcgtgtcttccatgctcagtccaagtccggccacataatatttgccgtctttggtctgctctattttgacgccccacgtggcgctccatttatcgttagcgtcctgccactccttcgaaaattgttgcagtttgctggcgttattctccgtcaggtcaatttttttcagcaactccgtaccaagatacgtctccgtaatcagtcccttaaaaaaatccagataccctttcgcgtcatccccggacgtccggatgcttccgcaaatactgattttccagccagatttacactgcgcacgtaa

SEQ ID NO: 379529 - DNA, 1518 bp, Salmonella enterica; identical to SEQ ID NO: 39471

SEQ ID NO: 379530 - DNA, 324 bp, Salmonella enterica
atgacaaaacgaagtggaagtaatacgcgcaggcgggctatcagtcgccctgttcgtctgacggcagaagaagaccaggaaatcagaaaaagggctgctgaatgcggcaagaccgtttccggttttttacgggcggcagctctcggtaagaaagttaactcactgactgatgatcgggtactgaaagaagttatgagactgggggcgttacagaaaaaactctttatcgacggcaagcgtatcggggacagggagtatgcggaggtgctgatcgctattacggagtatcaccgtgccctgttatccaggcttatggcagattag

SEQ ID NO: 379531 - DNA, 195 bp, Salmonella enterica
atgaacaagcagcagcaaaccgtactcaacatggcgggattcataaaaagccagagcctgacgctgctcgaaaagctggacgcactcgatgccgacgaacaggccgccatgtgtgagaagctgcacgaactcgcggaagaactccagaacagcatacagacacgctttgaagcggaaagtggcaccggggtataa

SEQ ID NO: 379532 - DNA, 825 bp, Salmonella enterica; identical to SEQ ID NO: 376363

SEQ ID NO: 379533 - DNA, 696 bp, Salmonella enterica
atgctgatgacgaggcggctgttgcgctggccgctgctgtacttgctgacgttgcagcatttgtctcagatatttttgctgcggctgccgatgcggctgccgccttttccgacgctgccgccgcagtggctgacgcacctgcatcaccggcactggaagccgcctgcgtttctgacgtcttcgcggcggtttcggatgctccggcgcgcgctgctgatgtctgcgccgccgtcgcgctggcggctgcggcagcagctgaatcgccggcggcagtacgggaggcatctgcattcgcttcagatgttttcgctgcggctgccgatgcggctgccgccgttctggctgtgtcagccgacgccgcgctggctgatgcctccccggcttttgtggtcgccgtacctgcgctgctctccgcagatgctgcggatgaggctgcctgtgtggctgatgcttctgccgctccggctgcattcactgctgccgtggcgctttccgatgcctgacctgctgatgtctgcgcctgttcagatgcctgccctgcggcggtggcattccgcgatgcctccgatgcctggcgggcaacttcttccaccatcgcctcaaaacgtcgcagcgcctccgggcggacgtcgtcttccgtcatggcccccagaaaatcattcagggtgcccggttttgaatcatcgtagaccgtaa

SEQ ID NO: 379534 - DNA, 1206 bp, Salmonella enterica
atgaaagaaatcaccgtcactgaacctgcctttgtcacccgcttttcctgttctggctcggcctgtcgcgaccactgttgtaagggctggaaaatcacgctggataagacgacggttaaaaaatatctcgccagtaaagacacgacgattcgtaccatcgcgcaagaccatattatcctgctgaaaaagaacaacagccactggggcgaaattaagctgccttcggcgctggggaattgcccttatctggatgaggaccgtctgtgccgggtacaaaaaacgttaggcgcaaaggcattaagtcatacctgttcctctttcccgcgggcgcatcatacctataaaaatgaggtgcgtaactctctgagtcttgcctgcccggaggtgacgtcccgcattttaaacgatcctgacgcaatggcactcagcgaaaaaacaatcattcagcagacattcaatactgcgccgttattcccagcgcagcaaaagttactcaatctgttttgcctgagtctgatcaaccatgccaacagcagtacggaagccgcgctctatgcgttgattaaattcgtcatgtatgcacagaaatttgccaaaattgatgatgccgcgctgggcgaactggaacaggtgtatgccgcgttacttgaacagttgcagaccggcgtgctggcgcaggagttaatgaatatcgcgccggatagcaaggtaaaaacctcgctggtattgcagatgcaggactatttccgctcgctcccgcttaatcgtggcagtgttatcctcgatcactacatccagtgtcttctgcgggtgctgacggcggaagagggcgtttcaatggagcagaaggttagcgatattgagtcctcattagcgcgctgtttacaggcgaatgagcagcagaagaactgggccttcagaaatttaattctctataaaatttgggaaaataatttccccaaccagccgaatgtcgacccgttacgcgcgctgtatattatcgtggcggaatatgcctttattaagctattaacggcagccagcgtgcatgagcgcgggcgtatagagtgggatgacgttaccaatattgtgtatagttttcactcccgcagccagcataacagcgaggtggcgaagaattttcatcgccatatagaaacggtgcgtactggcgacgatctgtcgatgattcatcttctgacatag

SEQ ID NO: 379535 - DNA, 207 bp, Salmonella enterica
atggcgatgaaatactcctggttccatcatcatgactgcacaaccgagcaggccgacacgctgatatcggattatcagaagcggggcataaggacaggaaagagcctgaaccctgacttcattacctggactgtcagcgcgaaattacctgaatatgcacaccgggtgcggacgccaaaatccttacgccaaaaggtctgggggtga

SEQ ID NO: 379536 - DNA, 612 bp, Salmonella enterica
atggctaaattaccgcgccgtaagtgcgcaaacaaagaatgccgccagtggtttcacccgatacgcgaggggcagatcgtttgctcgtaccagtgtgccagcgccgtcggcaaagaacaaaccagaaaagctcgcgaagccgcgcaacgtaaggcgcaatcccttcagcgcgccgctgagaaaaaagaacgcgccgcctggcgccagcggaaagccgcggttaagccgctgaagcactggattgacttgacgcagcgcgccgtaaatgacatttgccgtgaaaccgaactggcagaaggactcggttgcatctcctgtggaacgaagacggcgttcgcatggcatgcaggccattacaggagtacggccgccgccgggcatctgcgctttactcgcttcaacatccatcttcagtgtgatgtctgcaacgtctacaaatcagggaacatcgaagcatatcgtaccgcgctggttgagcgttacggtgaggcggcggtgctggcactcgagaacaataacaccccgcaccgctggacggtcgaggagctgaaggaaatcaggctcgcggctctggcggatctgcgtgcgctaaaaaagctggaggccgcatga

SEQ ID NO: 379537 - DNA, 312 bp, Salmonella enterica
gtggtgaaggtcagcgacggcggcgatatcagccagctcactgcggctgttccggcggcctcttccgcaccggttcaggctgccgccccggcaggcgccggcaccccggtcaccgcgccgctggcggggaatatctggaaggtgattgccaccgagggccagacggtggccgaaggcgacgtgctgctgattctggaagccatgaagatggaaaccgaaatccgcgccgcgcaggccgggacggtacgcggtatcgcggtgaagtccggggacgcggtctccgtcggcgacaccctgatgacgctggcgtaa

SEQ ID NO: 379538 - DNA, 1080 bp, Salmonella enterica
atgcttaccgaaaaatatgattttcgcattaccgatcagatgactatcccactcagacctcattggatagccaatgattcatacagggaaaagtgtaaaatgcttgtcctcaaccggagtaaaggggaaattcataaggtagactttagtaaagtaacagattatatcaaagaaggtgatgtaatctgttttaacgacagtactataataaaccatatgtttatctgtaaaacaagacagaataggttaattaaaattgttttagagggatttttaccaaataatagagtaattatttccggacttttaaaagaaaggcttaacgcgaatgatgttttctatttggttgataaccctgaaatttccattaagatagagcaaaagtttagcgaagagagccagtaccgagccgtcgtggaaaatcatgaggccttaatttgctatttggccagtcatggtgagcgtcttgatgagtatgtggactccagcttgttttataaatatccagatgcttaccgttccgttttttctaaaaagtatggttctttggaaataccttctgccggcattcattttacctgggatcttatccaaaaaatcaaagataaaggtgggttaatatccttcatcactttacatgttgcatcaacagaaatgttgtccaacagaaaaatacaaacaaaatgtgtagaggaagtgactatcaacgaagaatactacgaggttccgcaagcaacagcggatatcattaatactgcgaagcaaaatggcggacgtatttttgccgtaggaactaccgttacacgatgcctggaatccgcgtattcgagggagcacaattgcctcaaagcaagttctggctggactgaactttatatacatccaggctatcaactgaaagtggttgactgcctgctaacgaacttacatcagccaaaaacgacgcatatggtgttaaccggtcagtttgctggggttgatctactcatgaaggcctatgcctcagaagatatccagtcatgtcagttcgatatgtttggtgattgcatgttaatcatacaggatgaagggcagggatga

SEQ ID NO: 379539 - DNA, 204 bp, Salmonella enterica
atgtcagcgcagcgcaggaaaattgcccgtcgtctggaaaaaagcccgttattaaaacgggaactgtcggaaatggctgttgagtcctacggcgatgccgtgttatctgcagcgcgtgaaacaggccttgatgaaaagagttttccgtctgaaatgccgtgggcgctcgctgatacgctgtgcgacgatttcatcctggactga

SEQ ID NO: 379540 - DNA, 177 bp, Salmonella enterica
atgtcatttgtaaaatcgctaccaattcttcgcaacctttttggatgttcggcggcgtcgtatacaaaaacaaacaggccaggcgatacggttacgcatgtgcaggtcatgccaggcgcgacgctaaaatacgagccgattatgtttgaccgccgccagtgtaggtggcgagtgtga

SEQ ID NO: 379541 - DNA, 225 bp, Salmonella enterica
atgaatattcaggcttcctacagaacctttatttgtctggtggaaggcgcatcgctatgcgtacttgctatccgtcccggtgtctctctctggttggatgaggcgaaccttacaccagctggtatactgcagcgtagggcctgtcccattagactctttgatttgccagcttggccctggggagtgctcaaaatcctcagggacttcgttaccgtgtggttttag

SEQ ID NO: 379542 - DNA, 1134 bp, Salmonella enterica
atggaacaatgccgaaaagcgggtaaaagccactggtatcatgaaacacaatccactatgtcgtcacaaaccccgctttcgctgatgccggaagccgcgtatgttaacgatcgatttttactggatttagcggtagcaaaaaccgcgttgacgccttttgaatcatggttaaagccagctcgccagttggcggatgtcttatttccccgcacggttctcaacgaccggcttcatacgtttagcgcctatgaacgtatgagcaccgcgctgaccgccgctcaggtatttggggttcagcgtttgtgccgctattatgccgcgcgtctggcgccgctacccggccctgatgcctcaagagagagcaatcaacggctggcgcaaattacgcaatacgctcgtcagcttgccggctccccctccgttatcaatacgcgggcccgcgaacaacttgcagaggtgggattaaccacccgggataccgtactcatcaatcagatcattgggtttatcggttttcaggcgcgggtagcggcgatatttcaggcgttttgccgtctgcccgtgcgcgaactgcccggccaggagatgcagcgctttgccagggccgcgcggtttcaaaacccccagacgatatggcggcccgccgccagtctggtagaatatcctcccgcccataccaaagttcagcggcaatattcgtcttcacaatgccaaatgatggcgccggtactcatgcgcgatccgtcttcattcgcgttactcgaacgcatactgaccagcacattacacactgcgtcgcccccctctttacttccacttatcacgctcctcacatcacgtatcaacggcagcgccgcctgctttaacgaacaggcaacccaacctggcgcgtggcgtcgcgctgtcatcacgttacgccaggaagacgacgacatcgctcgttgggaacttgagcctgcgctgacacaggcgatacaatggctcaccagagcgcccgatcgctttagcgccgcgcattttttcccgctactcaccaggggagtttcatcggagcaggccattaatatgttaggctggtgcggcgtgtgcggatggttaaatcgtttaaaaatcgcgttgggcgaaacctattaa

SEQ ID NO: 379543 - DNA, 201 bp, Salmonella enterica
atgtcttttggggaaaaggttcggtggtgggtactggatatcctggatcgggaagtgggttccaccggtgccaaatacagggtgctggtaaaccgggtggatacctcaaatcctgacaggccagagcatcagcctgataaaatcgtattactgatttctaaccagtggcacattaattgtaccagctcagactccaactga

SEQ ID NO: 379544 - DNA, 237 bp, Salmonella enterica
gtgccggggttggccctgccggatgacgcggctctgccagttgacggcgtaccggcggtagccacaacggaaatccgaaaagttccggcgctgtgtgactgtgacaccatgagttttgtcagcgccatcattcagtgttcccagcttgggctggaacccggcggcgcgctcggtcatgcctatctgctgccgttcggaaacaaaaacgaaaagtcaggcaaaaaaacgttcagttaa

SEQ ID NO: 379545 - DNA, 201 bp, Salmonella enterica
atgatcgaccttgcccgccgttccggacagattgccagcctttccgcgcgcgttgtccgtgaaggtgacgatttcagcttcgagtttggtctggaagagaagctggtacactgtccgggtgagaacgaagatgcacaggttactcatgtctatgccgttgcccgccttaatcgatcgctgccgactggtaagccggactga

SEQ ID NO: 379546 - DNA, 333 bp, Salmonella enterica
atggatacagtagaagaactaaatggaacatacttctatgcaggaaaatccaatctgaatgctgccgaacttctgtttatgattttttgtgagaataccgcaagccagtttgggattggtgttgcagatttcggggccgttgttgctctggtatcaggtcgcaataatctctggacaagggcgaaacccgctggagcgactaaaggcacatcatacgcgtccaggactgcacgtgcagtgtttaaaaagtcaaaatttccctttggaatatcccttccgacatggttagggcggttacaccccgtggacagccagacgtgttatggttcgtaa

SEQ ID NO: 379547 - DNA, 486 bp, Salmonella enterica
gtgggctcggagatgtgtataagagacaggtatgatatagaaatagcgatgcaagactttttgaatgatataaattttgataattctaaagataacaaagtgcgatttgacgaagatacatatgactttaatatcaatgggaaacgccgaggaatgtttggtaaaggtacccgtgcagtaatgcatgctatatttaccatttgctttgcggaatttttatcaagaaaagggaatccattcattggatttgttgtgcttgatagtccattagtgacgcactttgataaagatagaggggtttctctatcggatgttaatagcgtcagtctcagtgattcattttatcacgcattaatcaaaagggactataatttccagattgtaattcttgagaataaaggtccgacgttccaaataaaaattaatgatgcaaataaaatccataacttaaataagaatggaagctctggtttttatcctgtttaa

SEQ ID NO: 379548 - DNA, 2334 bp, Salmonella enterica
atgtcaggaatgaaagttagccaggctgagaaagcagctcggggtcactggtcaagaattttacctgcgctgggcgtaaatgtactgaaaaatcggcaccagccctgcccggtctgtgccgggaaagaccgctttcgatttgatgaccaggaagggcggggaacgtggttctgtaaccagtgcggggcaggtgatggcctggcgcttgtaagtaaagtactggatgtaggcattagtgaagcggcagacagaataaacggcattaccggaaacctgctgccagtatctcagggaatgcttgaatctggtactcctgaaaaagaggacgggagaaaagctgcagcagtgctggctgcccgtttgtttgataagtcccgccagaccactggcaatgcctatctgacgagtaaagggtttcctgcactgccttgccgggaattaaccgccatgcataaagtcggtggtgtggcatttcgcgcgggagatcttgtcgttccattgtatgcagatggagagctggtaaatctgcagttaatcaacgctaatgggggcaaatgcttccttaaaggcggtcaggttaagaatgccttttacctggttgaaggtactgccaaagcagccaaacggctctggatagcggaaggatatgccaccgcacttactatcaactatctgactggcgatgctgtcatggtggccttttcgtccgtcaatttcctttccctggcgagcattgcctgcagtgagtacccaacgcaccagataattattgctgctgaccgcgatctcaacggtgcggggcaaacaaggggcgcagctgttaccggggcctgcaattgcacaatggcgctcccgcctgtgtttggtgactggaacgatgcattcacgcaaaacggcgaagaagccacccggcatgcaattcatgaagtaataaaaccagctgttgccagccccttcgacacaatgagcgaagctgaatttaccgcgttgagcgtcagcgaaaaagcgcagagggtagtggatcactataaaaattcactggcagtagacccgaacgggcaactcctttcacgctatgaggcgggggcctggaaagttatctattacgccgattttgcccgtgatgtcgctgcgctgtttcagcgcctcgacgcacctttttcatccgcgaaaattgcgtctctcgtggaaaccctcaaactgatcgttccgcaacagcagaatccggcgcggcaacttatcggatttcgcaacggtgtgctcgatacccggacaggattgttcagcccgcacgataagaagcactggttacgtacgctgtgcgaggtggattacacgcagcccgttgacggtgagtcactggaaacccatgccccggcattctggcgctggctggatcgtgccgcaggttttaatcctgaaaaacgggacattattctggctgcattgtttatggtgctggctaaccgttatgactggcagctgtttctggaggtcactggccctggcggaagtggaaagagtattcttgctgaaatagcaaccatgctggcgggtgaagataacgcgacctcggcaaccattgaaatgcttgagtcgccaagagaacgagctgcgttaataggtttttcactgattcgacttcccgaccaggaaaagtggagcggtgacggggccggactaaaagccatcactggcggcgatgcggtatccgttgatcccaaatatcagaacgcctattcaacccacatcccggcggtcatcctggctgtgaacaataatccgatgcgcttcactgatcgtagtggtggagtttcacgccgaagggtgatcctgcatttccccgaccagatagccccggaggaacgcgatacccagctcaaagagaaaattgccagtgagctagcggtgattgttcgccagcttatgcagcgtttcagcgacccaatgagtgccaggacattgcttcagtcacagcagaactccgatgaagcgctcaccatcaaacgtgatgctgattcagcttttgatttttgcggctaccttgaggtcctacctgacaccacgggcatgtttatggggaacgctaatattgttccacgtcagcctcgaacttacctctaccatgcctatctggtctacatggaggctaacggctataaaaatacgctcagtctgaccatgtttggcaaggggctaccgttaatgctcaaggaatatgggctgcagtatgagaaacgacggaccaatcaaggaatgcagactaatctggccctaagagaggaaagcaatgctgactggttgccaaaatgcgatgagtttgcagcgaaataa

SEQ ID NO: 379549 - DNA, 564 bp, Salmonella enterica
atggtagacgtttatagaacggttaaaagagtaaatgagacaatccagaccccaaatataaattgctatactacatgtattttaacaaggcccgcaaatggtcatgttacatctacaggcttctcacgaaacctcatggatgcgataaatatttcattagcagagcacaaaatagcctctttacataatgaagtcatgagtattgaggaatatgatcgtgattctttacaagagaaaggaaatactgccaggagatatttagaatatattctcatgcttgttaatattcgtataatgcatttaaacaacgttcaataccaagagcaaatgctaggtagtttagtttctgttattgaggctctggactatgaaccattaatgaaaaataatgttgaaattacaaaggacatccttaatgcttgcagccaccacgggggggttagaattgaaaagaaagatgtaattttttctttggaagttattgaaaacttaattaaagccataaaaaaaaccgacataaataaattacaactcgatgggatgtttaaatcaattcaaaaataa

SEQ ID NO: 379550 - DNA, 228 bp, Salmonella enterica
atgcgcccgaaacgggccagagggcgacctctggcctttttgtctatggaaaacccccagctaggctgggggttccggaaagctttcagctttaagccagttattaaaaccccttttgatttgttaaaacatcttgcggtctggcaactgcaaaagttcaacaagaaatcaaaagggggtcccaatgggggacgaaaagagcttagcgcacacccgatggaactgtaa

SEQ ID NO: 379551 - DNA, 441 bp, Salmonella enterica
atgggggacgaaaagagcttagcgcacacccgatggaactgtaaatatcacatagttttcgcgcccaaataccgaagacaagcgttctatggagagaagcgtagggcagtaggcagcatattaagaaaattgtgtgaatggaaaaacgtacgaattttggaagcagaatgttgtgcagatcatattcacatgcttctggagatcccgccgaagatgagtgtgtcgagcttcatgggatatctgaaggataaaagtagtctgatgctttacgagcagtttggggatctaaaattcaaatacaggaacagggagttctggtgcagagggtactatgtcgatacggtgggtaagaacacggcgaagatacaggactacataaagcaccagcttgaagaggataaaatgggtgagcaattcgggcagcccgtttacgggccgtaa

SEQ ID NO: 379552 - DNA, 291 bp, Salmonella enterica
atgaaaaggttatgttattttgtaaattcagactggtactttgatttacattggacagaacgtgcgatagcggcaagggatgcgggttatgaaattcatatcataagtcattttattggtgaagagattataaaaaaattcaaaacgcttggttttatttgtcacaatgtgtctcttgttgctcagtcatttaatatgtttgtttttttagagcattccttaacgctcggaaaattattaaagagattaatcctgacttattgcattgtattacgctcaaaccttgtctga

SEQ ID NO: 379553 - DNA, 207 bp, Salmonella enterica
atgcagaaattagcaccagtcttcgattcggatacccggaatgcgttcaaactcgcggagattgtttgtgacgacgaccagtccgcggctacgggcatggccagcaatcatctggtcataaggcccgacaggtgttcccttgcgggccagttcggcacggatttgaccggtatgtatcgccagcctgaaggggcatgttggctttga

SEQ ID NO: 379554 - DNA, 201 bp, Salmonella enterica
atggcagtaagaagatttattcgtttacctgaagttatcaacagaactggctatggcaaaacatggatttatcaccttatcaagcggggtgaattccctgaacctataaagactggtgcaagaacaatagcatttattgaaagtgagattgatgaatggattgaagctattattcgaaactcacgccagaacgctgcataa

SEQ ID NO: 379555 - DNA, 129 bp, Salmonella enterica
atgggcaggcaaaagtgtagcggtattaagcgcagctatttagaaaagttaagtttgctcaccataagctatccgattatcagccccatgaagggggccgatagacgtcagaatatattaacatattga

SEQ ID NO: 379556 - DNA, 486 bp, Salmonella enterica
gtggatatccatctcaacccaaaaatcggcgcagactggcaacttcgcgggcagcaaaaccgtgtggtcacgccgggccagaatgaaaaatactatcttgccggggccttacacagcggcacaggaaaagtcagttacgttggtggcaacagtaaaagctcggcgctgttcatcagcctgctgaaacaccttaaagccacataccggcgggcaaaaaccatcacgctcatcgtggataactacattatccataaaagccatgaaacacagagctggctgaaagcgaatccaaagttcagggtaatttaccagcctgtttactcaccgtgggtgaaccacgttgagcggttatggcaggcgcttcatgacacaataacccgtaatcatcagtgccgttcaatgtggcagttgctgaaaaaagttcgtcattttatggaaaccgccagcccattcccgggaggaaaacatgggcaggcaaaagtgtag

SEQ ID NO: 379557 - DNA, 405 bp, Salmonella enterica
atgccgatcatagcaccaatcccccgtaacgaacgacgcctgatgcagaaagctatccataaaactcgcgataaaaaccatacccgcatactcacggctatgctgatgcttcatcggggcgaacgggtcagcaatgtagccagaacactctgctgtgcccgttcatccgttgggcgctggattaactggtttacgcagtcaggtgctgaaggcctgaaatccttacccgcaggacgctcccggcgctggccttttgagcatatctgcactctgctacgtgaactgataaagcattctcccggcgattttggttatcagcgttcacgctggagcaccgaattactggcagtaaaaatcaatgagataaccgggtgcacgttacatgcaggaactgtccggcgctag

SEQ ID NO: 379558 - DNA, 981 bp, Salmonella enterica
atgcccctttgctatgatgaaatagatatgaatgctcatcaaggaaaatacacccagcaacttttatcccttccgattcttgagaatgtggatgatttatcgcacgccctcaggcttccaaaagaagttattttgaaatttagctttaataatgataaatactatcaccgcgtagaaatgaaaaaaaagactggtggtattcgacatatcgagagcccactaagagaattaaaagcgatacagcgatgggtcctaagaactatcttagataaattatccccatctgtttatgcgaaaggatttgtcagaggaaagtcaattcttgataacgcgaaaccacatgaagggaatcagtatgttttaaatctcgatttacaagatttctttacaaatgtaaaagcatcacatgtatatactctttttaaaaatataggatataacaacaacattgcttttatacttacatctttttgcactaaaggtggctatttacctcaaggtgcgccaacttcaccagccttatctaatcttgtatgcttaaggcttgaccaccgtatatctacatattgtaagaaacgggctttaacatatacacgttatgctgatgacctttgtatatcaggaaataaaatactaattttacaaaaagcttcttatttaataaaggatataatctgcaatgaaggttttataatcaattctaaaaaagaaaagttcttaggcccaaaagtgcgaagagaagttacaggcctaacagtcacgcctaaaataacaattagcaaaaagaattattgtatttatagaaaaagaatttatgatttggtgagaaataacatccccaacaaatatgaaataatagaaggcatattatcttttgtcaaaagtattgataaagacaaagaaaagaaactttctatattttatcagaaacaaaaagctattattgaaagtgctggcgaagttgtcgataattcagtataa

SEQ ID NO: 379559 - DNA, 879 bp, Salmonella enterica
atgaaatcacccaaacagagcatcataaataaatttccagatctacatgttcatcaaactatagatgatattagagatcttttaataaatggatttgatgattcacaaaaaactatttttttatgtggaaaggataaatcggataaaaaaagtcttcgccataaattttcaacttttctttctcaggaaaaaggaataactcttacttatccagaagatttatttgaagaccttcttgaagggcaaggaaaaaatagccttttatcccttgaaacacaacttgcaaactctgttgacctgatagttcttatacctgaaagccccggttcctttgctgagttaggggcattttccatggataaagccttagcaaaaaaaatgcttgtcataagaatgggagaatataaatcagggaaaagctttataaatcatgggcctataagactcgttagagcttatggtggtgaaatatttgatattccgaaaaatttcgatgaaaagaacccaaatcatgtaagagcagttctagacaaaattaaggatacgcttccgaatggacggaagaaaaaagaacttgataatattttattatattcaaaacatattcttcttttaacatatctttttgatgatttaagtttacgatcagtatataaaataatggaattgatcatgggccgtaagtttgaaaatagagataatattgcctgtaaagctgcaacacattcactcatcagagcagggctgatcaatcagcatgagggctcatttaccataactaaaattggctatacctcaataagtaatagttttcatttgaaatcatcgctcactgaaataaggacaaaaataatgaataaacaatatgctagacactga

SEQ ID NO: 379560 - DNA, 3882 bp, Salmonella enterica
atgccggatgatgaaggcggcagcatcgagttgccctttagcgtaattttcaccgtgataaccagcccggatgtggacggcgccaacatgtggggccatatgcagggcgtggtggacgcgggcaacctgtatagacgcccgctgctggcggtggaaaccagccacaaagacggtcagttcagcgaaaacaacgaagagtgggcgacgtttaattcagtggaaaaagccaccgcgcagtgcggcatcggccaggtgccggatcagtcatcgctggcgcatttatacagcgaacatgctggcggcaagatggaaagcgaacatggctggccaaccgaagactattacatcgccgcggacagcgacgcctcgggaacggcgcacgtcaaccttgaaaacggcgatagcggtaaatttaccaatcaaccgaactacctgacctgctcggccaacgaaatggtggcggtgctggacgtctacttcaacgatgacccggcgaccaaaaacagcgatatggttgccaaagtgggtgaacagattaagctgaacattcattcgcgcaacgccctcaacggcatgccgatcgcctataccgacttcaccgtcaccatggcgaacggcaaacggcgcgacgggttgacgaccggttttaccgacaccagcaatggtcagatgctgtttgatgacgtgggctaccttgccgggcaggcttatcatgggatcaccgacgccaacggcgatgcgaccattatcctcacccagccgaagggagtagggctgctgacgccgttaagcattgcgcccgtcgattcattaatcagcacgcccgtttcccgcagcgtgaagtttaccgtcgccaccagcccggatacgccaaaagccaaaatgtggggccatatggctgataccatcaccgtcggcgatctgacctttgagcggcctaagctggcggatgaagtgacgccggaacgtactcaggctgaggctaacgaaacctgggcgcgcgttctgcatcctgacgcggcgggcaacccggataagggcggctgcgcggcgaaccgcctgccgcgcatcgatcagcttgaggcgttgtacaacgccaacagcgacggcgtgatgaaaagcacccagggctggccgacgctgcttaactactggtcttcgaccttccagagcgctaccacgtggaaactgatctcgctgtttagcggcagtgaattcgccaacgccaacgtctccatttacgccagctgtctggccagcgataacccggcggcggcctcgattaccattgaaccggtggatgcgtcgcagtggtacgatggcagcggcgttcacgcggtcaaagcgaaaaaaggcgacacgatgcaactgaaggtgacggtgaaggacgccagcggcaacccgatcccggaagcgccgtttgtgctcacccgcggcgacggttacgatcgcaggggcgagaagtacaccgccagtgagggcaacgatcagcaaggcatcgtcacgcccgtggtgatcgatggcgaatccctggcctggaccaccaccaaaatggggatgctgaccggcgctgacggcacccgcatcatcagcgttacccgcccggacacacacggcacccgaacggccattatcgccgcgctgtatgaaaatgccgccgtgagcgccagcattgacaccatctttaccgtcatcaccagcccggatgtcgacgttgcccgcatgtgggggcatatgttgccgtcgctcacggcggcggatggcgcggagtatcagcgtccacagctctacgctgaattagccaatcaggcaagtgccgcgcaatataccgaagacaacgaaatctgggcggggctttatgggccagacagttcaaaaaccgaccccgctgttaactgcgctgcgggctatttcccttccgtcgaggcgctggattcgctctacagcaaatacccaaaccgcacgataaaaaccgcccagggctggccgatcaaccgttcttactggagcggttccagttccgggtcgttaaccggcggaaagccccgatcctattacattgtcgatctggatgatgattcgcgccggggcgtcgttaatgacggtgtgaacgacaggcaataccaaatttgcgcaacgacgccgaagacgcaggctacgcaaattacgctcacctccacgctggcgacggatgacactattcaggcggtgaaggctaaaaacagtgagtcgatcccactgctcgtcaccaccaccgatgcggcgggtaatccggtgccttatacgacgttttcgcttaagcgcgacgccgggacgccgcgtaaagctgactacccgtttaccaacagctacaccatgacgatgacgcagtctggtggcgcgacgcaagagtttgcctacagttcatcggttctttatggggcgaccggggcgaacggtacgttggccctttcgcttgacgaacctggcggagtcggggtgaaaagcgtggtgactgccagcctgtatgatacgccgacagtaacctcgtcgctgccggcagtgtttaccgtcatcaccagcccgaacagcgacaaggccaatatgtacggccatatgccggaaaccttcaccgccagcaacggcgcggagtttatgcgcccgctgctgtatggcgaactctcatcgcagaatcatacgtcgagttacttcgaaaccaatgaaacctggtttacggtgaataattttaataccgggaattatggcgcgtgcccgataaatcagatggccacgcaggatgatctccagtcgctgtaccgcgatcaccccaaaggtaagatcacgaccgacattggattacccatcaagaaaaaatggtgggcaggcgacagcctggtaaaaaatcaatccatttactggcaatttaccgatctcaatacgggtaatggcggcaccacgttggaaactccggggaatttctattaccagctctgtctgacggaaccgcgacagatgaagattgcgttatctacggacgtgtggaacgcggataaatcggcggcggtggcgaaaacaggcgaggcgataccgatgacggtaacggtgactaacggcgccgggcagccgcaggcgggggcgacggttatgctgacgcgtgattactcttattcgcgtggcacggtggatagcaaatacattcaggccggtgtgattggcgagccggttgcgtccaaaggcgcgttatcagacatgaccctgacgccggtatcgcctgcgggtgcggcagtggtgtttaataaccagaggggaaccagcacgaaatggtatggcgtcaccggcgatgacggtaagttgcggttcacgttaaaccaggataaatcgctgggtttgagaacatccatcacggcgacgctttcggagctggctggcgagacggcgagcgtcgatgcgatctttacggtaccaaccagcccggatacgccgtatgcgtcatactggggccatatgccggataccgttgaggttaacggcgttacgctgcgccgcccattcctgaaaacagagatgtccaaaatgccgccaggcacctggccgcttaataatgaaacctgggcggcgaactatattgattatggtgaaacatccattcatgctacgacatcgctgccttatctttgcggctcgctggaaaacgccgcgacgctggacgatctgaaggcgctgaagaacatcattggcgacctgcactggcctacggctgcgccggcgtcgtcgtatacatatgactatgcatcgcaaacgatggttggcggtaagtattgctcatttaacgaaacgaccaatacggaaaactgtacgctttcaagtcaaggttttgcttatgcctcgtgccgggtgcagtag

SEQ ID NO: 379561 - DNA, 588 bp, Salmonella enterica
atgacttttaaaatgagcagcaaagcgcagacaattaaaattttcaatctgcgttcagatacaaacgaatttattggggcaggtgatgcatatattccggcaaatacaggattgcccgcgtacagtacagatattgcaccgccagcagcgaaggatggattcgtcgctgtatttaattctgagtcagaaaaatggtcacttgttgaagaccatcgagggaaagttgtctacaacatcaaaacgggggaagccatcacaattaaccagctaggcgcactacctgatgatgttgtttccattgcgcccgaaggccattttgtgaaatgggacgggaaaaaatgggtacacgacacggaggcggaaaaagtggcgcaggttactcaggcgacgcagcaaaaagaaggtcttctgacgctggctgcatcaaagattggaccgctacaggatgctgttgatttgggtattgcgacagattcggaagcggcgcttttgctggagtggagaaaacaccgcgttctgatcaatcgtattaatcctgccgatgcgccagatattaactggccggaggttccgggcgatgtggcgtga

SEQ ID NO: 379562 - DNA, 384 bp, Salmonella enterica
atgcgcaatttgctgggtcttttgctgattctggtcgctgcaatgtcagcgggctggcaggcgcatgactggcacgacgcaaagctgcaactcgctgccagtgaagcggcagaacaaacacgccagattgtcgttgaagtgacgcaacagtctggcgaagcgctggaagcaaaactcgcggggctaaaagccaatgaaaggcacacggaacgggttattcgtacagaaatcattaagccggtttttagcaacgtttgcgcttctgatgattacgtccggttgttcaacgaaagtgcagatcaagccgaacgagaattatcaggaaaaccagctgacactttgcccggtcacgctgccacgtctggccggaccgaccggaaatga

SEQ ID NO: 379563 - DNA, 1023 bp, Salmonella enterica
atgaatatatgtgtaaattcactttaccgattgagcacaccgcaatttcacagtttatatgcagaagaggtgagcgatgagacgcttgcgttgttgattggcgaagtagagaatggtaatcagaattgtattgatctgttatgcaatcttgcgttacgcaacgatgacctgggacataaagttgagaaattactttttgatctctttagcggaaaaagatcgggatctccagatatagacaaaaaaatcaatcaggcttgccttgtattacatcaaatcgccaataacgatataacaaaaaataatactgagtggaaaaagctacatgccccttccagattactttatatggccggttccgcgacaaccgacctttctaaaaaaatagaaatagcacataaaattatgggcgaccagttcgctcagacagatcaagaacaggtgggagttgaaaacctttggtgtggtgcgcgaatgatgtcgtcagatgagctagcagctgcaacgcaaggtctggttcaagaatcaccttttctctcggtaaactatcctattgggctgattcatcctaccaccaaagaaaatatattaagcactcagctacttgaaaagattgctcaatcaggattatctcacaatgaagtcttcctggtaaatacaggagatcactggcttctctgtttattttataaacttgcagaaaaaataaaatgccttatatttaatacttattatgatttaaatgaaaatactaagcaagagattatagaagcagcaaaaattgcaggcatatcagaaagcgatgaggttaattttattgaaatgaatttacagaacaatgtacccaacggctgtggtctattttgttaccatacaattcaactcttatcgaatgccggacaaaacgatcctgttaccacactacgagaatttgcggaaaatttcttaacgctttcagtagaggaacaaacactatttaacacccaaacccggcgacaaatatatgaatacagtctccagtaa

SEQ ID NO: 379564 - DNA, 714 bp, Salmonella enterica
atgaaaaactattatctgttgctgatgctggcatccgcatccgtgagcagccagccgctgacagtcgcacaggcccactggcaggaaggcatggccgtgggcgtgactgaactcagcggcacactgtatatccgggatacggcctggcagtggcagcccgtcccgctggagatgagccggcaggagggcatggtgagtgaaagccgtccggggagacgttattacattcttaaagggtataccacgaccctgacatcagcccgtcccgggctgcagccgtcggtaagcctgctgcatgccggacatggcgtcgtctgccttgaggcccggggcgaactggcgaaggggcaggtgcggtatggcgaaattacctttactgccagccatgtactggcctggcaggacagtaccaccgcagagaagggctggagcgtggtcagcggcaacgtcacgccggatgcggcgcaggagataaaacgcctgctgtggcaggtaagagattaccggtggaacccgtcttactcgggtctgaaggcccggccggacgcctttacggtaatgcccggcagtttccttccggataacggcataaaaaaccgtattgccggggcttggttgacgtccctggagggtatccgggtccgttttcccggtgcagaggagccggtgagccggtggcaggggagcctgacgccggtggtgaactatttctga

SEQ ID NO: 379565 - DNA, 765 bp, Salmonella enterica
atgaaacgaatgacgcttttactgctggctgccagcctgctgccatcctgtgtgctggcgtggaacacgccgggggaagacttcagcggagagctgaagctgggcgggccggtgaccagcacccgtaatccctgggtctggaaggtcggggaagggaacacacagataaacacgaaagctgtctctgtcctgcgcagtggggagcaggtaataccggttcccctgccggccatgacggtcctgctgggaaaaactatcctgaccaccccggccggccgggaggggcttgcgccgcaggtgacgtacggtaaggaaaccgagggttttgcactgacgtggacggcaccgggtatggcatcggtgacactgccggtgacgggggagggaaatgtccgtaccgggacattcaccttccggatgcaggcggcgggtgtgctgcgccatgtcctgggggaccgggcggagtatgccgggctgtatggcgacctgcagggcaacggcttgccgccacagacgcaggtgatgccggcagggcagacgccgggtgtgctgcagaccctgtttgacagtgaaggcccggtctggctccgggagatgacggtcagcagcgtgtccggactgagccggttcagtgacgccgccctgcgccaggttgacggggtatacggcgcacagacggtggcggacagcggtgagctgcgttttaagggggcggtaccgtcccgctggcacacctccctggcggtgagtattgaataccggtaa

SEQ ID NO: 379566 - DNA, 2439 bp, Salmonella enterica
atgaacgggaataacgtaagacagccagcctgccagatgtcttttcgccatgccgtgctggcatttgcgatagcggttgccctgggcagcggtaccgcaagtgccggagaaaaactggacatgtcctttattcagggcggggcggggattaaccctgaggtctgggcggcgctgaacggagattatgcgccggggcgctacctggtggacctatccctgaacgggaaggatatcgggaaacacattctggacgtgacgccgcaggacagcgaagcgctgtgtctgtcagaagcgtggctggcaaaggccgggatttatgtcagcgcggagtacttccgtaaggggtatgacgccacgcggcagtgctgggtgctggcgaaagcgccggcggtgaaggtggacttcgatgtcgccacccagagcctgtcgctggctattccgcagaaaggactggtgaaaatgccggagaacgtggagtgggactacggcacggaggcgttccggatgaactacaacgcgaacgccaacagcgggcggtacaacacgtcggcgttcggctcagcagacctgaaggccaacatcggtcgctgggtggtgagctcgtcagccacggccagcaccggggatggcgggagtaacgaggccacgataaacatgttcacggccacccgggccatccgctccttgagtgcggacctggcggtcgggaagacctcaaccggtgacagcctgctgggcagtaccggcacgtacggggtgtccctgtcgcggaacaacagcatgaagccgggcaacctggggtataccccggtgttcagcggcattgcgaacggtccctcaagggtgaccctgacccagaacggcaggatgctgtactcggggatgatgccgtccgggccgttctccgtcacggatgtgccgctgtacagcagcggggacgtgacgatgaccgtcaccggggatgacgggcgggtgcagacgcaggtcttcccgctgtcggtaatggccgggcagctgagtccgggacagcacgagttcagcgtggcggccgggataccggacgacgacagcgacctggagggcggggtgtttgccgcgtcatacgggtatggtctggacgggctgactctgcgcacgggaggcgtgttcaaccaggactggcagggcgccagtgccggtgcggtactgggactcggttatctgggggcggtgtctgctgacggcgcttatgccacggcgaagtaccgggacggcagccgcagcgggaataaggtgaaactggcctggagcaaacagctggcgctgacgaacaccggactgcgggtgagctggtcacatcagagtgaggaatatgaggacatgtcctcctttaacccggctgaaacatggctgcagcagaaccaggggcgccggacccgggatgagtggaatgcgggcatcagtcagccggtgggagggctgttcagcctgtcggcgtcgggatggcagcggagctattacccggcctccacgaccggcagttaccggtaccgggatgataacggtaaggagacaggagttaccggtaccctgagcacacagataaaaagcgtcagcctgagtctgggctggtccgggtcccggaacatgaacggggagaacacctggtcggcctccgcgtcggtgtccgtaccattcaccctgtttgagcggaagtacagcagcagcaccacggtgagcaccggtaaagatggcggcaccggcgtcagtaccggtctctccggggctctgaacgaccggttcagctacggtctgggcggcggccgtgacagtgacggcggtgtcagcagttacctgaacgccgcctacagcggcgaccgggcgaacctgaacggcacggtgaaccactcgtccggttcgggcaccagtggttcggtgtcagccagcggttcggtactggcggtgccggcggcgcgggacatcatgttcagccggaccaccggggacacggtggcggtggtgagcgtgaaggacacgccgggggtgaaggtgatgtccggcaatgaaacgtcggacagtgacggaaacctggtagtaccgctgaacagctatgactggaatacggtgaccatagatgcgggcacgctgccgctggacacggagctgtccacgaccagccggaaggtggtgccgacggacagagcggtggtgtggatgccgtttgatgctctgaaggtgcaccgttacctgctgcaggtgaggatgccggacggggcctttgtgccgggcggcacatgggcacgggacagcaataacacgccgctgggctttgtggcgaacaacggcgtgctgatgattaacgcggtggaccgccccggcgatatcacgctgggacagtgccggatacctgcggcgaaactgcaggagacggcgaaactacaggaaattacgtgcgaataa

SEQ ID NO: 379567 - DNA, 132 bp, Salmonella enterica
atggtggactggttatttggcgatcttttgtattggcttaatgctattttatggtgtattaatctattatttgtttgttttttggtttttagtgttacatattggctttactatggattaaaagatcgttaa

SEQ ID NO: 379568 - DNA, 849 bp, Salmonella enterica
atgaaactcttcgctcagggcgccacgctcgatctcactcatccgcatgttatgggtatcctgaacgtaacgccggattcgttctccgacggcggcgcgcataacacgctgattgaggcggtgaaacatgcgaatttaatggtgaatgccggggcgacaattattgatgtggggggggaatcaacgcgaccaggcgcggcggaagtgagcgtggaagaagagctggatcgcgttattccggtactggaagcaatcgcgcaacgttttgaagtgtggatttctgtggatacctctaaacccgaggtgatccgtgaagcggcaagggcgggcgcgcatattatcaatgatgtccgttcgctctccgaacccggcgcgttggaagcggcagcggaaaccggcttgccggtcagtcttatgcacatgcagggcaaccccaaaaccatgcaggaggcgccgaaatatgacgatgtctttgccgaggtgaatcgctactttattgagcaaatagcacgttgtgagaaggccggcatcgcaaaagagaaattgttgctcgaccccggattcggtttcggtaaaaatctctctcacaattataccttactggcgcgactgggtgagtttcatcattttaacctgccgctgctggtgggaatgtcacgtaaaacgatggttggtcagttacttaacgtgggaccatcagaccgtctgaacggcagccttgcgtgcgcggtaattgccgcgatgcagggcgcgcagatcattcgcgtccatgacgtcaaagaaaccgtagaggcgatgcgggtggtggaagccactctgtctgcaaagggaaacaaacgctatgagtaa

SEQ ID NO: 379569 - DNA, 429 bp, Salmonella enterica
atgaaaacttttacagctaaaccagaaaccgtaaaacgcgactggtatgttgttgacgcgaccggtaaaactctgggccgtctggctactgaactggctcgtcgcctgcgcggtaagcacaaagcggaatacactccgcacgtagataccggtgattacatcatcgttctgaacgctgacaaagttgctgtaaccggcaacaagcgtactgacaaagtgtactatcaccacaccggccacatcggtggtatcaaacaagcgacctttgaagagatgattgcccgccgtcctgagcgtgtgattgaaatcgcggttaaaggcatgctgccaaaaggcccgctgggtcgtgctatgttccgtaaactgaaagtttacgcgggcaacgagcacaaccacgcggcacagcaaccgcaagttcttgacatctaa

SEQ ID NO: 379570 - DNA, 1143 bp, Salmonella enterica
atggctgctagaccacgttctcacaaaatttcaattccgaatctatactgcaagctagataagcggacgggcaagatttattggcaatataaacatcctgtttccggacgctttcacagcttgggtactgatgaagtggaagctaaaaaggttgcatccgaagcgaacacgatcattgcagaacaaagaaccaggcaggttcttagtgttaacgaccgtcttgccagaatgaaaggcagaagaacggacattactgtcactgagtggattgataagtatattgaaattcaggacgaacggttaaaacaccgtgaactcagacctaattcttatcgacagaaagcaaaaccagtcaggttatttcgcgaacattgcggtatgcaatatttgaaagatatttccgcattggatatctctgagataacggatgcagttaaggctgaaggccataatcgtatggcgcaagttgttcgcatggttttgattgatgtattcaaagaagcgcaacataacggtcatgtccctccaggctataaccctgccctggcgaccaagcagccgagaaacaaagtcactcgtcagcgtctttctttggaagagtggaaaactatttatgaagctgccgaaaagcaagaaccatacctccagtgtggaatgttgctcgcgataataacaggtcagcgtttgggcgatatctgtaacatgaagtttaaagacatatgggacgatatgctccatgtcgaacaggaaaaaacaggatcgcgtttagccataccattggacttgaaatgtgaagcgctgggtttaactcttcgggacgttgtatctaaatgccgggatgcagtcatcagtaaatatcttgtgcatttcagacataccacctcacaagcaaaccgcggtgatcaggtttcaaccagttctttaacttcaacattcaaaaaagcacgtgacagaagtggactgaaatgggataagggatccccacccacttttcacgaacagagatcattatcagaacgcttgtacagagaacaaggtgtcgacacgcaaaaattactcggccataaatcaagaaaaatgacagacaaatataatgatgacagaggaaaagattgggtgatcgtcaacacaaaaacagggtga

SEQ ID NO: 379571 - DNA, 237 bp, Salmonella enterica
atgtcacgaatgatccccttactcgactgggccaatgaagagttcggagcgcaagcaccaagtgagcgtatccttaagaaatacgctaaaggcaaaatgatgatacctccagctgtaaaagtaggtcgttactggatggtagaccgtaatgctcgatttgttggtacgcttgccgaaccgaaaattccggcaaacgccagtccaagattacaacggattattgcagatggctgctag

SEQ ID NO: 379572 - DNA, 552 bp, Salmonella enterica
atgagcaataacaaactaacagacaggaaaatagctgaaattctggcgcgcgctgaaatctgcgacgattcagttttgactgactacaccgatattgcagcggcgatgcgagagctacaggaacgccgcaggctggacgggatacagcacgctgtctgtgaggtgtgtggagtaccgtgtaataatcccaatcacccacaaatggctgtggcacatgagtacagcgcccagccagtgccggtagtgccggatgatggccgcgctgaatttgaggcgtggatgcttaagaagtgggggcgcgagcggcaagaatatgatttcgcaatgggtaagtttcttcatggcgaaaactacgctgacagctacacgcggcatatgtggaaggcatggacagaaagccgcgtcgccctgcttcagagtaaatatcgcgacctgtcacaaccagtagatcatcagatttccgaatacgagaaaataatggggcaggctggcaactctccggtaattccgggtgtttatctggttgatattaataccgaccaccagcactga

SEQ ID NO: 379573 - DNA, 156 bp, Salmonella enterica
atgaaagcaatcgacttaggcaacaatgaatctgtggtttatggcgtatttcccaataatgacggtacgtttaccgccatgacgtacaccagaagcaaaaccttcaaaacagaggctggcgcacgacgctggttaacaagaaaccattgtgagtaa

SEQ ID NO: 379574 - DNA, 507 bp, Salmonella enterica
atgattaagtttcaagatttcagaaaacgatacagcgaagtattaaaagttgaagatgaagaaaagaagagttttcagaaggttgctggaatgattgttcgtcatttcgaaagctcgctagaccttgagtattctcagtatcctgtaacctttagtggaaacccggcagaaaacaacattttattaagttatgtttttatagcaaccgaaaaaggagggcgacatgttgagcttaaggcactcaggcctgataaaaaaggtgctctttcattttatgtttgtttaacagtggataaatcaacgatgtcttatcccaagaggacgttatatgcacgtttgtcgttacgttgtaatggtgatggatttacagtaacagttggcgaagaagcgcttgaaacagacttgagtaaatatccgactgaagcagagttggcggccatctcagaagcgactaagcatgtcatgcttattgaattaggcagtgatgcaccaaaaaggaaatactga

SEQ ID NO: 379575 - DNA, 297 bp, Salmonella enterica
atgctcttatctgaaataaaaacttaccgcagtaaaaaatggctggcagccgtcgggcagattgaacagtgcgtgttgtgcgggcggtggggaacgcaggttgcacatcgcaatgaattaaagggcatgggaatgaaaacggatgactgcgccacggcggctatttgtcaggaatgccatcatgaaatcgataacggcagtcacctgagcagggaagagcgccggtgtctgatgaacagggcgatcgtactgacagtgattaaacttgtacgaatgggaaaggtggtaccgaaatga

SEQ ID NO: 379576 - DNA, 555 bp, Salmonella enterica
atgatttatccagccagtaccggaaaaccgggcgaatattttcgactgaatacactggaaagcgtgtggattcagggaaaactccgtatgtggggacgatggtcatacatcggcagcggtaaacccggcaatatgtttaaccagttgctggcctccagaaaactgacaaaaacagccatcaatgaggctttacgccgtctgaaaaaatcaggaacaagcaagccagagctggaggcctttcttcgggaaatgatgaacgggaaacaaaaaagctggctggcgcattgtactgattccgaagcaatgttgattgaccgcgtcattggtactgtattagctgagtatccggcgctgaaaaagttgattcaccagcgttacgaagggtgtggagtgagtcagagaaggatggctgagttactaaacgaacaatatccagactggtgttatgcaacgtgccgcaatcgcataggtgtatggctaaaaatggcggaatttatgctttatctgccgatgcgtgaagcgtttgcaaccgatgcccacaaaattgcccgttga

SEQ ID NO: 379577 - DNA, 558 bp, Salmonella enterica
atgacaactcaaatcgctgttgaaactctctccccgatcacccataaccagattcctgttattaccaccgaacttttggcgcagctttacggcactgaacctgtgcgtattcgccagaatcatcatgagaacaaagtacgctttgttgaagggaaacactttttcaaagttgttggtaatgaccttaaagaattgcgggtagctttaaactactcacaaaatccagtttcccccaaagcccgctccctcatcctatggacagaacgcggagcagctcgccacgcaaaaatgctcgaaaccgatcaggcatgggaggtattcgagaagctggaggattgctacttcagccaaaagaatccttcagtgcgagtttcacgccagaaaagttacgacacgcgagttctctgttatcagcaaagcggcgtcactgtttccacaatcccgttgcgggatgatgacattgtcatttcccttgagtcatggctggaactggcgagagccaacggttggtttgttattcgcaaagatcaactggtggaaaaactgatgcagctttag

SEQ ID NO: 379578 - DNA, 219 bp, Salmonella enterica
atgaaaattggtaagcacgcacataatgtaaatacttcgtctgcattggctcccagaacaagatttgtcttttcaacttccggggtaaataaagaggaagtcattgaaaagttaaaggtcgtcattgaaaaaattagcaacgaggaggtatctcttgatcctcatattcatctggagtcctacatatcaggcgtgaacatatcctgctctcccgcctga

SEQ ID NO: 379579 - DNA, 528 bp, Salmonella enterica
atgagcatagtgctttattccgccgacagaagaggccggtacaacgcaaatgcattaatggatttttcttccatgcagccacctgtaactgacacctacgccattgatagctttattggcgcgaaatttaacttcaaaatctccgagcatgggctgcgatatcttttcccaaggagggaacttaatggtgatgaccttatggaacttattgttgaactggtacgccagatgcaatcatcacgataccagtcaatattcgcttgtaaatcaatagaagacgcagattcttttagaaagaaataccgagaacaggaaggtccgcaaccaatttatgaaattcttatcaatgaggataccaatgttcatcatggcgatatgcggttacttgacctgaacgcatcatcagataatgccgcaatggttttcacgagagcaatatggtactggtctggaatatcttccatgaatccattctgggagtatatcgtccctcttccaattcaagttggcagcatggtagaagaatag

SEQ ID NO: 379580 - DNA, 738 bp, Salmonella enterica
atgaaagaacaggatattctggcgcacgcccgacggtgtgcgcctgcggagtcgtgtggcttcgtggtgagaacacaggcgggagaacggtatctcccctgtgtgaatatttctgccgcgccggaggattatttccgtatggcgccggaggactggctgagggctgaaacgcagggggatattgtggcgctggttcacagccatcctggcggccagccgtatctgagcgatgtggaccgcaggctgcaggttcaaagcgacctgccgtggtggctggtatgcgccggccaggtacataaattccgctgtgtgccacacctgaccggacgacagtttaaacatggggtttttgactgttacacgctgttccgtgatgcctatcatctggcggggattgatatgccggattttcaccgggacgacgactggtggcggcatggtgacaatctctatctggataatctggagacgacgggattttaccgtgtcagcgcagccagtgcgcagcccggcgacgtgctgatttgctgctttggctcctccgttccgaaccacgcagcgatttactgcggcgacggagagctgctgcaccatattcctgaacaactgagtaaacgtgagaggtataccgacaaatggcaacgacgcacgcactccatctggcgacaccgggcatggcgcgaatttgcctttacggggatctgcaacgattttgccgccgcgtcagcctgcaggtag

SEQ ID NO: 379581 - DNA, 303 bp, Salmonella enterica
atgcttcatactaccaatcccgtcatcaaacacaaagccggtttgctcaatctggctgaagagctcagcaacgtgtcgaaagcctgtaaaatcatgggcgtctcgcgcgatacgttttaccgttatcgtgaactagccgatgaaggcggcgttgatgcgctgataaatcgtagtcgccgcgtacctaaccttaagaaccgtaccgatgaggcaactgagcaagctgttgttgattatgccgttgcgttcccggcccatggtcagcaccgaactgcgcaaacaggacgtttttatctccggtag

SEQ ID NO: 379582 - DNA, 774 bp, Salmonella enterica
atggtcagcaccgaactgcgcaaacaggacgtttttatctccggtagtggtgtccattccgtctggctgcgccacaaccttgagaacttcaaaaaacgcctgaaagcgctggaagaaaaagtggcccgcgatggcattgaactgactgactgccagatcgccgcgctggagcgtaaagccagtgatgatgaagcctgtggtgagattgaaaccgttcatccgggatatctggggtcacaggacacgttctacgtgggcagcctgaaaggcgttgggcgaatctatcagcagacgttcgttgatacatactcgaaggtggctcactgcaagctctatatcaccaaaacgccgattacagcggctgatttgctgaatgatcgtgtactgccgttttatgagtctcagggcctgccgatgctaaggatactgacagacaggggtacagaatattgcggcaaagtggaacatcatgattatcagctttatctggagataaatgacatcgaacacacgaaaacgaaggcgatgtccccgcagaccaatggcatctgcgagcggttccataaaacgatactgaacgaattttatcaggtgacgttccgcaaaaagttatatggcgattttgatacattacaatcggatcttgatgaatggctggttcactataataatgagcgaacccatcagggaaaaatgtgctgtggccggacgccgatggaaacgttacttgatggaaaacgcatctggtctgagaagaatttaagccagatgtaa

SEQ ID NO: 379583 - DNA, 2112 bp, Salmonella enterica
atgtttaatatccgcaatacacaaccttctgtaagtatgcaggctattgctggtgcagcggcaccagaggcatctccggaagaaattgtatgggaaaaaattcaggtttttttcccgcaggaaaattacgaagaagcgcaacagtgtctcgctgaactttgccatccggcccggggaatgttgcctgatcatatcagcagccagtttgagcgtttaaaagcgcttaccttccccgcgtgggaggagaatattcagtgtaacagggatggtataaatcagttctgtattctggatgcagacagcaaggagatattgtcaatcactcttgatgatgccgggaactataccgtgaattgtcaggggtacagtgaagcacatgacttcatcatggacacagaacagagagaggaatgcacagaattcgcggagggggcatccgggacatccctccgccctgccacaacggcttcacagacggcagcagagtattatgctgtctggtcaaaatgggaaagggatgcaccagcaggagagtcacccggccgcgcagcagtggtacaggaaatgcgtgattgcctgaataacggcaatccagtgcttaacgtgggagcgtcaggtcttaccaccttaccagaccgtttaccaccgcatattacaacactggttattcctgataataatctgactagcctgccggagttgccggaaggactacgggagctggaggtctctggtaacctacaactgaccagcctgccatcgctgccgcagggactacagaagctgtgggcctataataattggctggccagcctgccgacgttgccgccaggactaggggatctggcggtctctaataaccagctgaccagcctgccggagatgccgccagcactacgggagctgagggtctctggtaacaacctgaccagcctgccggcgctgccgtcaggactacagaagctgtgggcctataataatcggctgaccagcctgccggagatgtcgccaggactacaggagctggatgtctctcataaccagctgacccgcctgccgcaaagcctcacgggtctgtcttcagcggcacgcgtatatctggacgggaatccactgtctgaacgcactctgcaggcgctgcgggacatcaccagcgcaccaggctattcaggccccaggatactattcgatatggcgggggcctccgccccccgggaagcacgggcactgcacctggcggccgctgactggctgacgtctgcacgggagggggaagcggcccaggcagacagatggcaggcgttcggactggaagataacgccgccgccttcagcctcgtcctggacagactgcgtgagacggaaaacttcaaaaaagacgcgggctttaaggcacagatatcatcctggctgacacaactggctgaagatgctgcgctgagagcaaaaacctttgccatggcaacagaggcaacatcaacctgcgaggaccgggtcacacatgccctgcaccagatgaataacgtacaactggtacataatgcagaaaaaggggaatacgacaacaatctccaggggctggtttccacggggcgtgagatgttccgtctggaaaaactggaacagattgcccgggaaaaggccggaacgctggccttggccgatgatgttgaagtctatctggcgttccagaataagctgaaggaatcacttgagctgaccagcgtgacgtcagaaatgcgtttctttgacgtttccggcgtgacggtttcagaccttcaggctgcggagcttcaggtgaaaaccgctgaaaacagcgggttcagtaaatggatactgcagtgggggccgttacacagcgtgctggaacgcaaagtgccggaacgctttaacgcgcttcgtgaaaagcaaatatcggattatgaaggcacgtaccggaagctgtatgacgaagtgctgaaatcgtccgggctggtcgacgataccgatgcagaacgtactatcggagtaagtgcgatggatagtgcgaaaaaagaatttctggatggcctgcgcgctcttgtggatgaggtgctgggtagctatctgacagcccggtggcgtcttaattga

SEQ ID NO: 379584 - DNA, 672 bp, Salmonella enterica
atgtgtggacgctttgcacaagcacagacccgcgaagaatacctggcatatctggccgatgaagccgagcgcgatatcgcttatgaccctgaacctataggccggtacaacgtggcgcccggtaccaaagttctgctgctcagtgaacgcgacgagcaactgcatctggatccggtattctggggatttgcgcccggatggtgggataaaccaccgctgattaatgcacgggttgagactgcggccaccagcagaatgtttaaaccgctatggcaacatggccgagctatcgtgtttgctgatggttggtttgagtggaagaaggaaggcgacaagaaacagccgtatttcattcacagaaaggacgggaagccgatattcatggctgccattggcagtacaccgtttgagcgcggcgatgacgcagagggattcctgattgttacctccgcagctgataaaggtctggtagacattcacgaccgtcgtcctctcgttctgtcacctggcaccgcgcgaaaatggatgcgccagggcataagcgggaaggaggtagaggagataattactgatggtgccgtgccgacagataaatttacctggcacgccgtgaagcgcgccgttggcaatgtgaaaaatcaaggggaagagctgatcaaacccgtcacctga

SEQ ID NO: 379585 - DNA, 165 bp, Salmonella enterica
atgaacaagaacaccggacaaattaatggttacatcttgaacgactacaacagcgtcagacctcaccattataacggtgcactgacgccggaaaaacctgagaacaggtaccgtttttactgtaaaaccgtgaccaatagtgtcgatgcgcagcaaaacgtataa

SEQ ID NO: 379586 - DNA, 459 bp, Salmonella enterica
atggcgttaacagatatcaaggtcagaacagccaagccaacggataagcaatacaaactgaccgatggcagcggtatgcacctgcttgttcatcctaatggttctaagtactggcatttgcagtaccgttatgacggcaagcaaaagatgttggcacttggggtttaccctgaaatcacactggcggatgccagagcacgtcgtgacgaagcgcgtaagctgctagcgaatggcgtctctccgggagacaaaaagaaaaatgataaggttgaacagagtaaagcacggaccttcaaagaggtggcgatcgagtggcatggtaccaatcaaaagtggtctgaagatcacgcccatcgagtgctaaaaagtctggaagataatctctttgcagcgcttggtgagcttaatatcgctgaattaagaactcgcgatttattagcgccaattaaagccatatag

SEQ ID NO: 379587 - DNA, 876 bp, Salmonella enterica
atggcctctgacaaaaccctaaagcaagcgatatcaaatatcactatctggcgcaaaggcgaacagcgtgcgccacataagccattattgctgttgcacgtcctctcacactatcggcagggtcatgatcgcctgtttaactatggttctgaaatctacgagcccttgctggatcttctggaacgttatggaccgcagcgccgtgaccagcgcccggacatgccgttctggcgtctgaagggcgatggcttctgggaactacaaaacgcggaactgtgctcaaccaagggtagccgccagccgccccgacgtgaactcatcgaatataatgtcgcgggtggatttgatgccgataattttgcgttggtggcaaaaaatcacaggttaattgatacgctggcgcagcagctcctggaggcgcatttcccggtcagtattcaggaagacatcgctgacgagatgggttttgatattcgcacctctctccgtcaacgcgatccgaagttccgtcagatggtgctacgtgcttacaattatcagtgcgcgatctgcggcttcaacatgcgccacgacaatgcgccaattgctctggaagctgcccatatcagatggaagcagaaccatggcccttgtgaagtacctaatggcctggcattgtgtgcgattcatcataaagcgttcgatcgcggctcgattggtctagatgaaaatatgcgtgtggtggtttcaggtgcggttaatggcggtggggtggtgcagcggctgttctgggattttgcgggaaaggcgattgcgttgccaccggttaaagaaaattatccgggcgagcagtttgtggaatggcataggaaagaggtgttcagaggagagtgttga

SEQ ID NO: 379588 - DNA, 1200 bp, Salmonella enterica
gtgagttggccgatggtgaagcttaaggattgctgcgaagttgtgggtggtgcaacacctaaacgtaatgtcgcatactactgggatggtgatattccttggataacgccaaaagatgtatcaaatcttagtgaaccttatatttacgaggcaccagaatatatatctaaagcagggtataaatctgctgcaacatatatgttgccagtaggaacagttctactcacatcgcgagcaccaataggaaatgtagctattgctggtattgaactttgtacaaaccaaggttttaaaagtttaattcctgggcaaaatgttcacagtaaatatttatatcattgtattaagaaatttgtgccacaattagaattattaggtaatggtgcaactttcaaagaagtgtctaaaagagttgtagaagattttgaaatcccgttacctcctttggaagaacagaaacgtatcgcggctattctcgataaagctgatggtgtacgtcaaaaacgcgagcaagccatcaaactggctgatgattttttgcgtgctacgtttctggagatgtttggcgatcctgtgtctaatccaaaagggtggaaggtaaaacctttaaaggaactctctgtaaaaatagctagtggttctacacctaaaggtgggagcaaggtttatgttgataaaggtattaccttttttagaagccaaaatgtttggaaaaatgatatcaggctagatgatgtcgcgtacattgatgaaaaaacccataacagtctaaagaaaagtagtctaaaacataaagatatattgatgactaaaacggggcggttcaatacagaaaacagcagccttggtcgtgcagctttgtttttgggtgatgacgacagtgcaaacgtcaatggacatgtttatttgataagattaaaggcaggggtgttacatgaatttattgtatacattttgacttcaaatgaatatcgtgaacatattcgtgaggtttgtgttggtggaatagataaaagacagcttaacaaagaacacattgaagatttccctattatctgcccgccagatgaccttcaaattgagttcatgaggaagttaaatggcattcaaaaaatacgttcaaatgctatgatgggattgaaagaggttatccctctatttaacacactcaaccaaaaagctttttctgatggattttaa

SEQ ID NO: 379589 - DNA, 1635 bp, Salmonella enterica
atgatcaccggtgacttaaaaagtaaaattgacggcctgtgggaagatttctgggtaggcggcatcactaacccgctgaccgtaatcgaacagatcacctacctgatgtactcccggatgctggatacccaggaacaacgcgacgagaagcgtaagcaaatcgcgggtattgattttaaaccgcgttttgcgcaagaacagcaggagttccgcttcagccactatagcaaccttggctcggacgaaatgatggaagtggtgcgcgacggcgtattccagcatttccgtcagctcggccaggccgatgcgtcgaaagtgacgctgctgggcaactttatgaaagatgctcgcttggagattgttaagccgtcattgctgaccaaagcggttgaggtgatcaaaaacctgccgctggatcgcggtgacaccaaaggcgatctctacgaatatctgttaagcaagctgaccactgctgggatcaacggtcagttccgcacgccacgccacattatccgcacgatggttgaaatgatggaaccgaaccccgcacgcggcgagacgatttgcgatccggcctgcggcaccggtggctttctggcgaccagctatgaatatctgctggagaagtacagttcactggagtcgattcataccgagattggcaccaacgaacgcggcgagttggaggagcaaaaaatctttaccggcgacctgctgatgccttggcgtaaccatgtggataacaacatgttccacggttacgactttgacaccaccatgctgcgtattgccgccatgaacctgattatgcacggtgtggaagcgccggatattcactatcaggacaccatgagccagagtttcagcgccaacttcccgcaggccagtaaaaacgccttcaaccttatcctggcgaacccgccatttaccggttcattggatgaggaagatatcgactccacgctgtcggcgatggtgaaaaccaagaaaaccgaactgctgttcctggcgcggatcctgcaaatgctgaaagtgggcgggcgcagcgccactatcgtgccgcagggcgtgctgtttggctccagtaaggcgcaccagtcgctgcgtaaaacgctggtggaagataaccaactggaagctgtgatcaatctgccttccggcatatttaagccttacgctggcgtggcaacggcgatcctgatctttaccaaaggcggccagacggatggggtctggttttacgatctacaaaatgatggctacagcctggatgacaagcgcaacccgataaaagacaacgacctgccgcatttgctggcaagctggaagcgttaccgtactttgcgcgggctaccggttgataactttatgggcgagaaattagcctcgttactgaaacagcagtacccggaagggattaatactggtgttgattttaaagatcgcacgcaggcggcgtttgtggtgccgaaagaggatattgccgcgcagaaatacgatctctctattaatcgttataaagaagtagtgtatcaggcggaggaatatgaagatccgaaggtgatactaaaacgattaaaagatctggaaaaagagattctggcggatttggatgagctggaggggatgctgtga

SEQ ID NO: 379590 - DNA, 3414 bp, Salmonella enterica
atggagcagtctctcaattttgaaatgttgcgcagccagtggccggaactggcagaactcgcgtgtatggcggaacgctatgttcactctgacccggaaagctgtctggttaagctgcgtaactacactgagttgatggtgcgctggttgtatcgccaggagcgattgccggaaggtattaaggcgaatctgtacgatttgatgaacgcagatgtgtttaccagcatgatgccggaagccatcaccatgaaaatggatgcgttgcgtatccacggcaaccgtgccgcgcatggtgggcgaatcaaagccaaggatacctactggctactcaaggaagcatacctgttaggcatctggctatacgtccgctatgccaacggtaacgttgacgattgccctaaatttacccttcctcctctgacgccatcttctgcgagttccgataaaaaacacctggaagaagcaatacaggcgcaaatcgaaagccgtgatcgtgaactggcgcttcaacgcgcgctacagcaggagcaggaaaaggccgaactgctcacccagcgcctggatgaagccagagcacgcaaccagcatgttgccgacatcctctctattgatgaagcggaaacccgccgccgcctgattgactcccgcctgcttgctgctgactggagtgtaggcgaagaacttaaaaataccgatcaggttacgcaggaacatcctgttaaagagcagcctaccgcaaccggtgacggttatgcggattatgtcttgtgggatgaggcgcataaaccgctggcggtggtggaagcaaaaaaaaccagcgtcaatgccgagcaggggcgaattcaggcccgactgtatgccgactggctggaaaaagaatatggtcagcgcccggtcatcttctacaccaacggttatgatatctggctgtgggacgaccataaaactcatggttatcctccgcgtcgggtatttggcttctacagcaaggaaagcctgcaataccttattcagcagcgtgaaactcgtctgccgctgaacagtgtgccgcacgttaaggataacgaaggtaaggccgttgccggacgtttgtatcagcttgaaaccatcgcccgcgtcagcgaacggtttaccaacaagtaccgacaatcgttaattgttcaggcgacaggtacaggcaaaacccgcgtggcaattgcgctaagcaaactaatgattgatgcccgctgggtaaaacgtgtcctgtttctttgtgaccgcaaagagctacgtaaacaggctgcaaatgcgttcaatcagttcaccaatgaaccgctgtatgtggtcgggaaatcgaagaaagcagacaggcagaatgccaggatctacatcgccacctatcccggcatgatgaaaatcatggaccattttgatgtcggttattttgatttgatcatcgccgatgaatcccatcgttcgatctataacgtttacggcgatctgtttaagtattttgatgccctccagattggcctgacagccacgccgatcgacatggtgagtaaaaccactttcggcctgtttggttgtgaaggacgtatccctaccgccaactacagcctggaagatgctatcgccgataacaatctggtgccttatgaggtcgtcacgcacaccacggaattcctgcgcgaaggcatcaaacgggagaaattaagcgacgcacaaatccgcgagctggaagagcagggtatcgatcccaataccctggaatttgatggcaaggcgctggatgaggcgatctacaacaaagacaccaaccgctatatcctgcgtaacctgatggaaaatagcctgaaagatcgggacggccagcttcccggtaagaccatcattttcgcccgtaaccacaaacacgcgctgttgttgaatgaattgttcgacgacatgtacccgcagtttgccggacgcttctgccaggtcatcgacaactacgatccccgtgccgagcaactgattgatgattttaaagggctggatgaaagcaccaacaaagagctgaccatcgctatctctgttgatatgctcgataccggtattgatgtcccggaaatcgtgaatctggtctttgccaagccggtcaaatcgaaagtgaagttctggcagatgattggccgtggtacgcgtctttgctcaggactgtacggcaacgatgaaaacggcaaaccgctggataaacagaaattccgcatcttcgatcactggggtaattttgagtatcacgagctgcataccgaagaggccgaggtcacagcgacaaaatcgctggcgcaaaaacgcttcgaagcgtgggttatgctgggagccgctgcgcagcgtaagttcgacaaacaggcggtggatttagtcgctcaccagctccgcgagcagatcaacgcgctggatgaaaagtcgattgccgtgcaggaaaagtggcagcaaaaagcgcagtacagcgatgaaaaagtgctgcgccagctttctccgaaaacgcagcaggatctgttatctgttctggccccgttgatgcagtggctggacgttcgcgggcaaagtgatgccatgcgctttgatatggatattctggcggcgcaaactgcccgttataccaacccggaagagctggatgtgctctggccggtcatcatcgagaaagtggaacgtctgccgccgcatctgactcaggtacaacagcagggacaacggattaatcagcttcgcgatttgggctggtggaagcaggccaccttggaagaactggaagatatccgcattcatctgcgcggcatcatgcacctgatggaaaaagacgcgacgccgaaattgggttcgatacaggtggatattaccgaagatgcgaacctgatccagacggaaacccgtaaaaccaatatccgctcgattgatttcaaactttatcgccagcaggttcagggagcactggagccgttgttccagcaaaatccggtgctgaaaaaaatccgcaacggcgagccagtcacgcgaaacgagctggatgaactggcgaagctggtgctgatccagaatcctaacgttgatatccgggcactgaaagaattctacccgcaggcgaccgccagcctggataaactgttgcgtaccatcatcgggatggacagcgacgcggtggaagtgcgctttgcgcagttcgccgctgacaacagcctgaccagccagcaactacgctttctgtcactgctgaaaaaccacatccgcgattacggcaccattgaaatgcggcagctctttgaacaaccgtttacgcatatccacaacgaaggcgttaccggtgtgttcccggatctagagcagatcgtccggttgcaaaagatagttgaagagctgggtgttgtgaccgacgcagcaacggtataa

SEQ ID NO: 379591 - DNA, 525 bp, Salmonella enterica
atgaacaacgtactgctcaaccactaccaggcctgtctggatgattatactcgcccggctgttctccatggtcagtgccagcaaggtattaaccgctggcataagctggcgatggtgccttgcaaactccccggaggcgatcttgccgaactggtgatccccgaacggctccagcgcgttctcactattccgacaaccgcaccgataacgacagttcaggtcatcaacaaagatatgatgtatttactgctgccaggggtactgatcagtgaatgcgagcggttggggatgcgccgcctcagcaataaacttgtgtctttgtttcaacagttcaattcgccgggagtgaaggaatgcctgacgctgctatgttggtcagaactggcaacaagtattaatcacgatgaatggaacgaactgcaccgactgcaagctgaggctttaatgcgatggattgacgaaaagctacagacactctgggagttgcagccgcagatagaagactacgtcgctttgaataactaa

SEQ ID NO: 379592 - DNA, 576 bp, Salmonella enterica
atgaaagaaaccacggcccgtcatgatgtactgctcaacacctatcagcgttggttgagcgatctgaccagtatcgctatcaaaaatggcatgtgccacccgaacgtccagtccagccacggtcttacactctcagcgctgtatttcccggaggctggagccgtcactgcggtggtgccgcaaagcctgtaccggatgatttatggcaaaacgcagccagacccactgagcattcagcgtgattttctaatcagcctcgacatcaacacggagctgttattcacccatgccgggctggagggggttttattgagtgaatgcgtcaggctgaagcaaaaccaccttgccagcaaactgcgccatcttctgacgcgggtcaggtcgcgtgagcttcgccagaagcttatctggctgtgctggtacgatttgatgatgggggctccggtagacgactggctggatatgctggcgctggcggacgatgtacaaattaccacttggctgatacaccggcaggaggagaatacggtgctgacggatctgatggatgagtacgttgtgtttatgcactactga

SEQ ID NO: 379593 - DNA, 207 bp, Salmonella enterica
atgacaacattaccttccgaagtaaacgatgaattagtcgatatgaaatttattactaaatattcaaaactaacggacaaatggttttacaagctgattaaagatggcgagtttccaaaacctataaagctgggtcgcagttcccgctggttacgcagtgaggtggaaacctggttccagaagcgcattgatgaatcacgtcagtag

SEQ ID NO: 379594 - DNA, 636 bp, Salmonella enterica
atgaaccaacgttataaccttgataacagacatgctcctttcaacaaacgttatctggaaagaatgtggatggtgttgaataacgctatcaaccaacattcaagaactctggctgtaatagccatactcagattacctgagtatcgggatattggcgacagtatcagtagcatcccagaccacaatggaaatattatgtccagatttattgaatcactgagagaaaagataaccgcctatcaaaaacgtaaagccaaacagaatattcgagttcattatagtgagttacgctatgcctgggtcagggaatatgagtcaggtaaaaagccacactatcatatcgttttattattcaatcacgacaccttcaatacgctgggacactatcgaaatgaatctgacaatcaggggacgcttattgcggatgcctggttgagtgcgttatctctttctgcattccctgaatatcgaacactggtccactttcctgataatccattgtattacctgcatgctcattcaactgactttgttaacatctacaatagcctaacgtttcgcctgagctattttgctaaagaacgctcgaaaatctatagccgtgataatcgttcttttggatgcagccagcgctga

SEQ ID NO: 379595 - DNA, 213 bp, Salmonella enterica
atgaataagtccggagatggaaaaaagccaaacatcagattagataacgcgctattcaatgtgattaaatataataaaggcgaatctgtgtttagtgatgttacaggcaaccaaatatttgggtgtgagtgggaagatataaaaaataaaataagcgtttattttcatggggggaatgagtttaaagatgcgttttccagtgtaatgaaatga

SEQ ID NO: 379596 - DNA, 639 bp, Salmonella enterica
atgatgttggtattacatacggtaatgcagagatacaaactaatgtattctacaccaacaatttcatcgttttgtttttctactgatgtatttgacagtgaaaaaggttgcgtagacaaaacggcctttctacttgcgctggatgaaatgagtttttatatagatcgtgaatgtgttcaaagcgaaattatggaggcgaaaagatcgtgggaattaatccaagatatggccgaaaaccctctcccattcccggagaagacttactctgcaaaatataaagatgattatttttgggctattaagtacatagataaagtttacggagaagataccgtccttcatatcgataaaattaataatgcctgcatatcggatcagttgagggtatatcacaagtacgatatttgtttctcaacaagaaagatgaatgagtcagaactaaagctttttgttgtgcgaatgaaaaagaccagaagtcagaataaatatcgtgaatccgtgaaggataaaaaagtgctaaatacatatattagctccggagccaaagcgaggcttacggctatggctaaatatcatggaatgaatatcaatgaggaactggaacaactcattaatcatgcctatacaaaatatcggtag

SEQ ID NO: 379597 - DNA, 276 bp, Salmonella enterica
gtggttcagtcaatacgcagaagcgaaatattggccgaaaagtcggtggcgggattggtgctatcgcaggcggcgttgctggtgcggagggggccactcggcgcagcggcaggctccattattcccggcattggaacgatcgccggaggcgtgatcggttttctggtcgggatgggaagtagcgctgcgctgggcgcaatgactggcgggaacctggatggtgaggtgcttgatgagtatctctgccatgactgtctgctgacattcaatgattaa

SEQ ID NO: 379598 - DNA, 714 bp, Salmonella enterica
atgcctcagactgaacgccgtcatgaacggcttgccgacaggctgacgcaaatcattcgccgtctgtttgccggggagaatctcaatatgcgccaccttgcagaagagtttggtgtttccgttcgtaccctgcgccgggatctccgcgaacgcctgaccggattggatctggaatataacgacggtcattgccgcctggtgactgccgacagtgcaggtcaacgcgaaagaagcggactaacacttgcccggcaaagcgatatggaagcgctgtttccggggctggatcttcgtctggcaggtgcgctgctggatgaaactgaacatagcccctgctgcatctggcccccggtggcactgactgcgggttcatttaccgggattttcagccatctcgtcaccgcgattaaccgacgcaaccgtatctccctgctggcgaaagggcagcgctgcgagtgcctcgcgccttaccgtcttatctgtctggaacgtaactggtatctgacgggcgagttatggaatgacattgccgtgttcccactggccgagatccagaatgtggcggtgctggcggacacctatacacgtaatgaaaccatcagccgtcttacccgtcatcccaactttattaatgccttaccgcattaccggtttatccgggatctgctcgccacctttaaatccggcccgttcccgaacggtgccgacgaataa

SEQ ID NO: 379599 - DNA, 219 bp, Salmonella enterica
atgctgatgattcagcacaacaccaccggatggagttcactgccggtttatctgaacgaaaaggagtacatcatgaaaatccagaaaattacgcttcgcctctgtcatgccgggcgtcgctgcccggactgcggttcatcggacgatatcattccgtggggagacggctggatgtgccgcgactgcggctgtgagtggggaaaaaataacggttactga

SEQ ID NO: 379600 - DNA, 204 bp, Salmonella enterica
atgggattctgggatacagcgggtcggcttgcgctcagcgcggcaaaagaggggctgaacaccgtcagggatatgaaagaaacgcacgatcaactggaagggaaaagcagctcgcaactggagcagatcgccgatagccgaaaggtgggagagatggaaaggcggcttgcccgcaagatcctgcgcgatcgcggtgagagataa

SEQ ID NO: 379601 - DNA, 927 bp, Salmonella enterica
gtgaagatgaaaaacagaatcacacaagggttattggtcgcatcgctgatgacggcaagcgccggggcatgggctgcgggtgcgggtgcggcaaaaaccgccgtagatgcactgaactgcacggacgacagttgcccatatccaaccgacctttataaatccgatccggtttatgcccacgatattgaaagcaatttaagcgcggcgggaatggcaaatctgattggcccttctggcaagctggccgggccggaagatccgttgtcacccgtacagattgggggcaagacctggctgaagagtatggtgtgcgaggcgggtaattgtggttatcactatttcaactttctgtatcaacctgatagtcatcggttactggggtactatttcgatggtaaaggggtctgggtgggtaagcctgataacgaagaggccagtatcctgacggacggtgagataaaaaccggccccggtgaaacaggtactgcgccggttgccactgcacccgcttccgcgcctgcatcaccggatgcgccgccagccaacaccatctggacgttcagcaataaaggcacgacgctctggcaggcctgtggcggacagaacagcgcctgtgcgattgtgggaaattcaaaatggtacgttgcggtgctgaaccgtcgttcggctaccggctgcgcttttggtgacttttatgtcgctgaccggagttcagcgtcgtggcaccggtacgacaccggcacctgtagcgccgatgcctacatccaggagggcagtatcagccacggtcagtattcatcggtcgatattcttatcaacgggtcgctggtgaagcagttccctattggttactggtcagcacagaaatcgttctccggtggcaaccgaccttcctggtcgaaagcgaaacaaaaaaatcagcactaa

SEQ ID NO: 379602 - DNA, 519 bp, Salmonella enterica
gtgctgcttaacagtcacgatggcaccagcagctaccgcatgatgccgggaatgtaccttcaggtatgcagcaatggtctggtgtgcagtcagtcttttggcgacatccgcgttccgcataaaggcgatatcgtcgggcaggtgattgagggggcatatgaagtgctcggcgtgttcgaccacattgaacagggcaaagaggcgatgcaggctgtcacgctttcatcggagaaccagaacgcttacgcccgcgccgcgctggcgtaccgctatggagaagagcatccccccgtcaccgaagcgcaggtgctgagcgcccgccgctgggaggataagaaagatgatctgtggaccacttttcagcgggtgcaagagaacctgatgaaaggtgggctgaatggcctatcggcacagggtaaacgcagtcacacccgcgccattaaaggtatcgacggcgatatcaaacttaatcgcgccctgtgggtgctggctgaacaaatgcagcaggcgctgagctga

SEQ ID NO: 379603 - DNA, 501 bp, Salmonella enterica
atgaatactgcaataccactgataccggcatccgcgcccgatgcgccacctgccttaacgccgtatgcacagcgcactatcagaagggccgtgaatctgctggataaatacctgcgccagcccggcgtggcctttacttccgcagcctccgttcgcgactggctgcgtctgcaactctcgcctctggagcgggaggtatttatggtgctgtttctgaataatcaacaccagttactggcgcatgagacgctgttcaccggcggtatccgccatacggaagttcatccacgggaagtcctgcgcgccgccatgcaccataatgctgcggcagtggtgctggctcataatcacccgtccggggatgccgaacccagtcaggccgatcggctgatcaccacacggctggtaaacacactggaactggtcgatatccgcgttcttgaccatttcgttgtcggccaccgggatgtcctgtcctttgccgcacggggctggctgtga

SEQ ID NO: 379604 - DNA, 330 bp, Salmonella enterica
atgacccggaatcaaccctccgtgcctgtccagggcctgcggagcgatatcgtgccctcgtttggtgcgcggttagtgcaggaagggtgtcgcctgcactttctggccgatcgcgccagtctctgtggtgatttcactgcggaacaactacacacgctggatatcacctttccgcagtttgtgaagcaactggaatcggcgctaaaaaacggggcgctcgatccgcgccagccgcaccgccacagcatcaccctcaatggcctgacctgcgaagccgacaccgacggtagccacggctacgtttacctcactatctacccgaccgaataa

SEQ ID NO: 379605 - DNA, 540 bp, Salmonella enterica
atgagccgctttcgccatgcgctggccgagcgagataaccatatcctgacgccgcgggcggtgattattctgctgtgcctctgtctggcgggcgtcggatacggctggtaccgcgcaccgcaaaagctcaccctctggttcccgccggacctgcgcagcggcagcacccgcccgtggtgggaagtgcctcccgccagcgtctacgccttcaccttttatattttccagcagctaaaccgctggccggacaacggcgaggaggactattcccgcaacctccgctcgctgcgcgcctacctgacgcccgcctgttacacccggctggagcacgattttcaggtacgacgcaatggcggtgaactgcgcgaacgcacacgcggcgtgtatgagcttcccggccacggctacagcagtctggtgcatgacggcgataaacgccccatcccccgcgtcgagaccttaagccgggatgcctggcgggtgacacttgatgtagcggttgaggagtattaccagaacggtgaacaactctccatttga

SEQ ID NO: 379606 - DNA, 240 bp, Salmonella enterica
atgacgaccatcccctttctccccgaccgcctcaaccgcgagccggtggtctggcgcggtctgaccaccagcgaactgtttctggtgctggctctcggtcttggcgtcggctgcgcgttcggcattgtgctggccctgataacccactactggccgttgatcccccggttcagcgctggcaggtgcggcgttgttcattcagggtggcgggcgagttctggcgcgcgccaaacgcggtaa

SEQ ID NO: 379607 - DNA, 318 bp, Salmonella enterica
atgcgctggctgttgttactgttattcgctgcattcaacgccttcgccgacctgccaacgatggaggatccatcacgcggccaaggtcagggcattatggagacgctgcaaaactacggttttgacatcgtggtgctgctggcgctggccatctgcgccgtcggttttctggtggtggcgaacaactgcattgccacctactccgagatccagagcgggcgcaagcagtggaaagatttgggctcgatggcgggcgtcggcagtattcttctggtggtcatcatctggctgctcaaccaggcttcggacgtcctgtaa

SEQ ID NO: 379608 - DNA, 234 bp, Salmonella enterica
atgactgactcgcaactcgccgcctttcaggccgccagcctgagcaaaccggagaccgtcagcctgctcatactcggcctgtttaccagcgtcatgctgctgtggtgtgcctggacactaatggtcgcctggcagggagtctaccgccagcgcctgagctggcagagttttggcgcggtggcggcccgttcactgttactggtgctggtcagtttctggctggtactgagctaa

SEQ ID NO: 379609 - DNA, 309 bp, Salmonella enterica
atgttcagccgctcatcatttctgttactgactttgctcataggatctcaggcctttgctacccctgaatccacccaactcgctctcgcgctgaaacaactcgaaggcgtaaaaacctcgctggaactagcccggagcaacgccagcaccgatccacagtcacgccacttcttcgactacttacaggcgcagcaggatatctcaaccattcagcagggcattcgccgctaccttgccccggcaagagcgcagccacgctccgtccagccactcagcgccagctaccagcgagagaaccccgatgactga

SEQ ID NO: 379610 - DNA, 2457 bp, Salmonella enterica
gtggcaaagatgatcccttcatttggacctcaggcaactgaaagttatggagaggtggtgctttataagttaattgagagtcagctttctaatgattttaccgtgatacatagcttgccttggctgtgctcagcaataaaagaaatagatcctcatttcgcacctactggtgaaattgactttttaataatccacaaggaattgggagtacttgctctagaagtcaaaagtggcaaatatagggtagatggagttacatttgtacatttatcaaccggcaatataacttctccaattcaacagacgcgccataatgtccatggactggcaaggtggctagggggaaataaagaactacgattacgaattgggtatggtttggtctttcccgatagtgactttactaatcaaattttcagtgcagcattagttgatattagtgtgacgccaaataagtcgatagcaattgataaggggcaaattccgtcgttgggacagagagttattgatatcatgaattactggaaagattctcttaatgtaccagtaatgtctgatgcaaaaacacagaaattaataagtatgctttgcccacagtatgatggaaccccaaaatgggggactagagtattttttgataataaaatttggctacctttaacaaatgagcagagtgaagtggtaattacagcatgcgaccgcacacgaatgcttgtcaccggatggccgggtacgggaaagactttgattggtattgcgattgcccgagaaatggtaagtcgtggaatgcgcgttcttgtattaacttttaacagtttactggctgagtacctaacaaggcagttggattctgatcaagctaaatgtactgtttcaacatggcatcgtttatgcgtaattgcacgtcaccaactaggcatcaccactgaacaactgaatgatgattggtttaaaacaggatgtttagatgatataagaatggctatcgcgagaggtatgattgataattatgatgtgcttattatagatgagtgccaagctctacgtcctgaatggtgtagatatcttgttgagtggtttgcagggaaaaaaattatcgccttttgtgatgaaacacagctctttccatttgagtctggtattgatttacttcaactttgtgatttactgaaaattgaatctccgtttttactaactatagctcttcgaactcccaaaatgataactgaaaggttgttatcagttaggccaacttcttatcagttatattctatgagagagaaagaaccagaaacgttaaaggaagttgttttcagcactgattggtctttaacagaactactagaaaagctcatgcatgaaggagtaatgaaaaaagatattgtcgctttatataaatataatttacctctattatttgaaacaattcttatagaatatgacattagaacagaatcagtatctcgctatcgcgggctggaatccccaattattataattctggatgccgacagcatggtggatgctgagcttttttgtgcatattctcgtgccacaacattagttattgcaatttataatccaagagcaatgggtggtaagtctgcgggtaaatttcaagagcaagtactggccatagaagaaaatagggacaagcttaacgaatatcatctcacttccctagtgtgtaatatcatgcgtacccatcttggtttcaaacaattcgatatagaaagtattaatttgagctggcacaaagcatggggagtatggcttgttgaattgaatgatttaaatggatacgaatcattatggcttgattatcttgcttctaactttaagtctccaattttttactgggataaaaaatctcagtttgttttttactcttacaacctgaatggcaattttccaggtgactctagtgaaacaacgcctctaaaattagaacactgcgataactgtgatacatttgttccatatacaattggtctcaaatctgaatgcatattctgccacggagataccaatacattttacgaaaaactcaatccagatacgattgagggcataataaaatatgacacaactattttaatgaaaaacaattcaattccgattaaccaacttccaatttccttagctgcctttggggctcgacgatatgctgaaaaaaagagaggggtagctaaagatagccttgaattacctcatgggagaattttatatcgtgcggcgctggcattcgtacaatcaagaataatctaccatcccaaaggtacggaaattatcactgttgaattggctactgagttatttaataaatacaatgatattcagctgtcgctttcattgtctcaatggaaatcaatcgtttccagcgcttttagcacctgctttcagaaagggttgctcacaaaaaaaagtaagggcatttacattaccagttctaattaa

SEQ ID NO: 379611 - DNA, 633 bp, Salmonella enterica
atgagcgagcagcggccacctccttcacgtccgccacaaggaccggtcggctggctgctgtcgctggccggaaggtttatcgggctggttatcggcgcgctggtgttgagggtggtactggaactggcagggctatatttctggtggcctcaggaaggcagcaggcatgtttttcaggtgatgaggtgggaacaggcggaactgtttagcacattacaaccgcatccgctgaggaatgaaatggtgaggttgctggagaacgggacaacacacgcgcttttggctaacaggttcctgcagaaaccgttaaccgccctggcttatatgctggtgagttttatgcagcgcctgacatggcttaccactatgctccccctgctctgcctgtgtgcattaacagggctaacggaaggtctggtgcggcgggatctgagacggtttggctccgggcttgaatccatttttctccatcgccatatcatcaggtctggcaattcagtcgccgcaacgctgtgggtattttatctggcgcagccgctgtttatccccgcgatgctggttttactgcccgcctccttagggcttgggataacggtatggatgacggcagggagttttaaacgctggttataa

SEQ ID NO: 379612 - DNA, 1026 bp, Salmonella enterica
gtgctgccgcggcacaacgcgcgggcgtgggaagtggtggcgcaactggcggagcgcgttaacgacaaaaacacgccacgccctatgctgggccgcgatcctcacgtggtggcgctggagcagtacctcaatgcagagaaattttacgatccgatcctcgacggcctgctctcggcggtgcgctatgacaaaacctacttcgacaagattgtcgcctcactgctgccgctgctggaaaagctgaccactggcacgctcgccgccctgctcgccccggactaccacgatcttgatgatgcacgcccgatcctcgactggcagcaggcgatccgccagaaagcagtggtctatgtcgggctggacgcactctccgatgtggtagtcgctgccgccgtcggcaactcgatgtttgccgatctggtgagcgtcaccgagcatctctacaagtttggcctgaatgatgggctgcccggcaatagcgaaaaaccgctgcctatcaacctgcactgcgatgagtttaacgaactgatgggagaggagtttattccgctggtcaacaaaggcggcggcgcgggcatccaggtcaccgcctacacccagacgctgagtgatattcaggcccgcatcggcagcgcaccgaagacaggccaagtggtgggtaacttcaacaacctgattatgctgcgggtgcgcgaaaccgccaccgctgaactgctgacaaagcaactgccacaggtcgaagtgcgcagccgccaggtcagctccggcgtcaccgacacgcctggcggcatcaacagctttaccagcaacacccgcgagcaggtgatcaccagtaatgtgccgctaatcgataccgccgcgctgatccagcttcccaaaggccagacctttgccctgcttgaaggcggccagctgtggaaaattcgtctgccgctgcccgtagcggataagcactgccctctaccggagtctgtggcacaactggcagcatggatgcaggcacgccagcaggggcgggcggaatga

SEQ ID NO: 379613 - DNA, 546 bp, Salmonella enterica
ttgcacggggtagaactgaaagagtacgacgtcaccctgccgctcagcgagcgccccggccacacgctggtgctcggcaccacccgcgtcggtaaaacccggctggcggaactgcttgccacccaggatatccgccgtggtgaggtggtgatcgtttttgatccaaaaggcgacgcggatctgctgaagcgtctgtggacagaaacgcagcacgccggacgcggcgatcgctttatcctgttccatctggcgtacccggagatctccgcccgctacaacgccatcggccgctttggccgcatttcggaagtggcgtcgcgcctcaccggacagctttccggcgcaggcaactcggcggcctttcgcgagttcgcctggcgttttgtcaacatcatcgcccgcgccctggtagcgcccggactaccagctgatttcccgccatgtcgtcaatatcgacgccctgtttatcgactatgcccgcatcgtgctgccgcggcacaacgcgcgggcgtgggaagtggtggcgcaactggcggagcgcgttaa

SEQ ID NO: 379614 - DNA, 456 bp, Salmonella enterica
atgagccgctacgcgctggaggcgctgctgcgaccgcccgtggagttttacagcaccgtcaccgccagttgtggcgcattaatctgcctgacgcaagccccactgctgatgctgacgccgtggcaggcacgcctgatggcctgcgccctgatgctgctggccatgcgacgcggctggcagggctggaaaatcgtgcgctatcaccgcaacctgctgcgcctgccgcgctatgcgctgaccagcaggaaaatcccggtcagccgccagcggctgtttctcggtaaaggcttcgctggcagcccatccacacccagagactgtacgactgcctgcaaccggaagccgcacgctggctgctcccgggatggtgttaccgcctggcaagacacatcgaaaaacgcagcgaacacactctgcccggccttgcccgcctgctcagcgccgatcgctggctga

SEQ ID NO: 379615 - DNA, 519 bp, Salmonella enterica
atggcgcgaggtcctgccctgatcctgcggctgccctgcctcgcgctggcacagcctctgccggaagcgtacctgcgcgccgcagaacatttccgcgtgccgccggaactactgtgggccgtcacacaaaccgaaagcggggcgaacctgagcggcaaacatcgcccgtggccgtggacgctcaatatcaaaggtaccggctaccgctacgccagccgggagcaggcctgtgaggcgctgctggccgccatccgccgtaccagcccgaagcgcattgacgtggggctcgggcagatcaatatcggctggcaccgggcgtattttgcttctccctgcgacgccctgcatcccctgcaaaacttgtcgcttatcgcgcaactgctgcgtcaacgctacgatgaacgccccggaagctggcttaatgccgccgcccgatatcaccgtcccgcaggcggcgcgcccgctgcacgctaccgtaagctggtcagtcgccatctgccacaggccacaccgccatga

SEQ ID NO: 379616 - DNA, 675 bp, Salmonella enterica
atgaaacgcctgattctcctgttactgttcaccgccagcgcgtgggcgcaaccgcttgaggtgcagaccagccagaacgcgggctctactctcagaccgctgaccactcagcagcaggccaccgtctggggcgtcacgccagaggagtggcagcgctatctcacgctgaaacaacaggcgcgcggcgtctggtcgccggggctcgatccgctgaccaccctgggcgtggaggctgaaagcgatcatgaacgccagcgcttcgccgaactgctggtcaggcaggaataccggcggctggagaaagaactcgccttccagcgcgcgtatgacgcagcctggcagcgtctgtatcctggcctgacgccgctgaaaaccacctccgccagcacttcccgcgtttcgctgttcgtccaggaggactgccctccctgcgacagcctgctgcgtactctgctggcacagcagcgcccactggatatctggctcgtcggaagcgaaggcgatgataaccgggtgcgccgctgggcgatggcgcatggcattgacgcaaaactggtgagtgaacacagcatcacgcttaaccacgacgcgggccgctggctgctgttgggccagagcaaaatcccggtggcgctggaacgtaagggggagcaatggcgcgaggtcctgccctga

SEQ ID NO: 379617 - DNA, 639 bp, Salmonella enterica
atgaaacgactgctgacagctctgctcctgtttattttcaacggcgtggccgccgcctcccctgcaacgccagaagtcgttcgctacgaccgctatctgctggtcaacacgtcaccgcaacagccacttctggagcagcttaccaccctgtccgttccgcctggttttcatccgacggtcggggaagcgctgcagtacctgctgcgcgacagcggctggtccttgtgtctcgccgatgcgcgccgggcgcagctttatggcctcccgttaccgctgagccagtacaacaccggtccgctgcgcctgaaggccgccctgcaactcctggcgggcccggcatggcggatgaccaccgacgaaaaccgtcgcgaaatttgttttgccagtgacaattccctccccccgacggtggcttaccgtcatcccgtgtttctccgccctttggggccattaacggccccgttttttctcgccgggaccctacagcgcggtgatatccgcctggcggtgatagtgccgccggatgctgtttacctccatcaggtggtatggctgcgcagggaagacagtggcacgactggcgactggagcggattgatgagcgccgggccatattccgtcacggcaaacgccagctga

SEQ ID NO: 379618 - DNA, 2172 bp, Salmonella enterica
atgagcgctatctccctgatccaaccggatcgcgaccttttctcctggccgcagtactgggccgcctgctttgggccggcgccgtttttgccgatgtcacgtgacgagatggatcaacttggctgggatagctgcgacatcattctggtaaccggcgacgcctacgtcgaccatccgagcttcggcatggcgatttgcggtcgtatgctggaagcgcagggcttccgcgtggggatcatcgcccagccggactggaacagcaaagacgactttatgcgtctgggaaaaccgaacctgttcttcggcgtcaccgccggcaacatggactcgatgatcaaccgctacaccgccgaccgtaagctgcgccatgacgacgcctacaccccggacaacgtcgcgggcaaacgcccggaccgcgccacgctggtctatacccagcgttgcaaagaagcgtggaaagatgtcccggtgatccttggcggcattgaggccagtctgcgccgtaccgcgcattacgactactggtctgatactgtgcgtcgttcagtgttagtcgattccaaagccgacatgctgatgtttggcaacggcgagcgtccgctggtggaagtggcgcaccgtctggcaatgggcgaaaccatcgatcagattcgtgatgtgcgtaacactgcgattatggttaaagaagcgctgccaggctggagcggcgtcgactccactcgtctggacacgccgggtaaaatcgatccaattccccatccctatggcgaggatctgccgtgcgcggataacaagccggtcgcgccgaaaaagcaagaagctaaggcgattaccgtgcagccgccgcgtccgaagccgtgggaaaaaacctatatcctgttgccatcctttgaaaaggtgaaaggcgacaaggtgctgtacgcccatgcgtcgcgtattctgcatcacgaaactaaccctggctgcgcgcgggcgctgatgcaaaaacacggcgaccgctatgtctggatcaacccacccgccataccgctctccactgaagagatggatagcgtgtttgcgctgccgtatcagcgtgtgccgcacccggcttacggcaatgcccgtattccggcctatgagatgatccgcttttcgatcaatatcatgcgcggctgctttggcggctgctctttctgctcgatcactgaacatgaagggcgcatcattcagagccgctcggaagactctattatcaacgagatcgaagcgatccgcgacacggtgccggggtttaccggcgtgatctccgatctgggcggtcctaccgcgaacatgtatatgctgcgctgtaagtcgccgcgtgcggagcagacctgtcgtcgcctgtcgtgcgtctatccggatatctgtccgcatatggatactgaccatacgccgacgatcaatctttatcgccgcgcccgtgagctgaaaggcattaagaaaatcttaattgcctccggcgtgcgctacgacatcgccgtagaagatcctcgctacattaaagagctggcgagccatcatgtgggcggctatctgaagattgccccggagcatactgaagaaggtccgctgtcgaaaatgatgaagccgggtatgggcagctacgatcgctttaaagagttatttgacctttactctaaacaggccggaaaagagcagtatctgatcccgtattttatctccgcgcatccgggcacgcgggacgaggatatggtgaatcttgcgctgtggctcaagcgccaccgcttccgtttggatcaggtgcagaacttctacccgtcgccgttggcgaattcgaccaccatgtattacaccggcaaaaacccgctgggtaaaattggttataagagtgaagatgtggtggtgccgaagggagacaggcaacgtcgcctgcataaggcactgctgcgttatcacgatccggcgaactggccgctgattcgccaggcgctggaagcgatggggaaaaagcatttgattggcggtcgccgtgagtgtctggtgcctgcgccgaccattgaagagatgcgcgaagcgcgtcgccagaaccgcaatacccgcccggcgctgaccaagcatacgccagtggaacatcagcggcaggggcttgctgcgaataagaagcgcgggaaaggcgcggggcgttaa

SEQ ID NO: 379619 - DNA, 732 bp, Salmonella enterica
atggcggctgctgacgttctggatgtttactgcagcggctatcttattctgttcttcattgttatttgcctggcttttttgttccaaacgcctcgtcgcgtgttgctgtggattgctttgccacagattacgctggttcttttgctatggtttgctgcgggtgatgaaacgcttttcttcccgattggcgcagggtggatactggggcttagtttattgctggcgctactgtttagccaccgattacgccaaccacaccacctttgggccgggtgccatgcggtcgtattgctgctgttgttagcgcacataggggatattctcgagaggcatcatcggcgcgatgcctatcaggcacagcaggcggcggaagaaacgctgttacaaaaaatcgatacgaccgatgaccgctcttttttaaatcatttgatgtcgcaagcaatgcagtcgcaaaacgcaggggattggtggacgaataggcggattgagcatctcgcaaaacgcatttccccttttgatattgcggacggaactgaaaaaatttggttggttttggccatcgaccggcttaatcgccctgccgttggggcgtttgcctcctggtttattggcgattctgtacaggcaaagcaatatcggcatcagctcttacaaaacaatccattattggacctactgaatcgtatttttaatgatagtatggctgacgaacaaatttttctgcaacaataa

SEQ ID NO: 379620 - DNA, 219 bp, Salmonella enterica
atgttccattgtccaaaatgccagcatgcagcgcatgctcgtaccagtcgctatcttagcgagaatactaaagagcgttatcatcaatgtacgaatattaattgcagttgcacattcgtaacgatggagtctgtagaacgttttattgttacaccgggaacaataattccggcgccacctcacccgtcggtgagtggtcagcggccattgtggctctga

SEQ ID NO: 379621 - DNA, 1194 bp, Salmonella enterica
atgctggatattatcaccggcgcggggggcacactgacgcccgattttatgctgacactggaaagcaaagatatcaccggcaatatcagcgaccggctgattaatctctcgatgacggataaccggggctttgaagctgaccagctcgatattgaactcgatgattctgacgggcttgtcgcgctgccgattcgcggcgcggtgctgtcactgtatctcggctggaaaggcttcgcgctcgttggtaaggggcgatttaccgtcgatgaggtggagcaccggggggcaccggatacggtgaccattcgcgcccgtagcgctgattttcgcggaacgctcaattcacgccgcgaggaatcatggcacgacaccacactcggcgttatcgtcagcgcgatagccgtccggaataaattaacggccagtgtcgcggattctcttgccgggataaaaattccgcatatcgaccagtcgcaggaatccgacgctgttttcctgactcgcctcgcggaacgcaacggcggcgcggtatcggtcaaggcgggtaaattgctgatgctcaaagcgggaagtggtacgacggccagcggaaaagctatccctctgattactatccaacgcagtgacggcgaccggcatcagtttgctattgctgaccgtggtgcttacacgggcgtaacggctaaatggctgcacaccaaagacccaaaaccggcgaagcaaaagcaagcggtgaagctgaagcgcaagccaaaagagcaacacctccgggcgctacagcacccgaaagcaaaagtcgtgagcagtaaaaccgcagcgaaaaagaagaaagagcaggaagcccgcgagggtgaatatatggccggtgaggctgacaacgttttcgcactgacgaccatttacgcgacaaaggcgcaagcgatgcgcgcggctcaggcgaagtgggataaattacagcgtggcgttgcggagttctcaatcacgctggcaactggtcgggaagatatttatcccgaaatgccggtcagggtctcgggctttaagagcgtcatcgatgaccagtcgtggataatcagtaaggtgacccataatctaggcgggaatggcttcacgacgactgtagagctcgaggtcatgctttccggcatagaatatgagtcggaagaaaatggttctcaaatggtgaataactga

SEQ ID NO: 379622 - DNA, 465 bp, Salmonella enterica
atgatgctggcactaggtatgtttgtttttatgcgtcagacgttgccctatcagagcatgcagcgcagcgcggattatagctgggcgtcaaactcccgcatcgggaagcgtgacgcttttcagtatctcggtgaaggggaggacaaaatcaccctgagcggtgacctttatcctgagctgaccggcggcaagttttcgatgctgacgctttatgcgatggccgagcaggggcgagcatggccgcttatttcaggctcaggctggatttacgggatgtttattgtcagcaatgtctcggagaccggcacggtattttttgaggacgggtcgccacgaaaaatcagcttcactctgtcactgacccgtgtcgatgaatcgctcgcggcggtctatggcgatatcggaaaacaggccgagagtcttgtcggtaaagcgggcgatctgctgtctaaggtgggggcttaa

SEQ ID NO: 379623 - DNA, 2430 bp, Salmonella enterica
atgagtaataacctaaaactcgaagtgctgctgaaagctgtcgaccaggcgacccgaccctttaaagcgatccagacggcgagtaaatcgctgtctggtgatatccgcacgactcagcaatccctgcgtgatttgaatggtcaggcatcgaaaatagacggttttcgtaaaaccagtgcgcaactggcggtaaccggtcagtcgctggaaaaagcaaaacaggaagctgaagcgctggcggtgcagtttaaaaatacggaacggccaacagcggcacaggccagagtgctggagtcagcgaaacgcgcggctgatgggttacagacgaaatataacagtctcacgcagtcagttaagcggcaacaggccgagctcggtaaagcggggataaatacccgcaaccttacgaatgatgaaaaccgcctgaaaaataatatcagcgaaacgaccgcacagcttaaccgacagcgtgaagcactggcgcgcgtcagcgcgcaacaggcgaaactgagtgcagtacaaaaacgctatcaggcagggaaggctctggcagggaatgccgcctcgatgggcgctgccggggtaggtatggcaacaacaggtactctcgccggtgttgcactaatgaaacccggttatgattttgcccagaaaaactctgagcttcaggctgttctcggcgtcgaaaaagattcagctgatatggtggcgctccgcaaacaggcgcgtcaactcggtgataacacagccgcgtcggctgatgatgctgccggtgctcagattattattgcaaaagccggtggtgataccgctgctattcaggcggctacgccagtgacgcttgatatggcgctcgcaaaccgtcgaacgatggaagagaacgccgggttattgatggggatgcgctctgcattccagctctcaaacgataaggtcgcccatatcggtgatgttctgtcgatgacgatgaacaaaaccgccgccgactttgacggcctgagtgatgcgctgacctatgccgcgccggtggcgaaaaatgccggggtcagtatcgaagaaacagccgcaatggtcggcgcactgcatgacgccaaaattacaggctcgatggcgggtacggggagccgcgctgtgttaagtcgcctacaggctcctacgggaagagcgtatgacgctattaaagagctcggcgtaaaaacggctgatggtatggggaacacgcgcccaatatttaccattctgaaagaaatgcagcggagctttgagaaaaataatctcggtaccggtcagcgcgctgaatacatgaaaaccatattcggtgaagaggcaagctcagctgctgctgtattaatgactgcagcctcaagcggtaagctggaccagcttaccgccacgcttaaagcatctgacggtaaaacggctgagctcgtcaaggtcatgcaggacaacctcggcggcgactttaaagagttccagtcagcttatgaggcggtcggaacagacctgtttgaccagcaagagtcatccttgcgtaagctggtacaaacggcgaccggttatgttttaaaacttgatggctggatacaaaaaaataaatcactggcgacgacgcttggggttatttcagcggcggctatcggtgttgtgggggttataggggcaatcggtcttgttgcgtggccggttattatcggtattaacgccatcatcgctgctgctggcgcacttggtgctgtctttacgacaatcagtggcggggttgtcgccgcaatcggtgctattacgtggccggtcgtggccgttgcggcggcggttgtcgctggcgcgctgctgattcgcaaatactgggagcctgtcagcgcctttttcggtggtgttatcgaggggctgatgagcgcctttgcgccggtcagggaaatgttcgcgccgctggcacccgtctttgacggcctcggggagaaacttcgcggcgtctggcagtggtttaaagacctgatagcgccggtaaaagcgactcaggacacgctgaacagttgccgtaacgtcggtgtcatgttcggtcaggcgctggctgatgcgctgctgatgccgcttaacgcctttaacaagctgcgaagcgggattgactgggtgctcgaaaagctcggggttatcaacaaagaatccagctcgcttgaccagaccgcggcgaaagctagtgcggcgacgcagaacggctatagcccggctatcagctcttacaacagctatcagccagtcacggcacccgccggtaaaacctacatcgaccagagtcggccaacctatcaaatcaacgtgccgggcaacggtatgccgggcggtcggttaggtaatgatttgcaggatgccttagaaaaatatgagcgtgagaaacgcgccaaagcccgcgcaagcatgatgcatgactaa

SEQ ID NO: 379624 - DNA, 282 bp, Salmonella enterica
atggaaaaaactaacgaaaatatagtcactctgattaaacccatcaagcgcggtgagcaggttatttccgatgtcaccctgttaaaaccgtgtgccggaacccttcgcggcgtcagcctggcatctgtcgcaaattctgacgtcgatgcgctgattaaagtgctgccgcgcatgaccatgccgtcgctgaccgagcaggaagccgccgcgctggagctgcccgacctgttgtcgtttgccggtaaggtggtcggttttttgtcaccgagttcggcggcgtaa

SEQ ID NO: 379625 - DNA, 519 bp, Salmonella enterica
atggcattaccgcgcaagctcaaactgatgaacctgtttatcgacggggtgagttatctcggcgtcgtgcagtccgtcacgttgccaaaattaacccgcaagctcgagaagtatcgcggcggcgggatgaatggctcagcctcggttgaccttggcctcgatgacgatgcgctgtcggctgaaatctcgctcggcggttttcctgatgatgctgtctggtcgttatatgccgccaccggtacggcctccgtgccgctacgttttgccgggtcttaccagcgtgatgacaccggcgagaccgtgccggttgaggttgttctccgtggccgtcagaaagaaatcgacctcggcgaagccaagcagggcgaagacactgagtcgaaaatctcgctcgagtgctcgtactacaagctgaccctcaacggtaaagatatggtcgaaatcgacaccgtgaatctcgtcgaaatggtgaacggtaccgacatgctcgaggcacaccgacagaatattggcctgtaa

SEQ ID NO: 379626 - DNA, 1188 bp, Salmonella enterica
atgagtgattatcatcacggtgtcgaggtcgtcgaaattaacgacggcacccgcacaatctcgacggtatcaacagcggtcgttggcatggtctgcacggccagcgatgctgacgccggggcatttccgctcaatgagccggtgctgattaccaacccacaaagcgccatcgcaaaagccggtactaaaggtaccctgaaaaaatccttacagctcatcgctaaccagtcaaaaccggttgttgttgtcgtgcgtgtcgcagagggtaccggcgacgacgaagaggcacaggcacaaaccatttctaacatcatcggcaccacggatgagaacggcaaatacaccgggctgaaagcgctgttaacggcgaaagcggtcaccggcgtgaagccccgtatcctcggtgtgccgggtctcgatactcaggaggtggcgaccgcgcttgtctccgtggctcagaaactgcgcgctttcgcctatgtcagcgcgtggggctgtaaaaccatttctgacgtcattgcctatcgtgagaatttcagcgcgcgcgaactcatgattatctggcctgagttcctcggatgggataccacggccagcgccacaacgaccagctacgctaccgccatcgcgctgggtctgcgcgccaaaattgacaatgacaccggctggcacaaaaccctgtcaaacgtcggcgtcaatgaggtcaccggtatcagcgcgtcggtcttctgggatttgcaggaaaaaggcaccgatgccgacctgctgaatgaggccggtgttaccacgctgattcgttctgatggcttccgcttctggggtaaccgtaattgctctgatgacccgctgtttcagtttgagaactacacccgcacggcacaggtcatcgccgacacaatggccgaggggcatatgtgggcgaacgataagcccattaccgcgacactgattcgcgacattatcgacggcatcaacgcgaaattccgcgagctgaaaagcggcggttacatcatcgatgcgacgtgctggtttgacgaagaggccaacagcaaagaatccctgaaagccgggaaactgtttatcgattatgactatacgcccgtgccaccactcgagcacctgaccttacgccagcgcatcaccgataaatatctggcgaatcttatctcgtccgtcaacagcaaataa

SEQ ID NO: 379627 - DNA, 534 bp, Salmonella enterica
atgagtaatgcgcggctgttgccggtgggctcgtcgccgcttgaggtggcggcggcacgtgcatgtgcggaaatcgaaaacacccccgtcccgctgcgtcgtctgtggagccctgattcctgtcctgcaaaccttttgccgtggctggcgtgggcgttttccgttgaccgttgggatgagaactggccggaagaaaccaagcgtgacgttattcgcagcgcgtattacatccactgccacaaagggacgataggcgcagtccggcgtgtggttgagccgctcggatatctgattaacgtgtctgagtggtgggagaccaatgacccgcccggcacgtttcgtcttgatatcggtgttttagagaccggcatcactgaagaaatgtattacgaaatggagcgactcattgcggatgcaaagccagccagccggcatcttatcggcctcaatattattcaggatgtgccgggctatctgtacaccggcgcgctgacgtatgacggcgacatcatcacggtttacccggataagtga

SEQ ID NO: 379628 - DNA, 909 bp, Salmonella enterica
atggcaaccatcgacctgagccagctccccgcacctgacgttgtggaaacgctggattttgaaaccatccttgctgagcgtaaggcgacattcgtgtctctttatcctgaagaccaacaggacgccattgcccggacgctcgccctcgagtctgagccagtggtgaagtacctggaagaaaacgcctatcgggaggttatctggcgtcagcgtgtaaataatgcggcaaaggcggtcacgctggcttacgcagagggcaacgaccttgacgtcatcggcgcaaacttcaacgtcgaacggctggttatcacaccggctgataaatcggcaattcccccagtggcggcggtgatggaatcagactctgattttcgtcttcgcatccagcaggcttttgaagggatgagtgtggcgggctcaacgggtgcctatgaatttcatggtcgcagcgctgacgggcgagtcgcggatatttcagttatcagcccgtcgccagcctgtgtgacgatttcggtgctctcccgacatgataatggtgccgcatccgatgaactcctgacagtcgtgcgtaatgcacttaatgatgagaacgtcagaccggttgctgaccgtgtgacagttcagtcagctgagattgttgattaccagattcgggcaacgatttttatctatccggggccggaaagtgagcccatccgggcggcggctgaagcgaaactaaaagcctatatcagcgcgcagcaccggctggggcgggacattcggctctcggccatttatgccgcgctgcatgttgaagggatccagcgtgtcgagctttccacgccggtcgctgacattgtgcttgataagactcaggcgtcattttgcagtgattatcacattgcgatagggggctctgatgagtaa

SEQ ID NO: 379629 - DNA, 348 bp, Salmonella enterica
atgacgacccgatatatcggcatgaatcgcgagaccgggcgcgccatcactgacgccgatcatatccgtcagagctgtggcgatattttgcgaacgccggtcggctctcgcgtgatgcgccgtgattatggctcgctgttgttctccctgattgatatgccgcagaccgacgcgctgaggctgcaaattatgtgcgcctgttatatggcgctgctgaagtgggagccgcgcatcagcatcagctcgctgacggtagaacgtcagtttaacggtcagatgattgttgagctgaccggcgagacccgggataccggcaaaaccctgtcactgactatccctgtgagttga

SEQ ID NO: 379630 - DNA, 642 bp, Salmonella enterica
atgaatactcgcgcaactcttcaggacgctttacgcctccttcgaaacctgatacgcaccggcgtcgtcgtcgaagttgacctcgatgacgggcgctgtcgtgtccagactggcggcattgttaccgactggcttcagtggctaaccacgcgcgccggtcgctcacgtgtctggtgggctccgtctgtgggtgagcaggttttactgctggccgtcggtggtgagctcgacaccgcttttgtgctccccggtattttctctgatgaccaccctgcgccgtcggcatcggctgatgcatttcacatcacctttcctgacggggctgttatcgagtacgagccggagaccggcgcactgactgtgagcggcattaaaaccgcagatgttacggcgtcggattccatcaccgcgacggtacctctggtgatggtgaaagccgagacccgcatcaccctcgataccccggaagtggtctgcaccaacaaactgacgacggcgacgcttgaggtacaacaaggcggcaccatgcgcggaaacatcgaacacaccgacggtacatttaaatcaaacggcgtgcaggtcgatgaccacggtcacggtggtattaagcgcggggatgactggacggagggcacgaaatga

SEQ ID NO: 379631 - DNA, 450 bp, Salmonella enterica
atgaatgactttaaaccctttgacgataagctcgcggggctgatagcggcgctgtcaccttctgcccgtcacagaatggccgcagatatcgcgaagactctgcgagcccgtcaacagcgccggattaaaacgcagaaagcaccggacggcacaccttacgccgcccgaaaacgccagccggtaaaagccaaaaaaggccgggttaagcgggaaatgttcgccaaactccgcaccagtcgttttatgaaagcctcagcggggaatgacgcggcggtcgtggaatttaccggcaaggtacaacggatggcgaatgtgcatcagtacggcctcaaggataagccagggcgaaacagtgcgccggtgcagtacgatgcccgaccgctcatcgggtttaatgacgaagaccgtcaggcagtggaggaaataattatcgctaaattgtccgtttag

SEQ ID NO: 379632 - DNA, 468 bp, Salmonella enterica
atgtacaagccgaaaagtctgcgaaaagccttaactgacgccgtgccggtgctggcacgaaaccccgatatgatgcgtgtctttatcgacaacgggaatctagcctcgacgctggcgacgtcgctgtcgtttgagaaccggtacacgctgaatgtggtggtgaccgatttcacggatgatatcgagctgttactcgtcccgattcaggcgtggctgcgcatccatcaggctgacattatgacgaccgatgaagggcgtaaaaagggattcacctattttgccgatatcaacgacaacgacagcgctgatatcagtatcagcctgatgctgaccgagcgcaccctcgttaaagagcagggggataagctccaagtcgaacaggctgaagagccgcagccgccggaacccgttacccggccggttgaactgtatgttaacggtgagctcgtgagtcgaatgcatgaatga

SEQ ID NO: 379633 - DNA, 414 bp, Salmonella enterica
atgaaaacgatagtcgtgctgttagtgctggcggtggccgggctgctctggatgcgccacgaaaacaccagtctgacccgctcctttgaacgggcgaacaaggtcgccggtgaacaaaaaacgctgattaccatgctgaaaagccagcttaaaacggcctcccgtatccgtggggaaaatgagaccgctcaggtcttactgcgcggtgagctcatcgatgccggagcgcgggcgcaacgccgggaacagaccattacgaggttactcaatgaaaatgaacagcttcgccgctggtatagcgctgatttacctgatgctgtgcgccggttgcaccagcgcgccgcctgtgccgacgccggtgattgtctacaacgcatgcccgagggtcagcctctgcccgatgccgggaagtga

SEQ ID NO: 379634 - DNA, 510 bp, Salmonella enterica
gtgggctcattcgttaaacgttgcagtgtggccgtcgtgctggcgctggcggcactggtgcctgattttcgtttgcttcacacctcgccggaggggctcgcgctgattgccgacctcgagggttgccggttgcgcccttaccagtgcagcgccggtgtgtggacgtcaggcatcggccacactgccggggtggtaccgaaacgggatatcaccgagaaggaagccgccgcgaatctggtcgctgatgtgctgaacgtcgagaaacgactcgcggtctgtgtgcctgttgaaatgccacccgccgtctatgacgcgctggtcagcttcgcttttaacgtcggtaccggcgcggcctgtcgctcaacactggtgtatcacctgaaacaccggcaatggtggcaagcctgtgaccagctcacccgctgggtgtttgtgaatggtgagcgtaataccgggctcgaaaatcgccgctttcgcgagcgcacctactgcctgaagggggcgaaatga

SEQ ID NO: 379635 - DNA, 222 bp, Salmonella enterica
atgggactgactgtggataaaatcacaacctttctgacctactggctgtcagtggagctggcgtatttcggtacgcagacaccggaacggctcgcgctttatgtcgggggaagctgcgccatttttaccgcgctggttaacttctggtaccagcgaaagaaataccgctatctcgtctcgatggggattgataagggggttattcgtgggctcattcgttaa

SEQ ID NO: 379636 - DNA, 204 bp, Salmonella enterica
atgaacgtcatcgcgcatcagggcgacacgctcgacacgttatgtcagcgccattacgggcgcactgaaggtgtggtcgaggctgtattgctggctaatccggggctcgctgagctgggtgtcgtcctgccacatggcacggcggtcagtctgcctgaagtcgacgccgcaccggtatcggagaccgtgaatttatgggactga

SEQ ID NO: 379637 - DNA, 501 bp, Salmonella enterica
atgaccatgattgtgatgaataacccggcgcaacagcgcgacccgatggtcatcccgccggtgccggtcgacgagccggtgattaaaaacacggcctttttcccggatgttgatccgaagcgcatgcgcgaagaaatgcgcctcgagcagaccgtgacgccggtgcgtctgcgccgggcgattaaaaccgcgatggccgagaccaatgccgagttaaccgactggcgcgaccttcagctcgccgccggttatcagcgcctcgaggatgtgccgacggatgagctcgacggcgaaagtgtgcgggtttttcactacttcaacgctgtttgctcgatgacgaccgcgacgctgtacgagcgttaccggggcgttgatgccagcgccaaaggtgacaaaaaggccgacagcatcgatgacaccatcgatgaaatgtggcgtgacatgcgctggtcggttgcccgtatccaggacaaagcgcgctgcatcgtggggcaaatctga

SEQ ID NO: 379638 - DNA, 759 bp, Salmonella enterica
atgtcaacccccgcacagcgtcacgcgatgcgggtctcggctatcagggcatcgcagcgggataacgccccgctgcgtcatgcctcaccttacgagcaaatgctcgtcaagctggccgcagaccgccggacgctatcagcaattcgttctaaagaacgcaaagcggataagaaacgcgaaatactcccgctgtacctgccgtgggtcgctggcgtactggaaagcggcaccggcgcacaggatgacattctgatgacggtgatgctctggcgtcttgatgcgggggatatcaccggcgcgattgagattgcgcgctatgcgctgcgtttcggtctgtcgatgccggaaaatcattcccgcaccaccccatacatgctggccgaagaggtcgcactcgcggcaaccagcgcccgtattgccggtgagccggtcgacgctgcgcaactgcttgaggtcatcgggctgaccgatgccgccgatatgcctgacgaagtgcgcgcccggctgcataaggtcaccggtctgaccctgcgtgatgccggtcagcttcctgatgcgctggcgcacctgcaacgcgccttacagctcgacaccaacgccggggtaagaaaggacattgagaccctcactcgtgagctaaacccgaaaccggtcgccgtcaaaaaaacagcgccgaaagccgcgaaaaaggcacccgcgaaaaaacaagattcaccggtgaaacgagggcgtggacgcccgaagaaagtcgccggttaa

SEQ ID NO: 379639 - DNA, 1161 bp, Salmonella enterica
atgcgtaaagacacccgttttaaatttaatcagtacctgagccgcatcgctgaactgaacggcatcgaggtcagcgacctcaacaaaaaattcaccgtcgagccgtcggtgacgcagaccctgtttgacaaaatccagcagtcgtccagcttcctgaagctcatcaacatggtaaccgttggcgagctgaccgaagagaaagtcggcatcgatgtgaccggctccattgccagcaccgctgataccgacggtggcgtcgagcgtaagaccgctgatttcgcgaaaatggatgcgtaccgctatttctgtcatccggtgaacttcgactatcacctgaagtacaacaagctcgacctgtgggcgcgttttcaggatttccagattcggatccgtaacgccatcatcaagcgtcaggcgctggactacatcaccatcggctttaacggcgtgagccgggcggcgacgtctgaccgtagcaaaaacccgttgcttcaggatgtggctgtcggctggttgcagaaataccgcaacgacgcgcctgagcgtgtgatgtccagcatcaccgacgctgacggtaccgtgatttcgaacaccatcaaagtgggtaaaggtgggcattacgccaacctcgacgcgctggtcatggatgctttcgagtcgctggtcgcggaaattcaccgtgagaacccggaaatggttgtcatctgtggtcgccgtatcctgaccgacaaatacttcccgatgattaacaaattccaggcgaacagcgaacagctcgccggtgagctgattatcagccagaaaaccatcggtcagcttcaggcggtgcgcgcgccgttcttcccggcaaacagcgttttcattacaacgctggataacatttcgatttatctgtacgaggacggccaccgccgccacatcgtcgaaaatccgaaactcgaccaggtggaaaactacgaacaggtcaaagtcgatttcgttatcgaggactacgaggccggttgcctgattgaaaatatcgagatcctcgagccggaagaacccgccaccactgaaccagtgagcgcggaagtctttgcggcggcaatggtcaaagcgatgcagtctctgacaggcagcgcaccggctgaaaccggcaccactgacggcaaggaggcataa

SEQ ID NO: 379640 - DNA, 864 bp, Salmonella enterica
atggctaaaaaagtttcgaaatggtttcgcatcggcgtcgagggtgacacctgcgacggtcgcgtcatcagtgcgactgatattcaggagatggctgattcgtatgacccgcgcgtctacggttgccgtattaacctcgagcacctgcgcggcctgttgcctgacagcgtatttaaacgctatggcgatgtggctgagctgaaagccgaagttattgacgatgattcagcgctcaatggcaagctggcattgtttgccaaaatcacgccgaccgatgacctcgtcgcgatgaataaggcaggccaaaaagtctatacctcaatggaaattcaaccgaactttgccaacagcggaaaatgctatctggttggtctggccgtcactgacgacccggcaagcctcggtactgaatatcttgagttttgccgtaccgcgaaacacaacccactcaaccgatttaaagccagccctgagaatttcttctcagtggcaacccttgccgagctggaattcgaagacctgcccgacaccctgctgaccaaactcagcgacaccgtgaaaggcatcttcagccgtaaacagactgacgacgatgcgcgtttcagtgatgtacatgaagccgtgaccgccatcgccgagcgggtgcagaccggcggcgaaagcgccgaggtgcgtttcagtgccattgaaaccgagcttgccgacgtcaaaaaagcgctggccgaacaggccgacgccacctcgcagcaattcagcaccctgaccaccacgctggaaaacaccgaaagcaaatcacaggcgcgccgcaagttaagcaccggtggtgacggtgattcagcgggctcctcgctgactgactgctaa

SEQ ID NO: 379641 - DNA, 1770 bp, Salmonella enterica
atgaccactaccaacgacacatcactactcagcgacccgcgacgacaggccgcgcttttgttctggcagggctattccgtgccacaaatcgcggagcagttacaggtcaagcgtcccacggtgcagagctggaaacagcgcgataaatgggaagaaaccgccccgttaaaccgggtcgagttcacgctcgaggcgcggctgattcagctctatgcaaagcctgacctgacggctcacgactttaaggtcgcggattttctggcgcgccagatggagcgcctcgcgcgggttaaccgctacggccagaccggcaacgaagcggatttaaacccgaacgtagccaaccgcaacaaaggggaaaagaagaagcggaaaaagaactttttcagcgaagaggctatcgagaaactcgaagagattttccttgagcagtctttcgactatcaactcgaatggtggcgcgccgggctggcgcaccgcatcaggcacatcctgaaatcgcgacagattggcgcgacgttctattttgcacgtgaggcactgttacaggcgctgaagaccggccacaaccagatatttttgtcggccagtaagacgcaagcctatgtattccgtaaatacattatcgcctttgcccgacaggctggcgtcgagcttaccggcgacccgattgtgctcggcaacaatggcgcggagctgatgtttctcggtaccaatgccaacacggcacagagtcacaacggcgacctgtatgtcgacgaaattttctggatccccaacttccagaaactgaagcgcgtcgccgggggcatgtcttcacaggagcatttacgcacgacctatttctcgaccccctcatcgctggcacacggtgcttacccgttctggtcgggtgagctgttcaacaagggacgctcagacaagagcgagcgcgtcgatatcgatatcagtcacgccgcactcgcgaagggcgtcgcctgtcctgacggtcagtggcgacagattgtcaccatcgaggacgcactcgccaaagggtgcaccctgttcaacatcgatacgctgaagcgcgagaacagtgtcgatgagttccgcaacctgtttatgtgcgagttcgtcgacgataaagcgtcggtattcccgttcgaagagctgcaacgctgcatggtcgacagcctcgaaaaatgggaggactacgcgccatttgccgaccggccattcggtcaccgcccggtgtggattggctacgacccgtcattacgtggcgacagcgccgggtgcgtcgttattgcgcctccggtcgttgccggtggcaaattccgcatcctcgagcgccaccagtggaaagggatggacttcgcccaacaggccgaatccattcgcgagctcacgcagaaatacaccgtggaatatatcggcatcgatgctaccgggctcggtcagggcgttttccagctcgtgcggtctttctacccggctgcacgtgaaatccgctacacgccggaaatgaaaaccgcaatggtgctgaaagcaaaagacaccattcgccgcggttgcctcgagtacgacgtcagcgcgaccgatatcacgcagtcgtttatgtctatccgcaaaaccatgaccagcagtggtcgcagctcgacctatgaggccagccgcaccgaggaagccagtcacgccgatctcgcctgggcaaccatgcacgtattaattaatgagccgctgaccgccgcgaccggtgagcagtcatccagcatcatggagtggaactaa

SEQ ID NO: 379642 - DNA, 1038 bp, Salmonella enterica
atgagcaagaaacgcaacaagcgccagcagccgccgcgcccccaaaaccacacagccgcaccggcacagagcatggaagcattcacttttggtgagccgacgccggtactcgaccgccgcgatattctcgattatgtcgagtgtatcgataacggccagtggtacgagccgccggtgagcttttccgggctggcgaagagcatgcgcgccgccgtgcatcacagctcgccgatttatgtgaagcgtaatattctggtgtcgacctacatcccgcacccgctgttatcccgtcaggacttcacccgatttgcgctcgactatctggtgtttggtaatgcgtttatcgaagagcgtcgcagcctgaccggcaagccgttaaaactggaaacctcaccggcgaaatacacccgccgtggcatcgaggatgacgtgtactggtacattcagagctacacacagccgcaccagttcgcgcccggctccgtcttccacctgctcgagcccgatattaatcaggagctttacgggatgccggaatacctgagcgcactcaattcagcctggctgaatgaatcggcgaccctgttccgtcgcaagtattatcagaacggcgcgcatgcgggttacatcatgtatgtgaccgacgccgcgcaaagcagcaccgacgtcgaggcactgcgaaaggcgatgcgcgactcgaaaggactcggcaattttaagaacctgtttttttacgcgccgaatggtaaagcagacgggattaaaattgtgccactgagcgaagtcgccacgaaggatgatttttttaatatcaagaaagtcagcgccgctgacctgctcgacgcgcaccgcattccattccagcttatgggcggtaagcccgagaacgtcggctcagtgggtgacgttgagaaggtggcaaaggtctttgtgcgtaacgagctgaccccgctacaggcgcggtttatggagttgaacgaatgggcgggtgaagaaattatccgcttcgaaaaatacagtctcggcgacgacgagtaa

SEQ ID NO: 379643 - DNA, 198 bp, Salmonella enterica
atgcgattcgatgcagtaatgcatgcggagctaaaaatggcagaaaatacggaaaaaacgcataaaaaaaccggcattcagggtgccggtttgagtcgtgtttattgcggttactggccgcgcaatgcgccaataatactgttaaggcaacaactggcaacaatcaacaaaaaaaccgtcgtccacggattttcataa

SEQ ID NO: 379644 - DNA, 897 bp, Salmonella enterica
atggattcgccattttataaactcaaaagcaaaaagaagcttgcaggacttctttgtattagtgttaatgatttatctattttgaaaaatgatgaaggtaattactccgttttcgatcaactgtctaaaaaaggcaaatcacggaaaatacaaaagcctttagataaattagatgtagtacatacgagaattgcaagtttattgtcacgtattgctttaccagaatatctgcattcggggaagaagaggtgctctaatgtgacgaatgctaaagctcatcttaaccatgaaaagatgatgacaactgatattaaggcatttttcccttcaacaactaggataatgatattttcatttttcttttcagtgatgaaaacgtcatctgacgttgctgatattttgtcgcacatatgcacctgtcatgaccggttgccaacaggaagtcggatcagtatgcctttggcctactttgcaaactctagaatgtttggtgagatgtatgaactttgccaaaagttaaaggttaaaatgactgtgtatgttgatgatcttacgttctcgggtgctaacgtaaatcgattattctgcgctgtaattcgtaaggttatcagcaaacatgggcatatcatgcatccaactaaaacgaaattatatgctaaggaccaacctaagttggttacaggtattattgtattaggtgatgttttaaaggttagaaatgagcaacatcgattaatggcaagggatattgaatactggaaaataatcaaagatgcggaaaatgcgaaagaaacatctattgcgaaaacactctttggtcgtttgcattcaatgggtgtcattgaacaacgctataaatcaaaagtactcactttaaaagtgaatactgcaagttaa

SEQ ID NO: 379645 - DNA, 309 bp, Salmonella enterica
atgttacataaagcccttcgtttgataaggcaataccataaagagtcattagttgatttatcagcatctttaggtattccaaaagatagaatagtagatctagaaagcggggtttggtctccgtcgattgaaatcttacagcgttatgcatcccatttcgacataccagtatcctctttagtatttttttcagaatccttaggcactcaagggcgtctgtctaaacgattacgtttgaatttagctggtaaagttctggatatcgtagagtgggtaagtaataaaaatgaaaaaacggaaaaagcttaa

SEQ ID NO: 379646 - DNA, 156 bp, Salmonella enterica; identical to SEQ ID NO: 85288

SEQ ID NO: 379647 - DNA, 441 bp, Salmonella enterica; identical to SEQ ID NO: 85287

SEQ ID NO: 379648 - DNA, 309 bp, Salmonella enterica
atgagaactattcattgtttaaagataactactgaacatttcgaagcagtatgcgatggaacaaaaaaagcagaactgcgagtagatgaccgtaatttccgttgtggtgattaccttttattgaatgagtttcgtaatgaatgcacctcaaatgtagtgctggtcgaaataactcatattttaccagtaagagattacattcaatctggaactaatttggtaattctttcaatctctctcttccctaatgaatatgctattgaaattcttgcagcaaagctgagggagctattatgtgcatcatactga

SEQ ID NO: 379649 - DNA, 228 bp, Salmonella enterica
atggccgacgcaatggatttagcacaacagcgtgagcaggaagaccgcgaacggcatatccgtaacgcgcgcaataaaaaaacgggtatttctcggcttcactgcattgattgcgatctgccaatcccgtcagcccgtcgccgcgcaattctaggtgtacagtgctgcgtcacatgtcaagagattgcagaactgaaaggcaaacattacatcggaggctcagtatga

SEQ ID NO: 379650 - DNA, 234 bp, Salmonella enterica
atgagtcgaactatttatttatcaacgccgagtagtgctggcgaccacgtgctggagtctttgtttaaagaagccaaaaaagaagagcgcaaagaccgcgctctcgccgtttcaatccgtctcgaagctctggccgttcacattaccaattcagatatgaccggtaaagaagcggccgaactactgcgccgtgaagcagcccgctttgagaacgaatcacaggagctgcactaa

SEQ ID NO: 379651 - DNA, 510 bp, Salmonella enterica
atgtttgattttcaggtttccaaacatccgcactatgacgaagcatgccgcgcttttgcgcagcgtcacaacatggcgaagctggccgagcgtgcgggtatgaatgttcaaacgttacgtaacaagctcaacccggaacagcctcaccagttcacgccgcctgaattgtggctgctgacagacctgaccgaagactcaacacttgttgatggttttctggcgcagattcactgcctgccatgcgtgccggttaatgagctggctaaagacaaattgcagtcttatgtcatgcgcgcaatgcgtgaactcggcgaactggcgagtggggcggtatctgatgaacgtctaacctctgcccgtaaacacaacatgattgaaagcgttaatgctggcattcgcatgttgtcattgtcggcactggcgctgcatgcgcgtctgcagactaatcccgctatgtcgagcgtggtcgataccatgagcggtatcggcgcatcattcgggctgatttga

SEQ ID NO: 379652 - DNA, 264 bp, Salmonella enterica
atggcttctgaaatcgcaatcatcaaagtgcctgcacctatcgttactctgcagcaattcgcagagcttgagggtgtttctgaacgtaccgcttatcgctggacaacaggcgacaatccttgtgtaccaatcgaacctcgtaccatccgtaaaggttgcaagaaagcaggtggtccgattcgaatttattacgcacgctggaaagaagagcaactgcgtaaggcgttaggtcattcccgttttcaactcgtcatcggtgcttaa

SEQ ID NO: 379653 - DNA, 576 bp, Salmonella enterica
ttgatacttgatactcaggtgaataacgacgagttactggataggatttgtcaagtatatggttttactcaaaaaatccagctagcccggcacttcaatattgccgccagttccctacaaaatcgctacacgcgaggcactgtttcttatgatttcgccgtacagtgcgcactagaaaccggagcaagcctgctatggcttcttacggggcaaggctctcaatatgatggcaaaccgtctccaacggatccgaaaacgatagtctccttcactctgagtgatggaaaactcacagaaaattcaccattgagtattgatgccagtttttttagcaagcaaatgtcaaaaggtattgctgttcgcgctgatggaaagctgcacttcatagaacaagatgcctcactttctgatggcctttggttggttgatattgaggggactaccagcatcagagaattgacgctcctacccggcaaaaaattacacgttgcgggcggcaaagtaccatttgagtgcgggatagatgagattaaaacgattggccgtgtagtgggtgtatacagcgaggttaattga

SEQ ID NO: 379654 - DNA, 1038 bp, Salmonella enterica; identical to SEQ ID NO: 110366

SEQ ID NO: 379655 - DNA, 1338 bp, Salmonella enterica
atggagcctaacgtggcaacgaaaaaatacgaactaacaaaggagtattccttccatggcgaattttggcagtctcctgataataatcaaggcagattttcggcacaaatagaatactcgccatatcaaggattgattttagattattgtatttctgatagtgatagtcccgatacatgtgatagattatatggggtattaaacacaggtgagttatgtactttaatcggtccattcaatttctctcatggtaattttcattttggtaaaggaacgaccctgacggggcgacatggatttcctataatgcttttcagtggattttatgatgaaaatacaaaaataaaacattgtgatttatctctacatggtctacaggaattcattcaccctcaaggttttatcaatcaattaaaattttcagaacaaccaatttttactgcggaaggaagtgactggaaacttcgacttgttaacaatgcaacatttaacgcaattggtgacaatctatcaaatataataaactgtcaaaacaagcatgctctagagaaattttacgtaagtttacaagaaattaaaaaatcatatcccgatgcttttttctctatcagaaaaactctcactttttactatcgattagaatccaaaaatcaaacaaaaataaatgacttcatatcaatgagttggaatgtatcagggttactttcaattcttattgataagccagtactaccagaagaactatacttcaaatttgaaggtagtgattttagaaccccctgtcttttatcaacccgcttcgagcaaagaacgatcgatcttgctcttaagcaaataaatcatcgcttcctgccaattaactggaaaaacattaatattaaagaggtattctgtaaatggtttgagctcgcagatagatatgtatcattaacggcaacctatcaatatgaaacaggtttcagaacactacatgaagctcatgctgatattatactatttgcaacccaactagaagcaataaatttaactatgggaggttcaaaaaatgaaaaatatataaaacccatcaatgaatatgcctctccattgctcaagcaaaaacttgaacagttttttataaaaatcaacagtgaatcattaggcgcaaatattgccacgcttagaaatgaacttgcacacgttgatcgcaataaaaaactaatgaaagcattaactattggtgattatattaaaatcggtatgtatctcaaaattatcgtgacctctcatttactttcaaatttaggtattgataaagataaaattgaaaaatatcaaaatcaggtagcaccagaataa

SEQ ID NO: 379656 - DNA, 2067 bp, Salmonella enterica
atggataaaaaactagaaccttattatttaagtgcggaaacggcattatctatagtgtctaaaaaattcaacataaaaattgacatcaaagaagatgatataaatttaagatttaaaaagtacgacagaaataacactgacgactctatacaaatgaagaatttctttttgtcgttagggctttctctacaggatatattatttaataatggtgaggatttactaaatgagcctatgccgattttactattaacaccagaaatgaagtggatggtgtgtgtgagtggcgggcaaaaaataaagttggtaaacgcgcgcggtgaactctgttatgttgaaattgaagatgaatatttaaaagagttatctgcatttagtatactacctttaaataaagttgttgatagtataagagtaaaaaatatcataaaaaactctttatcgatgaacaagattttttatactaaatacttcttttcatctctttttatggcaatttttgcgttaactattccagtatttagtaatctgttctatgataagcttgttccaagtgcttcggtttcatctttatttggcgtggctataattgttgctgtatttattgtttttgagtttatccttcgtacttcgaaagatatttatcagtctatcacagcaaggcaggatgacgtcgatattgatatcgcatttcttgaagcggtactttatagtaaaaagaaaaatggcagatccatgtcatcagcatttgtgctatggaatgagtttcagaaaattaaacccgttttattaaactcgatctttcaacgtatagccgatattccaatatttattatatttctcattgttatatatgtaaatttaggtctggtcgttattgtccctgttaccatgtttatcgtctctattattatttccctcgttaaccaccattatactaatgagttaatgaacaaacaaaaagaaggacagaagaacaggaatatcttcatctcagaggttttcttatctattaaaatgatccataccttaaataatcaaggtttactttttgattgggtcaacacatcaaatgaacagtcgtatcttaacctgaagataaggaaattaaatcttatctatcaatctatattggggagtatgtcatctattacccaaataactattatggtaatagccttttttatggtaatcaagggtgatgttaccactggcgcaattgtttcatctgtcattgtctctggtcgtatttccgggatcatttcgaatttttcttctacattaatctctattttatcagcagaaaaaaccggtaaggatctgctttctttttttgatgaagatcaggcagaaaaaacaccggcattacagtccatatcaaagtgcaatggcgatatctctattcggggtgtgagttatcagtatgacgctcaatctccgatgattattaaccgactgtctatagacatacctgcggggcagcgtgtcgcagtgataggcgaatgcggtgcaggaaaaagctcattactgggaatgctatctggctacctttcgccaacagacggcgccatcttatatgatggatataacttagggcatttatcgcagaactttttttctcagcatttaagcgtggtgacgacacatgatgttttattcaccggaaccattgaaagtaatttcgcgttaaaaccgcaaaacgacaggggccgggtactcaaggcgctccatctggcgaactgtggttttatcttgcaacatcctatggggctgaagtttccggtgaattttatggctaaaaacctgtcatccggacagcaacagcagttattattagcacgtagtctgagcagtaacgccagcgtctttttatgggatgaaccaacatcaaatctggatgaaaataccgagaagcaaatttttgataacttagatgagtttattcatgggaaaacgttgatcatggtgacgcatcgtcgatatctgataaagtattttgaccgggttctggtaatgaaaggtggaaaaataatccgtgattgttctccggataaattattaatgtaa

SEQ ID NO: 379657 - DNA, 9489 bp, Salmonella enterica
gtgtcagtcgaagataaagcggggaacaccagccattcggcatcgctgacggtgacggtggacacgcaaatcgccattaataacattgaactggtcaatgacagcggtattcccgacgataatctgactaataacgtgcgtccgcagttccaggtgaaggtaccgacggatgttaacgaggtgcgcctgagcattgacggcggcaagacatggttcaacgctacccagagcgcgacgccgggcgtctgggattatacctggctggctgatgtgggagaggggaagcataccctgacagtggaggcgaccgacaaggcgggaaaccagacgacgcagaaactggacttcatcatcgataccctactgtcagaaccgactatcgtgctggacaacacggacgacagcggaacaaaaggcgataacctgaccaacgcgaataagccgacgtttttactgggtaatattgacgcagacgcgcggtatgtcacggttgaagtgcagcatggcagcacgaaagaagtgctgacggccaccaaaggcgcgaccggcatctggagcgtgacaccgaccggcacatgggcagatggcgactatacgctgacggtgagggtggaggatgaagcgggtaacgtaaaatactcggcgccgctgacggtcacggttgatacccaaatcaccatcgatgttattgaactggttaatgataacggtattcccggcgacaacctgaccaatgacgttcgtccacacttccgcgtcacggtgccaggggatgtcaacgaggtacgtctgagtatcgacggcggtaatacgtgggttcgtgcaacacagggcacggcagggatctgggattacacctggccgaaagatgtgaccgacgggctacataccctgacggtagaagcgaccgataaggcgggaaataagacgacgcagacgctcgattttaccattgatacccggctgtcaacgcctaccatcactatggatagcagggacgatacaggtgccattggcgatcatattacgagcgtcaaaagaccgggctttaccattggcaatattgacgccgatgcgcaatcggtcattttgcggatcacacagggcggcaatagccaggaagtgatactaacccaggttggaggacagtggcgctttacgccagatgctgactgggcggacggtagctatacactgacggtagaggtaacggataacgcaggaaacgttcgtcagtccacgccgctgatagtgacggtagatacgcaaaccagcattactgatattacattggtcaatgatcatggcgtgccggatgacaatctaactaacagcacccgtccgcagtttgagatcacggtgccggcggatgtgaattctgtgcaactgagcattgatggcggcgcaaactgggtgagcgcggcgcagggtatcgaaggcgtctggggctatacctggccaacggatatgggcgatggaaaacacaccctaaccgtcatggtcaccgacagagcgggcaatacggcgacgcaaacgcttgaatttttcatcgacacccggttgtcgacgccgaccattgcgctggatagcacggatgataccggtacgcctggcgatgatatgaccaatcgcacccggccgacctttattctgcagaatatcgattcggatgttatcaacgttacagtcagcgtcacgcataatggaacgacaacctcgtttactgcgacacagggggctggaggatggagctttacaccgccagcgccgtggggcgacggtgattatacgctgacggtgacagtggaggatcgggcgggaaatacgcgtccgtctacgccgctgacggtgacagtggatacgcaaatagccattgatcatattgaattagtcaacgatagcggcgtccctggcgataatatcacaaaacatgtgcgtccgcagttccagatctcggtaccggatgatgtggaaaaggttcttctgagtattgacggcggcacgacctgggttactgcaatcaagagttcgacggctggcatttgggattacacctggccgacggatatgccagagggacagcataccctgatcgtggaagtgactgacggtgcgggtaataagatgacggggacgctcgatttcactatcgacatcacgttgttgacgccaaccattgagctagcgcccgatcaggataccggacagaataagaacgataatctgaccagtgtcactcagccggtatttgtgttggggagtatcgataaagatgttcgacacgtggaattgagtattgagcataacggcacgtttaaaacggtggtactcaccgaatcagccgacggctggcgttatcgaccggattctgctttggcggacggtagctacacattcaccgtgacggtaacagatgtggcaggcaaccagcaaacatccgcgcctttaaaggtgacgatagacggtacgttgactacgccggtgattgaactggcagctggcgaagatagcggtactgttggcgatcgcctcaccaatcacgatcggccggtgttcgacatacgccaggttgattctgacgttacgcgcgtgatggtcaaagtaacttacaacggtaaaacgcacgaggaagcggcggtattcaccaatggtcaatggcgctttacgccttctgcgagctgggctgatggctcatatcagttagccgttgtggtggaagatctggcggggaatgtaaaagaatctgcgccgttagaggtgcgtattgataccacgacaaccattaacaatatcgtattgcttaatgatactggcgtgcagaatgatcaattaacgaatgttgccaaaccgtcattcagaattgacgttcccggtgatgtcatccaggtacgcgtaaccctggatggtggcgctaactggaatgtgatacgcaaaaatgccgacggacagtggatttttgacagcccgaatactctggttgacggcacatatacccttcgcgtagaggccacggatgaggcaggtaatattgcgaataaagatttagtatttaatatcgatactaatatacaggttccgactattgctttagacgcaggacaagataccggagcgaatacagccgataatatcactaatatttcacgacccacctttacgattggtaatgttgaccccgatgttattaaagtcgtggtgacgattgatggtcatgattataacgcgactaaggttggggctggttggcaatttacaccaggcaatgccattccggatggttcttataatattaccgttacggttgaagataaggccggaaataccgcgacatcgaaaccattacctgttgtgatagatacgacggctgaaattgaaagcgtcacgttggttacagatagcggtgatagcgatgtagataacattaccaaagtcgacaagccgcagtttagtattgttaccgctgatgatattacccatgtgcgcgttaaaatcgataacgccgctaattggattgaactcacaaaaggaggggatggccgctggatatttaatgtcggttcggcattacctgatgggaaacacactctcttggttgatgtgactgatatcgctggcaacgttgcgcaagaaacgctgcagtttacgattgatacgactctgcgagagccgacaattgtactcgatcccacccatgatactggtgatgatactaatgataatcttaccaggattaacaaaccggtgtttattatcggtaatgtagataatgatgtatcacacattgtggttcatattgatggtcgggattacaccattgaaaacacaggggggaatttaacctttacgccggatcaaccgctgtctgacggtcagcatacgatctctgttaccgtaacggatattgctggtaataccaaaacatcggccgaactgcagattgaaatcgacacgcaggttcagattgacagtgttacgttaacaacagatagcggcgtcaacgatcacgataatgtcaccaatgctacccgtccctcttttgaaattgcaacgcctgatgatgtgacatcggtgctggtttctttcgatggcgtaaactggacgcctatcagtaaaaatgcggccgggcagtgggaatttactgcaggtagcgcattgcctgatggtcattatactctccatgtccaggcgacggatcgggcaggaaatacggcaaattccacgctgggcttcaccgtggatacgcagattgacggcctgagcgtcgtgatgctggatgacgccggaaaggattctacggatggtattacgaatattacctctccacgttttgaaatttcagccagagaaccgctgcagagcgtgacggtaattttaaacgggaaatccagcacactgactcagggggcaggtaataaatggctgtttacccctgatacaccgttagtggatggaacttacaaaatagaaatagtggctgaagatatcgcaggtaataaaattagcaaagaggtatcattcacaatagacactattgtttctgatcccagtattgatttgctggatgcggatgatactggcgaaagcgctgttgataatattacgagtgtcactaaaccacgtttcgttattggcaatgtacccgccgatattgatactgttgtaatcagaattaacggcgtttcttatccggttacggcaaatggcaataacctctgggaatttcaggttcccgttgcgttaaacgatggcgtatatgaagccgttgttgtcttcagagatattgccggaaatacttctgaaactaagctgccctttaccattgataccacgacaagcgtcagtgtcagaatggagccagcgtctgataccggcagctccaatagcgataaccttacgaataagcaaaatcccaaattcgaaggtactgcggagcctaatgcgaaactggtgattaccattgttgatgataagtcaggtcgggaggttctaaaacacacgattacggttggcgccgatggcaactggagtgtgacgccgaatatactgccggatggcatgtataccatcaacgtcgtcgcaacagatgtcgcgggaaatactgcgcaaacgcaggaaagattcactatcgatacggttacgatcgatcctaccattcgcctttcggatccatctattgatgatcagtatgaagcaaccagcctgcgtcctgagttcaaagggctagccgaagcgttctcgacgattatgattcagtgggatgggaaagtggtcggctcggcaaacgccaatgcgaatggcgaatggagttggacgccgccatcagtattagcgccaggctcctatgttgtgagcattgttgccaaagataaagcgggtaatgaatcgtcgcaggtcgactttcctgtcgtaatacctgttattgatgtcacgcctccaaccataaagctcagcgaggagagcgatagtggtgccttaggagactttaccacgaataataaaacgccgaccctggttgggaacacgttacctaatgcgattgtgagtatttatgtggatggcgtgaaggtcggcgaggcgacagcggatacagcgggtcgatatactttccagttatcggaaatgaaagatggccattatgtcgtccaggtgggtatcgtcaaccctcgcgataatagcgaactgcgttccaccgccgttgatgtcactatcgataccgaggttgctgaactggtatggaatatatctggaatgcatgagggcggatatatcaatacggtgacgccggagattggcggcaccagtgagccaaacagcaaaatcactatctttgtgaatggcgttgaaaaagcgattgcttatacgacaggcgcaggacattggggcgtagtattacctgctttgggtaatgacggtaattatgtattaacgtttaaagttgaagatgttgccggcaatatcagagagtttggtccgcagaatgtgatactggatacggtaatttcgccgttaaccgtggtattacgcgaagctgatgacagtggcaaagttggcgactggatcaccaataaatctcatgtcaccatcgatggtactgccgaagccggaagtactttaaccatcaggaatccgcagggggtggttattgctaccctggtggtaggcaatgatggtcgatggagcgcagaattagatctgcgtgaaggtagtaatgcctttgtcgtggtatcggaagataaagcgggcaacagccaacaaaaagatatcctgatagaacatgatacgcagattgaaatcagcgatatttcattaagtcgggatactaatagcggtgataaatatgatctgattaccaataataagtctccggtactggttgccatgaccgatcccggcgcgacggtacaggtttatattaatggtgtgttacaaggcacagtagaggcgagttcgtcaggtaatattagctataccatgccggcaaatagcgccgacggcgagtatcaggtgcaatttgttgctacggatactgctggtaaccgggttgagtctgcgattacaaccgtgacaatcgattctcaaattgctgtctttgacattgatgaagattcattaccggccctctctaataaccgggcgttgtcagtctcaggtgtcggggaggcaggttctcaggtcagcatctttgtcgatggtaaattagtcaacgttgttatggttgaggctgatggcacatggcgcgcgccgatactgttgcaagatgatggtacgtttaatattcatttcagcattactgacgttgctggcaacactgaagtgagcaaggattatagcgtggatgtcgattcatcaaccgacttcccaacgctcaaccttgaagatgcgagcaactctggttcacttgacgatctgattactagtcacaacaagcctgtgttagttggcaccgcagaagcgggagccacaatccatatttatgtggatgaaaagatcgtggcaaatgttcttgtgcttgaagatggaacctggtcctatcagtttgataatgcgttaaaagatggtgaatattctatccgagtggttgccgaagacccggcaggtaatacggcagaatcgcctcgcttactcgtcacgatagataccagtacgtttatcgataatcctgttatgatggcaggttctgataacggtattttcagtaatgatagtataacgagtcaaacccggcctgcgtttagtatttatggagaaatgaaccagagtgttcagattttcattgatggggtgttagtcgatacgatcacggtgacggacagaaatcaagtttatcgacctgagtcaccgttgggcgatggttcccatagcatttattatgttatcaccgataaagcaggcaacacggctacctcgaaaacgctaaactttactatcgataccttaaatacgacgcctgtcgctattgattctatcggcggacaaacgttagcagagatgaccggtagtgatggcaaaatatatataacggacacgacacgtaacttattgtttagtggcagtgccgagcccaatagcaaaatagaaatcatcattaatggcttaaatgtgggggaagtttgggttaatgacaaaggccactggcagatgccggtgaacccgctttatttcacagaaggccagctggatatcactgttaaatctacggaccgtgctggtaacgtaaatcaggaaaagtattccatttgggtcgatacgcatatccaggtatttaccagcgagcttgatgacaataaatcatcatcgaaaacggactggtggagtaatagctccactattaccatgagaggtatgggggaaattggcgctacggtatcattaatcgtggcaggggtcacgctggcaaccgctgtcgttgcggctaatgggcagtgggagttatcgaccgatcagcttccggaagggaaatacgatatcactttgagtattgaggataacgcaggcaaccgtaaggaagaggtacatgaaatatttattgatcgaacgccgccaaacgctccggtcgtaacgtattcagatattgtcaacgatctaattattatgcaggggacggcggaagccaaatctcagctaataataaccgatagtaatgggaatacttatacgctaaccgttcctgataatggtaaatggagtatggcgatcccgtatccatcggaagggaagtttaccattacgagtgtggatgcgattggtaaccggagtgatgatgtccctctcgatatcatgaaagaggttcccgttatttcattatctccagactcagacagtggtacggtgggcgataatattacgcgagataatcagcctacctttattatcgggaatctggaaagcgatgttgtggtcgttcaggtcgatatcaatgggaccgtatataatgctgaaaaaaatgccgatggcgtttggttctttacgccaggtacaccgttagctgatggttcctatacgatatcggtaatcgcaagcgatgccgcgggtaatcagaaaaactcgttacccattaccgttacgatcgacagtacgctgaccgtgccggagattgcgctggcagcaggtgaaggcaatggcgcttcagacagcgataacgtgacgaatcacaatcacacccagcctaagttcacgctgcagcatattgatgctgacgtgaccggggtgaccgtaaacgtgacgcataatggcgtgacagacatctatcaggcgacgcaaggcgcggatggctggaccttcacgccgccagccgcctggaatgatggtacctacacgctgagcgtgacggtggtggatcgcgcggggaactcactgcaatctgcttcgctggaggtgacggttgactcaacggtgacggtaacagcggatagccagcatgacgatgcgagcgatgacgccacgccaacagcggttactccaccggagtctgaaacagtgaatgccgaaagcgctacgcatcttcgtacagtgccgtctgcggcggaagaaagcgtggtgaaggagacagcctatagtattacattgttaaacgctgactctggggatgaaatagatcgttcaattagtcagacaccttcttttgaaatatcagtacctgagaatattgttaatgtcagtgttatgtttgaaggagaagagtttactctgccgataactaaccagaaagcaatattcgaagttccgctatctttggaagatggtgaatatactatggacgtgaaattccttgataaggacgatgatttcctgattaaggagaaaacattctcagtcgatcactcctcggcggatattgtgaacgcaatgaatgcaagaggaaagaccgaggatgatattaatgattccccttcaacgagttctgtagggcacaacaataacggcgctattgaagttttcgccgttaatgaagttacgttacctgtagataatcaagaagaacacgcataa

SEQ ID NO: 379658 - DNA, 1230 bp, Salmonella enterica
atgaatagaagacaaagcgatcatctcatgatgataattatttctttgacgatcttaattattatccttacctactttatagaaattaattcagtggttcatggtcagggcgttatcactactaaagataatgctcagttaatatctctttctaaaggaggaacgatacaagatatttatgtggccgagggtgatactgtaaaaaaaggagaactccttgcaaaggtcgttaaccttgatctgcaaaaagaatatcaaaggtatagaactcaaaaagggtatctggataaagatgttaacgaaatatccttcattcttgataaagaaaatgagagtgggttgattaccctggatggcacccgttctttaagcaataaagaggtaaaagcgaatattgaattagtgcatagtcagataagagctaaagagttaaaaaaaacctctcttgattctgagattagcggattacaagagaagctgagttcgaaagaaaaagaactagcattgcttgccgaagaaataaatattctttccccactggtaaaaaaagaagttaagtctgaaattaatgatattgaaagtagcatcactttaaaaaaagatgatattgagctggttgttaatgatattgaggcgcttaataatgaattgcgattatctttatctaaaataatatctaaaaatcttcaggaacttgaggttgttaactctacattaaaagtaatagagaagcagataaatgaggaggatatctattcaccggttgacggtgtgatttataaaatcaataaaagtgccactactcatggtggtgtgattcaggcggcggacttactttttgaaataaaaccaaaagtaaggactatgctggccgatgtgaaaatactacccaaataccgtgaccaaatatatgtagatgaagccgttaagctggatgtccagtcaattatccaaccaaagataaaatcgtataatgcgactatcgataatattagccctgattcctatgaggaaaataccggaggaacaattcagcgttattataaagtaattattgcattcgatgttaatgaagatgatttacggtggttaaaaccaggtatgactgttgacgccagtgtaattaccggaaaacacagcattatggaatacctgttatctcccttgatgaaaggcgtggacaaagccttttcagaaccagttaatactaaacgattagatacaccttga

SEQ ID NO: 379659 - DNA, 1230 bp, Salmonella enterica
atggcaaagctcgcaaaaaaacttactgatactgaaatcaaaaataccaaacccggcgataaggaaatcaacctctttgatggagatggattactgctacgcatagcgccagacacaaaaggagggaagaaaaactggtatttcaggtattcagtgccagtgaccaaaaaacgcacaaaaatgagtcttggaacctaccctcaccttaccttggctaaggcacgaactttgcgggatgagtatctctccctacttgccaacggtatcgatcctcaagtccataacaacgaaaaagccaatgcactaaaagatgcgactgaaaacacgctacaggctgttgcaagaaagtggttggatgaaaagattaagacttccggtatatcccaagatcatgcacaagacatctggcgtagccttgaacggaacatctttcccactctgggtgatgtccctatcaaagagatccgccccaaaatgctcaagcagcatctcgacccaattgaacaacggggtgtgcttgaaactctacgtcgcatcatttcccgcctgaatgaaatttttcgctatgctgccacagaagaactcattgagttcaacccagccgacaaccttggtcaacgtttcagtaagcccaaaaaacaaaatatgccagcattaccaccaagcgaaatcccccggtttatgattgcactggctaacgcatccatccgtctggaaacccgtatgctgattgaatggcaactgctgacatgggttcgtcccggtgaggctgttcgtgctcgttgggctgatattgatacagagaataaaatctggaacatcccaccagagtttatgaagatgaaacggcctcataaagtgccattaagcaaagaggcacttcgcattctggaaaacatgcagcctatcagcggtcatcgtgaatgggtatttcccagcataaaaacacccttgacccacatgcatgagcagacagctaacgccgcattgattcgtatggggttgggtggtgaactggtagctcatggtatgcgttctattgccagaacagccgccgaagagagtggcaaattcagaacagaagttcttgaagcagcattggcccataccaaaagcactgaaatcatagcagcctacaatcgagctgaatatttaggagagcgagaagtgcttatgcaatggtggggtgattacgttaaggcgcagaaatatagggctatggcagcttga

SEQ ID NO: 379660 - DNA, 447 bp, Salmonella enterica
atgctgtacgccgttctgcacataatccgccaggttgtcagcaaccgtaatacgggactgcacaccccacacgctggtaagcgttcctgtccagcatacatccagccagactttgactggcctggttgtcacggtaatattcaggttttctgcaagcgttgtgcgcagacctgccacatagccggtacctttggtcacataaaactgattcccgcttttcccgaccagatagccgtccccaaaaaacgccgccgccccgaagatgtcgatattttccaggcgctggcgctcgtccattccggccatacgcgcggtaaagtcaatctgccaggtctcagcaggcgtattaattccggtttcagcctgtgcgccgttatattccatcagaaacgagcgtgtaagcacgttcccctgttgcccttcagctgttttaagtttttgctgtaa

SEQ ID NO: 379661 - DNA, 1662 bp, Salmonella enterica
atgtttttatcttcactatcatcactaataacggtaaaagatataaacaaagtaaagaaaaatttccccttgtttattatctctgaaaatatagatattaatgctgaacctgatattgagtatttcagaacgttgaatagagcatttgatgaggtggcgacttattctgggagaatattctctcatttacgtactaatgaacccttaaaattaaattgtcgtatagataaagaaactctgctttcaatgagaaaatatcttgatgaatggaatgtttttgactcattaagtagggtaagtgacttttttagattgagtaatgcggaatttactaaaaaagataatgatacatattctcttgatgtcgatggttcttgtttatatcaggactatgaaattgcccgaaatagattgatgatgagagaatctaatttatatagtgagatgcacacttcaagcaaaaaaggtcttaaattaaggcaatgggctaagaaccgtatgccttcttatttaaatcctgaaggtatttatagctcacatcatttaagtgagttagaaaatatgtcacctgacgatctacatgaagaatatggtaatgtatcactatataattgggtacatgcttatcaatgtttagttgagttatccaaagaagagttgaggaaaagattttcctccaaaaaacctataccattacaggtagacagatggctgataataaagagtcgtgaaaattggttatctttttttaaacggaaaggtatggcggaggatgtggcgaaaaaagttattggttattttacttttaattcaaagtcacatgatcttaatgattgtccattcattccctgtgtagatggattatgcttaatgccagcattaatagcacatagttctgctacacgttctttaatgtcgttatttggatcaaaaaaaatctctcaggcaggtaaggggcgattccatgaacagcaatttttaagacaggttcgtgcagctgggattaaagcatctcccattgaaacacatgctaattttcagtgtgattgcgtaatgcttattgatgatcatttgatttttacagagcttaaatcaaatgggcagccgatttattatggcaagtattatcaacaattgtgtaatattattggagatagttcattaatttatgatggtaataataaattattgcggtcttatattgaacaaatcgacagaatttcaacacactatcttaaccatcttgatatcattattaatgagttcaatctcccggtagattggcaaccgaaaggtgttcataaaattattgtcacaacaactatgcttggagggaaatatcattccgataatgtgtttgttgtcgataaatattcgttatctagttttcttcaacgtgtgccaggggtgattttccaaaataatgaagaaggagatagaataaaaaatattattgatggttatgagcattgcacaggggagataacaattgaaaaatttcttaactatctttattgtttgcctagtgtaagcgcagtgcgtaaaaacattaaaaaattaacctatagtgttcggtttgatgaaacactcatttatcatccttattatgattcttgggcttttggtccatatattcgtaaagaagatgagcggattaactag

SEQ ID NO: 379662 - DNA, 144 bp, Salmonella enterica
atgggcgacggttctcgtatgtccgtttccagaatagagacattatgccagcctggccgttcatttttgaatcaattacgtggtgaattttatcaacgatatgcattaatcgttttacaacaatggcgtgagcagcaggtgtaa

SEQ ID NO: 379663 - DNA, 675 bp, Salmonella enterica
atggaaaacagaatcagcaagagaaatgttgcgctcgtagaaaaatgcgtgatgagcaccattggtattaaagggctatttgatgcaatgccggattgccgacatacgcttcatattttttcaaaaccatccgcgttttataaggctgcgctaaagacgccgttttctgccgttattttttctctttctgcgttaagaactgaacgccggacaggattatccagcctgacggaactggcgataaattatccccatatgcggcgtctggtgattgcagatgatgatgctgaagcccgcttaatcagcgcgctatccccgctgccgctggatggggtcatcagcaaagcgtcgccgttggatgttttacaggatgccttatttacatcgcttaatagcgcccggcggacaacggagcgtacagataatctttgggaacttcaccagaattgtatgcttagtccaaccgagcgggagattctgcgttttatgtcgaacggctactcaatgccgcaaattgccgtccagttagaacgtaacattaagactatccgggcgcataagtttaatgtgatgtccaagctgggcgtgagttctgatgccgggttactcgatgcggcggatattctgttatatctgcgcgccggagatgctaccgcgctccagcatcgggtatag

SEQ ID NO: 379664 - DNA, 993 bp, Salmonella enterica
atgccaatagagattagtaatcacagtgaatatctattagaaaaaagagcagagaagtattcgccaatcacttatttaggcaccgtacatcaaggctattgctcagtaattagcaaggtaattgcatggtatttactttcaagggcaggagtatattataaaaataacagtatagttgaattagaaaaatctataggatacagagatacgaaatcggtaagccatagagtttcaaacttaaatgctttgatgtcttctctctctagagagaacattttagacacactagataagtttggtgagttgatatattctgattataaataccaaaactctacaacctatgacctggaatatgatggagttagatatccacctaaagtcatttttggtatttcagctattgcattgattaatagacctttgtttgctgatgagtttagcggaggagtcaattcaccttgttttcatatattagaagcacttggttttaacatcgttaaaaagaataaatctagtgatggcaatgaatttgaagatattgattttctaatcaatgatattgaaatgattggaaatgacgattcactctcggtaacagaacgcgaacagcttatagccgcacgtaaaggtcaaggaaagtacagaaaagaattaattaaactatatgggaaatgcatcgttactggtattccgtatgaatttatgcttagagcaagccacatcaagccctggagagtatcaaataataaagaacgtcttgacccttttaatggttttttactttcttcaaatgtggatattttatttgataaaggtttcttgagctttgaaaatagtggtgagttaattttatgcgatgagttaaaaaatgaattcacgcttcgtcttttgggaatcgacttacgcaaaaaagtgatgatacccctaggcactttccaatatctagattggcatcgtaaaaatgtttttggacgatgcaaaggaaaataa

SEQ ID NO: 379665 - DNA, 249 bp, Salmonella enterica
atgaattacttctggattacgcaaagcccatggtcacaaaaaaaagaacttgagaatggttggatcagcgcaaggcccgcaaaaaaatacaaccattatagagaaatggttaaaaccattaagaaaggcgacctcatttttttctgtagccgtggggtaataaatcatgtaggatttgcgctcgcttcgtctatgtcagaaactgacaaaacaggtgagatctggaaggtgaagattaaatcttattag

SEQ ID NO: 379666 - DNA, 369 bp, Salmonella enterica
atgctctgtgacgtcccgtacctcgttcagtgttttgaacagataaaaaaccaggatgtctatccgatacagtacccggatgatacattgagccgggatatacagatcgattcctatcacctgcatcccatgatgaaaaccatctaccaaattgaagatccggaagcgtctgtcgtagacaaacgcatcctgcataaagtcgttatttcagaactgattcagcaattccggttttatcaacagagtcggattacgcaccggcagacctcgctttcctttacgatgaaaatttggcttcagcaggcaataaatccggtgtacacgcttaagattcaagcagcagccctatcttcggagttcctgaaatag

SEQ ID NO: 379667 - DNA, 1917 bp, Salmonella enterica
atgtcatccgatattaagatcaaagtgcaaagctttggtcgattcctcagcaatatggtgatgcctaatatcggcgcgtttatcgcgtggggtattatcaccgcattatttattccaacagggtggttgcctaacgaaacgctggcgaaactggttggtccgatgatcacctacctgctgccgctgctcatcggttataccggcggtcgtctggttggcggcgaacgcggcggcgtagtgggcgctatcactaccatgggcgttattgtcggcgcggatatgccgatgttcctcggctcgatgatcgccggtccattaggcggctactgcattaagaaattcgacagttgggtagacggtaagatcaaatccggttttgagatgttggtgaacaacttctccgctggcatcatcggtatgatcctcgccatcctggcgttcctcggtattggtccggcggttgaagtcctgtccaaaattctggcggcgggcgttaacttcatggtggcgcacgatatgctgccgctggcgtccatttttgttgaaccggcgaaaatcctgttcctcaataacgcgattaaccacggcatcttctcaccgctgggtatccagcagtcccatgagatgggtaaatccatcttcttcctgattgaagctaacccgggtccggggatgggcgtcctgctggcgtacatgttcttcggtcgtggcagcgctaaacagtctgcgggcggcgcggcaattatccacttcctgggcggtatccatgagatctacttcccgtacgtgctgatgaacccacgcctgattctggcggtgattctcggcggtatgaccggcgtattcaccctgaccatcctgaacggcggtctggtctctccggcatctccgggttccattctggcggtactggcgatgacgccaaaaggcgcttacttcgctaacatcgctgccatcgtggcggcaatggcggtgtccttcgtggtgtctgcaattctgctgaaaaccagcaaaatgaaagaagaagatgacattgaagcggccacccgtcgtatgcaggacatgaaagcggaatctaaaggcgcctctccgctggcggctggcgacgtgaccaacgacctgagccatgtgcgtaaaatcatcgtggcttgcgatgccggtatgggttccagcgcgatgggcgcaggggtactgcgtaagaaagtacaggatgcgggcctgagccagatctccgtcaccaacagcgccattaacaatctgccgccggatgtggatctggtcattactcaccgtgaccttaccgagcgcgcgatgcgtcaggtaccgcaggcgcagcatatttcgctgaccaacttcctggatagcggcctgtacaccagcctgaccgaacgtctggttgccgcacagcgccacaatactaatgaagagaaagtacgcgaccatctgaaagacagctttgaggagggtgataacaacctgttcaagctgggcgcggagaatatcttcctgggccgtaaagccgctaacaaagaagaggcgattcgctttgccggtgaacaactggtgaaaggcggctatgttgagccggaatacgtcgaagcgatgctggaccgcgaaaagctgacgccgacttacctcggtgaatccatcgcagttccgcacggcacggtagaagcgaaagaccgcgtgctgaaaaccggcgtggtgttctgccagtatccggaaggcgtacgcttcggtgaagaagaagacgatattgcccgtctggtcattggtatcgccgcacgtaacaatgagcacatccaggtcatcactagtctgaccaacgcgctggatgatgaatccgtgatcgaacgtctggcgcacaccaccagcgtggatgaagtgctggaactgctggcaggtaaaaaagcttaa

SEQ ID NO: 379668 - DNA, 459 bp, Salmonella enterica
atggttagaatttataattcaagtttagaagtggcatgtcgaatagcgaaagtgctcgtcgctatttatccttcttcattaagccttgaacggcttatttgttttgattttattttagtaaatcttaaggattttttacctgaagagattagtcttcatcctccaataccccgtagagatgctcagttagccctaaaacgagagattgttttagaatcattggctttgttgcaaggctatgaactagcctcaaaaatttatacacatcgtggttttgtatataaagcttctgaaaaaacatatgcatttacaaattctctacataatgaatatgttgcgcagatggagcataatataaatttggtggttaagttatatagtgatattcctgatgagcagttgcaatcaattataaaaaataaaattggcaaatatgatatggaatttaattatgaatga

SEQ ID NO: 379669 - DNA, 1008 bp, Salmonella enterica
gtgtctcaaccactttcggaaatattgacatgggatgatgaacaatgggaggtatttgtccatgattggcttattgtctgtaaatcagatgattacccgtggagcgaacgtttgggaggagctggagataaaggtagagacgttgttggatataaatcggatcctaacgtagaaggttattcttgggataattatcaatgcaaactgtacaaaaaaagtttagggttctctgatgttgtagttgagtttggaaaacttatctattttactctgaatggtgattatcccatccctcagaagtacttttttgtggcaccctatgatttatctactacattttctaatttattgaaaaataaaaacgagcttaaaaaagcagtccttgattcatgggattcagcaatttcaaaaaaaataactaaaaagattgatattccattagatgatgaaataaaaaaatatattgaggattttgattttagtattttttactctctacccttatcattgattttaaatgatattgcaaatacacacctttattttaagtactttaacgagctgtatgtcgtgagaatccctccaaatgaaattccaacatacaattcaaaaaaagagtctgtatatgttaatgcactgcttcaagcctattcagagcatggaaataaaacttatagttctttcttagagcttgatgatccatacagacgacactttaataatagtagaaatgatttttattttgcatcttcgcttgaggtttttgtccgcgaagtatttaaagatgatgtattcaaagcattgaaatgttacatttcatcttcaattgaacccgtcttttatgaagaccataattatgcatttattaggtgtaatgcagtcttgaagcaggctgttctgacaccaattgcacattcagtactatcaaaaatatgtgaagcaaatgataaaaaaggaatatgccatcatttggttaatgatggtgaagtaatttggacggtgagataa

SEQ ID NO: 379670 - DNA, 1047 bp, Salmonella enterica
atgaaatgggcgagtatgacgtggtattggctgctcttggtagctatgtgtatagctccattaaacgtgtgggcagaccattttacctacaacaaatacatacctattactcaaactcaggacattagccagtctgttgaagatttgtacatcttgcgtaatgaaaatattaagtttgaggacaacactatgaaccgagggagtttactttgtctctctgagaatgatcccagtaacggtgcatgctctacgagaagtctgtggggtcataacgtgacggtggctggtaagttttcagcaatcaggttgatgtttacagatttaaaaacaggcaagaaggcagaggtggctcttcagggataccgttccagttcgtgtggtgattattttttagattctggtggaggatgcgcctattcgtggggatattatctatggatacctgcaagcgaacgcagaaaactccctattgggcaatggagcgcacatttacagatgcgggctgaggcatggtggcatattccaatcggtagtttagtgtcggatatcacgctgaatgtgacagaccactttgcagaaaatgctgctatttacttttcgcagtttggtactgcaacccctcgggtggatctgaatctgcaccggctgaatgcctcacaaatgtcgggcagggctaatctggatatgtgtctgtatgacggaggtgtgaaagcccgttcattacagatgaagatagaaggaagcaataaatcaggtacgggatttcaggttataaagagcgattctgctgatacgattgattatgcggtcagtatgaattatgggggacgaaatattcctgtcacccgtggcgtggagttcagtctggataacgtggataaagcagcaacgcgtccggtggtacttcccgggcaacggcaggcggtacgttgtgtgccagtgccccttaccctgacaacacaaccctttaacatcagggagaagcgttctggtgaatatcagggaacgctgacagtgacaatgctgatgggaacacaaaccccctga

SEQ ID NO: 379671 - DNA, 495 bp, Salmonella enterica
atgaaaagcataaaaaaattgattatcgcaagtgcgttgagcatgatggctgctagttgttatgcttcagttttgccgaacacagagcaacagaaatcagtggatattagctttgccgctcccgaacatttaaccatatcgtttgatcagatgccaggcttaatggctgggaagaatgctaaggatatggatattgcgaagcttacagttgattctacttctattaaagagttcggggtcagggggatttctggctcgctaatgaacgatgctggcagtgaatggaaaataactggtaaaaatggtggcaacccaatcattgtgcgcttttcagattatgatctaaacaaaactcatgtcccggtaatgtggaatgggagaaaatggctcacctttgataccaatgtcccaattgatattattgcagtagcgggtcaggatatctcacctgatacgtacccactgactgtagacgtagtgggatatcagccttaa

SEQ ID NO: 379672 - DNA, 447 bp, Salmonella enterica
atgagtgtatctgaatacaaacgagcattgctctatagaaaagctcaggctaatgtatgcaaaaatgattattttaataaaatacaatcatttaccaatgatactgttgtagggggtaattttcttaccttagaagaaactgataatattataaattctcttaaagataagaaaataaattcaaaaattaaagtggaaattgatagctatcaacaacttgttgaatttattaaagagaaagttgcaggtctttcttcttatttattaattgatgaagaatggaagttttgcggaatgtataagataagtagtgagttttcgagtgattataattttgatgaattacattcagacgagataagaataatatcttgcgatctatcttttcagattcaaatagactatgaccacaataaaatagagtgtgaatatattatgtataaataa

SEQ ID NO: 379673 - DNA, 435 bp, Salmonella enterica
atgtatgaacagcaggcattttataatgacgagccaatagactttaataacttagatttatgggataaatttaaagtcacatttggatttaatgttacagaaaaaaacaaacccaatggtaaaaaattcaattttgagtattgtggattctctacttttattacgccagttgatagcgttgacgggattttagcaaagtggttctcaaacaaacataatgtaattgtcccaacgccttatacattcggtcaggaccccattcctggcgtcaatctttatcgtaatacaaaagcaaaatttgttatggctaacggcggtaatagtcttccctgtgcgatggcaaaatataatgcaaaaactggacaatttattcatataaccagtgacaatgagttttcacaaataatgcgagaagcaagagtcatgaaaaaataa

SEQ ID NO: 379674 - DNA, 4026 bp, Salmonella enterica
atgaacagaatatttaaagtcctctggaatgccgctacgggaacatttattgtcaccagcgaaacagcaaaaaaccgcggcaaaaaaagcggccgcagaaagctggcggtttccgcactcatcagtcttagcagcattatggtttctgcggatgtattggccaatgcaggtaaagatactggcagcggtgttactccatccggctccactgcaggaacagggtggattgcaattggtaccgatgccacagccaatacttacaccaacgttgatggcgcaagcgccgcaatgggttataaagcctccgcgatggggaaatggagtaccgccattggatcatacagccagtccaccggcaactcttcgctagcgcttggcgtaaaatccgtttcagccggtgaccgggctattgcgatgggggcctcatcctcagctggcgggagttattcgatggcaatgggcgtgtatgccgattcgagcggcacaaactcggttgcattaggttataaatctgtcgcaagcggagcaaattccgctgcattaggttatcaagccactgcgagcggcgacgacagcgctgcatttggtaatggcgcacaagcgataggcaccaactcagttgcccttggcgcgggctctaccgctctggaagaccattcagtcgccgtgggtaacagcaccactcagcggcagatcacctacgttgctaaaggcgacatcaatgccaacagtaccgatgccgttacaggcgcgcaaatttattctttaagtcaatccgtcgccgatcgactaggcggaggggcttccgttaattctgatggtacagtgaatgcgcccctctacaaggtgggcacaggcacctacaataacgtaggcagtgcgttaagcgcacttaactcttctatcacgaatacagaggcctctgtcgcaggattagtcgatgacgcattgctgtgggatggcaacacaagcgcattcagcgctaaccacagcggaagcgacagcaagattaccaatctggcggcaggtaccctggccgcggacagcaccgacgccgttaacggctcccagctgtttgccaccaatgaaaatgtgtctcagaacaccacggatatcgctgccaataccgacagcattaaccagaacaccactgatattgccaccaacaccaccaatatcaacagtctgagcaactccgtcaccacgctcaccgacgatgccctgttgtgggatgcagcctctggcgcattcaacgctaaccacagcggaagcgacagcaaaatcaccaatctggcggcaggcaccctggccgcagacagcaccgacgccgttaacggctcccagctgtttgccaccaacgaaaatgtgtctcagaacaccactgatatcactgccaataccgacagcattaaccagaacaccactgatatcgccaccaacaccaccagtatcaacaacctgagcaactcagttaccacgctcactgacgatgccctgttgtgggatgcagcctctggcgcattcaacgctaaccgcaacggaaacgccagcaaaatcattaatgtcgccgccggggacctttctgaagacagtacagacgcggtgaacggctcccagttgtatgaaaccaaccagaaggtggatcaaaacacctctgctatcgcagatattaatacgtccatcactaaccttagctctgacaacctgagctggaatgagacaacgagttcgttctctgccagccacggaagtagtacaacaaacaaaatcaccaacgttgctgccggagagctgtctgaagaaagtaccgacgcggttaacggatcgcagctgttcgaaaccaatgaaaaagtggatcagaacacgaccgatatcgctgccaataccaccaacatcactcagaacagcaccgcgattgagaacctgaatacttctgtctccgacattaatacgtccattaccggcctcactgataacgctctgttatgggacgaagacatcggcgctttcagcgcaaaccacggtggaagcatcagtaaaataaccaatgtcgccgccggggcgctttctgaggacagtacagacgcggtaaacggctcacagttgtatgaaaccaaccagaaggtagatcaaaacacctctgctatcgcggatatcaatacgtccatcaccaatcttggtaccgatgcactgagctgggatgacgaagagggtgcgttcagcgccagccacggtaccagcggtaccaataagataaccaatgtggcagcaggtgaaatcgccagtgacagtactgacgctgttaatggctctcagctttatgaaactaacatgctgatttctcagtataatgaatctattagccaactagccggcgataccagcgaaacctatatcacggaaaatggtaccggcgtgaaatacatccgtacgaatgataacgggcttgaaggccaggatgcatacgcaacgggtaacggcgcaacggcagtgggttacaacgccgtcgcatccggtgcttcgagtctggcgcttggagagaacagcagcagcagcattgagggcagtatcgctttgggcagtggctccacctctaaccgcgcgatttcatcaggtatacgagcaacgagcgtaacaagcgatggcgtcgtcattggctacaatacaacagacagagagttgctgggcgcgttgtcattggggacggatggagtaagctatcgtcaaattaccaacgttgcggacggctctgaagcgcaagatgcggtaacagttcgtcagttacaaaatgccattggtgcggtcgccactacaccgaccaagtactaccacgcaaactcaacggaagaagattcactggctgtcgggactgactcactggcaatgggtgcgaaaaccatcgtcaatgctgatgcaggtattggtattggtctgaatacactggtgatggctgatgccatcaacggtattgctatcggttctaacgcacgcgccaaccatgcaaatagtattgcaatgggtaatggttctcagaccactcgcggcgcacagactgactacaccgcctacaacatggacacaccgcagaactctgtcggtgagttctctgtcggcagtgaagacggtcaacgtcagatcactaacgtcgcggcgggttcggcagacaccgatgccgtaaacgttagtcaattgaaagtcaccgacagccgtgttgccgcaaataccgaaagcattaataacctgaacacgcaggtgagtagtcttgatactcgcgtcaccaatattgaaaacggcattggcgatatcgtcactaccggtagcaccaagtacttcaagaccaacactgatggcgtagatgcaaatgcccagggtgcggacagcgtcgcgattggatctggctctattgctgccgctgaaaacagcgtagcgttaggcacaaattcagtcgcagatgaagctaatactgtgtctgtcggctcttctacccaacaacgccgtattaccaacgttgccgcaggggtgaacaacactgacgcggttaatgtggcgcaactgaaagcttcagaagcaggctccgtgcgttatgaaaccaatgcagatggttcggttaactatagcgtgctcaacctgggagacgggagtggcggtaccactcggatcggcaatgtttcagcggcggtgaacgatacggatgcggttaactatgcgcaattgaaacgcagcgtcgaagaagcaaacacctataccgaccagaaaatgggtgaaatgaacagcaaaatcaaaggggtagaaaacaagatgagcggcggtatcgcctcagcgatggccatggccggtctgccacaagcctacgccccaggtgccaacatgacctcgattgctggcggtacatttaatggtgaaagtgccgtcgccattggtatctccatggtaagtgaaagcgggggctgggtgtataaattgcaaggaaccagtaacagccagggcgattactctgcagctattggcgctggcttccagtggtaa

SEQ ID NO: 379675 - DNA, 942 bp, Salmonella enterica
atgtttctattcatatgcatgactaatttgcaattattgattgcacggtcaattatagaaaaagagcagttgaaaaaagttgatgttttatttattggcgatgtagataacgtaaaaaatcagtactatttaaaaaaaattcagccgttatgtcggcactcagacatcgtcccgcaggtagcaaaattttcgacatttaaaacgattcaaagaacacggtatgctaaaaaaatcatggaaaagtatgccagagaatatcatactgttttcttcgcgaattttcatgtcccgcttatacaccatattttatcctgtatcactttttctgaaataaaaacctttgatgatggtacaaataatatcaatcagaaaagtataatgtatgaaaataagaatataagcgccacatcgaagttaatacgaaagctgatggggcgtaaatatcataaagatgaaatattaaagttagacgcaaaacattatactctatttcctaatagaaccaacataattgaaaagaccgaaggaattatattggtacaccataacggtcttcctgatacgaataatggctttaaaaaagtattattgggaacagtatatactgatgcgttaaaaaataaagaagatgagtgtgtttttcttcagcatcttcagcggcttattaaaaaagaagcggttgatatatatattcctcaccctcgatatgactctcatcagtttaatggtgtattgaatgttagctctgaaatgatagccgaggacattattttagaatatctggagcaagggatatcattagagatatatggatttaatagcacagttcagtataacctaaataatatctcaactatcaaaaactataaaataaccagcccttttctaaaagatagctttaatcatggactggggttcgattttaatcaggtctcagtataa

SEQ ID NO: 379676 - DNA, 531 bp, Salmonella enterica
atgagacattttaaaaaattcactaaaacaacggaattaacccctgttcagcaggagttatcagagaactgcagcgttcagtttatccacgatgaatcaggtgttgactggtatgtgctacagaaattatttcagccagacacactgaaaatacagtatgacaaaacagggctgattattgctgcggataaagatgcaacaaagttatttccgctgaattgctctgttgtggaactcgctgatactgatattcctgatggtttccaggctggtaattttacctatagcaacggcgttatcgcacctgttcaggttgattatgttgctttagcgacagcagaacgcgaccggcgcatggcgtcggtcacgtcaaaaatcaatcagcttatggaagcgcaggatgatagtgatattactgatgccgagctggtcgaactttccgatttacgtgaagtgcgtacaaaattgcgccgtctggatctgactggtgcgccagatattgactggccggaggtaccggatgtggcgtga

SEQ ID NO: 379677 - DNA, 1464 bp, Salmonella enterica
atgataaagaaaaaaggatttaccttactggaagtgactattgttttaggtattggaacgcttatcgcttttatgaaatttcaggatatgagaaacaatcaggaagcggtattggctgataatgtcggaacacagattaaacagcttggagaagcagttaaccgctatatcagtattcgctatgacaaaatttccacactgtcatcatccaacaaccaaagcagcgatccggggccaagaacctgttcggctgctggttgcgaaatcacttatcagacgttaattaatgaaggtctgttgcctgtaggttatacaggaactaacgcgcaaaaagcatcttacaaaattgtgttaaaacgttcaggaacagcgtcggattacgtcattaatggccttataacaaccgccagcccgtgggaagaaggtggtcgtattcgttatgacctgttaggtaaagcggttcaggcggctggtgttgatggcgggatgagcagaaacaccaagatagcttccggctatggtggtcagtggagtgagaactctaacagctacagcaatatcacgggtggtggattactggcttatcgtgtggggtataactcttcaatgtattctgtttatctgcgtcgtgacggaacgttgccgatgacgggtgatctgaatcttggtggtaagagcatcaaaaacatcaaagatatgacggcatcagggacaacaactaccggagcacttaagacaacgggtaatgcgtctgttgcatcagatctgactgtgggtggagcctcgacccttaatggtcctgtaaatatcaacaacaacctgaaggtaaaatctgatacttatctgaatacgctttcaacaacaggtctggcgagatttggtagccgtatcgcgacgaacggacttaatccaaacgatctgcctgctggctgggctggcggtgttcgcacctatgatttgtatgcgtctggaactgttggtgttggaacaggaaaaacagttaaagcttacatgaacaacgcgggtaatatttatgcgtcaggtaatctaactgccggaacgataaaatccaatggtacaattgaatcagttggaagaatcaaagcaggtgaatatcttcatttgaatggacaggcaacgttgaacgcaaaatgtacgcctaatggtttggttgggcgagacagtacaggtcgagtgttatcgtgtgttaacggtaaatggcagacagcaagtggtgatggcctgaaaggtatttttataacaataaccgatcaagtatctggatataagtgtgtaataccgaatagtgacactgggacatgtgcctgtccggggtcaacgtatagtcctcagtttggctatatatctggaacccttattgcagagtataatgaggagcgttgtagtggtagtaagaatacacattgttatagtaattttagaaggttatatgcttgtagataa

SEQ ID NO: 379678 - DNA, 174 bp, Salmonella enterica
atgaccatgaagatctgttctgtggctgaaatcaaatgtttcgccaatgcgatcatctgtaatacgtgtacgggcatggtaggcagctttcgcaacggaagtcataccttcgcttcgtttcacaattttaaaatccagatgaaaaatcgccatgaaaaatataacctcaaataa

SEQ ID NO: 379679 - DNA, 276 bp, Salmonella enterica
atggaaaacaataccatcaaatgcccgttttgcttcaaagagagtcagcgtggggttcacgtctgtacaggctgtttagcgacggtgttatatggcacttatcccggttggtatgctgctgttgttttgctgttgacttttggtttatcggcgttgatcggtatgtcaacaggcatggcgggggctactatcagcttgccagtaatcgctgttgttgggtttatagctggtaaggcgatattctctgataatgttgtgtttaggcgaagaatgtag

SEQ ID NO: 379680 - DNA, 735 bp, Salmonella enterica
atgaatacaaacgacgctgacctattacacttatttgaatcattaactacagaacaaaagattgatatcgcaagacgcttactacaaaacaaagaaataaaatcaacgacagttatttcttctgaggaagataaagctatttcgttttcacaaccttatgtgtttgcttttacttccaactttcgagttttctctgatcttgacatatccaagaatgaattccgtgtattaacctatatcttggagtatatggagtttggaaatctgatcaatctttcgcaatcatcgctgtgcaaagcattgaacatcgcttccggtaatatgtctaacatttttaaaaaactcagacagaaaggaatactcgtcgagcatcatggtcatctctatatcaactctaacattttcgcaaaagggatgagtcatcaactggatcagaaacgtaaagaacagttgagcaatgctcgcaatctttgcgcagagatagagcagtatccagaaaactatacgaaacattcacaggaagaaagaagaaaacttacattagaaacagaggttaaagaaatctatactgacgcatttgttttcagtaagaagaaaaagaataacgctgttcctaatcccaataacagcatacatgttgataaaccacgaaaagtatataaaagaacaaaggaaaatgaggaagcaagaagaaactctgttgacgcagactctcatatgcagaaagtatcctga

SEQ ID NO: 379681 - DNA, 825 bp, Salmonella enterica
gtgctcagtacctgccaacgtcgccaccagcgcctcggtggccgggtggccgtaggtggcgctcatggaggaaatcgccgtgtcgacgccgtcaacgcccgcctcgatagccttcagcagggccatctccgccatcccggtggtggcgtgacagtgcaggtgcaggcgcacctcaaaacgttttttgatttcactgaccagctcaaaggcggccatcggcgtcaggatgccggacatatccttgatggcaatcgagtcaacgccggtttccagcagctgttcggtcaggtccagccaggtctgcagggtgtgcgccgggctggtggtgtaagagagcgtgccctgggcgtgtgcgccgtggctgcgcaccgcctgcagggcggctttcatattgcgcgggtcgttcatggcatcaaacacgcggaacacgtccatgccgtttttcaccgcgcgttcgacaaaacgctccaccacgtcatcggcgtagtggcggtagccgagcaggttctggccacgcagcagcatctgcagcggggttttgggcatggcttttttgagttcgtgcaggcgcagccacgggtcttcgccgagaaagcgaatgcaggcgtcaaaggtggcgccgccccagcattcgagggagccgtagcccacgtcatcgagcgcggcggcaatgggcagcatatcgtcaaggcgcaggcgggtggcgaacagggactggtgggcgtcgcgcaggacgacatcggtaatggcaatagtcatggatccctccggaaattaagcgttaaggcggtgatggtgaatggcggcggcaatcaccggctttaa

SEQ ID NO: 379682 - DNA, 225 bp, Salmonella enterica
atgacggaacataaccggatgccggcccggcagattatcgtttacggtgactgctggccggtgacgatcgccgtggcacacctggtccggagatttctgccgggctgcaactgtgaaaccgcatacagtctgcctgttctgttgcagcaattacgtcggaaaccggaggccatactgatactgtgtcctgatgaatcccctaatgattttggtaaaaatcattaa

SEQ ID NO: 379683 - DNA, 672 bp, Salmonella enterica; identical to SEQ ID NO: 370073

SEQ ID NO: 379684 - DNA, 1716 bp, Salmonella enterica
atggcaatcattattcccaccgtaagtagctgtagcgagaaaattacagcaggcgaaaaaaggctggcaaggctactggagagagggttaagcgatagctgtacctgctggtacgacacgccgatgggcaaacaacatagtcatcctgactttgttattctgacccccgacaaaggtatattattcattgaagttaaggactggtttattacaaaaatcaaaggtgctaataaaacatatgtccagtatgaaactaaaaatggtatagaaagtttaaaaaatcctattgagcaagttcgtcagtatgctttccagaccattaatagcctcaaaacagatccacaacttcgccagcaagaaggccaatatcagggcagttttgttatgccgtatggatacggcgtgtatctgtccaatatttctcgctctcagcttgagaaagccttttcacctaccgaacttgcagacatactccctaccgataaggtgatatgtaaggatgaactcaatgaatttatgtctcaggaaaaagtagctgccaggctcgcattacttgccaaatacaactttgctcaccagactacacctcagcagctggatcgtataagatggcatctttatcctgatattcgaatccataaacccattaagcaagctgatgtaaagaatttcacactccacacaccaagtattatatccattatggaccggcaacaggaacaacttgcaagaagcatggggtccggacatcgggtgattcatggcgttgcaggatctggtaaaacactgatattacttcaccgttgcctcgaacttgcaaataatattgaaaacgaaaaacctgttttggtcatttgctacaacattacgctcgccagaaaactcaaagcccttattgagaaacatacgctcaggcttcctgttgaggtcacacattttcatttatggtgtcatcaacaattacagtcttatggacggctaccgccaaaaagcaaaaactttgttgagctaatggaaaatgccctttctatcgcctttgaggatggaatcatccagccagagcagtacagcgccgtgctgatcgacgaaggccacgattttaatcctgagtggctaagaattcttacccgaatggcagacaccaaaaataacacactgcttttcctttatgatgatgcacaatcaatttatcagaaaaagaaagcgctcgacttcaccttatccagcgtcggcattaaagctcaggggcgaacgacaatcctgaatattaattaccgtaatactcagcaaatattacatttcgctagtagcattgcatttaactatctcaataatcacattgaggatgctcttaaatatcagcagcccgactcaggcggaattgcgggttcttatcctgagttgacctgttttgataaccaggatgaggaaataacgcatatccttaactgggttatcgaacagcaccagcggggcattccgtggtttgatattgccatattgtgcccatcaacctatagcattaaagacgtgctgggaccacaactgacggctcgcaatatcccttatcaaatgattattacctctgccgataaaaaaactggtcgccacagcaagaacggctgtgtgttatgcctctgccgagcagtaaaggactcgaatttcagtcagtcgctgtcatggacgcagccagatccaaaaatgaagaagacttga

SEQ ID NO: 379685 - DNA, 141 bp, Salmonella enterica
atgctcgctgagtgcattttctccattcatagttatcagcagattatagcgagcccgtgtgaagccaacgtaaagccttttgatatcattgctcaagtcttcttcatttttggatctggctgcgtccatgacagcgactga

SEQ ID NO: 379686 - DNA, 243 bp, Salmonella enterica
atgaatagttcggtgctattaggtgaaggcttcaccctgatgttcctcggcatggggttcgtgctggcgtttctgttcctgctgattttcgccatccgcggcatgtccgccgtgattactcgcttcttcccggaacccgtcgccgcgcccgcaccgcgtgccgttcccgtcgtggacgacttcacccgcttaaagccggtgattgccgccgctatccaccaccatcgccgccttaacccttaa

SEQ ID NO: 379687 - DNA, 1164 bp, Salmonella enterica; identical to SEQ ID NO: 372473

SEQ ID NO: 379688 - DNA, 612 bp, Salmonella enterica
atgacgacacacgccacaagcagaagaccagcaacaaaatcttaccgtaatcccaataaggtcagtaaagtaaatgtatcagggaagaaatctcccgttctgattgttcctgaaccaactgcatccactaaattgaaaaccccatctattcaaaacaccagagcgaagaaccgcgctccgatgaggagtaggaaacagaccaagccccgccagaatggtttgtttaaacgtttcacgctactgatagtaggatatataagagagaaatttatatgggccagaaggaaacccgataccactgatgctgaccatgataagcgtatcgcagagaactatgtctatgatgaagtgctgggtatcaatgttccacgctcggagtttgaaaaacgcgctaaatttaacaatgaccagacatcaccagaagcaagcatctatggcaatgaatcagaccatgacaaaaccgttcgttttccaagtcgtccgaaagatgtacaaacagagattgataaatacatagatctcataccatcaagcccctcagagtattcaggaaagtcccatgtttcaaagttgagaccactggcatatcgtaataataattataatgaatag

SEQ ID NO: 379689 - DNA, 129 bp, Salmonella enterica; identical to SEQ ID NO: 372520

SEQ ID NO: 379690 - DNA, 255 bp, Salmonella enterica; identical to SEQ ID NO: 379310

SEQ ID NO: 379691 - DNA, 369 bp, Salmonella enterica
atgcccggagccgcaggccgggtcgagtactttgatgctttccggttcaatactggcaggtgtaatggcggccagctgcgcctgcacttctggcgtctgttcggctggctcaatgtagtagtccattttgcctttcagcggcgaatccgggtaggtctgcaaccactggcggccgacggagttctgtaccagatactgcacaatccagtttggggtaaacagctgggtggcggcaggaatatcttcgctcttcaccaccttaccgataaccgcatcttttttctcagagatatagaactgatacagccagccgataacctcaacttcttgccagtcttcttccggaataccgtccaccagaccgcgtag

SEQ ID NO: 379692 - DNA, 255 bp, Salmonella enterica
gtggaagccgtggtcaagataaccgtggatttccatataacgaatggcgcacaggcggttgaaccaggtgtaggcacagtgctcaaccagcacgtcaaagccctgctcgcgggcgcgttttaccagacgatcgcggcgggtgagggtggatttggggtagtcgaactgaccatagcgcatggtttcgccgacgagctcggcatccgcaatttgcagattgccttttttatcagcggaaatccccagcgtggttag

SEQ ID NO: 379693 - DNA, 3642 bp, Salmonella enterica; identical to SEQ ID NO: 375936

SEQ ID NO: 379694 - DNA, 714 bp, Salmonella enterica
  misc_feature (636)..(645): n is a, c, g, or t
atggttaacaatagattaaaaatggtaatcgctatccttatagttttctcgttggtgtattcaataggatttatcacaccaatgaactctgatgactatacttatgccctaagagagctttcgctttctagcgtaaaaatgcactatttgggatggagcggaagggttgtgtcagatacgatcagcacatctctattaaagtttttctccccgcatatttacaatgcaataaactcagcagcgctaacattaatggtgttgtgctggacaatgatcccagctacattaacaaagtcgtcaccgtccccatatgtgatgattttcttatttttcttatacttcgttgcaaatccagccctcggtcaaactaacttctggcttgttgggtcagcaaattacttatggaccaacatgttcattgccatttatatactaatttctatatatttaagcaatggtaaaaaatccaatttaatactctttgtatatgccatatcatcgatatttgcaggttgctcaaatgaaaatacatctcttgtagttgtattaatttctgtagcatatttctttataatgaatagaaataaatatttactgattggcgtattcggatctgcaataggcgcgggggttctnnnnnnnnnngggaaacctatcccgtgcgtctacaatacaagactggtacaatcaaccacttgcatggagggttcttga

SEQ ID NO: 379695 - DNA, 882 bp, Salmonella enterica
atgtatatcggtccacacggacacgtcgttattgtggacgcagacggtaatgcggaaacctttggtcttatggacggcggtgtggatgctgctattacggcatatttcgggtcgcaattacaggaacgggtacagcaaaatatcatccgtgaatacctgggggaacagcccgtcggcaccgcctttgttattgaaacgggtaacagtaaacatccgtggctggttcccgccccgacgatgcgcgttccgctgattattgacggcaccgacgcggtttataatgcaacacgggctgcgttactggcaatttttcagcacaataaaagcgccggagaagaccggaaaattacatctgttgcattacctgcaatgggggccggatgtggtcaggtcccccccggacagcgtcgcccggcaaattgtactgatatagcccctcctgatattccctccagtcatattgctgtttttgacgctgaaacccaaacgtggagtctgcaggaggatcaccgcggcgagacggtttacgacacaacaaccggcaatcaggtttatatctccgatcttggtccgctacctgaaaacgtcacatcagtttcaccaggtggtggatacaaaaaatgggatagtaaggctcaggtctggatgaatgatgaagctgcggaggccgcagccagacttcgtgaagctgaaggaacgaaaaacagactcctgcaaatagcgtctgaaaaaatcgcgccgttacaggatgcagtggatctggacgaagcaaccaataaagaaaaagcttctcttctggcatggagaaagtaccgggtacaggtaaaccgtgttgatactttaaagcctgtctggccggagaaaccagccagtagtttataa

SEQ ID NO: 379696 - DNA, 612 bp, Salmonella enterica; identical to SEQ ID NO: 67540

SEQ ID NO: 379697 - DNA, 3405 bp, Salmonella enterica; identical to SEQ ID NO: 270408

SEQ ID NO: 379698 - DNA, 198 bp, Salmonella enterica
atgcaatatactgatattcaaatttggcagcctggcattctgcgcaacaccgattatcttaaccccggtcccgctaagctgctggccgccactctggataaagacatcaaaatctttaaagagggggggcgttctgccagaattatggcactggctctattttcttcctgtcgaccgccagtcagatctatctgctga

SEQ ID NO: 379699 - DNA, 483 bp, Salmonella enterica
atgattacctgtaactttaccgcatttgctgtacttgcttctggtatgtggacagacgccagttatcaaggtattcagattatctttgccgccttaaaagaaacatggcatccgattattgttcaggttctctgtctcggtgtggcgttgattctgtttacttcttatcttggttcatatattaaatttcgcacttcgataaactatatctttggcgataagctagaacgcatcattaaatggctatattttttgccgccactgattgccgttaatatggaaatcccggtaatctggttaatggctgatattgctgtcggttttctggttatccccaacgtaattgctctgttcttgctgcgtaaagaatttattagcgaattcaatttattcagaacgcgtacacagcgggacactaattctgaaaaaacaacgcaaattacgcacgtaaatatgtcgaagagtgaagggaaagaggagtaa

SEQ ID NO: 379700 - DNA, 4386 bp, Salmonella enterica
atgaatagaatatttaaagtcctctggaatgccgctacgggaacatttgttgtcaccagcgaaaccgcaaaaagccgcggcaaaaaaaacggccgcagaaagctggcagtttccgcactcatcggtcttagcagcattatggtttctgcggatgcactggccaacgcaggaaacgatacaggcgacggcgttactccaacgggtacccagactggaggaaaagggtggattgcaattggtaccgatgccacagccaatacttacaccaacgttgatggcgcaagcgccgcaatgggttataaagcctccgcgatggggaaatggagtaccgccattggttcctacagccagtccaccggcgactcttcgttagcgcttggcgtaaaatcggtttcagccggtgaccgggccattgcaatgggcgcctcatcctcagccagtggaagttattcaatggcaatgggcgtgtatgccaattcgagcggcgcaaaatcggttgcgttaggttataaatctgtcgcgagcggagcaacttcctctgcattaggttatcaagctactgcgagcggcgacgacagcgctgcttttggtaatggcgcaaaagcgataggcaccaactcagttgcccttggctcgggctctgtcgcccaggaagacaattccgtcgccgtgggtaacagcaccactcagcggcagataacctacgttgctaaaggcgacatcaattccaccagtaccgatgccgttacaggtgcgcaaatttattctttaagtcaatccgtcgccgaccgactcggcggaggggcttccgttaatagtgatggtacagtgaatgcgcccctctacgaggtaggcacaggcatctacaataacgtaggtagtgcattaagcgcacttaacacgtctatcactaacacagaggcctctgtcgcaggattagccgaagacgcgctgttgtgggatgaaagcatcagcgcctttagcgctagccacacgggaaacgccagcaaaatcaccaatctggcggcgggtaccctggctgcggacagcaccgatgccgttaacggctctcagttgtttgatacaaatgagaaagtggataagaacactgctgatatcgccaccaataccggcagcatcaaccaaaacactgccgatattaccgctaataccgacagcattaaccagaacacaaccgatatcgccgccaatacgaccagcatcaatcagaacaccactgatatcgccaccaacaccaccaatatcaacagtctgagcgactccgtcaccacgctcaccgatgatgcactgctttgggatgcagcctctggcgcattcagcgctaagcacaacggaagcgacagcaaaatcaccaatctggcggcgggtaccctggccgctgacagcaccgacgccgttaacggctcccagttgtttgatacaaatgagaaagtggatcagaacaccgctgatatcaccaccaataccaacagcatcaatcagaacaccactgatattgccaccaacaccaccaatatcaacaacctgagcgattccatcaccacgctcaccgatgatgccctgttgtgggatgcagcctctggcgcattcagcgctaaccacaacggaagcgccagcaagatcacaaatctggcggcgggcaccctggccgcggacagcaccgatgcggtgaacggctcccagttgtttgccaccaacgaaaatgtgtctcagaacaccgctgatatcaccaccaataccaacagcatcaatcagaacaccactgatattgccaccaacaccaccagtatcaacaacctgagcgattccatcaccacgctcaccgatgatgccctgttatgggatgcagcctctggcacattcagcgccagccgtagcggaagcgccagcaagatcaccaatctggcggcgggcaccctggccgcggacagtacagacgcggtgaacggctcccagttgtatgaaaccaaccagaaggtggatcaaaacacctctgctatcgcagatattaatacgtccatcaccaatcttagctctgacaacctgagctggaatgaaacaacgagttcgttctctgccagccacggaagtagtacgacaaacaaaatcaccaacgttgctgccggagagctgtctgaagaaagtaccgacgcggttaacggatcgcagttgttcgaaaccaatgaaaaagtggatcagaacacgaccgatatcgccgccaataccaccaacatcactcagaacagcaccgcgattgagaacctgaatacttctgtctccgacattaatacgtccattaccggcctcactgataacgctctgttatgggacgaagacaccggcgctttcagcgcaaaccacggtggaagcaccagtaaaataaccaatgtcgccgccggggcgctttctgaggacagtacagacgcggtaaacggatcacagttgtatgaaaccaaccagaaggtggatcaaaacacctctgctatcgcggatatcaatacgtccatcaccaaccttggtaccgatgcactgagctgggatgacgaagagggtgcgttcagcgccagccacggtaccagcggtaccaataagataaccaatgtagcagcaggtgaaatcgccagtgacagtactgacgccgttaatggctctcagctctatgaaactaacatgctgatttctcagtataatgaatctattagccaactagccggcgataccagcgaaacctatatcacggaaaatggtaccggcgtgaaatacatccgtacgaatgataacgggcttgaaggccaggatgcatacgcaacgggtaacggcgcaacggcagtaggttacgacgccgtcgcctctggcgctggcagtctggctcttggccaaaacagcagcagcagcattgagggcagtatcgctttgggcagtggctccacctctaaccgcgctattacaaccggtatacgagaaacgagcgcaacaagcgatggcgtggtgattggctacaatacaacagacagagagttgctgggcgcgttgtcattggggacggatggagaaagctatcgtcaaattaccaacgttgctgacggctctgaagcgcaagatgcggtaacagttcgtcagttacaaaatgccattggtgcggtcactactacaccgaccaagtactaccacgcaaactcaacggaagaagattcactggctgtcggaactgactcactggcaatgggtgcgaagaccatcgtcaatgctgatgcaggtattggtattggtctgaatacactggtgatggctgatgccatcaacgggattgctatcggttctaacgcacgcgccaatcatgcaaacagtattgcaatgggtaatggttctcagaccactcgcggcgcacagactgactacaccgcctacaacatggacacaccgcagaactctgtcggtgagttctctgtcggcagtgaagacggccaacgtcagatcactaacgtcgcggcgggttcggcagataccgatgccgttaacgttggtcaattgaaagtaacggacgcgcaggtttccaggaatacccagagcattactaacctgaatactcaggtatcgaatctggatacccgcgtcaccaatatcgaaaacggcattggcgatatcgtcactaccggtagcaccaagtacttcaagaccaacaccgatggcgcagatgcaaatgcccagggtgcggacagcgtcgcgattggctctggctctattgctgccgctgaaaacagcgtggcgttaggcacaaattccgtcgcagatgaagctaatactgtgtctgtcggctcttctactcaacaacgccgtattaccaacgttgccgcaggggtgaacaacactgacgcggttaatgtggcgcaactgaaagcctcagaagcaggctccgtgcgttatgaaaccaatgcagatggctcggttaactacagtgtgctcaacctgggagacgggagtggcggcaccactcggatcggcaatgtttctgcggcggtgaatgatacggatgcggtgaactatgcgcaattgaaacgcagcgtcgaagaagcaaacacttataccgaccaaaaaatgggtgaaatgaacagcaaaatcaaaggcgtagaaaacaagatgagcggcggtatcgcctcagcgatggcgatggccggtctgccacaagcctacgccccgggcgccaacatgacctcgattgctggcggtacgtttaatggtgaaagtgccgtcgccattggtgtctccatggtaagtgaaagcgggggctgggtgtataaattgcaaggaaccagcaacagccagggcgattactctgcggccattggcgcgggcttccagtggtaa

SEQ ID NO: 379701 - DNA, 858 bp, Salmonella enterica
atgtcctgctacgcagccacagcatcagactatactcagtggtgtctattaaccctctccaactacgttatgttttggcatggtaacaatgcgatgttatggataattaacgataatattgaatttaatccagaaatgaatcgcctggcttcattatcgaggccagatctcaacattattctgacaacgcccgccagccgctgcttgcgccttctgctggaaaacgccccctccgtcgtctcacaacaaacattctttcaaaaagtgtgggaagaagacggcatggtggtgtcggcaaatacgctttatcagaatatctccattattcgccgcggattacgtaccgttggcgaaaatgaagatacgctgataatcacggttccgcgtagaggctttcagattgagccaggtgtgagcctcatgaccatccgcaaagacttcgctcaggcaatagaaaaaaagggtgagacgccaccgcgtatgtcagggcgttggtttaaacattatgtacctgtactttggatgaccgggacatttgctgtcggtattttgcttggcactataagctggcaaaccgttcccgataaggatttttacgatcgctacacgctggttgaaacaactcagggctgtcattttttctcgcggaatgaagatatcgaaagcggcagccgctttgcaagctataagtcaatgattctaaaaaccggtatggattgtcagaaatacccatgggtctatttcccttccagcagtcgcaccccagcggttacggcattgatttgtcagcaaccttataaaacgcgcggtgatacaggctgcgtgacgctttttttccgcggggtgacacatgggtaa

SEQ ID NO: 379702 - DNA, 1542 bp, Salmonella enterica; identical to SEQ ID NO: 375980

SEQ ID NO: 379703 - DNA, 1680 bp, Salmonella enterica; identical to SEQ ID NO: 375979

SEQ ID NO: 379704 - DNA, 2847 bp, Salmonella enterica
ttgaaataccttgcttcctttcgaactacgctgaaagtctcgcgctacttattcagagcgttagcgttactcatttggctcttaatcgcctttgtttcggtgttttacatcgtcaatgccctgcaccagcgggagtctgaaattcgtcaggagttcaaccttagctccgatcaggcgcagcgttttatccagcgcacgtcggatgtgatgaaagagctcaaatatatcgccgagaaccgtttaacggcggaaaacggcgtcatgtcgtcgcgtgcgcgtgatgacaaaatggtggtgccggactttgaaccgctatttgccgactcagactgtgcggcgatgggctccgcctggcgcggatcgctggagtcgctggcctggtttatgcgttactggcgcgacaacttttcagcggcgtatgatcttaaccgcgttttcctgattggcagcgataacctctgtatggcgaatttcggcctgcgtgaaatgcccgtggagcgcgatgatgcgttaaaagcgttacatgagcggattatgaaataccgcaacgcgccgcaggaagaaagtgggaataaccttttctggataagccagggcgcgcgtcagggcgtgggctacttttatgcgctgacgccggtgtatctggccaaccgtctgcaggcgctgctgggcgtcgagcagtccatccgtatggaaaattttttcacgcccggcagtttgccgatgggcgtcactattattgatgagaacggccattcgctgatttcgttgaccggtcctgacggcattattaaagcggagccgcgctggatgcaggagcgttcctggtttggttatacgccaggttttcgcgaactggtactcaaaaaaagcctgccgccatcctcgctcagtattgtctattctgtgcctgtagatttagtcctggagcgtattcgtattcttatcctgaacgctatcctgctgaacgtgctggtgggcgcagggctgtttacgcttgcgcggatgtatgagcggcgaatttttattccggcggagagcgatgctcagcgtctggaagagcatgaacagttcaaccgtaaaatcgtcgcctccgcgccggtggggatctgtattctgcgcactattgatggtgtcaatattctgagtaacgaactggcgcacacctacctgaacatgctcacgcatgaagacagacagcgcctgacgcaaattatttgcggccagcaggtcaactttgttgatgtattgaccagcaataataccaatttgcaaattagcttcgtccattcccgctatcgcaatgaaaacgtcgcgatttgcgtgttggtagatgtgagtacgcgcgtcaaaatggaagagtcgctgcaagagatggcgcaggcggcggagcaggcaagccagtctaaatccatgttccttgcgacggtcagccatgaattgcgcacaccgctgtacggtatcatcggcaatctcgatctgctgcaaaccaaagagctgccaaaaggcgtggaacgtctggtcacggcgatgaataactcctccagtctgttgctgaaaattatcagcgacattctcgacttctcgaaaattgagtcggaacagctaaagattgagccgcgcgaattttcaccgcgagaggtgatgaaccatatcaccgccaattatctgccgttggtggtgcgtaagcagctcggtctgtattgttttattgagcctgacgtgccggtatcgctgaacggcgacccgatgcgtttacagcaggttatttcaaacctgttgagcaacgccattaagtttaccgatattggctgcatcgtgctgcatgtgcgctgtgatggggattatctcagcattcgcgtgcgggataccggcgtcggtattccggcaaaagaggtggttcgcctgttcgatcccttcttccaggtgggaaccggcgtacagcgtaactttcaggggaccggtctggggctggcgatttgcgaaaaattgatcagcatgatggacggcgatatttccgtcgattcggagcctggcatgggaagccagtttacgctgcgcatcccgctttatggcgcgcaataccctgtgaaaaagagcgtggaaggactcgccggaacctgctgttggctggcggtgcgcaatacttctttgtgccagtttattgagaccagtctggcgcgtagcggcgttcatacgcagcgttatgaagggcaagaacccgccgcggacgatattttgattgtcgatgacgcgctggagcatacctggcaggggagggcggcggtcgtcttttgccgccgtcatatcgggattccgttggaaagagcgccgggcgagtgggtgcatagtgtggcgtcggtgcatgagttgcccgcgctgttggcgcgtatctatagtattgagctggatagtgaagcgctttccagcgcattgccgacgacggataaaactgcagattcaaatgacgacatgatgattctggtcgttgacgatcatccgatcaatcgccgcttgctggccgatcaattgggatcgctggggtatcagtgtaagacagccaatgatggcgtagacgctctgaatgtgctgagtaaaaatgctatcgatattgttctgagcgatgtgaacatgccgaacatggacggctatcgcctgacgcagcgtatccgtcagcttgggctgacgctgcctgtcgtcggcgtgacggcgaacgcgctggcggaagagaaacaacgttgcctggagtccggtatggacagctgtttgtcgaagcctgtgacgctggatgtgttgaaacagacgctggcggtgtatgccgagcgggtacgtaaaacgcgggcataa

SEQ ID NO: 379705 - DNA, 1389 bp, Salmonella enterica
gtgaaatatataaatcattaccgctatttgtttgtctgttttttccttgccatactccctttttttgctttatcttttcccggtataagagagtatgtttttgataacttcatggtttctgcaatttacaatggagtcattattgccatttatattacaggttctttgtgtgcattattcactattcttaaaaatatttcagcaaaagacatattaatagctcaggacgccagtagaaaaaatagcattctttctaacctcaatcaggttttgtttgccggggagtccaaacagtgtgatttcaatttactgatggaattagatgacaatgtgtctaccgcccgtaatcaacgattgtcatttattatgagctgtagcaatgtgtcgacgcttgttggcctgttggggacgtttgcgggtctgtctattacgattggttcaatcgggaacttattgagctcgccatcagatgttggcggtgataatgcaagtaatacactcaatatgatcgtgacaatggtagcgtcgctttctgaaccattgaaagggatgaataccgcatttgtatcttctatctatggtgttgtttgcgccatactcctgacctcacaaagtgtttttgttcgcagctcctattcccttgtttctacggaaatcaaaaaattaaaaatcataagcaacagagccaataataaacagcgaagcctgcgggttgaatcagagacgcttgtagaatttaaagagttgtttaaagcgttttttgataactacctgacagttgaaaacttacggacgcaggatgaagaaaagaaacgagagatgctatcagatagctttgtcactttgcaaaaccgactattggataactcagcaaaactggaacaaatttctacgctgattgatggttatctggtaagcagtaacgaaaatctcaaaaaattatctgacggtgtaataacaattacctctcgtttatctgaaggtaatatcctgcttgctgataataatgcacgactggaggcaatgagtacaatacaaaatattatagataaaaagaatgattcaataatgacatcagttgataaatgttatcaggaatctctttcacatggtaagaccataaacgatattgccgctggcagtgccgatatttctcatactctcgatgggctgagaaaagaaatggatgaggatatgaataatgttcatttagcgctatccgatctatcggctactgataaaaagattattgccaatactaaagagattagtgctgaaatggttagctaccgtgatacctatatgccattaatggaaaaaataacatctatgcatcaggaaatagtaaagcaacgtttgttaaacaaggaggaaaaaaatgaagattaa

SEQ ID NO: 379706 - DNA, 1320 bp, Salmonella enterica
atgaagattaagatgttttttctgacgactgcttttattacacaaagcacatacgccagcgagcttccggtcattcctctaagagatttagttaatgccgcattaacgcatcagccctctgttgctgtttcatattatgagactgaaaagaaaaacagtgacttagatctttcacgggcagcactttatcctaccctggatctaacatctggccttaataataacaggaaagagtcatcaggtaccgagaggaacgttgaaaataaggtgtctttatcataccgaataacggattttggagtgaggggggctaatatcaggaaatctgaatatgaaagagataatagtaaaactgactatgaaaaaacaaagaatatagtgtctcaggaggttgtgacaacctattacaacatcagtaaatatcgtgaaatgattgatggcgtaaatctggagaaagagttttataaaaagatgctggaaactttttcgttgctggtatcttccggtgtagctatgcaatctgatatgcgtaaagtacaagtatctatcgatgcattaaataccagaagcattatgtatcagtcgatgttggatgatgaaatgtataaaatgcagaatatgactggtctgaatttatcgccagttcagattcaaagcgatgaaaaattcaacctcttcaaaaaatatatctttgtcgaaagccctgaaaaacttatggacatggtgatgaaatacaacgatgactataagatgcttgtcaatacccgaaaagccgcgaccgaagatattaatgccgcaaaatcatcctattttccgactgtagatcttgtttccagctatgtacagaataacccgagcggtagtgccaaaaaaagtgattatgaagatgaatttaaaacgggtatcaatgtcagtttcaacatttttaatgggttcagaaattcagcccaggaaagaaaaatggtggcaagttactcgcaggctaagctgcaaattgacgattttttgattaaaacgcgttataacattgattcacaactttcaagatacgccgctgcaaaagagacttactcagtggcggaacgttcacatacaaacgcgttacagcttactgaattatatgagcaggagtttcagttagggcaaaaaagtttgcttgatttaatttcaagccgtaatgaagcatttcaggcatatgtaagcatgatcgacagcaaatatagcctgtatattttaaagctacagcaactctcattgatttttcatttaatggattatttaaaaggaaatactgaaagtgagttaaatgtaatgaaatga

SEQ ID NO: 379707 - DNA, 495 bp, Salmonella enterica; identical to SEQ ID NO: 376080

SEQ ID NO: 379708 - DNA, 588 bp, Salmonella enterica
atgacccacatcatggatcacacaatggagatgcgtgaaaagggtgggcgttacgtgttcctcattaaagcagcgacaagtgaaacgtggtggccggaagacgctgaccacatcatgtttatccgcggtcgtattggtttcgatctcccagtgtggtttgttcctgcggacaataagcagaaacccactggtgcattctttgctggcgccattgcaatcttcgataagtcatggcgcggcgagcgtttcagctacatcagccgtaccgaactggaggaaaaggggaaggcgttcatgtcactggtcgaatttgccgcgggtaaggttcagccaccagccactacggcgccagagcaagaagaacccattatagcgccagcagtattaccttatgtggattcgcgtatctggccgcttgaggttggtctggtgttcaaccaagttgagggggcggattctctggacgcattacagcagaacaagctgaaagccaacattaatcaactctggctggaacgaacggccaccagcgaaatcattactactgctggtggactggtcagcagcatgcggcgggaggttgcatga

SEQ ID NO: 379709 - DNA, 309 bp, Salmonella enterica
atgagcaataaatattgccaggcgctggcagaactgcgcagcaaatcagcacacgaactgaaagaagtcggcgatcagtggcggacaccagacctgcttttttggggcattaatgcgatgttcggtcccctaacgctggatctctttgctgacgacgataacgctaagtgccctgtgtggtacaccgccgatgataacgcgctggtacaagattgggctgaaatgctggagtcaatcggcggggccgcattcggtaatccaccctatagccgctctcagtaccacgagaagcaggcgatcccggcatga

SEQ ID NO: 379710 - DNA, 225 bp, Salmonella enterica; identical to SEQ ID NO: 371888

SEQ ID NO: 379711 - DNA, 684 bp, Salmonella enterica
atggtgggctgggtaggggcaccgaaaggtgcgccggtttccgataacgccggttacgccaaccctgctcagttcaccaccagtgaaattggcgtttccggtggtggagtcacatccaagttatcggaggcggccatcatggctacagtcccaactctcgctcaacctgaaatcagtgttattaacgggcaagccgttacttcttcccttgctgttgccgactacttcaccaaacgtcatgacgatgttctgaaaaagatccgcgcacttgattgctctcctgagtttactgcccgcaattttgcggtgagtgattacaccgacgcatctggccgcaaacttccctgctataacatcacccgcgacggctttgctttccttgctatgggctttacgggcaaacgcgccgcccaattcaaagaggcatacgtcaatgcctttaaccagatggagaaacaactttcaactccatcggtgctgagcgatgcagcacataatgccagcgttctttattcctacatttcatccattcatcaggtctggttacagcagctttatcccatgctggaaaaagcggaatctccgctggccgtaagcctgtacgaccgcatcaatgacgctgcggcgcttgcgagccttatcaatatgacactgaaccgttcagaggtaagggggcgcaaatga

SEQ ID NO: 379712 - DNA, 240 bp, Salmonella enterica
atgattcatcacagaacgtttgctaatctcgcactggtcagcaatatgctggtagctgggccagcactcaccctgatcgctggcattatcagccagcttgatcagaaccagttttcgcaatggattacccactcgaattttcatcgctttaaccatcagctccatgctcatgcagcacctccgagatgcttcatgtttttgccggaacgaaaggcaataagaggcatgttgacgcggtaa

SEQ ID NO: 379713 - DNA, 225 bp, Salmonella enterica
atgatccggaatatttttaagcggttcaccagccaacgttttcattgccctcgtccaggacagtggtacagcacaccagaagggtacgttctgcgtattagcctggtcgatcgcgaatgtcagaaggttgtctgtgagcctcttgggcgtaattaccgcgtcaacatgcctcttattgcctttcgttccggcaaaaacatgaagcatctcggaggtgctgcatga

SEQ ID NO: 379714 - DNA, 711 bp, Salmonella enterica; identical to SEQ ID NO: 375960

SEQ ID NO: 379715 - DNA, 405 bp, Salmonella enterica
atgttagaaccaccaaagagttataatgaaatgttgcctatgctccataaggcaacttttattactacatttatattttatctatcattagttatttatggctacatgccattagttggcattaatgctaagtacatcccccccattaaagactacgaagaatttattaagtggatattaacattcggtatattgccaattgcattttcaattttttggtccgtgattagcggagctttagatctacataataatgtggcaaaaattattgggataagaaaagtatgggataattacttaattattaaaccattagcgaaaatcgcaggcgttacgagaaagctaactaatgatgaatcttacaaggtaatgagtaaactgtatctgtctcttatacacatctga

SEQ ID NO: 379716 - DNA, 672 bp, Salmonella enterica; identical to SEQ ID NO: 376540

SEQ ID NO: 379717 - DNA, 483 bp, Salmonella enterica
atgagtcttatgggagacgttcagaaattcattgaatcccatccgggatgtacttccagcgatatagcgaatgctttcgcagatttcccgcgtaaaagcgtcctgcagtcgacaagtaagttacgccagtgcaggcgtgttgctcatcgctttgaaggtaaaactcgcaggcattttgctcttgagacagacatacagccggatcaggagccagatatcgggactaaacctgtgcggagctgttatgtcggaaccaacgacccgcaggtgattatgcatctgatacgtcaggcagaaacactggagtcgggagggttgttccgtcgtgcagctacggtatggatggaggcattccgggagagtcatatcccgtcggaacgtagcgcctttctggcgcgccgtgaacggtgtttgcggaagagcagaaagtctgttgcatcaggtagtgagtggtatctgtcagggaattatgtggggtcttaa

SEQ ID NO: 379718 - DNA, 555 bp, Salmonella enterica
ttgattaatacagactacggaaaatatattctcaaagtatttagtccaaaagtaaaaaatactgaacgctttttcaaatcgttagtaaaaggagattactacgaaaagctttttcatcagacagatcgtgtgcggcgtgaagggtttgcggcgcttaatgatttttacctgctggcggaaattaaaacattacgctatgtaaaaacatacgtgatgataattgagtatattgaaggtattgaacttgttgatatgccagaaatttctgacgaggtgagagggaaaatcaaacagtcgatatattctctgcatcagcatggtatggtttcgggcgatccccataaaggtaactttatcctgcaaggcaatgagatcagaattatcgatttgtccggaaaaagaccttccagacaacgaaaagcaaaggatcgtattgatttagaaagacattatggtatcaaaaataatgtgagagatatcggattttacttattgatttataagaaaaaactccgaaatttcttgcgtcgtattaagggtaaggaaaaacgctga

SEQ ID NO: 379719 - DNA, 219 bp, Salmonella enterica
gtgataaagatactcaccttcacctatgtgctgagcaagaacgcggtaacggaggggcatagttgcgacaatagtcagctcgggggctggggctgttgccggggaagggcagttgcttccgttaccaaaattttcgttgtggtcttccagcacttcgtctgtttcggtattaacaccgtcgacgatatgctggcgcgccgcggcggcggcttcagatga

SEQ ID NO: 379720 - DNA, 219 bp, Salmonella enterica; identical to SEQ ID NO: 376342

SEQ ID NO: 379721 - DNA, 294 bp, Salmonella enterica
ttggggctgttgcgtttcttgttgggctttgccgatggcgcgatgttacccgccgtacaaacgttattggtgaaatactccagcgaccaaattaccggacgtatttttggctacaaccagtcatttatgtatctgggcaacgtggttgggccgttgatgggcgcgacggtatcggcgatggccggtttccgctgggtttttatcgctacggcggcgatcgtgttgatcaatattgggcaactgaccctggcgttacgtcgtcggcgtaacgcgcaaaaagcgaaaggccaatag

SEQ ID NO: 379722 - DNA, 141 bp, Salmonella enterica
atgataaggaaaggcgcggcgctagcggggcttgttttgatgtcgcccgttattgcgaagccggtaatggtggagagcgggcgtattcacctgcgcggacaactggtcaatggcggctgcgctgtcgccacagaaagctag

SEQ ID NO: 379723 - DNA, 345 bp, Salmonella enterica
atgtcagatttggctatgaaggttttgaaatggcaatcgactggcgatgtcggcatcagtagcgcaactcttgcctcaatcgcatgtggactgaaaaagaatatctatggtcatagcttcggtgctccacatgacgcagccgatttcagacgatgcgttgcacttgttgagcagattccagaaatcagagattcattcgacaaggttgcaaagcgcgttccggcattcaaaggaatcctcaacgaatgggattcccttgttgctctattgaagtctgaaatgaagacgtacggaaacaaagcgccagagacttacagaagaatcagcgagctacgcaaggactaa

SEQ ID NO: 379724 - DNA, 300 bp, Salmonella enterica
atggtctgttcaacattcaaccctctaacgttacagaaataccagccagaccctgaagatttatgctcactgtgtggcggaaatcatggtaaagccgccatgatcgaatgtaaggacaaaatccacatttgccttaattgcgttgatgtcctcgttgatatcaaaaatgagagagaagataaaaagcgtagcgaggctgttcgcgccttagattcatggatgcgagatgggtatagtgccgcgcaaatttatgacttagcaatatcaaaaggcgaaataccaggagtgcgcatcgaataa

SEQ ID NO: 379725 - DNA, 1083 bp, Salmonella enterica
atgaccactattaccaaagaatggctacagcaaactatcgctgaatttgaaaacactcgcgacgatattccgtttggcctgagcgataacgacgccaaagttcttattgtgctgaagcgtgcgctggcatcgcttaccgctgaacctgtgcgatatctaaataaattttccggtacatgcgtgacgttagagcaacagccaaacgcttctgatgatgttgccgtgtatatgccgttatatgctgccccgccagcgtcagaacgcgaacgtattcgccgtgagcacgccgagtggtcagataagacgttcggcgatgtcggtccagtagggccgctgaaacatctctcaaaagaagcattggaaactgccgcagaacctgacgacctgagcgagtgggccgatatgcaattcctgttatgggatgcgcaaagacgtgctggtatcagtgacgagcagattaccctggcgatggtagaaaagctggcggtgaacaagaagcgcgaatggcctgaaccgaaaaacggcgagccacgactgcatatcaaagagcagccagtgccggtagtgccggatgagtggactattcaggatgctgtgaagttttgcagggaaactggaagacaagatgctggctcagctatggaggcatggaacgcttgtcgcgctgccatgcttcagggggtcgaacctgtaagtaatcatgatgagttggcgctgtattatctgcaaggtcaaaaagatggccttgaatgggctgcgcagcttgcagaagcaaaccacccgcttacaggcgactggctttacgatgacccgctggagctggctaaagctatcagaaaaggtccagatatgcccgggttcgccggaagctctccggtaactccggatggttggataagctgtagtgagcggatgcctgctcaagatgattgggttttaatttattcaaagtacggcgagtatttggcaggtcaggtgcaaggggagtacgtggagttgaacgatggcactctttcgtggttaggggctgccttgcactggatgccgctaccggagccgccgcaggaggttaaccgtggctaa

SEQ ID NO: 379726 - DNA, 171 bp, Salmonella enterica
atgagaggtttgtcctacgaccccggtatcctgccatctgaaatgattattcgacaccgcttcaagcccatcaacgatattccacgcgaagaaatgctggcgagaaagagttttccatcagtgaatgaaaacaaatatctgaatgcaatgttgcggagtgggaagaaatga

SEQ ID NO: 379727 - DNA, 141 bp, Salmonella enterica
atgcaatatcgtcttgccgggtggcccattgctggctgcccttctgaatcacttctcgacagaattaccagaaaattacgaaccggatggaaacgtctggtcgatatcctgaatcaaccaggagtgccgtgtaatggataa

SEQ ID NO: 379728 - DNA, 300 bp, Salmonella enterica
atgaattatacactcggaccatggcaatggtggacaagtaacagctttctgcgattaagcagtcaagatacaggtaaagatggtggtgtcatcgactcttatgtcatgaaggatggtcactcatcactaatcgttagcaaaggagatatgaatctgatagcagcagcacctgatttgctcgaggctcttcaattggctgaaaaagcgatggcagaaggacgcaatgtgacctatccggagtggtacggggtaatcaataaagctcgcgcagtcatcagcaaggctcttggggaggagtga

SEQ ID NO: 379729 - DNA, 333 bp, Salmonella enterica
atgacggttatcacctacgggaagtcaacgtttgcaggcaatgctaaaactcgccgtcatgagcggcgcagaaagctagccatagagcgcgacaccatctgcaatatcatcgattcaatttttggctgcgatgctcctgatgcttctcaggaagttaaagccaaaagaattgaccgcgttaccaaagccattttgcttgccggaacgcgtcagaagaaagttgaagtaacagcggttaagaagaaccgcatttactaccgggacgttaacccgcccgggaataaaatccacgccgttcagcgcatgaggctgagcagtaaaccacttatttga

SEQ ID NO: 379730 - DNA, 924 bp, Salmonella enterica
atggttaatcagataaggtccatatcaccccgccaaggaaacctccagttatttcctgtaaaagaggttgaagttgaaggcgtggcaatgggagttcttaacgatggaacgccatatcttaccggccgaggactggctgaaatgtgtggcgtgcatcatagtgtaattcaggatatttcttctgattgggctagcgaacgccttaaacctcgtggaaaaaaaatcgacactgttctccttgatcagggtatagatgttgactcactttacataccatcttcagaaactaagcgggaccattatccataccctgattatgtttgcatggcaattcttgagtattatgcgtttgatgcaagccaagcaaacaacgccacagctcttagaaactatcgtcttttagcaaggcaaacacttcgtgagtttatttttagaagtgttggtattgatccaagaaatccagtaagcggcgcctggaagtgcttccaagagcgcattatccttaatgataaaatcccagccgggttcttcagtgtattccgagagatggtggatatcactgtgcctttgattaatgctggatttgaattgggccctaaaactgttcccgatattagcgttggaactcgatgggcaaaccactggaagcgcaacaatctgagcaaaaaatatggggaaatacagaaacatcctcatgtctatccggactggtttccgcagagtaaagccgggaaagtgccagcgaatatatatcccgaagaagctttaggtgaatttcgcagatggcttagggaagactatgtcccaaaaggttttaaggattatcttgctgataaggtccaacaaaaagtcatagaaaacgccaaagccattgaggttttggaaaacctgcaaagacctgagttacctaacaagaagaattga

SEQ ID NO: 379731 - DNA, 477 bp, Salmonella enterica
atgagtaatcttgcaacagttacaccgataaaacctcatctggaggttgtggagcatcgcgtggcagaactcgacgatggctacacccggactgcaaatacactgctggaagctgtcatgctttctgggcttactcaacatcagctactgattgttatggctgtgtggcgcaagacatacggttataacaaaaaaatagattggatcggaaatgaacagttcgctgaactcactggcatggcgccaaccaaatgttctaccgccaaaaacgagcttatcagaatgggggttctcactcaggtggggcgtcaggttggtatgaataaaaatatttccgagtggaagacgaaggttaacggattcggtaaaacatttaccagatcggtaaaactaaccttcaccaaatcggtaaaaaccaatttaccgaatcagtcaaacacaaaagacaataaatacaaatccccccttaccccctaa

SEQ ID NO: 379732 - DNA, 204 bp, Salmonella enterica
atgacactcactgtccaaaccatccccgaattgctcattgagacatacggaaaccagacagaagtcgctcggcgcttatcgtgccatcgaaacacagtaaggcgttatttgtacgacaaagaagccaggtatcacgccatcgttaacggcgttttaatgattcatcagggcgggagaggtatctatgaccgtaaccagcattaa

SEQ ID NO: 379733 - DNA, 489 bp, Salmonella enterica
atgagtatacgagaattgaacctcactaaagagcagcatgactggcttaatgggtggcttgagctatggggggcatgggtttattcaggaagactcgaaaaacgcatgagcagcgttatagcgcagtttatggagagggtagaaccatcaagagtgatgacaaggccaatgtgcaatgatgatgacggaatgttgatttctcaggtcgtagattccgttatgcgcatcgacacaaaggcttttggcattctgcttagctattacgcacatggttcctctaagtacgccatatcatcctactatcacaagactgcaagtccccgcaaaatgtcaggccgcggcggagaaaggatgcgcaagccatctcttattacctgtcggagagaagtagatgacgtactcaaggcatccctgttcatgctttatcaaccgatgctaaatgccttcaatagtcgtaaacgtgtggataaaattaaacatgttgcatag

SEQ ID NO: 379734 - DNA, 438 bp, Salmonella enterica
atgcaaatcagcagtaacggaatcaccagattaaaacgtgaagaaggcgaaagactaaaagcctatccagatagcagggggataccaaccattggggttggacataccggaaaagtggatggtaatcctgtcgtatcagggatgacaatcacatccgaaaaatcgtctgaactgcttaaagaggatttgcagtgggttgaagatgctataagtagtcttgttcgcgtcacgctgaatcagaaccagtatgatgcactatgtagccttatattcaatataggtaaatcagcatttgctggatctaccgttctgcgccagttgaatttaaagaattaccaggcagcagcagatgctttcctgttatggaaaaaagctggtaaggaccctgatattctccttcctaggaggcggcgagaaagagcgctgttcctgtcatga

SEQ ID NO: 379735 - DNA, 366 bp, Salmonella enterica
atgaaaaaagttaacattggaaacgtaccaaagatgctcgttccgctctttgagagcggtacaattgtgttttgtagagactttccagaatggcaacgcctgcatcaaaaacttggtgtggacgtgcaggactcggatgccaacggagcgtctcatacaatgagcagcgagaatggtgttttgcatgtgataggcgtgttcaatggcaaactatctactattgcccatgagtgcgctcacatggcattcgatatctgctcaagggtcggtgttgatgttgaatcaggaagagccaacgagacttactgctacttaatgagcaggcttgttgagttctgcgagcgacatatcaaaaagccggagtga

SEQ ID NO: 379736 - DNA, 180 bp, Salmonella enterica
atggcgaaaaaaccaggtgaaaacacaggaaaaaacggcggaatataccaagaagttggcccgcgcggcggtaagaaagacaattttgccaccgtcaaggacaacgaaaggcttccaccaacaacaaagccaggtcatggctgggtattagataagcgaactccagacagcaaaaagtaa

SEQ ID NO: 379737 - DNA, 252 bp, Salmonella enterica
atgggaagagatgacccgcaatttaatctgcggctaccttacgaattaaaggaaaagctgaaacagcgagctaaatcgaatggccgctcactgaatgctgaattagtgcagatagttaccgaagctatatctaaaccatctccagtatcaggttatcgcgacgaagcagagcgcattgctgatgagcagtccgaacttgttaagaagatggtgtttgatacgctgaagagtttgtacaaaaaacccacctga

SEQ ID NO: 379738 - DNA, 2004 bp, Salmonella enterica
atgacagatatcactgcaaacgtagttgtttctaaccctcgtcccatcttcactgaatcccgttcgtttaaagctgttgctaatgggaaaatttacattggtcagattgataccgatccggttaatcctgccaatcagatacccgtatacattgaaaatgaggatggctctcacgtccagattgctcagccgctaattatcaacgcagccggtaaaatcgtatacaacggccaactggtgaaaattgtcaccgttcagggtcatagcatggctatctatgatgccaatggttctcaggttgactatattgctaacgtattgaagtacgatccagatcaatattcaatagaagctgataaaaaatttaagtattcagtaaaattatcagagtatccaacattgcaggatgcagcatctgctgcggttgatggccttcttatcgatgttgattatcatttttataatggagagaaagttgattttggtggtaaggttctgactatagaatgtaaagctaagtttataggagatggaaatcttatttttacgaaattaggcaaaggttcccgcattgccggggtttttatggaaagcactacaacaccatgggttatcaagccttggacggatgacaatcagtggctaacggatgccgcagcggtcgttgccactttaaaacaatcgaaaaccgatgggtatcagccaaccgtaagcgattacgttaaattcccaggaatagaaacgttactcccacctaatgcaaaagggcaaaacataacgtctacgttagaaattagagaatgtataggggtcgaagttcatcgggctagcggtctaatggctggttttttgtttagagggtgtcacttctgcaagatggtagacgccaataatccaagcggaggtaaagatggcattataaccttcgaaaaccttagcggcgattggggtaagggtaactatgtcattggcggacgaaccagctatggatcagtaagtagcgcccaatttttacgtaataatggtggctttgaacgtgatggtggagttattgggtttacttcatatcgcgctggggagagtggtgttaaaacttggcaaggtactgtgggctcgacaacctctcgcaactataatctgcaattccgcgactcggtcgttatttaccccgtatgggacggattcgatttaggtgctgacactgacatgaatccggagttggacaggcctggggactaccctataacccaatacccactgcatcagttacccctaaatcacctgattgataatcttctggttcgcggggcgttaggtgtaggttttggtatggatggtaagggcatgtatgtgtctaatattaccgtagaagattgcgctggctctggcgcgtacctactcacccatgaatcagtatttaccaatatagccataattgacaccaatactaaggatttccaggctaatcagatttatatatctggggcttgccgtgtgaacggtttacgtttaattgggatccgctcaaccgatgggcagggtctaaccatagacgcccctaactctaccgtaagcggtatcaccgggatggtagacccctctagaattaatgttgctaatttggcagaagaagggttaggtaatatccgcgctaatagtttcggctatgatagcgcagcgattaaactgcggattcataagttatcaaagaccttagatagcggagcattgtactcccacattaacggggggcccggttctggctcagcgtggactcaacttactgctatttcaggtaacacacctgacgctgtatcattaaaagttaaccacaaagattgcaggggggcagagataccatttgtccctgacatcgcgtcagatgattttataaaggattcctcatgttttttgccatattgggaaaataattctacttctttaaaggctttagtgaaaaaaaccaatggagaattagttagattaaccttagcaacactttag

SEQ ID NO: 379739 - DNA, 294 bp, Salmonella enterica
atgaagaatatcctcgctatccagtcccatgttgttttcggacatgcgggcaacagcgccgccgaatttcccatgcgccgtcttggcgcgaatgtttggccgctgaataccgttcagttttctaaccacacgcaatatggtaaatggaccggctgtgtcatgccgcccagccatctgactgagattgtccaggggattgcggacattggccagttagcgcactgcgacgccgtacttagcggttacctgggatctgccgagcagggagaacacattctcggtattgtgcgctag

SEQ ID NO: 379740 - DNA, 204 bp, Salmonella enterica
atggaaaaaaaactgggactgagcgcgctgaccgcgctggttttaagctcaatgcttggcgcaggtgttttcagtctgccccagaatatggccgccgttgccagtccggctgcgttgttaattggctggggccattaccggcgtggggatactcttactggcattcgccatgttaatccttacgcgcattcgctccgagcttga

SEQ ID NO: 379741 - DNA, 1068 bp, Salmonella enterica
atggacaaaatgaagcgtcatctggtgtggtggggagcggggattcttgtagcggtggccgcgatagcctggtggatgctgcgccctgcgggaataccggagggatttgccgccagcaacggcagaattgaagccaccgaagtggatattgccactaagattgccgggcgtattgataccatcctcgtttcggaagggcagttcgttcgtcagggcgaggtgctggcgaaaatggatacccgcgtgctgcaggagcagcggctggaggcgattgcgcagattaaagaggccgagagcgcggttgccgccgcccgtgctttgctggagcaacgccagagtgaaatgcgcgccgcgcagtcggtcgtcaaacagcgggaagctgagctggactccgtctctaaacgtcacgtgcgttctcgttcgctgtcgcagcgtggcgcggtatctgtacaacagttagatgacgatcgcgcggcggcggaaagcgtgcgcgccgccctggagaccgccaaagcgcaggtatctgcggcaaaagcggcgattgaagcggcgcgtaccagtattatccaggcgcaaacgcgcgtggaagcggcgcaggcgaccgagcggcgtattgtcgccgacatcgacgacagcgaattaaaagcgccgcgcgatggacgcgtgcagtaccgcgttgcggagccgggcgaagtgttatcggctggcggccgggtgttgaacatggtcgatctcagagatgtttatatgacatttttcctgccgaccgaacaggcggggttgttgaagatcggcggcgaagcgcgactggtgctggacgccgcgccggatctgcgtattccggcgacgatcagttttgtcgccagcgtggcgcagttcacgcccaaaaccgtggaaacccacgatgaacgactgaagctgatgttccgcgtcaaagcgcgtattccgccagagctactgcgacagcatctggaatatgtcaaaaccggtttgccgggaatggcctgggttcgtctggatgagcgcgtgccctggcctgacgctctaagcgtgaggctgtcgcaatga

SEQ ID NO: 379742 - DNA, 1218 bp, Salmonella enterica; identical to SEQ ID NO: 371034

SEQ ID NO: 379743 - DNA, 1860 bp, Salmonella enterica
atgaccaactacagcctgcgcgcacgcatgatgattctgatcctggccccgaccgtcctgataggtttgctgctcagtatcttttttgtagtgcaccgctataacgacctgcagcgtcaactggaagatgccggcgccagtattattgaaccgctcgccgtctccagcgaatatggtatgaacttacaaaaccgagagtctatcggccaacttatcagcgtcctgcaccgcagacactctgatattgtgcgggcaatttccgtttatgacgatcataaccgcctgtttgtaacgtctaatttccatctggacccctcacagatgcagcttcccgccggagcgccgtttccacgtcgtctgagcgtcgatcgccacggcgatattatgattctgcgcaccccgattatctcggagagctattcgccggacgagtcagcgattgccgacgcaaaaaataccaaaaatatgctggggtatgtggcgcttgaactggatctcaagtcggtcaggctacagcaatacaaagagatttttatctccagcgtgatgatgcttttttgtattggcattgcgctgatctttggctggcggcttatgcgcgatgtcaccgggcctatccgtaatatggtgaataccgttgaccgcattcgccgcggacaactggatagccgggtggaaggatttatgctgggcgagctggacatgctgaaaaacggcattaattccatggcgatgtcgcttgccgcctatcacgaagagatgcagcataatatcgatcaggccacctcggacctgcgtgaaacccttgagcagatggaaatccaaaacgttgagctggatctggcgaaaaagcgcgcccaggaagcggcgcgtattaagtcggagttcctggcaaacatgtcgcacgaactgcgaacgccgctgaacggcgtcattggctttacccgcctgacattaaaaacggagctgaaccccacccagcgcgaccatctgaacaccattgagcgttccgcgaataatctgctggcgatcattaatgacgtgcttgatttctccaagctggaagccggtaagctcattctggaaagtatcccttttccactgcgcaacacgctggatgaagtggttacgctgctggctcactcgtcgcatgataaagggctggagttgacgttaaatattaaaaacgacgtcccggataatgtgattggcgacccgctgcgcctgcaacaggtcattactaatctggtgggcaatgccattaagttcaccgagagtggcaatatcgatattctggtagaaaagcgggcgctcagtaacaccaaagtacagattgaagtgcagatccgcgatacggggatcggcattccggaacgcgaccagtctcgactgtttcaggcgtttcgccaggccgatgccagtatttctcgccgtcacggcggcaccgggcttgggctggtgattacgcaaaagctggtcaacgaaatgggcggggatatctctttccacagccagcctaatcgcggctcgaccttctggtttcatattcatcttgatcttaacccaaatgtcattattgacgggccgtcgaccgcgtgtctggccgggaaacgactggcttatatcgaaccgaatgctaccgccgcgcaatgtaccctggatctgctgagcgacacgccggtggaagtggtttacagcccgaccttctccgcgctgccgttagcgcactacgatattatgattttgagcgttccggtgaccttccgcgagccgctcaccatgcagcatgaacgtctggcgaaagccagcgtcaatgacggactttctactgctggcgctaccttgccatgcgcaaattaa

SEQ ID NO: 379744 - DNA, 1086 bp, Salmonella enterica
gtgcataaaggcaaccaggctgctgattttgacacctttggcaaaggcgcatggacgtttgaactgcgggttaacgcggtggcggctttggaagcggcgctgcttgatctactgggacaggcgcttaatgtgccggtctgtgaactgttagggccaggtaaacagcgcgatgccgtcaccgtgttgggctatctcttctatattggcgatcgcactaaaaccgatctgccgtatctggaaagcacgccgggcagtcatgaatggtatcgtctgcgccatcaggaagcgctgaacagcgacgcggtcgtgcggctggcggaagcgtctcaggatcgctacggctttaaagattttaaactcaagggcggcgtgctgccgggcgaacaagagattgatactgttcgcgcgctaaaaaaacgcttcccggacgcgcgtattaccgtggatccgaacggcgcctggctactggatgaagccattgcgttgtgcaaagggctgaaagatgtactgacctacgcggaagatccgtgcggcgcggagcaaggattctctggtcgtgaagtcatggcggagttccgccgcgcgacaggactgccggtggcgaccaatatgatcgccaccaactggcgcgaaatggggcatgcggtgatgctcaacgcggtagacattcctcttgccgacccgcatttctggactctcaccggcgccgttcgcgtggcgcaactgtgcgatgactgggggctaacctggggctgccattcgaataaccattttgatatttcactggcgatgtttacccatgtcggcgcggcggcgccaggcaaacccaccgctattgatacgcactggatctggcaggagggcgattgccgcctgactaaaaatccgctggaaattaaaaacggcaaaattgccgttccggatgcgccaggactgggcgtggagcttgactgggaacaggtgcgaaaagcgcatgacgcgtataaaaagctgccaggcggcgcgcgtaatgatgcaggcccgatgcaatacctgatccccggctggacttttgaccgcaaacgccctgtttttggtcgtcactaa

SEQ ID NO: 379745 - DNA, 441 bp, Salmonella enterica
ttgctgaaagataagcaacttaattttgtcgcctgcggtctgcaaagtgcatatgtcagcgaaaatgcgccagaagcattcgttaccctgatggcaaaacactaccatcgcctgaaacccgtaaaagattatcaggagattgatgacgtactgttcaagttttcgctcaacctaccggatgaacaaatcccgttagtgatcgacaaactacacgttacgctcgatgacattatgaagcccgtcacaagtggttttggctttatcgatctgattattcccggcctgcataataaagcaaacggtatttcgcggttactgaaacgctgggatctgtcgccacaaaatgtggtagcgattggcgacagcggcaatggcgcagagatgcttaaaatggcgcgttattcatttgcgatggacaatgccgcagaaaacattaaataa

SEQ ID NO: 379746 - DNA, 498 bp, Salmonella enterica
atggctaaagtcgatgtgaaatgcccgttttgcgcgcaaacggcatccgttaaaaagtatggtccggggagtgcagggcaccagcattaccgctgtcaggcatgttgccgcagctttcaggtcgactatgaataccgcgcctgtcagcccggcatgaaagagcaggttgttgatcttgccatgtacaatgccggtattcgtaatccgcagggactggcagtcaatccctggagcggcgcgctatggctgcatgaacacggtctgcgcggcggcgatgaaattaacataccgaaaaaaggcaaaaattatggctggccgctggccacatggggcgtcaactatagtggtctgaaagtgccggaaaccaaaggtgaaattgtcgaaggaacggagcagtcggtttactactggaaggattctccggcaattagcgggatggcctttatatcagcgacgtttttgtgccgtgacggcataaactgtttatcggcgcgctaa

SEQ ID NO: 379747 - DNA, 612 bp, Salmonella enterica
atggctaaattaccgcgccgtaagtgcgcaaacaaagaatgccgccagtggtttcacccgatacgcgaggggcagatcgtttgctcgtaccagtgcgccagcaccgtcggcaaagaacagaccagaaaagctcgcgaagccgcgcaacgtaaggcgcaatcccttcagcgcgccgctgagaaaaaagaacgcgccgcctggcgccagcggaaagccgcggttaagccgctgaaacactggattgacttgacgcagcgcgccgtaaatgacatttgccgcgaaaccgaactggcagaaggactcggttgcatctcctgtggaacgaagacggcattcgcatggcatgcaggccattacaggagtacggccgccgccgggcatctgcgcttcactcgcttcaacatccatcttcagtgtgatgtctgcaacgtctacaaatcagggaacatcgaagcatatcgtgccgcgctggttgagcgttacggtgaggcggcggtgctggcactcgagaacaataacaccccgcaccgctggacgggcgaggagctgaaggaaatcaggctcgcggcactgtcggatctgcgtgcgctaaaaaagctggaggccgcatga

SEQ ID NO: 379748 - DNA, 147 bp, Salmonella enterica
atgaaaccagaactgatcgagatactccgcatgcgctggttgcgtctccgaatttatcgataccggggatcttttcctgtggcataccgcattcttcgtaattacgtccgcattgaagcaaaacgggagcatcgaaatgaatcttga

SEQ ID NO: 379749 - DNA, 348 bp, Salmonella enterica
atgaaaatgcacaacgatccccattcctggcagggctggctggagctgttccagagctggtggcgaggagatacgccgctgggcgctgttctgatgtcgttatttatggcaggcctgcgtattgcgtactttggcggtagtggtggctggaagaaaaagacactcgaaattctgctttgcggcgccctgacgttgaccttctcatctgcgctggaatatttcggctggcccaagtccctgtctgttgcgattggtggcggcgtcggccttatcggcgtggatgcgatccgcggctttgcaatgaagtttatcagtggtcgtatcggtggggataataacaaggtttaa

SEQ ID NO: 379750 - DNA, 615 bp, Salmonella enterica
atgaacgagtctcaatttcagcaggcggctggtatcagcgccgaactggccgcacgctggtatccacatattacggcggtaatgagcgaattcggtattactgcgccactggatcaggccatgtttattgcacaagcgggacatgaatcagcaggatttactgttctgaaggaaagcttcaattattcagtggaggcgctgaagaagacgtttggtaaacgcctgacgccgtatcagtgtgaaatgctggagcgtgtcgatggtaagcaggtggcccaccagccgcaaatagcaaatctggtttacggtagccgcatgggtaacaaagacgccggagatggctggaagtatcgcgggcgtgggcttatccagattaccgggctggagaattacaccagatgcggcgttgccctgaaactggatctggtggcgaatccgggacagcttgagctggatcgtcatgccgcccgttccgcagcgtggttttttgtgactggagggtgtctgaaatactccggcgacctggtacgcgttacgcagatcattaacggagggcagaacggcatcggtgacaggcgagagcgctttgaaaaagcaaaatcggtgctggtatga

SEQ ID NO: 379751 - DNA, 414 bp, Salmonella enterica
atggaaattaagttgattaaatactggaaggttgaattatttgaggaaccaaaggttactgcttctgtaatcaatggaattctccccattgaagaaaggagcccatttttaacagggtactcaaacacccagttcgacctgcgaaaagctgtgattaatggggaagagtttatcaccctgtgttgtgatcctggttcacttcaaactcgttccgttcacatcagccgaatccatgaatttaaatgtacaccgatttatgagagcgacgacacatttcaggaagctgctaagccactgatgaaatggctggttgaaaatgtgcacccacatcatcaagccattgtgaccagttcacatgcagagctgctggaaagtcagatcgtgactaagactgaagaatttctgaagggataa

SEQ ID NO: 379752 - DNA, 1395 bp, Salmonella enterica
atggcaattgttaatattaatgtgtcggtgaccagtccgccgaaaccctcccagttgttaaagtcaggcgctctggtatcaacggggggaaccacgctggcggcggggagttatcagttgctgacgtccaaagacgatctaaaaaatatcgttgcgccagcaaaagctatttcttcgcttgcgtgggccgggaataccgtcacggtgactctttcagaaaatcatggctggtccattgatgaaacgatccctgttgtgatttctggtgctgcgcctgctgcttataacggggcatatacagcgtcggtgacaggcgaaaaaacgtttacttatcccctgaacagtgatcccggtacagcaacggctacaggtaccgtaacgtctgttgccgccggagaactccagcagatgaacaccacgtactgggcacaggggaccagccgggcggtttatgtccttgagctgggtgagatgaatgtaaaatctgcggttgcggcccttggtacgttcattgatgaagatacttctctgggaaacacataccagaaatttttctcttaccttgtgccgagggaatgggacgccgaaccgacctttaaaacgctggcgaacaattacacttcacccggcgcgctggtgaaatttttcgtcactaccacgattgcgacgtaccaggaatgggtatccggaaaatatccgaatgtctttgccggggttgaggcgccgtcaattggcgcaactgagttctcgatggcggcaccgttccagtcctcactggcaaacgatccggggtcatcaaacatggtcccgccgatggcgtaccgctttatgtatggcgtaacggagtatccgccggcaggtaatggtacgttgctgaaaaccctgcaggataaccatatcaactatatcggcacggcggcagaaggtggcctgagcaataaaatgctggtggccggtcacatgcttgacggtatgccgtttaactactggtactcggtggcatggtgtgcaatcaaccttgagctggatctggcgaatgaagtgattaacggttctaacactactgttaacccgctttattacgatcagcagggaattggtcgcctgcaacgacgcgctttgaaaactctccgttccggtatcagttacgggctaatcctcggtcaggtaattgatacgcagctcacgcaggaatcgttcaacgcggaatatgaaaaaggctcttatgccgggaacgcggtcatcaacgcagtaccgttcgctgactataccagcctgaatcagtccgattacgccgatggaaaatataacggcctgagtgcggttgtcaccccgcgtcgtggttttgagtccatcacgtttaatctcaacgtaaccaactttgtgggggcgtaa

SEQ ID NO: 379753 - DNA, 498 bp, Salmonella enterica
atgtcatttacccgcgagctctacaagctcggttttgaaatctccccggttattctctgcgatggtgtggcgcagagtatacccggcggcatgttgccgatagttgccctgacccagagcgccagctacgtttcaggtctgatgggcggggcgacgggtctcaccgacctggataaatatttctgccactggtcagccgcagcgggcacgacaatggtggattacgatatcggtcgttatccgttcgctaatcagaaggttgccgcgaatgcgctgctggctcagcctctgcgcgtgtctatgctgatgaatgcgccggtgaacgagaataccggtgccatgacaaagctggtcacgctcagcgcgctgcaggcagtactacagggacatgccaaccttggcggaacgttcatcgtcgccactccggccatcatttacagcaactgtatactgaaggcggtacgcgacgtaacgggctcaaatgaactgctgccgtaa

SEQ ID NO: 379754 - DNA, 276 bp, Salmonella enterica
atgagtaccgcattataccctttttctggcaatgaacagaaaagtatggttttcagtccggtgcttgacgggaaaatatatgactgccagatgaaatggaatatttactcacagcgctggtatctgaatgttacggataattccggcaatcggaaattaaccattcccgttgtcgcgtctccagcggattacgatattaaccttctgatgggggcctttagttcgacaaaaatggtctggagagttgccagcggacagattgaggtgattaactga

SEQ ID NO: 379755 - DNA, 1053 bp, Salmonella enterica
atgcgatattatgatattaaaattttttaccctccccagtatcccccggatccgaacgcagatacccgaaaaatttacaggcattacaccagtgtgaaaaatggcgtacataaccccgggagcctgatggttgaatttgatattctgcgttttggggaatccacgccgcagggggaaaccaccattacgatatggggtatcagtccgcaggaaatgcagcaggccagacagaatatgttcggcatgccgatagaggtaagagtcgggatgtcaaaagggcttccgctggcgaatgccggaaaatcggggctggttctgaaaggtgttatctggcaggcgatggggaactggcagggtaccgaactgcgtctcgatttaattgtgacggtgagtccggtttctcatgttgacccgcttccgctggctcccattaatttaacgctcccctggaataaagggcagaaactttccgatgctctgttcgattgcttacggacgcttggtggttatacgttttcaatcagtatcagcgacaggcttgtgaataattacgacaatggtatgtattgcgggaacctttccgaccttgccgtgtatctcaatacgttcagcaaaagcattattaaagataaaaattacgcaggggtggaaatagccgtggtggacggtaatgaaatccgcgtctacgacaacgacttcggcactcaccgggctaaaaaaccggaggaaagcgctgcataccgtagggaccacccgatacaacttcagtttaccgatcttattgggcaacccacctggattaaatataatacggtttccgttccctgcgttatgcgcggtgatattcaggtcggagattatattctgatgccgaaggaatccagaccgataattcaggccgcgtcctattcgcagtttcgtgatgaatcggcattcaaaggcctttttcaggtaactttagttcgtcttctcggtaacagtcggcagcctgatgctaacagttgggtaactgttctggaggctaatccttattcggagacacaaaaacagtga

SEQ ID NO: 379756 - DNA, 1227 bp, Salmonella enterica; identical to SEQ ID NO: 373292

SEQ ID NO: 379757 - DNA, 231 bp, Salmonella enterica
atgttatccaaaaaatttggcttatcgatgatagtgttgggaataatgtcgtcttcagcgtttgctgatagcatcgttgaagggagaacactcaatgtcgcagtatcaccagcctctccccctatgttatttaaaagtgctgatggcaaattgcaggggatagatctggagcttttttcgtcttactgtcagtcacggcattgtaagctaaacatcaccgaatatgcctag

SEQ ID NO: 379758 - DNA, 429 bp, Salmonella enterica
ttgaacgatttggttcgcaacgcgcgtgaagcagacaaggtcgcgttgctgctcaaggtctggcgtcagcggcttagttaccgcctggtacgctgcgcggaagagagcaaaatcgccctttccggccaggcggatgttacggcgaggctgccatttatcagcgacgaccttgcggtcgctatcagccagcaaggactggaagcggcgctggatcaaccgctggcgcgtattctggaacaggtgcaactggcgctggacagcgcgcaggaaaaaccggatgtcatctatctgaccggcggcagcgcccgttcgccattgattaaaaaagcgctttccgaacagttaccgggcatacccgtcgctggcggcgatgatttcggctccgtcaccgcaggactggctcgctgggcagaggtcgttttccgctaa

SEQ ID NO: 379759 - DNA, 372 bp, Salmonella enterica
atgagtaaaccatcccaacatgttttcgttaccgtcccccacccgctattgcgtctggtcagtttaggcctggtcgcgtttgtctttacgctcttttcgctcgtattatcgcgtgtcggcacccaactcgcgccgctgtggttccccacctccattatgatggtcgcgttttaccgccatgcgggccgtctgtggccagggatcgcggtcgcctgctcgctcggcagcatcggagcctcactgactttatttcctgccgcctcgcttaactttagctggacggcaataaatattatcgaggcggccactggcgcgatactgctgcgaaaactgctccccagctacaatcccttacaaaatttgaatgactag

SEQ ID NO: 379760 - DNA, 642 bp, Salmonella enterica; identical to SEQ ID NO: 369852

SEQ ID NO: 379761 - DNA, 1857 bp, Salmonella enterica; identical to SEQ ID NO: 369854

SEQ ID NO: 379762 - DNA, 1365 bp, Salmonella enterica
atgattagcgcatttgatatttttaagattggcattggaccttcaagctcccataccgtagggccaatgaatgcaggaaaatgttttatcgatcggctgatcgacagcggcgacctgccgcgaacgacgcgcatcacggttgatctttacggatcgctatcgctgacgggcaaaggccacgcgaccgataccgccatcattatgggcctggcgggcaatacgccgcaggatgtcaatattgatagcattccggcgtttatccaggaggttgcccgcagcagccgtttatcggtggcgggtggcgcgcatgtggtggattttcccgtcgccgacagtattctctttcacgctgaaaccctggcgcgccatgaaaacggtatgcgtattaccgcctggaacggacaagcgccgcttttacacaaaacgtattactctattggcggcggctttattgtcgaagaggagcgttttggtcagtcgcacgacgtagaaaaatcggtgccgtatgattttcattccgccagcgaactgttgacgctgtgtgaaagacaggggctctcggtttccggcctgatgatgcaaaatgaactggcgttgcggagcaaagagcagattgacgctggctttgcccgcatctggcaggtgatggcgaccggaattgaacgtggcatgaatactgagggcgtgctgccggggccgctgaacgttccacgccgcgcggtagcgttacggcgtctgctggtctccagcgataatctctcccgcgatccgatgaacgtcattgactggattaacatgttcgccctggccgtgagcgaagagaacgcggcgggcgggcgagtggtcaccgcgccgaccaacggcgcgtgcggcattattcccgcggtgctggcctattacgacaaattccgtcgcccggtcaatgccaactctatcgcccgctatctgctgtcggcgggggcgattggcatgctgtacaagatgaacgcctcgatatccggcgcggaagtggggtgtcagggtgaggttggcgtcgcgtgttcgatggcggcggcggggctgacagaactgctgggcggcagccctgcgcaggtctgtattgcggcggaaattgcgatggagcataaccttggcctcacctgtgacccggtggcgggtcaggtacaaatcccttgtattgaacgtaatgcgattaacgccgttaaagcggtgaatgcggcgcgaatggcgctacgccgtacctctgagccgcgggtttcgctcgataaagtgatcgaaaccatgtacgaaacgggtaaagacatgaacgacaaatatcgcgagacgtcgcgcggcggtctggcgattaaagtcgtttgtggatag

SEQ ID NO: 379763 - DNA, 177 bp, Salmonella enterica
atggaatcggctagtaataccagcgtaatcctcgacgcatcagccccggcgcgtcgggcagggatgacagaaagcgaatggcgtgaagccatcaaatttgatagtaccgacaccggttgggtcattatgagtatcgggatggcgatcggcgcagggatcgtttttcttcctgtctag

SEQ ID NO: 379764 - DNA, 672 bp, Salmonella enterica
atgtcatctaaatggattacctctttatttaaaagcgtagtattaaccgcggcattggtcactccttttgcggcatcggcttttaccgagggcacagattatatggttctggagaaaccgattcctaatgcggataaaacgctgattaaggtatttagctacgcctgccctttctgctacaaatatgacaaagccgtaacaggtccggtttctgataaagtagccgatctcgttacgttcactccgttccacctggaaacaaaaggcgaatatggcaaacaggccagcgaagtatttgcagtcctgatcgccaaagataaagctgccgggatttcgttatttgatgctaaatcacaattcaaaaaagcgaagttcgcctggtatgcggcttaccatgataagaaagagcgctggtcagatgggaaagatccggcggcatttattaaaaccgggctggacgccgcaggcatgagccaggctgattttgaagcggcgctgaaagatcctgccgttcaggagactctggaaaaatggaaagccgcctatgacgttgccaaaattcagggtgttccggcttacgtcgtcaacggcaagtaccttatctataccaaaaacatcaaatccatcgattctatggctgaactcgttcgggaactggccactaaaaaataa

SEQ ID NO: 379765 - DNA, 1797 bp, Salmonella enterica; identical to SEQ ID NO: 368949

SEQ ID NO: 379766 - DNA, 531 bp, Salmonella enterica
atgacccgcgccgcccccgatgtagaagaggtactcagtgagcgcgcgctaagccaatgggcgcaggccatcagctatgtcgccggtcattatcgcgttgcctgttctcccggttcaattcaggccaacgccccgtggtttaggggtaaaagcagaacgaccgccttaacgcagctcgcgcggcaggcgggtttatcctttcatgcgccggacatagacaaaacggcatttagtcagtggcgattgccgttggttgtcgagctccgggacgggcagttattggtcatcgagcatgttaatggcgaagatgcggtagacgtttttgtgattgaagaagagggtcagcgtaaccgcctgacgctcagcgagttattgccggagatcctctatgttgccgcgctacgcccgctatcggcgctcaaggatagccgcgtcgatcgctatatctcccgctttaaacccgactggatgcgcgagctggttctgcaggatattcgcccttatttacctggtcgccgcctttctgattaa

SEQ ID NO: 379767 - DNA, 528 bp, Salmonella enterica
atgaaacattttaaaaatttcactaaaacaacggaattaacacccgttcagcaggaattatcagagaactgcagcatccagtttatcaatgatgaagcaggtattgactggtatatattacaaaaattattccactccgatacactgaaaatccagtatgacaaaacaggactaattatttctgcagataaagatgtgacaaagctatttccactgaattgctctgttgtggaatttgctgatactgatattcctgatgatttccagccaggtaatttcacctacagcaacggcactatcgcccctgttcagactgattatgttgctttagcgacggcagatcgcgacaggcgtatggctgcggtcacgataaaaatcaatcagcttatggaagctcaggacgatagcgatattacggcgacagaactgctggaactttcagcactgcgtgaatatcgtacgaaactaagacgaatggatttaactgctgcgccaaatattaactggcctgtgtatccgaaaaagtaa

SEQ ID NO: 379768 - DNA, 360 bp, Salmonella enterica
atgacgctgtatctcggcatgagtcagagcaatggaaaagcgattacggataccgaccatctgcgccagtcggtgcgggatattctgctgacgccgcagggcagccgcattgcccgccgggaatacggttccctgctgtcgaccctgattgaccggccgcagaacccggcgctgagactgcagatcatgtctgcggtctacgtggccctgagtcgctgggagccacgactgacgctggattccatcaccatcagcagcaattttgatggctccatggtggttgagcttaccggacagcgcaacaacggcgcgccggtttccctttccgtatcaacaggagcagacaatggcagtcattga

SEQ ID NO: 379769 - DNA, 867 bp, Salmonella enterica
atgacacaaatcgcaatttatggatttaatttcactaaaaaaatcacatttgacggtggtgagttaactcctattttcagttcatggagtgagttaaaaaaaaatggctgggctaatgataggtacatcctcactggttttttcaaaccaaactcgaataactacgccgctcaacagcagcttatttttgatttacaagcagttcttagtttcattgaacaaaaaaatgtaatcatttcaggagaacttgaaaatgatgaaacccctttcaatttcaaaccatctctacccaaaaagcttgacaaaaaaagagataagggtgcgggcattatcatcatggaagattattttgcaccaaacagccgagaaaattttatttgcttagccatggaaaaactaaatagtaaagccatgctaaaacaagatgcctttagaacatcattttttaaatcaatgctagctttccgcgactcaataaattatatcgacgtcagatattatttattattctcggcactagaagcactttgcagatttattaaaaatgactactcccctgccaaaacaccacaaataatcactcaggttttaaaagaatatggttttaatgtcgaaaaaacaggacatacattagctcaaagaaacattatgcattactgcaaactccgtcactcgctgttccacaatggtaaatacattgcctatcttgatgaaaaaaactcagatggcaaaattgaaattcaagattactcatcaaatttgaatttactggtgccacttgtactaatgaaattcataggatttgatgacaattatataaactgggactcatggattgataggaatccatttatcagtaaaaagtaa

SEQ ID NO: 379770 - DNA, 513 bp, Salmonella enterica
atgaatccatcaatcgttaaacgctgccttgtcggggccgtgctggctattgctgccacgctgccggggtttcagcagcttcacacctccgtggaggggctgaaactgattgccgattacgaaggctgtcgtctgcagccgtatcagtgcagcgcgggtgtctggaccgacggcattggtaatacatcgggcgtcattcccggcaaaacaatcacggaacgacaggcagcagaagggctgatctccaacgtgctgcgtgtggagcgggcactggaaaggtgtgtgaagcaacagccaccacagaaggtgtatgacgctacggtgtcgtttgccttcaacgtggggacgggcaatgcctgcagctccacgctggtgaaattgctcaatcagcggcgctgggcggatgcgtgccgacagttgccgcgctgggtttatgtaaaaggtgtgtttaatcaggggctggataaccgccgtgcgcgggagatggcctggtgcttacagggagcaaactga

SEQ ID NO: 379771 - DNA, 375 bp, Salmonella enterica
atgttcgatattcctttagtattagatgagttatcaatcaatgattttgatgttgataatatgtataacttagaatcacaagtaaatgagctgttgaaggggtctatatttatccttttagagggaaattcaaatcaagttgaaggtatagtgaatataattgaatcaaaatgggcacctaagaaaaaacgtagacgagttggatatcttaacgttattgatgagcttctgaaaaagagaaatagaatcgctcatggagagggttttgatgttgtaactgctaatgagcttaaagaggccactgagcaaataaaaaaattatgcgatggcctgctaggaaagttaactgataagctagctgaaatgaaaccttag

SEQ ID NO: 379772 - DNA, 285 bp, Salmonella enterica
atgcaaagatttgaggagataaatcttcttgcaacgatggcagagaagaattctgagcttggtgggaatattatggctatgaacgcattgactcgttctgggctagtattattgtgtggctattttgaaggttttcttcgtgaaatgtgtaaagagtttgttgaggagctcaatgatttgggtatcccaccttcaaaaattcctttgcgaatgctttcagagcatgttaacgcctgttcagataaaataaaaataacaaatgccaaccttttaatgattttataa

SEQ ID NO: 379773 - DNA, 1155 bp, Salmonella enterica
atgactgatgtaaatgttcaacaaattctaacagagcaaaatgacgagattgagattgagattgagaatgaaattgagccttatgaacatataaaagagcgtaaggttgttattcagccatatgattatgcggtacgaactcttgttgatatgataattgaaggggatttaattcttgagcctgattatcaaaggaaatatcaatgggatgatattaaagcgtcaaggtttattgaatcgatagctttaaatatacctgtgccagttgtgtatttggctgaggaaaaagatggtacatttagtgtcattgatggacaacagcgattgacatccttgttccgctttattaaagctaacgagattgagaatttattcccagactcaggattgatgccattaaagctaactgggttaaaaataatctcagaaataaatggtaaagaatatcttgagttagatcgtgtattaagatctaatattgcgaaaagagctattaggtgcattgttgttctcaatgaatcagatgaggctttaaagtttgaagtatttgaacgcttaaatacagggagtgcatcgctctctgatcaagaagttcgtaattgtgtatatcgaggtagttataatgaactactgaaaaaattggcacaatatgataaattcgttgagttgatttcgctgcctgagcaagatgctaagtcaatgaaggctgttgagttagtgttgcgcttcttagcgtatagagaattatcagcgtcttctgattactcagataactactctgagtatttgaatttacatatggaggaaaatcgcgaaatttctacagcaagagcagaaagtgttacctctcttttttatggaactgttgacttaattcacgatgtgttaggtccaggtattgcttttagaaaacccaaagatcaaacagatccaagtaaagggtattttcaaaatagaattaatggctctatttatgaatcacaaatggttgctttttccagagcatttgaacaggggaaaaaggaagatcttgcagttaaggcatttagtgtgtttaaaaatgaaggctattggaaaaccttattccaagggacttcaaaaaagaactcggcattgaatagaagtacaattcttactgaggcattaatggggtaa

SEQ ID NO: 379774 - DNA, 288 bp, Salmonella enterica
atgcctgtcagcaatacgcatacggaaaatcctatgcctttgagcatagagacttcgcgtataaagtctgcaaggatgcggctaaactatggggtgatgaagttcctagctatgtcattaggcagatccaattacatcctgaaatacctgccgatgaaattaaatatgctgcgatggcaggctcactggggaacaactaaatcgacgtatgtgaaaggggccttatgccccttttggattatccaatcaagggccatcaggacactgatcaactggttacatccatag

SEQ ID NO: 379775 - DNA, 1449 bp, Salmonella enterica
atgcaacttaacgactctaccctgttccgccagcaggcctttatcgatggcgactggcgcgacgcgcgcggcggcgatgtcatccccgtgagcaaccccgccaacgggaaaccgctcggcaatgtgcccaaaatgggggcggaagagacgcgcgacgccatcaacgccgccaatcgcgccctgcccgcctggcgcgcgctcaccgccaaagagcgagccaatatcctgcgtcgctggttcaatctgatgatggaacatcaggacgatttggcgcatctgatgacgctggaacagggtaaaccgctggcggaagcgaaaggcgaaattagctacgccgcctcgtttattgaatggttcgccgaagaggggaagcgtatctatggcgacacgattccaggtcatcaggccgataaacggctgctggtgattaaacagcccatcggcgtcaccgccgcgattaccccgtggaactttccctcagcaatgatcacccgtaaagccggccccgcgctggccgcaggctgcacgatggtactcaaacccgccagccagacgccgttttccgcgctggcgctggcggaactggcccggcgcgccggaattcccgcaggtgtatttaacgtcgttaccggttcggcaggcgatatcggcggcgagctgaccagcaacccgctggtacgcaaactgtcgtttaccggctcgacggagattggccgccagctaatggaacaatgcgccaaagacattaaaaaagtgtcgctggaattgggcggcaatgcgccgtttatcgtctttgacgatgccgatctggataaagccgtcgaaggcgcgctggcttcgaagtttcgcaacgccgggcagacctgtgtctgcgccaatagattgtatgttcaggacggcgtttacgatcgttttgcggaaaaactcaaccaggcggtaaataagctcgcggtcggcgacggtctgcaagccgacgttgctatcgggccgctgattgatgaaaaagccgtggcgaaagtccaggagcatatcgccgacgcgctggaaaaaggcgcccgcgtcattacgggcggtgaagcgcacaaattgggcggcaacttctttcaaccgaccattctggcggatgttcctgataacgcgaaagtcgccaaagaagagacattcgggccgctcgcgcctctgttccgcttcagcgacgaggcggatgtcatcaggcaggctaacgataccgagttcggcctggcagcctatttttatgcacgcgatttaagccgcgttttccgcgtcggcgaagcgctggaatacggcatcgtcggtattaataccggcattatctccaacgaagtcgcgcctttcggcggcattaaggcctccggattaggccgagaaggttccaaatacggcatcgaagattatttagaaatcaaatatatgtgcatcggcctttaa

SEQ ID NO: 379776 - DNA, 294 bp, Salmonella enterica
atgacagcagttagccaaaaaacaacgaccccgtctgcgaatttttcgctgttccgcatcgcctttgcggttttcctgacctatatgacggtcggcctgccgttacccgtcatcccgctttttgttcatcacgaactgggctatagcaatacgatggttgggatcgccgtgggcattcagttttttgcgacggtactgacgcgcggctatgccggacgactggcggatcaatatggcgctaaacgatcggcgttacaggggatgtttgcctgcgggctggcgggcgccgcctga

SEQ ID NO: 379777 - DNA, 1392 bp, Salmonella enterica; identical to SEQ ID NO: 369289

SEQ ID NO: 379778 - DNA, 1236 bp, Salmonella enterica; identical to SEQ ID NO: 369284

SEQ ID NO: 379779 - DNA, 1242 bp, Salmonella enterica; identical to SEQ ID NO: 369280

SEQ ID NO: 379780 - DNA, 180 bp, Salmonella enterica
atgcctctaaaaacgcgtcccatggggggcgcgttgatgaatctggtcggtgatatattcagcaaatgcgctttgatagacgtaatgatcagaactcacatattcaataatattatcataatgtccctgccacgcttttccttccagcgcatggaagaaaatataatcttcgattgttga

SEQ ID NO: 379781 - DNA, 534 bp, Salmonella enterica
gtggtgctcgactggtttaacggtcgccgcacgccaaacgctaatcagcgtctgaaaggcgtcattaccgatctcaatctcgccaccgacgcgccagcgctgtttggcggtctggtcgcctcgaccgccttcggcgcgcgcgccattcaggagtgttttaccgagcagggtatcgcggtcaataacgtgatggcgcttggcggcatcgcccgtaaaaatcaggtcattatgcaggtctgctgcgacgtactgaatcgtccgttgcagatcgtcgcttccgaccagtgttgcgcattaggcgccgctatctttgccgccgttgccgcgaaagtccatgccgatattcctgccgcccagcaaagcatggcgagcgcggtagaacgcactctgcgtccccgccctgaacaggcgcaacgcttcgaacggctttaccgccgctaccagcagtgggcgctaagcgcagaacaacattatcttccgactgccgcgccggcgccaacgaccccggccaatcaggcaatcctgactcattaa

SEQ ID NO: 379782 - DNA, 1434 bp, Salmonella enterica
atgaaaacctgttggcaagtccttggcattgaggccaccacggataccgacgccattcgtcaggcttatctggcgctgctgccgtcatttcatccggaaaccgatccgcagggttttaagcaattgcgagaagcctatgagaatgcattgcaggggacaacatcgcccgccattacggtggttgatgaggatcccgataccccgtgggtgaattatctcagggagatattcggtgatttgctggcggatggcgaacggcgatttcagccgcaggcatggcaggagtttatccaacagatcaataaattatcgatttcacaggtcgaaaaatcgcgctggtggctgtgcgctatcgcgatgaagacctttcctatttcgtactcgtgtctgaaactgctgtcagatcgcctggcctgggaacaggggagtgataatcgagatgtcgatgccgaggaggtggaggatcttttgtttgaaatccgccgtggcgacctgtttgattattcgctattgctgcatttgccagtggcggtacaaaaccagaccattgctttttatgatgccctggacaacacctttttcgagcatcctctctatttcgcccaacttatggcccagcacggcccgtggattatcccggacaatctacgctttcaacgacgtctgttacgctggttcagcaccttgcactggggtattgcggagctgctgcctgtcgccctggcatggcaggaagccgaacccgataacgcaacgccgggttattactacttagcccagcgcgtattttgcggtgaaggcgatagcctgctgccagaactttacgcgcagtggtgggcgcatccttctacccagcttgacgatctgttgctgcgctggtgccgtcagcatcgaccggactttttcccgctgctggtgatggcggttgaggggcgtgagcaggtggatattaacgctgaacagctgctgtatattcccggctcaagcgctcgttcctgcttgctgtgggccgaggcgctgcacagcggcgcattatcgccactaagcgaaagttttattgcgcggcgtttgaattatggcgcgccagcggtgagtgaggcgcatagccagcatccatactggctgttgtatcaggtggcggatagcctggcgtgcgccgaggagccgtcagcggcattgttacagagtctggtaacgaagcttgatgcgccggatatctgcccgttggaagcgctggttattcgcggggtgctggggcgggctgcggctgtcgccacaccgtgtgaagctgtagtcgcagatgaagaaccggtgacgacggtgacttcgccgagtacggaggaatctggcggcggctttggcctctggcaggtgattaaaatcattttatttattggcgttgtcggccatgtattacgccagtttatgcattag

SEQ ID NO: 379783 - DNA, 399 bp, Salmonella enterica
atgtactctgaaacccgcaatatgacctcttatggagacagcgactatcactctgcagacggtaagttgggtggcggcggtatcgctaacaaaacccagaactttgaagtggttgcacagtatcagttcgatttcggtctgcgtccgtccatcgcctacttgcagtctaagggcaaagatttaggcggccaggatatggatagccatggtaactatcgttacaccgacaaagatttggttaaatatgttgacgtcggtatgacttactacttcaacaaaaatatgtccacctacgttgattataaaatcaacctgctggacgaagatgatgacttctacgcaaacaacggtattgcaaccgatgatattgtaggtgttggtctggtctaccagttctaa

SEQ ID NO: 379784 - DNA, 468 bp, Salmonella enterica
atgacggcggcggcattcggcactgtattgggaaatatcgtttggggtctgtgcgcagatagaattggtttgaagaaaacgttcagcattggtcttctcatgtcctttttattcattttcccgttattcagaattccgcaagataattatttactgctgggcgcatgtttattcggtttaatggcgactaacgtaggtgttggcgggttggttcccaaatttctctacgactactttcctcttgaggttcgtggtttgggtaccgggctgatttataatcttgctgcgacatcaggcacattcaattcaatggcggcgacctggcttggaataacaatggggctaggcgctgcgctaacgttcattgttgctttctggaccgcaacaattctactcattattggcctatccattccggatagactaaaagcacgtcgtgaaagttttcaatcaacaaaagaattttaa

SEQ ID NO: 379785 - DNA, 1365 bp, Salmonella enterica
atgagtcaggacgcactcacgcacattattgttaccggccaggatccgcgcggcctgccggagttcagcgccctgcgggaagagatcaacaaatcgtctcacccgtcgcagccggagctgaactggaaactggtggaatcgctggcgctggccatttttaaagcccatggcgtggatctgcacacggccacttattacaccctggcgcgcacccgcacgcacggcctggccggattttgcgaaggggtggagctactggcggccatgataagccacgactgggacaaattctggccgcaggatgagtcagcccgcaccgggatgcttgactggcttaattcgcgcaccggcaatattctgcgccagcagctgtccttctccggcgcggacctgccgttgctgtaccgcaccgaacgggcgttacagttgatttgcgacaaactccagcaggtggaactgaaacgccagccgcatgtggagaacctgctttattttgtgcagaacacacgtaagcggcttgagccgccgccgaaaagcagcgtggacattccgccgcagaccaccgtcagaacgttgatctacgccccggagagcacgcagcccctcacggcggaaaaccttccgcccctgcctgagttgccggaaatgaaggtggaagtccaccacggcgcggtggaggatccagagcctgtcgccagggccacgtcaggccggactataaaaggctttatggccggtgtcgtctgcgctgcggctgtcgcagccgcactctggtggtggcaggtgtacccgatgcaacagcaactggcgcaggtaagggacacggcgcagggcgcggcaatgctctggctggcctcgcctgaactggacagctacgggcagcggttacaacagcttcccgacgcctcgccgctgcaactgctggaggcggggatgcagatgatgcataccgcagacagccgctggccggagagtctgcaacagcagcaggcaacagcgcagtggaatgaaatcctgaaaacccgcgcgcaaagcagcccacaaatgcgcggctggcagcaggcgcgccagaatctgcgtgactttgctgacctgatgatgcagcgggaaacggagaagcagggctttaccctctcctatattaaaacggtgacctggcaggcggaacgcctgctgaaccaggaaacgccgctggagtccctgctgacgcagtaccaagatgcccgcgctcagggacggaatgcggaggtgctggaaaaacaaattaatgaacggctggatggggtgttaagccgctggctgttgctgaaaaacaatgtagtgccggaaacggcaactaaagccccccccgaaaataatagttaa

SEQ ID NO: 379786 - DNA, 1413 bp, Salmonella enterica
atggacttacgcgacccgaatacctggatttcgcacctgctggaaaatctgccggatgacaaactggcctgcgcgctgaaagacgatgatcctgactgggaatatatcgacggcgaaatgcttaaactcggctcgctggcgcacagtcagctggatatcccggaaattcagcgccgggggctggtgattctggcctcggaaagcaaggattttcgcctgctggcccatctgctgcgcaccctgcaacatgccggcgatccgctgctggcgctgcgtctgctggcgctgtacgtggagcattactggacggtggcggcaccacaaaatgcggcacataaacagcgtttcgccacccaggtgctgaaacgctttgaaaccggcgtggagagtttcgcagagacagcccgtaccgcgcagcgcgacagcctgctggctgaactggcgaaactggcgcagcgctggcaggagcagaatatcccggcgctggcacaggccgtcgatgacctctcgtcgcagtatcgccgggcatttcgcggggccgccccggtgccgccagcggctggcccgtccacgcctccggctccggtttcggccacgccgtccgccccggtatccccgtctgcgcctgcggcgacgacggcgccaccggtggatatcgacagccatgacgacaaagcctggcgcgacacgctgctgaaagtggccgccattctctgtgagcgccagccggattcaccgcagggctaccgcctgcgccgccatgcgttatggcaggccattacatccgtcccccaggccgaaagcgacgggcgcacaccgctggcggcggtgcctgccgacatgaccgccgattaccaggcgcggctgaacaacgccgatctggcgctctggcaacaggtggaaaaaagcctgctgctggccccgtactggctctatggtcattacctttcagcgcaggccgcacaacgcctgggctacaccagcgcggcagaagccatccgggatgaggtggttcgctttctcgcccgcctgccgcaacttgccaccctgctgtttaatgaccgcacaccgtttatcagcgaacagacaaaacagtggctggcggcgtctccgggcagtcagacagccccgatggtgcggaccagtgaagacaccgaggccgtccgccagtgtttcagcgagcaggggctggaggccacgctgcgatacttggaaaccctgccggaaggcgatccgcgcgatcggttccaccggcagtatcttggcgcgcaactgttagaagaagccgggatggcgcaactggcacagcaacagtaccggatgttgtttaaagcagggctgcgcatgacgctggctgaatgggagccgtccctgctggaacaactggaaaacaaactcacggcagaacagtaa

SEQ ID NO: 379787 - DNA, 738 bp, Salmonella enterica
atgagcagaatgcagacgctcctgatcatggcgctactgccgggattactccccggcgcagtacaggcggaaaccgcggccaaacaggcggctgccgcgctgccgggaattgtggtgccgggcgtcccggaaacagacgcacaggcgacactcagcgccatgacggcctgtcgccgggagcctgcggcgctggagcgtctggactgctacgacaaaatcctcaccccggagcagcccggttttgccagcgcgctggtgaaggcaaaatacgaaggggaagcctggaaacgcgccttcgcccaggaaaaacagcgcccggacaactccaccgcgctgataatgacgcagagcggcggcgagcggccaacggtgattatcaccacgcccgccatcggcaacgtaccgccgcgcccggtgctgatgttcagctgcgtggacaacatcacccggatgcaggtggcgctgacccacgccatgacgccggacagcatcgacgtgacgctgaccgccgatacccgacagattcggtcgcgctggtttatccgcgaaaacggcaccctgctggagtccagccggggcttatccggcatcgacgaaataaaacaacttttcggcgcaaaaacgctgaccattgataccggcaccgacagcgcagccggaaaactgacgtttaacattgatggactggcaaaaaccatcgcgccgctgcgtgaagcctgtcactgggcgggagaataa

SEQ ID NO: 379788 - DNA, 2736 bp, Salmonella enterica
atgatccagattgacttagccaccctggtaaaacggcttgctcccttcgcgaaacaggcgctggaagcggcggcgtcggagtgtatgagccagcaggcggcagaaattaccgtcgcgcatgtgctgctacagatgctggcgaccccgcgcagcgactttcgggtgattgccgaacgtgcggagatcggcgccgatgatttacgccaggcgctgacggtggaaaattacgccaccgcccgttcatccgacagctacccgtcgttttccccgatgctggttgaatggctgaaagaggcctggctgctggcctccgcggaaatgcagcagaccgaactgcgcggcggcgtgctgctgctcgccctgctgcattcgccgttgcgctacctgccgcccgccgccgcccggttgctgaccgccatcaaccgcgacctgctccggcaggattttgccgggtggacgaaggagtccgccgaatcggtgatcctgaatgcggacggacagaccgccagcgccatagccgataccggcgacaccctgctggcccgctatgccaaaaacatgaccgacgatgcccggcaggggcggcttgatccggtgctgtgccgcgataacgaaattgacctgatgatcgatatcctctgccgccgccgtaaaaataatccggtggtggtgggcgaagcgggcgtgggcaaaagcgcgctgattgaagggctggcgctgcgcattattgccggtcaggtgccggacaaactgcgcgataccgatattatgacgctggatctcggcgcattacaggcgggcgcgtcggtgaaaggtgaatttgagaagcgctttaaggggctgatggcggaagtcattcagtcgccgaaacccgtcatcctgtttatcgacgaagcccacacgctgattggcgcgggcaaccagcagggcgggctggatatctccaacctgctcaaaccggcactggcgcgcggcgagctgaaaaccatcgccgccaccacctggagcgaatacaaaaaatacttcgagaaagactccgccctgtcgcgccgtttccagttagtgaaagtcagcgaacccaatgctgccgaagccaccattattctgcgcggcctgtcggcggtgtatgagcagtcccacggcgtgctgattgacgatgaagccttacaggccgctgcgacgttgagcgagcgctacctgtcaggccgccagttgccggataaggccattgatgtgctggataccgcctgcgcccgcgtggcgattaacctctcctcgccgccgagacaaatctcggcgctgaccaccctgcgccagcagtgtgaagcggaaatccgccagcttgagcgtgagatccgtattggcctgcggtcggacacctcacggctaaacgaggttctggcgcagtatgacgaaacgctgagcgaactggatgcgctggaggccgcgtggcgccagcagcagacgctggtgcaggagattatcgcgctgcgtaaggggctgctggacgaaacggacgctaccggcaacgacgaaaccgcaacgcctgaaacagaggcggtgggcagtgacgatgaatccgtcacagcgccgccggaagcggaaccggaaatttcgccagccgcccgcctcgcgcagctcaccgccgaactggacgccctgcaccacacgcagctgctggtctccccacacgtcgataaaaaacagatagccagcgtgattaccgaatggaccggcgtgccgcttaaccgcctgtcacaaaacgaaatgtcggtcatcaccgacctgccgcagtggctgggcgacaccattaaaggccaggcgctggcgattaagcacctgcacaaacacctgctgaccgcccgcgccgatctgcgccgtccgggacgcccgctcggcgcgttcctgctggccggtcccagcggtgtcggcaaaaccgaaaccgtgctgcaactggccgaactgctctacggcggtcgccagtacctgaccaccatcaatatgtcggagtttcaggagaaacacaccgtttcacgcctgattggttcgccgccgggctatgtcggctacggcgagggcggcgtgctgaccgaagcgattcgtcagaaaccgtactccgtggtgctgctcgacgaggtggagaaagcccacccggacgtgctcaacctgttctaccaggcgttcgacaagggcgagatggccgatggcgaagggcgtcttatcgactgtaaaaatgtggtgttcttcctcacctccaacctcggctatcaggtgattgtcgaacatgccgacaacccggaagccatgcaggaagcgctgtacccggtactggcggacttctttaaaccggcgctgctggcgcgtatggaagtggtgccgtacctgccgttatccagagaaacgcttgccgtcattatcgccgggaagctggcgcggctggacaacgtactgcgcgcccgcttcggcgcggaggtggtgattgagccggaggtgaccgacgaaatcatgcagcgcgtcacccgcgccgaaaacggcgcgcggatgctggagtcggtcatcgacggcgagatgctgccgccgctctccctgctgctgttgcagaaaatggcggcgaatatcgccattgcccgtatcacgctgggcgtggcaaacggcgcgtttaccgcggatgtggaggatgtgccggatgaggatactcagcccgtagcggaagcagaggacgaagccgttctatga

SEQ ID NO: 379789 - DNA, 759 bp, Salmonella enterica
atggatgagctgtcactgccccctttacccggatacgagagagaaggccagcgccagtatcagctggcgctgcgcggcaacagcctgaacccgatgatcgatgccgccaccccgctgctggggatggtgatgcgcgtttcgggcatgaacagccatgccatgcctgaacacctgttcacccaggtggtgacggatgtgcaggcggtggagcagttactccaggagcagggctatgagcctggggtgattatctcgtttcgttacatcctgtgtacctttattgacgaggcggcgctggggaatggctggtcgaacaaaaacgagtggatcaagcagtcgctgctggtgcatttccataacgaagcctggggcggtgaaaaggtttttatcctgctggagcgcctgatgcgcgaacccaaacgctaccaggatctgctggaatttttgtacatctgcttttcgctgggctttcgcgggcgttataaagtcgccgtccaggaccagggggagtttgagcagatataccgccgcctgtatcacgtcctgcataagctgcgcggcgatgcgccctttccgctgctgcaccaggataaaaaaacccagggcgggcgctatcagctgattaaacggctgaccatccggcatgttctgtgcggcggcatcgtcgtgctggcgctgttttatctgttttatctgctgcgtctggacagtcagacgcaggacattcttcatcagttaaaccggctgcttgccaggtaa

SEQ ID NO: 379790 - DNA, 1332 bp, Salmonella enterica
atggcaaccacgcgaaacaaggtgatgtggcgggaaggaacgctgatgcgtccgcaccatctccagcagcaacaacgttataacgattatgtgaataatctgcgtttccgggccattcatgatttgtcctggggatttaccgagctttccctcaatgatgagctgctgggacagggcaaaattatgatcgacagcgcgtcgggcaccctgccggacggcaccgtgttttcccttccggaccaggatgcgctccccgatccgctgcatccggacagttttcctgatgaagaaagccgcaatgtctatctggctttacccgttgccagcgatgtgagaggcgaagtcagttacgggcagcaggttgggcgttaccggctgaacgatgccagtgtccgggatctgcactccgagaatggcgatgcccggacgctgacgctgggccagttgaccccccgcattatgagcggagcggacgatatgagcgcgtatgtcacgttgccgctgtgccgtatcaaagacaggcgtgcggacggctccctgatgctggatgaaaactttatccctacctgccagaacgtttatgtcagcgcacggctgcgtgaatttctccgggaagtccaggaagcggttggcggccgggccaatgacctggctaaccgcattggctctccggcgcaaagcggtattgccgacgttgcggaatttatgatgctgcaactgctcaaccgtaaccagacgcggttcacccaccgcgcccgcaggccgcacctccatccggaagatttttatctcgatctggccggactgctgggcgagctgatgacatttaccgagccatcccgcctgccctgtccgctggatgtctacgatcaccgtaacctgacggacaccttcaaaacgctgttgccggaagtgaaacgggcattacataccgtcctgtcgcccagggcggttaacctgccgctgcatctgcgcgatggcatctggcaggctgacgtacatgactccacgctgttgcagtcggccaccttcgtgctggcggtggcggcgaaaatggagacgctgcaactccagcgccagtttatccagcagtcaaaaatttcctcgccggaaaaaatccgcaatatggtcagcgtgcaaatccccggcatcccgctgcatacgctgatggtggccccccgccagcttccgtaccatgccggtttcagctatttcgaactggacaagagcggggccgcctgggcggatgtggcggccaccggcgctgtcgccctgcatgtttccggtacgttcccggatctgaacatgcaactgtgggccataagaggataa

SEQ ID NO: 379791 - DNA, 534 bp, Salmonella enterica
atgacaggccgtggtttcctcgcctgggcgatggtggcgttgttcaccctcgccttatgcggttgtgaaacggtaaaaaaaatcggcgaggtgattaaaaacccggatattcaggtcggtaagctggcagaccagtcttcgcaggtgacgattacgctgctgacggagccggatgccaatatcaacgcggacggtgaagcggctgcggtggacgtgcagctggtttatctgagcgatgactcaaaatttcaggcggccgactacgaccagatagccaccaccgcactacccgacgcgctggggaaaaactatatcgatcaccaggatttcagcctgctgcccgacaccatgaaaaccctgccgccggtgaagctggatgagaaaacgcagtttatcggcgtgattgcctatttttccgacgaccagactacggaatggaagcaaatcgaaccggtagaagggacaggacacaactaccgcctgctggtgcatatccggcagagcagtattgaaatgaaaaaagaggatgattaa

SEQ ID NO: 379792 - DNA, 1287 bp, Salmonella enterica
atggcggaagaaaaagcgcggcaacagacgctttcactgcatgtcgttaacggtaacgagctggagagcggacgtaccgcacggtgtctgttcaccggagacggcgatgtgggccacggcagcgaatgccactggcctgttcaggaccggcaccagaacgttccggcgaaggcgttcagcatcagcctgcatgatggcgcattctgcctgcatccgctggcatcgccattatggctgaaccaggctaaagtcacggcggcctcagaccaggtgcagttacgtcagggcgatgagatccagaccgggcatctgatactccgggtttatctgaaccagggcgggatgcggcattacgatgaggagatggcgacgcctgaaaccatcgtttctaaccacgacctcctgtcggacacgctactgtccacggacggcgcgccggaatatccgggaatgccgtcccgccatcagctcgcggataccgttgttaatggcttttccaccgatccgttgcaggtgctccaggctgaaagtctgaccaccagggacaatccgcttgcgggtatcaccccggcccggccctccgccccgttatccgatccggcgataaacggcgggatcaacacgccgtttatggatctgccgtccatgtatgccgatccgcatgataatgaagagggcatgtcaccggcagacgcggcgcagcgccacctcgccgtcacgccgttactgcgcgggctggggggatcgcttgccgtgcataacacccaggacgccgatgattttctggaggaggccggaaggacattgcaggcggcgattcaggggttgcttgagctacagcagcgccgcaacagcctgtcagacaagcatctgcgcccgctggaagataacccgctgcgcctgaatatggactacgccacggcgctggacgtgctgtttgccgaagggaaaagcccggtacatctggccgcgcccgccgccgtcagcgagagcctgcgcaatattcgtcatcacgaagaagccaaccgcgccgcgattgtggaatcgctgcgcgtgctgctggacgccttctcgccacagagtctgatgcgccgttttgtgcagtaccgccgcagccacgaactgcgtaaaccgctggatgatgccggtgcgtggcagatgtactgcgattattacgatgagctggcctccagccgccagcagggttttgagatgctgtttaacgaagtgtatgcccaggtgtatgaccgggtgttgcgtgaaaagcagcgggagccggaagcatga

SEQ ID NO: 379793 - DNA, 1089 bp, Salmonella enterica
atgggcggaaagaaccgggcaacacccgctcatctgagtccggacgatgctccggcgcaggatgaacaacgcacgctgcgggagccgttgtttcaggacgcctgcgcctgcaattttttcgcgctctctgagctgctgcaccggctggcatcagaaggcggcgaaacgccagtgttatccctggatacccctccggcgcaggaaaccattcgtttccaggcggacgccagcctgggatttccggtaagcgatgtcagcgcgctggagcaggatgcttccgggttgttccggatgaccaccacctttatgggattgcagggcagccagtcgcccctccccggctattaccttgatcacctggcctggaaatccgcgcacgagcagagtccggtcagcgattttctggatatgttcagccatcgcctgacgcagtttgtctggcatatctggcgtaagtaccgttaccacgtcgctttccgtaacggcggcgtggatgcgttctcgcagcggatgtactccctggtggggctgggccaccggcagcttcgcgacagtctgcccgttaaccacagcaaaatgctggcctatgccgggatactggcaaatccgggacgttcgccggagatcgtctgtacgctggttgcgcactgtttcgatttaaatttatcggacgtgacgctgcaaaactggcagcggcggatggtggatatcgagccggatcagcagaacagtcttggatgttacacgattaaaaatggcgaaaaactggccgggcgatcggtgctgggtaattttgtcctcggtacgcgggttcccgatctcagcggtaaatttcagttaagtattaaccacctgagccgcaagcagtttctctcgttcctgccgtcaggagaaaattttctgccgctggcgatgtttgtctccttcgtcctgcgcgatcagcttgcctgggatttacacctggggctggccccggatcaggtggggattatgcggctgggcgataacaagagcgcgctgctgggctggacgtcatttctcggcgagccgggagagcatccctcagtcaccatcagggtcagggagtaa

SEQ ID NO: 379794 - DNA, 1854 bp, Salmonella enterica
atggaattcgaagaacgctattacaggcaggagttggatcacctgcggcagttgagcaagctgctggcgaccgaaaagccgcatctggcccggtttctggcagaaaaagaggccgatccggatatcgagcgtctgctggagggcgtggcctttctgaccggcaatctgcgccagaaaatcgaggatgagtttccggagctgacgcacggactgatccggatgctgtggcccaattatctgcgcccggtgccgtcgatgacgctgattgaatatacgccggatatggataaaacttccgtgccggtactgatcccccgtaatgagcagttcacaaccggggcgaaggggactcagggaaacccggtattgtctgcgtattccggcaatgagcacgatgtagccccgccctgtacgttcaccctgtgccgggatatctggctgttacccgttcaactggatcaggttgaaaatcgcagtacgccccgccacggcattattgatattacgtttgccgtcgcaccgggcactgattttgccacgctggatctgaacaggctgcgcttctggctgggcaacgatgataactatacccgctatcagctttatctgtggttttgtgaatatttacagggcgcagagttgatggcgggcgggcagtcgagcccgatgcctgaatttatgctgaaagcggtgggttttgagtcagaggacgccatgctgccctggcccggcaatgtccacagcggctaccgcattctccaggagtttttctgctacgccgacagttttctgtttttcgatgcctgtggcattccggcattgccagacaggttaaaggagaaccgtttcactctgcggctgcggttttctcgccccttaccggcagatatccggctgcgggatgattccctgcgcttatattgtgcgcccgccattaatctgtttgcccaccatgccgaagccatcacgctggatcatcagcggcaggattacgctctggttcccagccgtcattttccggatcattacgacattttttcggttaacagcgtggtgagtcagacgcaggggaagcagagaaaagcggatcttggacggccggtgatcacagaggccgcgcgccactggcctgcttttgagagtttccgccaccagatggagtacagccgtaagcgggaagtggtctactggcagcaccggaccaggacctcgctgtttcaccggggctttgatcataccctagcttttattcatgccgatggcagcctcccggatgcctcactgcttaataatgaagtggtttctgtatcgctgacctgcaccaaccgggagctgccggtacagctacggcccggcgatatcaccggtacgacaggtaaaaacgcgtcggtggcgtcatttcgcaatatcacccgccccaccagaccgctctggccggtgattgacggcagcctgcactggtcgttgctgtctgccatgaacctgaattatctgtcgttgctggatgctgatgcgctcaaacaggtgatcgccaattttgatcgccacgccatccatcatccgcagatggcccgtctgtcacagcagaagctggacgccattgaacggctggaaacaaccccggttgatcgcctgtttaccggcataccggtgcgcgggctggcgtccaccctgtccattcatccggagccgtttgtctgcgagggtgaaatgtacctgctgggcgcggtgctgtcgcattttctgtcgctgtacgccagcgtcaattcgttccacatgctgaccgtcgttaacacggaaagccaggagtcatggaaatgggcggaaagaaccgggcaacacccgctcatctga

SEQ ID NO: 379795 - DNA, 417 bp, Salmonella enterica
gtgataccggcgcgcgaaaagcctgccggatcgctgtttgagcgtctggaaaaccctcctgccagaaactggcgggagggcagtaatatagaggcgttcaggcagtccattcgccatagtctgcgcaatatcctgaacacccgctccggcagttgtcggggaacaccggggctgggtattgaagagccggaagggtcggataattaccgcagcgccatgagccaggccatcgtgcagtgtattgagcgttatgaaccccggatttcgcacgcggaggtccgggcaatcctgccacaggccgccagcccacaggagataatttttcgtatcaccgcctgggtgacatttaacgatatcgacgatgtgctggagtttgatatggcaccggacggtagtcagcattatcgggtggagtag

SEQ ID NO: 379796 - DNA, 1473 bp, Salmonella enterica
atgtctttacaggaagaagaacttgtttccacccgcactgaacagggaagccatgccccgtcgttgcttgatgaaatcatggcacaaacccgtatccagcccggcgctgacggttatgatattgcccgtcagggcgtaacggcttttattgccagcctcctgcaatccacttcacctgcagaacccgtaaacaaactggccgtggacagcatgattgcggacatcgacgcccgtatcagccgtcagatggatgctattattcacgcccctcagtttcagcaactggagtcgttctggcgttcaatgaaagcgctggtcgatcgcgttgattttcgtgagaatattaaggtgcatgtcctccatgtcaccaaagcggaattgctggaagatttcgagttcgcgccggagattacccagtccggcttctataagcatgtttattccagcgggtttgggcagtttggcggcgaaccgattgcggctgtgctgggcgcatatgagttcaaaaataccacgccggatatgaagctgctgaactatgtcagcgccgtcggcgcaatggctcacgcgccgttcctttcttccgtgtcgccggagtttatgggcctgaaatcatggaccgagctgcccaatatcaaggatctctacgccatttttgaaggtccggcctacacaaaatggcgcgccctgcgtgattccgaagattcccgctacctgggactgaccgcgccgcgttttctgcttcgccagccctattccgcgaccgaaaacccgattaaaagcttcaactacgccgaagatgtgagccacagccacgagcattatttgtggggcaataccgcctggatgctggccagtaatatagccgattcgttcgcgaaataccggtgggcgcccaatattatcgggccgcagagcggcggcgcagtaaaagatctgccggtacatttatatgagtcaatggggcagattcaggccaagatcccgacggaggtgttgatcaccgaccgccgtgagttcgagctggccgaagaggggttcatcaccctgaccatgcgtaaaaacagcgataatgcggcgtttttctcggctaacagcgttcagaaacccaagcattttccgggcaaagacgccgagaccaactacaagctgggtacgcagttgccttatctgttcattattaaccgcctcgcgcactacattaaggtgctgcaacgcgagcagcttgggtcgtggaaagagagaagcgatctggagcgggagctgaatatttgggtgcgccagtatgtcgccgatcaggagaatccgcctgctgatgtccgcagccgtaagccgctgcgtggcgctaaagtggaggtgctggatgtggacggcgagccgggctggtatcaggtggcgatttccgcaaggccgcactttaaatatatgggcgcgtcgtttgaattgtctttagtcggacggttagataagtga

SEQ ID NO: 379797 - DNA, 213 bp, Salmonella enterica
atgggcttgcgggaagagacctccagaaccgatgacgcaataacgcaggcagtgatccggttatttatcagtcagacaggcgacatcaacacagaaacactggaggtattggtcgcggcgcttgaccagaggatcggatgtctgatggatgaaatcatccatatcaacgggtaccagcagatgaagccacactggcgaaaggtgttccactga

SEQ ID NO: 379798 - DNA, 504 bp, Salmonella enterica
atgagcaaagattataacggcagcgtggcacccaaagaacgcattaatatttcttacattccaaaaacggacggtgagccttctgaggtggaattaccccttaatatgttgatagtgggggataccggaaactcacaggaaacagcgccacttgatgaacgccagatggtttctatcgacaaacattcattcaattcagtgatggcagaagcgtccattagcctgaattttgcagttccggcatcattgaaggacgacgcaaaagatggcgatgagatgaatatctcgctggaaatcaaatccctgaacgatttttctccggacagcgtggcaaaacaggtaccggagttgaacaaattgctggaactacgcgaagcgctgacagcattaaaaggcccgctcggtaatctgcctgcatttcgcgcccagcttcaggcattgctggaaaatgaagaatcccgcgaacagttactgcgggagatcagccaggcagaaaaccagtaa

SEQ ID NO: 379799 - DNA, 261 bp, Salmonella enterica
atgactcgctattattttctgcgcggaaagcggctcgaccagctggtcgcaatgggcgagtttctgcaaaaacagggaaataaagtccgctttgaaacggatggaaaagcggtttttgtcgacctggcagcaaaagaacactttcaggatcaacaatttaattttttcattacgcagaatgatataaaccatcttactcagcagatggttgaatttataaatagtcaacaagatgcggcggatgctggcggcgttaattaa

SEQ ID NO: 379800 - DNA, 432 bp, Salmonella enterica
gtgctgaaaaaccgttttcctgatgtcacgacacacatcattgcccatgagtgttttttgcgcggcgcggtcattacggcatgggcggagcggtttcgccagcgtctctcctcgctgtggttcgttgaggaagagataaacgatgacgattgccgcgcagagtggcaactgttaggcaaaacatggcagggatggtggcaaaatcagtggcagctctgggggcaaggtcacaaccgcaaaatggtctgttcgttaaccggttcccacttagaacaaggtgtcgccgttaatctggcggctagtcgccgctttgttacctggctatggcaacagcctgaattccagcaaagcgcccactattccgccaaacgcgtcacgcaaattctgtatttgctgacggaaaaatataactcacaatggaatcacatttaa

SEQ ID NO: 379801 - DNA, 855 bp, Salmonella enterica
gtgaataaaaccattaatctgctaaaattactgcccgtagtattattaagcgcatgtactacatcgtatcctccccaggatataatatcggcacccgagttaccccatcgtaacgtactcgttcagcaacctgataactgtagcgttggctgtcctcaaggaggaagtcaacaaacaatctatcgccatgtctatacgctcaataataatagcgccacgaaatttgccaactgggttgcctatagcgtgacaaagaccagccaggcaagcggtcgcccgcggaactgggcgcaggaccccgatttaccgccctcggatacgttggccccttcggcctataaaaatgcccatacgctattaaaagtcgacaggggacaccaggcgccgttggcaggattgggcggcgtttcggactggccgtcgttaaattatttatcgaatattacgccgcagaaatccgccctgaaccagggagcatgggctgcactggaaaaccgggtgcgcgaacttgccaaacaggctgatgtatctgtagtgcacgtagtgaccggccccctttttgagcggcatatcgccacattgccagaagatgcgacggtagaaattcccagcgggtactggaaggttttattcaccggaacggcgccgtcaaaaagtgaaggaaattacgctgcgtttattatggatcagaatacgccccgttcggcgaatttttgcgactatcaggttaccgtggaggctatcgaacataaaacgaagccagtgctgacgctgtggtctgccttgcctgaagcggtagccagcgaggtgaaaacgacaaaggggagtctggcgcagaagttaggttgtcgatga

SEQ ID NO: 379802 - DNA, 261 bp, Salmonella enterica
atgaaattagtgctcgtcaatcggcaggtcattttaccggaaagcggaaccgagtccttccagtgccatgcctctacgcttgttcgcttaccgtgcggtacgctcgtggccgcatggttcgcggggttgcgcgaaggaagcgaagatacagccatctggctatctcgctatgaacataatatctggacaacaccgcagcgagtggcggcacgcgagggggaagcgcactggaatccggtgttattttacccgtcggattaa

SEQ ID NO: 379803 - DNA, 765 bp, Salmonella enterica
atgactaaaaaaattgttgctgtgacggcctgtccgacgggcgtcgcccatacctttatggcggcagaagcgttggaaattgaagcccgcaagcgtggtgactggatcaaggttgaaacccgcggttccgtcggggcgaagaacacgctgaccgcggaagagatagcgcaagcggatgtggtgattatcgcggcggatattgagctggatctgtcaggctttgttggcaaaagactctatcgcaccagtaccggcgcggcgctaaaaaagagtgcgcaggaaatggataatgctttcaatagcgccgaggtctatcaggggagtgccgggcgctcttcttcagctggtaaaacagagctacccggcgtttataagcatttaatgaccggcgtatcccatatgcttcctttggtggtggcgggaggattgtgtatcgcgctctcttttgtcttcggtatccaggccttcaatgagccgggcacgctggcggctgcgttatttcaaatcggtggtaaggcggcctttgcgctgatggtgccggtactggctgggtttattgccttctcaattgccgatcgtccgggtctggccccggggcttattggcgggatgttggccagcctgtgcggtgctggtttcctgggagggattgtggccggttttcggccggttacagcgtacggtttctggcgcaaaatattaagctaccagcgtcaatggaagcgcttaagcctgtgctggttctgccgctactgtctacgctga

SEQ ID NO: 379804 - DNA, 315 bp, Salmonella enterica
atgaaacgaatgacgattttactgctggccgccagtctgctgccgtcctgtgtgctggcgtggaacacgccgggggaagacttcagcggagagctgaagctgggcgggccggtgaccagcacccgtaatccctgggtctggaaggtcggggaagggaacacacagataaacacgaaagctgtctctgtcctgcgcagtggggagcaggtaataccggttcccctgccggccatgacggtcctgctgggaaaaactatcctgaccaccccggccggccggccgggaggggcttgcgccgcaggtgacgtacggtaa

SEQ ID NO: 379805 - DNA, 273 bp, Salmonella enterica
atgcagaatgctgcctatgttaaatcaatgacttctacacaagtcaaagatcatctaccccgtattttgggtgcagatatgatcaccattgcccaggatgccgttgaaagctcttacactggtccaaatgtatttaatcgcgctgatgctaaaactattcagggggtatatggttctgagattgtggctaaatcaggccaactatctttccctaaagacggcgtaccaagtgactggaatgctcagatgagcgttactgtttcttatcagtaa

SEQ ID NO: 379806 - DNA, 570 bp, Salmonella enterica
atgtcgttcggcgatgtccgtctgggagcattaaccgttatgcgattcaataaaattaagaacgccgcaataactattgggtttgccctgttcgggctgacttcatcagtacatgctgctgatcctgcaacagcctcgctaattatagaagctatattaacaaaaccaacttgcatgattactgttccaaccacttatgatttggggcagttgattcgtgggcaagtcagagagcatgaaccattacttattaatgtcaattgccctggaaaagactcactgaaaacggcgctaaaggctaaggttctagcgggaaggttagaaggagatgataaagtgcagatgctagtaaatggccaaggtaatggtacattgttatcattaaagcctgtgaatgaatctggagcaagttctcctgttaaacttacaggagcggcatcaggtactttttgcgaagttgatactgttggatatcgccagtgtcagctaattcctgttacggaggttcactcagaggatacgccggggcatgcttcggcaacattattgtttgaggtagtttatccgtaa

SEQ ID NO: 379807 - DNA, 795 bp, Salmonella enterica
atgaatcgcctgatatcagccttctgtattacattctgttgtcatgcttacgctataaccctagatgccagtattactgattttacggtactatttgggcaacatatggggcacagtgcttgtgtaggcaaatttccacaaggtgctccacccagtacttttgtaggatgccgatcgaatggtgatttttcaatgtataattcatttacctcaaaagtcatcattactcggttgcccgacaaagtatccgctgcacatggtgagagtctgccatgtacagttccctcgttgagggtccggggagggttagaattcgctaagtcaacctccgatgcaggaatagtcgaaactattgatattagtggaatgaatgtaggtgaaagccggacaggggatattaaaaatgccaaatatattgcccttacgcccggaactgttatcagcctagaggcgcttcagtgtgattacagtgctggttcgctttttggcgatacatctgctcgagtctctgctaattattcaatagaaatgcctgatagtaatttcagcacctcggtactatatgaggtactggctaaaattgacaaaattgggagcaaacccgactttactttgtcaccgacttatgtcaggtgtgtaggtaacactgcgtccgggtgcatgactgaacctgtgacagtaagcgtaaaagatgtaactaatggtcacagaattcaagtcactggtctggtaactggagggatttatcatatatatcaaatactggccgtgtcgacctgcccgagggtaagttga

SEQ ID NO: 379808 - DNA, 198 bp, Salmonella enterica
atgcagaaaaatgtgactcccggcaggcgtaagggctgccctaattattctcctgagtttaagcagcagcttgttgcggcctcctgcgaacccggcttatccatctcaaaactggcgcttgaaaacggcattaacgccaatctgttgtttaaatggcgcaagggaaagctgctattacctttcagctactccctgtga

SEQ ID NO: 379809 - DNA, 204 bp, Salmonella enterica
atggcgcaagggaaagctgctattacctttcagctactccctgtgactctcaatgccacctccgtacagccagaactaaccgctgaaggcccggaggttctcagtatcagctgtgaggcaacgttctggcacgggacgcttcgcctcaacggcactgtcagcgaaaagctcctgactctgctgatacaggaactgaagcgatga

SEQ ID NO: 379810 - DNA, 174 bp, Salmonella enterica
atgatcccgttaccttccgggaccaagatctggctggttgcaaaagtgcagacggtgctgaaagatgatccgatgtccggccacctcttcatcttccggggtcacagtggcagtcaggtcaaactgctgtggtctaccggagacagctggagcgcgggcgtcagcccgcgatag

SEQ ID NO: 379811 - DNA, 177 bp, Salmonella enterica
atggaagccgacctgaaccggctgcagaaagaaggcgatgcgctgcgtcagacccgcacccgcaaaccgttccccgcatcactcccccgtgacgaaaaacagctgcagccggcagaggcatgctgcccggactgcggcgatgcgttgagttatttgggcgaagatgccgccgaatag

SEQ ID NO: 379812 - DNA, 741 bp, Salmonella enterica
atgacgatggataacgccacacgtaacgattcgcgggcagcccaggtggatacccggctgcagcgactgctggcctggtcgcctggacagagggatctcatcaaaaccgtggtgctgctgctgatggtggctgaccatattaaccgtatcctgcacctggatctgacgtggctgtttctggccgggcgcggggcgtttccgctgtttgccctggtgtgggggctgaacctgtcccggcatacgtatatccgccagtctgcgattaaccggctgtggggatgggcggttatcgcacagtccggatattttctggcgggatttccgtggtatgaagggaatattctgtttgcctttgcggtggccgcgcaggcgctgaagtggtgtgagctgcgctgcctgtttcactctgcggccgcgctgttactgctgacggcgtggatacccctgtccggaaccagctacggcgttgccggcgtgctggtgctggtcatctgttaccggctgtaccggaccgcagatactgaagaacatctggcgcttgcggcctgcctggtggtggccgtccccgcgctgaatctggtcaccagtgatgccgcggcggtggcaggacttctggtgaccgggctgacggtatggcttgtttcgctgacaggcaaatcacggccccggttctggccgactgattttttcccggtattctacacctgccatctggctgccctgggcattctggcactgtag

SEQ ID NO: 379813 - DNA, 4287 bp, Salmonella enterica
atgcaccagaaagtagatcgacaggaaaggcataccgacgtgctggccagaacggttggcatgctgccgccggaagccggcgtgattgagaaagcccgggccgggattgatgaggccatcagccgcgagcggcttatccccctcgaccgggagaaaggactgttcacctccggtattcatgtgctcgatgagctgtctgtccgggcactcagcagcgatatcatgaagcagaaccgggtgaccgtccatccggagaagagcgtgccccgcacgggaagttacagcgacgcggtgagtgtcttggctcaggatcgcccgtcactggccattatcagtggtcagggcagtgctgccggtcagcgggagcgggtggcggagctgacgatgatggcccgggagcaggggcgtgaggtgcagattattgccgccgaccgccgttcgcagacgaacctgaagcaggatgaacgtctgtccggtgagctgataaccgggcgtcgtcagttgcaggagggcatgtcattttccccgggcagtaccgttattgtcgaccagggcgaaaagctgtccctgaaggagactctgaccctgctggatggcgcggcgcgtcataacatccaggtgctcattaccgacagcggtcagcgcaccggtaccggcagcgcgctgatggccatgaaggaggccggcgtgaacagttaccgctggcagggcgggcagcagaccccggcgaccgttatcagcgagccggaccggaatgtccgctatgcccggctggccggggattttgtggccgcggtgaaagccggggaagagagcgtggcgcaggtcagcggcgtgcgtgagcaggccatactggcggggatgatacgcagtgagctgaagacgcagggggtactcgggcagcaggacaccatgatgaccgcgctgtcaccggtctggctggacagccggaaccgttacctgcgcgacatgtaccgtgaagggatggtgatggagcagtggaacccggagaaacggtcccatgaccggtatgtgattgaccgggtgaccgcacaaagtcacagtctgaccctgcgggatgcgcagggagagacgcagatggtgcggatttcagccctggacagcagctggtcactcttccggccggagaagataccggtggcagacggcgagcgtcttatggtgacgggaaaaattcccgggcttcgcgtctccggcggcgaccggctgcaggtatcagcggtgaacgatggcatgatgacggtcatcgttccgggacgggctgagccggcttccctgcctgtgggggattccccgttcacggcgctgaagctggaaaacggctgggtggaaacacccgggcattccgtcagtgacagtgcgaaagtttttgtttccgtcacacagatggcgatggacaacgccaccctgaacggtctggcccgcagcggccgggatgtccggctgtattcctcactggatgagacccgcactgctgaaaaactctcccgtcacccgtcttttacggtcgtttctgagcagataaaggcgcgtgccggtgaggtatcgctggaaaccgccatcagccgccagaaagccgggcttcacacgccggcacagcaggccattcaccttgcccttccggtggtggaaagtaaaaacctggcattcagtcaggtggagctgctgacggaggcgaagtcgtttgctgcagagggaaccggttttgctgaactgggacgggaaattgatgcgcagataaaacggggcgatttactgcatgtggatgtggcaaaaggttatggtacagacctgctgatttcccgtgcatcgtatgacgctgaaaagagtattctgcatcatatccttgagggaaaggaggcggtcacgccactgatggagagggtatccggcgaactcatggagactctgacatccggacagcgtgccgccacccgtatgatactcgaaacgaaagaccgtttcaccgtggtacagggctacgccggggtgggcaagaccacccagttccgggcggtgatgtctgccgtgaacctactgcctgggagtgagcgtccccgcgtcgtggggctggggccgacccacagggcggtcggggagatgcgcagtgccggcgtggaagcacagacgctggcgtcctttctgcatgacacgcagctgcagcagcgcagcggtgaaacaccggatttcagcaacacgctgttcctccttgatgagagttcgatggtgggcaacaccgatatggcgcgggcatacgccctgattgcggccggtggtggtcgtgccgtggctagtggtgacacggaccagctgcaggccatcgcacccggtcagcctttccgtctgcagcagacacgcagtgccgccgatgtggccatcatgaaagagattgtgcgccagacaccggaactgcgggacgccgtgtacagcctgattaaccgggatgtgaataaggcactgtccgggcttgaaaacgtgaagccggttcaggttccccgcctgaagggggcatgggtgccggaaaactcggtgacggagttcagccgtctgcaggagcgggaactggtgaaagccgcacaggaggcggagaaaaagggcgaagcctttccggatgtgcccgtgacgctgtatgaggccattgtccgcgactataccggcagaacgccggacgcccgggagcagacgctgattgtcacgcatctgaatgaggatcgtcgggtgctgaacagcatgattcaggatgcactggcgaaaccgggtgagcagcaggtcactgtccctgtactgaccaccgcgaatatccgtgacggggagctgcgccgtctgtccacctgggagaatcatcagtgcgcgcttgccctggtggataaagtgtatcaccggattgccggtatcagtaaggaggacgggctgataaccctgcaggatgccgacggcaacacgcgcctgatttcccctcgggaagcagcggcagagggcgtcacactgtacaatccggaaactatccgggtgggggccggtgaccggatgcgtttcacgaagagtgacagggaacgcgggtatgtggccaacagcgtctggccggtgaccgcggtttccggtgacggtgtcacgctgtcagacgggaaacagacccgcgtggtgcgtcccgggcaggacagggcagagcagcatattgacctggcgtatgccatcaccgcccacggtgcgcagggggccagtgagacgtttgccattgcgctggagggaaccgaagggggccggaaacagatggccggttttgagtcggcgtatgtggccctgtcgcgtatgaaacagcatgtgcaggtgtacaccgacgatcgtcagggctggactgatgccatcaacagagccgcacagaaaggtactgcccacgatgtgctggagccgaaagcagaccgggaggccatgaatgcagagcggctgttcagcaccgcccgggaactgcgggacgtggccgccggccgtgccgtgctgcgaaacgccggactggcgctgggagacagccgggcgcgttttattgcaccggggcgcaaatatccgcagccgtatgtggcgctgccggcgtttgaccgtaacggtaaatccgccggtatctggctgaacccactgacaacggatgacggtgccgggctgcggggcttcagcggtgaaggacgggtgaaaggcagcgaagaggcgcagtttgtggccctgcagggcagtcgtaacggcgaaagcctgctggctgataacatgcaggagggcgtccggattgcccgcgataaccctgacagcggcgtggtggtgagaattgccggtgacgggcgtccgtggaatcccggcgccattaccggcggcagggtgtggggcgatattcctgacagcagtgtgcaacccggcgcggtcaacggggagccggtcacggcagagattctggcacagcggcaggcagaagaggcagtccgccgtgaaacagagcagcgtgccgcagagattgtccgtaaaatggctgaggataaacctgacctgccggaggagaaaaccgcgcaggcggtcagagagattgccggccaggagcaggacagaatgaccccgcctgaacgggaaaccccgctgccggagagtgtgctgcgcgaaccggtacgggagcgggagaccatccgggaagtggcgcgggaaaaccgggttcgggagcggctgcagcagacggagcaggagatggtgcgtgacctgcagaaagagagaaccccggacggggactga

SEQ ID NO: 379814 - DNA, 1128 bp, Salmonella enterica
atgacaattacggcctactccaaaacgttcaagcgtgaacttgatgccaggcagttgaaaaatctttttgatgaaaataatgccgattcagcgctgagtttccgggattttgtgaaagcagatattgaatgcccagcctgcaatgtttctggcggtcattatgttgcagaagctaaatcgcagtcgaaaggcaatgttgtaaagcaggctcattttgcatttcgcgacagccaaggaaaagatactcatcttcctttctgtgatttttacactggttcagacaagctaaatgtcgtttctaacgacgggcgtgttgatttcatgcgttctggctctgaagccacgcaactgatcggcttaatggtctgtgccgggattgaagccaatatattcactcagcaagacattcggaacatgcgacaatggttcctagacttgcgtgagcaaggttcgtttatcttcaatctgaatccacatatcgtacagattgccagagcttctctgataagaaacaaaagaaatagagatcaatacattgttgatatcagtgaaaccaagaatagttggtttgatattgataatgaagtctaccagtcgctttacttcaagtttcccgagttggctttggatcatcgggataatcccgaactatgggggataaggcttaaaggggttgtcactaaagctaaaagcattattgtgaaggactcgggtacatccacatttgataggtcaatcctttctgaaaaatatcagttggcaacacaaattgcatcactggttagaagtactcatccacggctacgcgtactgttaggatacacaaccaacgctctgaggagtagcaatccactgatggcatttgcagcgcttctgctgtttgtatctgattgggatgttacagtcgctgaaaagaagattaaagcgatattggccgtagaaacagtgactgacattaccgctggtaatgtggttggcatgaacccttttatccattatagcgcgtggatcttggttaaagccctgcatgaactacaatctgagctggggtacgaagttgattttgacgctgagtttaacttcgaaaaagaaagactgatgaaactatattttcctagtgagccataa

SEQ ID NO: 379815 - DNA, 486 bp, Salmonella enterica
ttgtcagatctcattccatacaaaaaaccttaccagtcaagtaccgacttgtgtcagaagctgcaacgggatggtttaattatcaatgatgttgataatgctcggaaagtgcttgagagatgtagctactatcgatttaaagcctatctgattccctttcgtgatgaaactactcgcagatattatccggatgcaacttttgataaagcgcataatctatatctgtttgatcaggatttacgactgttggtgtttaagctgatccaaaaaatcgaaattgccgtgcgtagttcttttgattattgggttactggaataaataaaaattctttctggtatctggatttctcactatttaacaatagtgataatcatatcaaaactgtttctaatgtgagcgcatcattcagaaaatcaaaagaagagttcgcaaaacattataaagaaaagtattttaatgaatactgtccgtttcatcgtggatag

SEQ ID NO: 379816 - DNA, 267 bp, Salmonella enterica
atggccagaattcagtgcaaccgtgatcggggcaataattcattcgacggggtgatttgtctggcccggggaaaatcgttaactgtgtactacatgttgcttttcgttttaaaaaacttatatacagcgaatgttattcagaacgaaagtactttctccagccgcaacctgctcatctggtattcctcatctgttacactccccgcttacagtctgtccagaccgtatcgagtacttccgggaggagctccttctcagccaaattaa

SEQ ID NO: 379817 - DNA, 171 bp, Salmonella enterica
atgaacctgatgacgtggctaacaggaaaaacactggcggagctggtgaaaaaagggcagttgatcccgccagaaattaagttacctgtgtatccggccagccactacaaaaaaactggtatgaacaaggtattcctcacggaggcgttattgggcttacggcgattatga

SEQ ID NO: 379818 - DNA, 243 bp, Salmonella enterica
atgtcgtattctataggcgaatttgccagactatgcggtatcaatgccgccacgctaagggcatggcagcgacgctatggtttattgaaaccgcagcgtactgatggcgggcatcgcttatacagcgatgacgatattcgacaagcgcttagcatcctcgactgggtgagaaaaggcgtaccgataagccaggtcaaacccttactgtcgcgtccggtcattcgcctggcgataactggataa

SEQ ID NO: 379819 - DNA, 450 bp, Salmonella enterica
atgttcacctgtctgctggcgtatcccatgcacgtgctatttggcatcatgtcggatcggcgtggctgccgtcaggtgtatattttcggcgcgctttttgtcgcggcaatggcttttccctttttctggctgctggaaagccgttcgctcatactgatgacaatgggctacgttttgcttattaacattggtcataattcactgaatgccgtgcaaccttcttttttcgccggactgtttcatccgcctgtacgctacagcggttcatcaattggcgctcagttgggggcggttgtggcagggggattcacgccgtttatcgctaaagcgttaagcgcagtctatgataacagttggactttggttgccggttatgtcgttttgactgcgctggcttcggcgtttgcggcaaagattgcgccggaaaccgtgttaccgcattcaccgtaa

SEQ ID NO: 379820 - DNA, 3033 bp, Salmonella enterica
atgactcaggaaatcacgctaacatgttattcgctgcctgcggcccccggactggataacatcaaatttgaaaaggggcgcgagcacgaccgccaggcgctgggatttattctgccagcgaatacgcagctgcaaatccgccagccaaataacaacgccggtaacgccagactccgtctgctgtgcaatgactcagcgtgtgagaaatcgcttacgctgaacggcaactggcaaacgatcagcacaacggtcgattccgttccctttattgataccctcttttttgcgcagggcggcgagttttcggtgatctaccgacagccaaccagcaataaaaatttgccacactggcgtaaggggcaatccgaagacgcttttttccagacctgggaagaacaggcgtcgccttttgccctactggaactggaccgcgtgcgttttctgctgccctgggcggatcgcgctaatgtcatcaacgccggtatcaccgcgctggatgcgtactacacgcgagtgatcgacgcctataatggctggactggtctcagcgatagccctgcttcgccgcttaatcaaaatgtcgctaaccgctattttattaaagcggataaacacggcgtcggcgcggcttattatctcccctggtggtgcgcgcaaacggctgcaacattaagccaggggtggatcgataatgtcgccacgcagtggacgattctgcatgaaatcggtcacggctatcagggcgtctttatgaatgacgtcgacctgccagtcggtgaggtgtggaacaacatttacgccgcgtttttccagcagcttaacctgaaccaggggaaccatctttataccgacggctggctctacaattacggacggcagtctgagcaggaattgcaattcattacctatctgcggaatcgcacgccggttaacgcctggggcgtccgcccccgcctgcaatttctgatgctgatgttatttaaaggcggaacagaagcctttcgagtgtttaaccagaactaccgcgagctgggtgctgacgaaaactttttgccctgcgagcatcgcctgaccgatctgctggcggacgccatcgccacagcctcaggttatgacgtcgcgccgtttattcagctgtgcggcttaccggtcgatgcgttcacccgcgagcagatcgccgcacaggcggtaaaacccgtctggccgctttacgatctgttgccggagcgcgaatgggaaagcgcgcgccaacagttagggctggactcttttgtctggctggttgaaaacgccgaactggcggagctgaacaaaacgggaacgctcacgctaacgctgaatatcgatcagccggagcaactttatggacgcgccttaacgctacacgacaacgccggcagcacgtatacattgcccgtcaacgacagtacgctcacgttaactcccctgcccattggcatttaccatctcaccctgcccaaagggcgatcgcagaaataccgcccggacacggactatgtggttatccgcgaaggggaaaacgcacttaccgttaatttcaccgccttgcaggacagcgccgcgtataacgagcagttgattttcctcggctacggtgacatgcccttcgcccgtttagccgtggatcatgaggccagacaattagttctggatatcacgaacgccacgccgcacagctacttcgcgaatacgttatacgccagcataacggtgttaaccgccagcggcgaaaaggtttttgaacgtaagatgaacggaataaactgcgccaccggaaaaattgtggtgccgtttagcgaccactaccacctttatctttatcatgccgagcctggccgcctgaaagcctcgccgggctatctgacattggtctcgtcgacgaaatatcagttactgcgtcttgatagcgaagggctttatcatttttcgctcaacaacgatcctgccgcagatctccaggctatgtttacccatcgcgcagatgctatccgcgcctgccctttattaatggcgcaaccttatgccgcttgcaaaaacgatctctggctgatgctctcccatattgaagagccgacccgtagcgcgttaatgcgcgacagcgttgatgtgctgccggcggataacagcgagccgggcgaaggcatcggtaaaggcgtgacgttgcagttacgcggacaaggcgacagaacgttttgccagcttgcttacgataatcggcaacagcgcatgacaatagaaacactggccgggcagcctcatccctactataccgcgacatacagcacgctcacggtaaaggaggagtccggcgaggttatctatagccgtcattatgatggcatcacccactattcagccgatagcgatacggttgttttgcaagcgggaatgtacattgagctcttccatgacgaaccttaccgttgcagcgccatcaatgaaacgaccgggcaaaacgtcaggctgaaaaaacacaaccgctggcgcgtggtgagcgatgggctggaggtcgactcaccggaacaaacggaagagaaaaatacctccgatgctgccgcattatatggcgataaattcagctggcagcttattggcaaggaagaaaatggttttgccagtatggaaatagacatccgtgcgcaacaatttatctttaccgcatacccaattgcgccgcatagcgacttcgcaacggaatatgcggcagtgacgatttataatacgcgcggtacggtggtttaccgtcagtcgataaaaggttcggtgcagcttggcggctatactgacgtctgcgggctggatgaggattatacgattgaggtctttcatgccgagggcgcagaccagtcggttatccgcaacccgctcaatggcgaaagctggccgcagccgcaacacgtgatctggcaggtcacggcgcggggattacagcgcctgaccacgaattaccccccccatcacagcgtcttcgggcgctgtgagattacgttgtcggatggcggctttgcctaa

SEQ ID NO: 379821 - DNA, 384 bp, Salmonella enterica
atgcgtacgtttagtggcaaacgtagtacgctggctctggctatcgccggtatcacagcaatgtcggggtggatcgttgttccgcaggcgcaagcctccggctttttcgacgactccacgttaacgggcggcatctattattggcagcgtgaacgcgatcgcaaagatgtgaccgacggcgacaaatataaaactaacctttctcatgcgacctggaacgctaacctggattttcagtctggttacgctgcggatatgttcggtctggatatcgcggcgtttaccgcgattgaaatggcagaaaacggcgacagcggtcatccaaacgaaattgccttctcgaaaaagaataaaaggctacgacgaagactattccggcgataa

SEQ ID NO: 379822 - DNA, 1530 bp, Salmonella enterica
atggacgatagagaaagaggcttagcatttttatttgcaattactttgcctccagtgatggtatggtttctagttgcaaaatttacctacggtattgatccatccacggctaaatacctgattccgtatctggttaagaatactttttcgctatggcctttatggtcagctttaattgcaggctggtttattggtgttggcggtctgatcgcttttatcatttatgataaatcacgcgtgtttaaaggcgaaagattcaaaaagatttatcgtggtacagagcttgttcgcgccagaacactcgctgataaaacacgcgaaagaggtgtcaaccagttaaccgtggctaatatccccatacctacatacgctgagaacttgcatttttcgattgccggtacaaccggtactggtaaaaccacaattttcaatgaactgttatttaagagcatcattagaggcggcaaaaatattgctttagatccaaatggggggttcttaaagaatttctatcgtcccggcgatgttattttaaacgcctatgataaacgcactgaaggctgggtgtttttcaatgaaattcgccgttcatatgattacgagcgcttagtgaactctattgttcaggaaagccctgatatggctactgaagaatggttcggctatggccgtcttatttttagtgaagtttcgaaaaaacttcacagcctatacagcacagtaactatggaagaagttattcactgggcctgtaacgttgaccagaaaaaattaaaagaatttttaatggggacgcctgccgaagctattttttccgggtctgaaaaagcagttggaagcgcgcgatttgttctcagtaagaatcttgccccacatttgaaaatgccggaaggtaatttttccctgcgtgactggcttgatgatggaaagccgggaaccctgtttatcacctggcaggaagaaatgaaaaggtcacttaatccgctaatttcctgctggctggattcgattttttctatcgtgctgggtatgggtgaaaaagaaagccgcattaatgtatttattgacgagctggaatcactccagtttctgccaaacctcaacgatgcactgaccaaagggcgtaaaagcggtctgtgtgtttatgctggctatcaaacctattctcagctggttaaggtttatggtcgggatatggctcagaccattctggctaacatgcgttctaacatcgtgctgggcggcagccgtctcggtgatgaaacgttggatcaaatgtcgcgctcactcggtgagatagaaggcgaagttgagcgtaaagaatccgatcctcagaagccctggattgtccgtaaacgccgcgacgttaaagttgttcgtgccgtaacgcctaccgaaatatcaatgttgccaaacctcaccggctatctggcgttgcctggtgatatgcccgtcgctaagttcaaggctaaacacgttaaataccatcgcaaaaaccctgttcctggcattgaactgagggagatctga

SEQ ID NO: 379823 - DNA, 3237 bp, Salmonella enterica
atgcttgatataaccacgattacccgccagaacgtcactagcgttgtgggctactactctgatgcaaaggatgattactacagtaaggattcatcattcacgtcctggcagggaaccggagctgaagccctcggcttgtccggggacgttgaatcagcccggtttaaagagctgcttgtcggtgagatagataccttcacgcatatgcagcgacacgtgggtgatgccaaaaaagagcgtctgggctacgacctgacgttttcagcgcctaaaggggtatccatgcaggcgctgatacacggcgataaaaccattatcgaggctcatgaaaaagctgttgccgctgctgtgcgtgaagctgaaaaactcgcgcaggcccggacgactcgccaggggaaatcagtaacccagaataccaataaccttgtcgtcgctactttccgccacgaaacgtccagggcgctagatcctgatttgcacacacacgcttttgtcatgaacatgacccagcgcgaggacggccagtggcgcgcgctcaaaaatgatgagctgatgcgtaacaaaatgcacctgggcgatgtttacaaacaggagctggcgttggagttgaccaaagccggttatgagctgcgttacaacagcaaaaataacacgttcgatatggcccatttttcagatgaacagattcgcgctttttcccgccggtcggagcaaattgaaaagggactcgctgcaatgggtctgacgcgggaaaccgccgatgctcagacgaaaagccgcgtctcgatggctacgcgtgaaaagaaaacagagcattcccgtgaagaaattcaccaggaatgggccagccgcgccaaaacgctcggcattgattttgataaccgtgaatggcagggacacggtaaacctctggaggctgatatagcgcgcaacatggccccggattttaccagcccggaggttaaagctgaccgggctatccagtttgcagttaagtcgctgtcagagcgcgatgccagctttgaacgccagaagctgattcaaatcgctaataagcaggtgctgggccatgccacaatagccgatgttgaaaaagcgtacctgaaggcggtacagaagggcgccatcatcgagggcgaagcccggtatcaatcaactctgaaggtcggtgcttcagttatggccgaaactctgacgcgcaaagagtggatcgactcgctgacgaatagcgggatgcgtgcggataaagcccgttttgcggtagatgatggtattaaaaacggcaggcttaaaaagaccagccaccgcgtcactaccgtggagggtattcgccttgagcgttccattctgactatcgaatcacgcggccgggggcagatgccgcgacagctgaccgcagagattgcaggccagctgcttgccgggaaaaccctcaagaaggagcagatgcgcgcggttacagaaattgtgacgagcaaagatcggtttgtggccgcacatggttacgccggtaccggtaaaagctatatgacgatggccgctaaagagctgctggagtcacaagggctgaaggtcacggcgctggccccctatgggacacagaaaaaagcgcttgaagatgatggattaccggcccgcaccgttgccgctttcctcaaagcgaaggataaaaagctggatgaaaaatcagtcgtattcattgatgaagccggggttatacccgcccgacagatgaaacagctgatggaggtaatcgagaagcataacgctcgcgcggtattcctgggggatacgtcacagacgaaagcggtagaagccggtaagccttttgagcagctgattaaagcaggtatgcagaccagctacatgaaagacattcagcgacagaagaatgaagttttgcttgaggcggttaagtatgccgctgaaggtaatgccgcgcgcgccctgaaaaatatcaccggcgtgaacgaactgaaggaagaagcgccccgactcgctcaacttgccgatcgctacctgtctctgtcctcagaacaacaggatgccaccctgataatctctggtacgaacgcctcacgcaaaaccctcaatgactacatccggggcaatctggggcttgccggaaccggcgaaacgttcacgctacttgaccgcgtggattcgacacaggcggaacgccgcgacagccgttatttcagtaaagggcaaatcattatccccgaacaggattacaaaaatggtatgaagcggggcgagtcttaccaggttcttgataccgggccgggcaacaaattgacggttgaaagcatcagcggtgagcagatcgctttcagcccgcgtacacacaccaagctgtctgtataccaggcagtcagcgccgaactggcgccgggcgataaggttatggtaacgcgtaacgataaaacgctggacgttgccaacggcgaccgcttcacggtgaaaaccgtggagggtgaaaaactgacgcttgaggacaaaaaagggcgcacggttgagctggataaaaaacaggcttcttatctttcctatgcttatgcaaccaccgtccacaaatcccaggggcttacctgtgatcgcgtgttgttcaacatagataccaaatcgcttaccacttctaaggacgttttttatgttggtatttcgcgtgcgcgtcatgaggtggaaatttttaccgacgataaaaaatctttggcatcgagcgtgagccgcgacagcccgaaaaccacggccgcagaaattgaccgtttctttgggcttgaggccaggtttaaggatattggccgcgataccagtttagaaacccgatcagctgaaaaaggtctgccagaagccacgggggaaagcatggcgtttaaccagaaacccgatgaacataacatgacaaccggcactgattatcagccggtgagcaacgcagaggacgcctttcatcttaagcagaaccctatggatgattccgttggcctgcggcgtcatgaagcacagcaaaatgatgcagagctggcccatgattatgctgctgccgacgatcagcagtggagcgcgcaggagtatgccgattacgagcattatgccgaagcatccgactacgactttgacagcagcatttacgacgattacgccatgccgcagacgtctcaggcggaacagagccataccggaaaagaacacacccatgagcatgagcatgaagaagggggccatgaaatctga

SEQ ID NO: 379824 - DNA, 1578 bp, Salmonella enterica; identical to SEQ ID NO: 62825

SEQ ID NO: 379825 - DNA, 1797 bp, Salmonella enterica; identical to SEQ ID NO: 120698

SEQ ID NO: 379826 - DNA, 885 bp, Salmonella enterica
atgaaaaaactacttctttcagcagtcgttttgtcagtcctgggaggcgcggccactaacgttatggcgcttgaggttggccgcaattctccttatgactatcgcattaaaagcgttgtttataaccctgttaatgtggtcaaaattgacgctgtcgccggtgtggctacccacattgttgtcgcgcctgacgaaacctatatcactcatgcttttggcgattctgaaagctggacgtttgcgcacaaaatgaaccatttttttgtgaagccgaaacaggccatgagtgataccaacctggtgatcgtcaccgataagcgcacctataacatcgtcctccatttcatcggtgaagaaacgaagaaaaatgcagacggtacggtatcaaaatcctttattgaaacgccgtgggctgtgcgccatgccgttcttcagctgacctatgaatatccgtttgagcagcaggaaaaagccaaaagcgcggctgataaaaaacgcattacgcagaagctgaagcagacggcttttgcgggggcgaagaactatcagtacgtaatgagcgaacagcctgaaatgcgcagcatccagccggttcacgtctgggataactaccgctttacccggtttgagtttccggccaatgcggagttaccgcaggtctacatgatctcggccagtggcaaagaaacgctgcctaactctcatgttgtgggtgagaaccgcaacatcatcgaggtggaaaccgtcgctaaagagtggcgtattcgtctgggcgataaagtcgttggcgttcgtaataataatttcgcgccgggcgccggtgcggtagcaaccggtacggcttccccggatgtgcgcagggttcaaattggggaggataactga

SEQ ID NO: 379827 - DNA, 699 bp, Salmonella enterica
atgaaagctaataaaaaaacagggcttacacgtgaagccattaaagagttcaacgaaagccgtaaagggcttgaagttgatctgatggatgaagtgctgaagtcccggcgtaccgcctggatggttgccaccggttcagcggtggtaactgtttttgcactctctttagttggttacgtagtgcataagtacagccagccaatccccgcacatctgctaacgctcaacgaggccactcacgaagtacagcaggtcaagctgacccgcgaccagacctcttatggtgacgaaattgataagttctggctgacacaatatgtcattcaccgtgagagctatgacttctattcagttcaggtcgactatacggccgttggcttaatgtccacgccgaacgtggcagagtcttaccagagcaagttcaagggccgcaatggtcttgataaggttctgggcgacagtgaaacgacccgcgtgaagattaactctgtgatcctcgataaaccgcacggcgtagcaacaatacgctttactacggttcgccgcgtgcgcagcaatcccgttgatgatcagccgcagcgctggattgccattatggggtatgaatataaatcgctggcgatgaatgctgagcagcgttatgtcaacccgctgggtttccgcgtgacgagttatcgcgtcaacccggaagttaactga

SEQ ID NO: 379828 - DNA, 1041 bp, Salmonella enterica
atggcattcaccctggtacaagacattttcgcaaaagtagacggggcgattacgtcaatggtgagcgccaacgttgccaccattatctctgacgttacgcctctggtggcaacctgcctgaccataaagctgatgatgcagggcttgtactcgatgtttaatccgggggcaggcgacagcctaagctcgctgattaaagagtatctatctatagcccttatcctgagctttgcgacggcaggcggctggtttcagcaggatttggttaatgtggcgcttcacatgccagatgattttgctggcatcttatcttcccctgataaagtcgaagccagcggcgtaccggcgatcattgatagcggtattgaaaaaggcgtcaggattgtaaatacagcgtgggatgcggcagatgtattttcgtcaagcggtctggccgcatatgccattggcggaattatgttggttgctaccgttgtgctgggtggcctcggtgcgggctttgtgatcatggcgaaaatccttcttgccgttacgctttgtttcggcccgattgccattttctgcctgctgtgggggccaacaaaaaacatcttcgcgcgctggcttggatcggtaatcaactacgggctggtcgttgtcgtgctggctctcgtgtttggtttcatcatgcagatgttcgacaaccttctgtcctcgatgaactccgatgcggcctattcatctatcactggctctatggccgcgctgctgctgaccattatctctatctttgttctgtttcagatcccgcaggtcgcccagagctggggtagcggtatcagtgccggtgtcgcagatgctgcacgttctaccggttcttcaatgcaggcgcttggcaacatgggtagtcatggcatgtttggcggtaatgcgttccggggcggtaataccggcggcggccagcaatcggcaggtggaggaagtggcagcaacagcggaggaagcagtggttctaatttaagtggtaaggcaaggggcagtcgcgggaagaaggctgcataa

SEQ ID NO: 379829 - DNA, 228 bp, Salmonella enterica; identical to SEQ ID NO: 167500

SEQ ID NO: 379830 - DNA, 714 bp, Salmonella enterica
atgaaaaaatcacttacggcagtgctgctgaccaccggcttgattcttgggggcgcgcaaagcgcctccgctggcatcatcgtatccaaccccaccgagctgattaaacagggtgaacagcttgaacaaatggctcaacagctggagcagcttaaaagccagctggagacgcagaaaaatatgtatgagtcgatggctaaaacaaccaacctgggcgatctgctggggacgtcaaccaatacgctggcgaataacctgcctgacaactggaaagaggtgtacagcgacgcgatgaactccagttcgtcggtcacgccttctgttaacagcatgatgggccagtttaatgctgaggttgacgacatgacgcccagcgaagcaatcgcctatatgaacaaaaagctggcggaaaaaggtgcttacgaccgtgtgatggccgaaaaagcctacaacaaccagatgcaagagctgagcgatatgcaggcgctgacggagcagattaaatcgacgccagacctgaaatccattgccgacctgcaagcacgtatccagacgtcacaaggcgctatacagggtgagcaggcgaagctgaatttgatgaatatgttacagcaatcgcaggacaaacttttgcgcgcacagaaggatcgtgcgacccgtaattttgtttttggaaccggtggggacgttaccgcgtcaccttcaattaactga

SEQ ID NO: 379831 - DNA, 2601 bp, Salmonella enterica
atgagagctgccaccgctacgaagccaaaaaaaattgatgcctaccgtaaggagccatcagtaaataaaaagtatttgccctattcttatcacctcaatgattacgtgatttcgatggaaaacggcgatctgatggcttttttcaagctggatggccgcacacatgactgcgcatcagatcgggaactggtcacctggcataaagaccttaatacgctggtcaagagcttcggaacagaccatgtagagctgtggacgcatgaatatcaccatgaggctaaagagtacccggatggtgagtatgaccattttttccctgcttatattgatcaatataaccgtaagttgcacggtgattccaagcagctgattaatgacctttatctgaccgttatttacaaacaggtaggggataaaacacagaagtttctggcgaaatttgaaaagccgactcgtgacgaaattcagcaaatgcagaatgaggcgcttgaaggtctggaagatatttctgaacaaatcctggaagcaatgaagccgtatggcattcagcagttgggtatctattatcgtgacaaacgcggtgttgaaattcctgcgcctgataaaaaagaacgtgaagaacttgctgaagtcgatgaatcagacatttttgacgaagccattgttatcgaacgcaacgagcctgaaccttcgcaggctcacgcttattcaaaagcgctggagttcctttatttcctcgcaaatatggaatgggccatcgtgcctgtttgccgtgatcgtatccgtgagtacatcatggacaaccgccctgttagctccctgtggggggatgttgtccagatcagaacggtagatcacaacttctataccaccggcattgaatttcgtgaatacgaagaagatacagagccaggccagcttaacatgcttaaagaagccgattttgaataccttctgacgcagagtttttcttgcctctctgaatcttcagctaaaacgtttctgacgcatcaggaaaaatctttgcaggaaacgcgcgaccgtgcgcaaagccagctggcacagcttggtaccgcgctcgatatgctgacgtccagagagttcgtgatgggctaccatcatggaaccgtgcatgtctgggataatgaccaaaacgcggtacagcgcaaagcgcgtcgtgtgaaggttatgctaaccggctgtggcgtggttggtgggactctcagcctggcctctgaggctgcatattatgcgagactgcctggcaaccagaaatgggcgccgcgcccggttccgataaactcatggaacttcctgcacttcagcccgttccacaattttatgcgtggcaagcctgacaataacccgtgggggccagcgctgaccatgttccgcacgatcagcggtacgccactctattttaatttccatgtgaccccgcttgaagaactttcctacggtaaacgcccactgggccatgcgttaataacgggtatgtcgggggaaggtaaaaccacgctgcttaacttcctgctggcgcagtcaatgaagtacaacccgcgactttttgtttatgaccgtgaccgcggtatggagccgttcattcgaagcgttggtggctactataaagttctgcaacagggtatgccgtccgggtttgccccgcttcagattgaaccgaccaaacgcaatattgccctcattaaaaacctgttccgcatttgtgtggaaaccaccaataacgggcctatcagcgcaacgatggctaccgaactggctgaaggcgttgatgcggttatgggggaaggctcacttattccacgcgaggcgcgcaccgttacgatcctggacgggtacgtgaatgaagttgtggaaaatggcgtatcactgaaagggctgctgcgcgaatggacgcgcgaaggccagtatggctggctgtttgacaatgataaagacagcctggatctcagcgcgaatgatatttttggcttcgatttatccgagtttatcgcagccaaagaggaagtatccagcccggcccgtactccgctcatgatgtaccttctgtaccgggtacgtgactccatcgacggcaaacgccgcgtcattcagtgctttgacgagttccacgcctaccttgacgatccggttatcgagcgtgaagttaagcgtggtatcaaaactgaccgtaagaaagacgctatctatgtgtttgccacgcaggagccgaacgatgcgctgtccagccgtattggccgcacgatcatgtcgcagaccgtcacaaaaatctgcctgcgcgatccggaagctatccgagaggattatgccttccttactgatgctgaatacgacgcgctgatgtcgattaccgaacactccagacagttcctggttaaacaagggcaacagtctgcgattgcttctttcaatctctaccctcgcaacagcgacgatattgatgcagatattaagacaatggacaacgtacttagcgtgttgtccggtgaaccacaaaacgccgaaattgcgcatgagctggttgaacggctcggtaatgaccctgaagtatggctcaaagaatactggcgcctgacggcttaa

SEQ ID NO: 379832 - DNA, 318 bp, Salmonella enterica; identical to SEQ ID NO: 16851

SEQ ID NO: 379833 - DNA, 294 bp, Salmonella enterica
atgaccacgttgtttaagaagtatggccctgcggtagttatgggcgttttgtccattgccctgccgcaaattgcgctggccgctggcaccgatactggtgaatcaaccgctacatcaatccagacgtggttgagcacatggattccaattggttgtgctattgcgatcatggttagttgctttatgtggatgcttcacgtaatcccagccagctttattcctcgtatcgtaatctctctgattggtattggttctgcatcatatctggtttccctgacgggcgtaggaagctga

SEQ ID NO: 379834 - DNA, 282 bp, Salmonella enterica
atggaacgtttgtatcttgtattgcaatcacagatcctggagttatttgaagcaggaaaagtgaaggaggtaacgatagaacgggtttcattaaagaagtggtatcccgtttttcagatagacgatgaacagctgggccagatcgcatgttccattcgggttaacaaagagcatgagctacgaacctgggctgatttaaggctactggcagagtttttgaaagataagtgtggcgttgaagaatgccggttaaatctgcaatcaacagaagatagtgagtaa

SEQ ID NO: 379835 - DNA, 735 bp, Salmonella enterica
atgagtaaacatccaaaactcctggttctcgctctggcctgccttgcttgtgctggccgtgccagtgctgcgcctgcctccgatgaagttgccaggcttgcgcagagatgtgcgcctgatgtttcacccttaacgatggcgtacatcgtcggccatgagtcctcaaatggaccgtacaggatcaatattaacggtagtattcagttaaaacagcaaccgcgtactgaagctgaggccgtcagcgttgcgaaagttctgctgaaggataataaaagttttgatatgggccttgcacaaattaactcaaataatttagtgggcctgggtctttcggttgacgatattttcaaaccctgcatcaacctgcgggcgagccagaccattcttaaagcctgttatgatagcgccctgaaatcctacccagccgggcaggttgcgctgagacacgcgctttcctgctacaacaccggctcactcacaaacgggatttctaacgggtatgtcacgaaagttatcaacgtggcgcgtcaatcaactgatttgaaaatccctacgctgctacctgacggccagaccagtgaggacagcaccgcgaatgagcctcagcaggcaaaaagtacggcgccgcagtatgacggtgaacaagatgtttttggttctggtgatggcgatgccttcagccgaaataatacggatgcctttttaaccagacaggaaacagcgaagggggaatga

SEQ ID NO: 379836 - DNA, 306 bp, Salmonella enterica; identical to SEQ ID NO: 97181

SEQ ID NO: 379837 - DNA, 378 bp, Salmonella enterica
atgggcgaacttattgattttgcggaaaggcaaaaaagcagaaggaagaaaaaagcatcttccattccgcccatttttagaaaatttcgtgtccatgcgatcaggttactcgccagcatcatcaaatccggctcttattcagttgcttatatcgttaaaaaaattacaggaaagttaatcaagttttacacaattttaacgattttcatttttgttgtcgaatatattgcaggcgatataggttacaaatccatttataacgcagcgttattattaatattacttacctttatcaacattctggcgagtgtatatctgaacaaactgttaaggacaaaaaatgaagaaactcttaatacctctgatagcagctggtag

SEQ ID NO: 379838 - DNA, 315 bp, Salmonella enterica
atgaagaaactcttaatacctctgatagcagctggtagtctgctttatcttcctgccagccatgctgaagatccctgcaaagttattatgtgcatggcgggcaagctcaccggcgatagcggcggaagcgagtgtaacagtgctgaagctgctttcttcaatatcgttaaaaagaacaagcacggctttttacccaaccacacgaaggatgctaggaaggcttttcttaatgaatgcccggataatggcgaaggtggaagtaaccagtcgatgataagccagatcataagtaaatacgggaaagttcgcttatag

SEQ ID NO: 379839 - DNA, 312 bp, Salmonella enterica; identical to SEQ ID NO: 97178

SEQ ID NO: 379840 - DNA, 861 bp, Salmonella enterica; identical to SEQ ID NO: 5314

SEQ ID NO: 379841 - DNA, 150 bp, Salmonella enterica; identical to SEQ ID NO: 371933

SEQ ID NO: 379842 - DNA, 225 bp, Salmonella enterica
gtgacgttcccgtcaaacgatgaggcacggatcagcgacgtcaagaacgcgctggcccgcggggaaatccccgaacagaaaaaaatcgaaagagtcctgcgtgatgtcggactctcccgtacccaggccaaagcattcatggccgggggctatggcgcactgtccctgcgcgacgctgaggatgtgggctctgcactgaatgtactgaaaaatctgaacttctaa

SEQ ID NO: 379843 - DNA, 435 bp, Salmonella enterica; identical to SEQ ID NO: 40595

SEQ ID NO: 379844 - DNA, 393 bp, Salmonella enterica
atgaagctgagatataagctggttattgttgccttctttgttaccgtcattggttccttcatctggtctaccgggcattactacagcaaatatcagcacgaaaaggagcgtgctgatgaggctgtacgaaatgctgaatcagcaactgccattacccgtaacgttctgcaatcactgcaaatcatcaatacagttatagaggctaaccagcatgcaaaacagcagatcgcactggagtcacagagaacccaggaagatatcaaagtggctgttgcggatgatgattgtgcttcacgtcctgtgcctgctgccgctgctgaccggttgcggaagtacgcggacggtttacgtgagcgatccggtggcaccgctgccagccagcctgacttctga

SEQ ID NO: 379845 - DNA, 477 bp, Salmonella enterica
atgcaggcactaaattcccagcgtaaagctttccttgatatggtggcatggtcagaaggaacggataacgggcgacaaccgacacgtaaccacggttatgatgttattgttggtggcgaactgttcactgattactccgatcaccctcgcaaacttgtcacgctaaagcccaaactcaaatcaacagccgccggacgttaccagcttctttcacgctggtgggatgcttaccgtaaacagcttggcctgaaagatttttctccagaaagccaggacgctgtagctctgcagcagattaaagagcgtggcgctttaccgatgattgactgcggcaatattcgtcaggcaatcgaccgttgcagcaatatctgggcgtcgttacctggtgcaggttacggtcagtatgaacataaaatcggcgacctgattgcccgatttaaagaggctggtggggaagtaaatgaagctgagatataa

SEQ ID NO: 379846 - DNA, 354 bp, Salmonella enterica
atgaaaatgcataacgatcctcattcctggtctgacttacttgaattgttacagagctggtggcgtggagacacaccgctgggcgcagtaattatgtcgatcgttatggctggcttgcgcattgcctattttggcggtggtggtggctggaagcgaaaaacgctcgagattttgctctgtggcgctctgactctgactctgactctgacttttgcatccgctcttgagtatgtcggatggcctaaatctctttctgttgccattggtggcggcgttgggctgatcggggtcgatgctattcgtggggctgcaatgcgagtaatcggtaacaaatttggtagctcgaaggagtaa

SEQ ID NO: 379847 - DNA, 243 bp, Salmonella enterica
atggtggagcgttgttctgtttgtgagcagtcattaagtcattcacgagaagttgaacaagatggcgttgaatataaatcttgcccaaaatgttctgctgatgccggagtgcacgttttttataaaacaatagactttggttatagggatatgggagacggcagacatatcgttcagtcatggtgtccggcttgccgttctggtgaaaaaccttttataccaccagcatttaaatgttgttaa

SEQ ID NO: 379848 - DNA, 285 bp, Salmonella enterica
atgtcgtatgaccaaacgacttcaccactattgtttaaaatctggactttcatttcatacacctgctttaacatgagtgcctggcttcagacttgcaaaggcatattcaggatttgcgaaattccgacgttcacagcccacaagaaggcaagcactaataaggaacacctgaactacttcatttcccttaaagcgccgatgggtgatggcgcttttctttgcattaaccagcatcattcccccttcgtgacgttcatttttactggctttatcacggctgcgtag

SEQ ID NO: 379849 - DNA, 246 bp, Salmonella enterica; identical to SEQ ID NO: 234608

SEQ ID NO: 379850 - DNA, 474 bp, Salmonella enterica
atgtcacagcaaacaattttggacgtgtgttgcggctcccgtatgttctggttcaacaaactcgatacccgcgcagtgttcgcagatattcgggcagaagagcacacattgtgtgacggtcgccgtctggttatcagtcctgacctcattgctgattttcgtgcgctaccgttcgctgatgcctcgtttccggtcgtggtgtttgatccgcctcacctggaacgtatcggccaaacggcctggatgggcaagaagtacgggagactcaacaaaaaaacatggcgttctgacctccgtgccgggttcaaagaggcgtttcgggtactgcggccacacggcgtactcatatttaaatggaacgaaacgcaaatccctgtgagccagattctggcgctgacggacgcaaaaccaattattggccagcgaaccgggaagaacgacaaaacccactggattatttttgtgaagggctaa

SEQ ID NO: 379851 - DNA, 159 bp, Salmonella enterica
atgagacgtattgagatcgtactgggagagctggaacggctgacgcgcgggctatgccttgccgatttggcgcaggagacggcgtttacggcggaggcgataggtttcaatcttgggctggcgcgtaactccgtcagcaaagatctcaatcagttatag

SEQ ID NO: 379852 - DNA, 858 bp, Salmonella enterica; identical to SEQ ID NO: 370989

SEQ ID NO: 379853 - DNA, 438 bp, Salmonella enterica
atgaaggtttattttagccaaatatacctcgagggtgagaatactacttttccaatcacaaatacgataatacacttattaagtattcagcttgataaacttaataaaaacttaaatcattatgagaaattatttaaggctgatgatttttcaattatttttgtgatatcagcaacgagaaaaagtgagactttgaatgtaaaggggccaacaacgaaatcaaaggataaggaaacgtatttttctttatttataccatatcgggagtttagtgtttttaccattcaaatatcttatgttcttgataatatagctgaaggaattatttttgtccttgataagtataaaacagactcttcaggtgtgaaagaggcgattagtgaagtaaaagcattaattgaaagtgatcctgaaaaatatcagaagtggactaagtga

SEQ ID NO: 379854 - DNA, 129 bp, Salmonella enterica
atggagagggtattcgtactcccggtgaatatactgtttattatcaacatcaattgcctaccggagattatactaaatccgatgattatcattttaaaaatgcaaatgaaggtttatacaatgcaatga

SEQ ID NO: 379855 - DNA, 339 bp, Salmonella enterica
atggctactaagtttagcggtatttggcaactagctgaaaattgggaaagtatcccctatcccggtcgtttttatacgaagggggaagttacatcaggaagtatagaacaaaaggagtttgtcctttttctaagcaaagaagttgaagaatatgtaatagaagatggcaggtcaattcctgttcaatttgctgggcaaggctataaatcatggttagattcggcaacggtacgaggaataattgaaagtgaattcgaattttcctcagagaccaatgtccaagatgttataaaagcaattttttattatttggacaatgatgcctttttacgtgagtaa

SEQ ID NO: 379856 - DNA, 258 bp, Salmonella enterica; identical to SEQ ID NO: 372177

SEQ ID NO: 379857 - DNA, 267 bp, Salmonella enterica
atgaaaatagaaatattcagaattgaaggacgagtttgtttactcatatccccaatcagtatctctatcgcggagcgccttgctactgccatggaaaacagcgaagtcgttgcagctcttggtgcttatctcacatccgttggcgaggcaccagatggagaactcgttgggctctatctctactttgatcacctcgataccactgcgttcataacgatcaatcatctgattgaagcggataagccagtcccgataatcgtcaggtag

SEQ ID NO: 379858 - DNA, 462 bp, Salmonella enterica
atgactgagcgccaaatccggctgatttgtcagcagtgtatggagcgatgccgggcggctgagacatggccgccggacctggctgagtttattgcgctggtttctgaaagcggagctaatgcgtttggtctcacagccgatgcggtgctggcggaatatcgtcactggcgtaacgagtcctggcgctactccggcagtgataaatatccgtggcctcagccggttctgtatcacatctgcaccgagatgcgcagaacgggcgttgagcaccagatgacggaaggcgaactgaaacgacttgcagaacggttactggcgaagtggacaaaacacgtcggtaatggtttcagcataccgccggtacgccgtcaacttgcagcgccgcgccatccggcagggccaaccccggcacaactgatgatggaagaattcagacggcgtaaggcggcgggaaggctttaa

SEQ ID NO: 379859 - DNA, 396 bp, Salmonella enterica
atgagcagaaattacacaccggcgcagaaagctgaaatacagaagcgcctgacggaactggtacgaacacatggtcggatgacgtttggagagctgcggaagataacagggttaaccatttttacagcccgccactacctggaaaaggcggaaagttgtggggatctgtatcaggccgggagaagcggtatttttccttcggaacaggctttcctgctttggaagcagaaacgtgaagatgccaggattacccgctttctgaaaacgccggaaggtgtcgtgagttcctacgaccggaccagaaacgttatctgtacggagtgccggaacagcgtgacgatgcaaagggtactggcattttatcggggacattaccgggaggtgaaatctgcatga

SEQ ID NO: 379860 - DNA, 165 bp, Salmonella enterica; identical to SEQ ID NO: 371553

SEQ ID NO: 379861 - DNA, 429 bp, Salmonella enterica
atggcatttgaaaagacaatcccactcaatgaatttatcactcttcaaagaggtttcgatttacctcaagataaaagagttatgggcgatattccagtcgtagcttcaacgggagttgttggttaccacaatgaagagaaagttctagctccaggtgttgttatcgggcgaagtggtagcattggtggtggtcagtatataacaactaatttttggcctttaaacacaacattgtgggttaaggattttaaggggcaccaccctagatttgtttattatttacttagaagtattgattttagccaatttaatgttggctcaggtgtgcccacattaaatagaaatcaccttagtggaatactcgtagcggataccagctatagttatgaaaaagaagcttctgatattattggcattttagatgcctaa

SEQ ID NO: 379862 - DNA, 468 bp, Salmonella enterica
atgctactggcgttactggctggccgtaaacaggccagacgtgcagatctgttgccgaaatggcagacttccttgcaccagcactctaaattcgcctcccctagctcggttaaaactacgctctatgcccggctttataatctggtcgaacgaagactggttgcccgtaaaggaatgagctacaaaattaccgatgcagtccgaaaatggctcaacaaagcgctacctgaacgtcgtaccgatccgcgcaaagagctgcttgacgccgtaaaacgctataacgagcagccaaaagaggtgttgcgcgaacagctctctaccatgaacccgtacaaatttgaacatctggtgggccagttgctggaagcgatgggttatgaacaggtggaagtcacaaagcctctggtgacaaaggcgtgtatgtcatcggtaaagtgcaggtcggcatcaccaccattaccgaagtag

SEQ ID NO: 379863 - DNA, 1005 bp, Salmonella enterica; identical to SEQ ID NO: 372111

SEQ ID NO: 379864 - DNA, 501 bp, Salmonella enterica
atgaaagaagctattcaggctatccagcaagccattaactgtctgacaaaagacgtaactggctggcgcgatctggaatacagctccagccataaccagcaactggtaatgaatcatccgcagcacggcaagatccccttagcccagctcagcgacggcctgcgtaatgcggttgcgatggtagcggatatcgcgtttcgctgtgtcaaactcaacccccatttacgcgatgaagccgccttaaaaacacaggggattgtgctgatcgatgaagtcgatatgttcctgcacccagcctggcagcagcaaattatccagtctttgcgcagcgcatttccactaatccagtttattgtcactacccatagcccgcaggttatcagcacggtaaaacgtgagtctgttcgcctacttgaacaggacgagaaaggtaatggtctggcgtcaataccaccggggcgacctacggcgagccaagtaatgatgtactgcacagcgtga

SEQ ID NO: 379865 - DNA, 141 bp, Salmonella enterica
atgccggaggcggtgggaatcggcgaactgtggatggcgaaaaaactctatccggaaaaattccacgatattgacatgcaaaaggccgctaacgactggtatcaacgtttttaccgtactgactatcagggcgtacagtga

SEQ ID NO: 379866 - DNA, 702 bp, Salmonella enterica
atgcgaatactggctgcggggagcttgcgcgtcgtctggccgcagctaatggcggcatttcaggcggatgcggtatgtgatttcggtccggcggggctgttacgtgaacgcatcgaagcgtgcgacttttttgcttcggcgaacctggcgcatccgcaggcgctgctggaaagcgggcgggcgctgcgggtcgcgccttttacgacgaaccgtttgtgcctgagcgtgcgggcacaggcgatgcgtgaaggcgaggactggctgtcgctattaacccggcgggatctgcggatcggcacctcaacagcaggttgcgatccttccggcgattatacgcagcagcttttttcgcggatgggcaaggagggcgaagcggtccgaaaacgcgcggtagcgctggttggcggcaggcagactttgccgttaccggcgggccggctggctgcggaatggctcatcaatcatgattacaccgatatctttatcggctatgccagctatgctcccaggctacggcaggttaattcgctgcgagtggttgatatcccggaaccttataatcccgtggctgaatatggctttgcctgcctgagcgagcagggaaaaacgcttgccgactttttactgtcagcacgggcgaggttgattctcatgcaacatgggtttagtgaagcgccgaatatgacacactcgcagaactga

SEQ ID NO: 379867 - DNA, 666 bp, Salmonella enterica
atgatttatggtgaaacctatgtcaactctgggcttgctgccattatctttgcgaatatgcctgtggccgttttgatagcatcggttttgtttctaaatgaaaaagcgaaactaatgcagatcgcgggcttaactatcgcaatcactgcattgacggggatacttcttgaagaaacgaatacaagtacagagagtcactggcagggtatcactgcgcttatttctgctgtgttaatccatgccataatatatacacaatgtaagaaaagaagttgtactgtctctgttatcacatttaatgcgctcccgtgccttttagctgggttgatactttctgcgacaggatggttttttgaaagaccacaagtatcaaccttctcagtacactcaatattagctaccctgtatctcggggcttttgccggagtttttggtatcctgtgctactttgcgcttcagcaaaaggctaatgccttccaggcttcgcttgtatttcttatctttccgctgattgcggtaagtctggaagactatatttatggatatgctatttcaacacactcaatgctgcttattataccattagttatcgggatatttcttactcttgtcgccagaaatatccctgtaaccagcagatgccgggataactcatcacagaaataa

SEQ ID NO: 379868 - DNA, 126 bp, Salmonella enterica
atgatgatgatgatgcatgaaaaatcaaaaatgcgccaaatcccgcgccgctgccgtcccgtggcagaccgccccgccgggagtacctttttaaaatgcgaacaattatcaacaactaccacttaa

SEQ ID NO: 379869 - DNA, 519 bp, Salmonella enterica
atgccaacaccgtgttacatctcaattacggggcaaacccagggcaatatcaccgctggtgcattcaccgcagattctgtcggcaatatctacgtgcagggtcacgaggatgaaatgctggtacaggaattcctgcataacgtgaccgtacccaccgatccacagtccgggcagccgagcggccagcgttcgcacaagccgttcatttttaccgtggcgctgaacaaagccgtaccgctgctgtacaacgcgctggcgtccggtgaaatgctgccgaaaaccgaactgcactggtggcgtacttccgttgaaggcaagcaggagcattacttcaccacccgcctgacggactcaacgattgtggatatgaaactgcatatgccgcactgtcaggacccggcaaagcgcgaattcacgcagttgctcgaagtctcgctggcctaccgcaaaatcgagtgggaacacgtcaaatccggcacctctggcgcggatgactggcgcgcgccgctggaagcgtaa

SEQ ID NO: 379870 - DNA, 2115 bp, Salmonella enterica
atgtcaacaggattacgtttcacactggaggtggacggcctgccaccggatgcgctggtcgtggagtcctttcacctgagccagtccctttccacgttattttccctcgatatctcgctggtcagtcagcaacttcacaacattgagtttgcccaggtactggaaaaaccggcgcacctgaaaatctggcagggcacggagatacagcgccgggtgaacggcatagtgacctggtttgagcagggggaaaacgacggacaccagatgctgtacagcatgaaagttcgtccgccggtgtggcgcgccgcgctgcggcagaactcgcgtattttccagaatgaagacataaaaagcattctcgggacgatactgcaggaaaacggcgtgacggactggagcccgctgttcagtgaggcgcatccggcgcgggagttctgcgtgcagtacagcgaaacggattacgactttctggcgcggatggcggcggaggaaggtattttcttttacgaggaacatgcgcagaccagcgacgaccagagcctggtgctgtgcgacacggtacgttttctgccggaagcctttgaaatcccctggaacccgaacacccgtaccgaggtgagcacgccgtgcgtcagccagttccgccacagcgcgcaaatccgcccctcttccgtcatcggcaaggactacaccttcaaacgccccggctgggcgggccgctttgagcaccagggcgaacatcaggattaccagcgcacgcagtatgaggtctttgattatccggggcgcttcaaggacggccacggtcagaacttcgcccgctggcagatggaaggctggcgtaataatgccgaagtggcgcaggggaaaagccgttcgccggcgatatggccgggacggcgtattcagctgacggaacacccgcaggcgagcctgaaccgggaatggcaggtggtgagcagcgatttacacggcagccagccgcaggcggcggcggggcgctcaggttcagggacaacgctggacaatcattttacggtcatcccggcagacagaacatggcggccacgcccgctgcccaaaccatcagtggacggcccgcagtcggcggtggtcaccggcccggaaggggaagaaatcttctgcgacgaacatggccgtgtacgggtgaaatttaactgggaccggtataacccggcgaaccaggacagctcgtgctggatacgggtggtacaggcgtgggcggggccggggttcggcaacctggcgataccgcgcgtggggcaggaagtgatagtggacttcctcaacggcgacccggaccagcccatcatcatggggcgcacctaccaccaggaaaaccgctcaccgggcagcctgccgggcaccaaaacgcagatgaccatccgctcgaaaacctataaaggcagcgggtttaacgaactcatgtttgatgatgcgacagggaaggagcgcgtgtatatccacgcgcagaagaatatgaataccgaggtgctgcgcaaccgcaccaccgatgtgacgaataatcatgctgaaaccattggtaataaccaggtgatcgccgttaccaataaccaaatccagaccatcggcgtcaaccaggtggagaaggtgggcagtaaccaggtgatcaaggtgggtgccaatcaggtggaaacggtggggattgtccgcgccctgaatgtggggctggcataccagactaccgtgggcggcatcatgaatacctcggtggcgctgatgcagtcttctgaggtcgggatcttcaaatcactgaatgtgggaatgaaatacaacgtcaatgtcgggcgtaatgccagcgttaacgtgggcaacagtaaaaccgaaagtaccggtaaaacggcggtgtattccgcaggcgagcatctggaactggtgtgtggtgaagcccgtctggtgctgacgagcgacggcggtatttttctgaacggcaaacatattgagttgcagggcgtggacagcttaaacggggattcaaagctgatcagctggaactgtggggtgagcaagaagccacctgaagcatctgaacagcaggatgaccccgatccatcggatctgatcatgtactga

SEQ ID NO: 379871 - DNA, 561 bp, Salmonella enterica
atggcaaagggggggattgattatgttcaagccagaaaattatttataaaggctgctgaatccaataatccagttgctatttataatctgggacacatctataattatggattgggcattccaagagatgatgttcaggctgcaacatggtatagcaaagcggaagatcttggttcaatgagcgcaagaaattcacttgctctattttatgcaaaaggattgggtaatctgcctgttgacagaaataaggcattaaaattattgaatatttctgcttgtcagggatatgcggtagctcaaaataatcttggaatattatattctgatggtacagatgaattatctaaagattatcagcaatcctacgcctggttctcagtggcattttataatggttttaaagaggctgatacctcacgaaacgtaatcatgggaaaattagaaactaaagaaattgaaaaagctaaagcactttccactgaatatattgaaaaataccatactaatctcaatggagatgacacagatagagataaagagtgtaagcatttatacccgtga

SEQ ID NO: 379872 - DNA, 642 bp, Salmonella enterica
atgatccccttccccactacagaaaaccttattctatgggcttgcagcgccatcgtactgcttgccgttgtattcttccggcgttcagtacggcacaggcgacacaaaaggaagcagcaaagtgcgcggcgggtgctggagcgcataaagacgttgccgggcttcccacaaaaaattaactacctgagaaaaattgatccttttgtgtttgaagaactgttgctggaaggatttgaagcgcatggcttcagaaccatcagaaacaaacgctataccggcgatggaggcattgacggccaggtaataataggaaaatatcgctatcttattcaggctaaacgctatcgcggccatattgctttacagcacgtacaggagttcgagaagttgcttaaacgtcataactgtcgcggtctgttttgccataccgggaaaaccggcgcaggttcaaaatctgtcagtattgccagtgaacggatggagattatcagcggccagcgcctgatagatttgctcacgcccggtagctccttcactatcgcaaccgccccgcagacgatgatgaagcgtaccgcagcaacgctagaaacgagcaccattgttaaagatgccggtaaagaaaatcgataccatgagagttaa

SEQ ID NO: 379873 - DNA, 222 bp, Salmonella enterica; identical to SEQ ID NO: 236014

SEQ ID NO: 379874 - DNA, 843 bp, Salmonella enterica; identical to SEQ ID NO: 140055

SEQ ID NO: 379875 - DNA, 276 bp, Salmonella enterica; identical to SEQ ID NO: 140056

SEQ ID NO: 379876 - DNA, 795 bp, Salmonella enterica; identical to SEQ ID NO: 140057

SEQ ID NO: 379877 - DNA, 1188 bp, Salmonella enterica; identical to SEQ ID NO: 236015

SEQ ID NO: 379878 - DNA, 504 bp, Salmonella enterica
atgaccgacaatggaattaatggaattttatttgaatatttaaaaaagagaaaaaataacaataatgatatttatgaaattgcctgcttattttcaaaagtgaataatatcgagcagctatacacatctctgtgcatttcagtctcacgtagtttttctgatattgttagaaaaacaatagataatgacatttcaacgaaatggagattaaaaacattatccgaaaaactaaatttatcagaagtgactatcagaaaaaaacttgagaatgaaaatactaatttttacagaatccttctggatgccaggatgcaaaaagcagcgcgtttggtgcttgatagcgacacccatattaataaagtatcatatgccgtaggaatgtcaagcgtatcatatttcattaaattattttctgactattatggcttaaccccaaaacaattccatctaaaatataagcatagaaatacaggagaaaaagctgcatttatgctttataattaa

SEQ ID NO: 379879 - DNA, 228 bp, Salmonella enterica
atgcgttggaacaataccaaaagttacaagcttaccatttgcagcgtattcttcagcatgtctgacagctttcgtaaaagctatttcatcctgaatcacatgatctgcagcaagaaccaacaaaagaggatcagcattatcagcattctggagcgcacaaaacgcggcaagagcgatcgctggtgcagtattacggcctaccggttcgagaataatattatttgctaa

SEQ ID NO: 379880 - DNA, 447 bp, Salmonella enterica
gtggtgcttggcctgaatatctggaccaccaacgataacgcgctgtacgcatcgggtctgggcttcgccaatattaccggtctttccagccgcacgctgtcggtggtgaacgggattatcggtaccgtgtgcgcgctgtggctttacaataattttgtcggctggctgacgttcctgtcatctgccatcccaccgattggtggagtgattattgccgactatctggtgaaccgccgccgctatgccgacttcaacaccgtgcgctttattcccgttaactggattgctattctttccgtcgcgctgggcatcgccgccggacattatgttcctggtattgtgcccgtcaacgccgtactcggcggcgtcttcagctatatcctgctgaatccacttttcaaccgcagccttgctaaatcaccagaggtcagccatgcagaacaataa

SEQ ID NO: 379881 - DNA, 924 bp, Salmonella enterica
atgggatatttaaaattacctgagggtaaaaggattgcggtcaatcttggtgtcgatgtagatgctcagtctttatggctgggcggatttaatcgaccgtcgccatcctttatgtcacgaggagagtttggcgcacaagttggcgttccaaggcttctgaaattgttcaaagaaaataatatcaaaaccaccttttttattcccggacacactgtagacaccttcccggaaatcagtaaagcgatttttgatgccgggcatgaaatcgctcaccatggctactatcatgaaaacccgacgctggtgaatcgtgatacagaacgccgacttatggatctggcgttcgcctgttataaaagacattttggcatacgccctgtgggataccgttctccctattgggattatagcgagaatacgctggatcttctggaggaagccggttttctctatgacagtagcctgatggcgagagatcttgtgccttaccatcctcaacgttggcaggtgaattgggaaacgggaaatatcgcaggcccggccagcgcgattctggaaattcctgttagctggtatctggatgattttcccgcactggcgtataccggtaaccaggaggggatgagcgatactgacggtgttctgcgacgctggaaggatatttttacctatgcttataaccatcaggaaaacggtttatatgcgatggctcttcatccgcagataatcggtcatgggcatcatatgatgatgttgtcacgtttgattgaacatattaaagggcatgatggcgtatggtttgcaacctgtgaagagatagccagtgtctgggtggatgacgaagaggatcgacaaaaaatgctccgtcctgatgttcgtggcgtagcgccggttccggatgattatggctggccaggcaaatga

SEQ ID NO: 379882 - DNA, 471 bp, Salmonella enterica
ttgctgaggattaaggcgaagctctttatccagatgttcacggattgtacgtctaatcatatgccgctggataagcattgggtcaatatcacctacgatatcaccttctttcatatagtaggtattagaaggcgtatccagtgtcagatagccttctttgcccgtgcggatctcacttatcctgtatccctgataaatatcacgccccgtttcgtcatcaagtgtcataccgtcatgcacggtaatttcagaacgatttacgcccccttttttatcggctatatcaacaataagagtcgcgctaatgctattcttcttattgttaatactgaccagttttacataggggctattgcttgcattctggacttcaagcccggcaacttcaatttgtttgaccagtttctgattgtaagcatcaatggcatcgaggcgatacaccatatgatgtttatgcacatgtgtcgctga

SEQ ID NO: 379883 - DNA, 1887 bp, Salmonella enterica
atgaacaaactttcgcctgaaatgcccgaactgcaatcaatgaatatcactgccgataacatcaccaagcttaaatcattgtttcctgaagcctttaatgaaaacggcattgattttgacgttttaaaacagcttttgggtgaaaatgtagacgaaaaagaagaacgctatggcctgaactggcatggtaagcgtcaggctcgtcagcttgctcttaccccttcccgtggcaccttacgcccatgtaaagatgaaagcgttgattgggataacaccaagaacctcatgatcgagggtgataaccttgaagtattgaagcttcttcaaaaaagctacactggaaaagttaagcttatatatattgatcctccttacaacaccgggaaagattttgtttatcctgataacttccaagataatatgaaaaattatcttgaaattactggacagacagaagacggagcacgtttaagcacaaatacagaaaccagtggacgttaccatactgattggttaaatatgatttacccacgtttaaaacttgcaagaaacttgttgaaagaagatggggttattttcatttccattgatgatgctgaagttgataatttaaaaaaagtttgctcggaaatctttggtgaagagaactttgttgctaatattgtatggcaaaaaaaatactcaccacaaaatgatgccacatattttagtgatatgcatgatcatattttagtatatgcaaagcaacggaagaattcaaaaaatgattcaaatggttggaacatagattttctaccaagatcagacgaacaaaatgcagcgtataaaaaccccgacaatgaccctcgtggagtttggaagtctgtagatttatcagtcaaaacttattccaaggctaatgattactcaattaccacaccatcaggacgtattgtaactcctcccgccagtagatgctggcaggtttctgaaaaacgttttgcagaattgtgtaaagaaaataaaatttggtttggagaaaatggtaataatgttccatcaatcaaaagattcctgactgaggtccaagatggtgttgttcctacaacatggtggtcatataaagaatgtggccataatcaagaggccaaacaggaactaaaaaaactcatggagggagaatctgtattctttgacacgcctaaaccattgagattattagatagaatattacatttagcaacaaccaatgataaaaatagtattatcctagattttttcgctgggtcaggtaccacggctcacgcaactttgaataaaaatattgctgacagtggttcacgccgatatattgctgtgcaattacctgaaaaaatagatgatgaaaaataccatacaatatcagaactaaccaaagaacgcctccgccgcgcgggtaaaaaggttcgtgaagacaatccagagtggaaaggtgacgttggttttcgtgttttcaaactcgatacatctaatatccgtccgtgggaagccacagcagaaaccctttcagaacagattgatgcctatgtaagcccaatccttgaaggccgtagtgaagaagatttgctcacagagttaatgctaaagcgtggcattgacttgagtgttaacattgaaacccgtcagtttgatggattaaccgtttcttgtgttgacggtggaaaattgtttacctgctttacccgtcaaatccctgcctcttctgttgaggaactaaccaaggggatcattgactggcataagagtttaaaagctggcaaagatactgtctgctatttccttgatgacgcatttgaaaataatgttgctaaaacaaatctttgcgccattctggaacaacatggcctaactaacctgcacagcctgtaa

SEQ ID NO: 379884 - DNA, 1389 bp, Salmonella enterica
atggctaaactgaacaagaaacaactttctttactcaaggaaatgcctgcagaacaactcatgcaaataatttgtgatattgcagaggataatggtcaggcaaaatcctttcttattaatgaatatctgttaactccagaagaatcactgaaaaaagctgaggctgaatacaaaagggcaattaaaacaaaacgcttttatgattattatgaagcagcggttttttttgaggggctatacaggaatgtcatatttccacttgaaaagacggtatcaacgctgcctgaaaaaaccgaggcgttttgccatgatttactgctctcatttgataaagtcagcgaaattgctgatacatcagatggatcatggatggactattataatggtgctgtcgaaatatggttaaaatccctgtccctacaaaaagacaaaagcattgatgttatagcggatagaatactttccgtacttaaaggtgatgtatattttaactttgatatttttgataagtataaaaaagatctgggatacaatgttattcgtgctttaagggaaagtcttcttaagacaggtgatgttaatgatgctgttgagttaagtctgtatatcagggatgttgatttcatcaggcaatgctttgagaaaagaaaactgaaccagccagaatacatcattaagtttgctgagttgctggttgatgaactgtgtactgaggaagccattcaggttctcaataaaatcaaagaagataaatcagttgatcaggcagggcttcgtgataaatggactgaggtgttggctctggcgttgattgaagaaggcgagattcagcaggcaaaaacaatttgtatagtcggatttaagaacaggtgtgatgttattttttataatatctataatcgggtggagaaaaataatgactcactggatttgttctctggcatagcaaagaaaaaaggctttccgtttgttattcttttcttgtccgggacagatagttatggaaaacttgattctgaagtcatgaatgcgagtgaaaatgaaatcgcagagatgatgtctttattacgcggttcttttgttcgtaccttatcgagtgagctttacaggcatggttatgcatgttctgcaactctgctccgtagagtgctggcagaggacagtatcagtcgttctcagagtaaatactacacctatgcggcatctgatatgaaaaaaagcattgattacagtaaagatattgcatggactgaaaaaatcccttcaacagaagagtatttaaaatctctgtttattgagcacaaaagaaaatacgcactctgggaaataatgctggaaaaaatcgctggtttagcgatagaaaaagattcagtatcatattcagcatag

SEQ ID NO: 379885 - DNA, 1275 bp, Salmonella enterica
atggccattaatgtgctttcccccaaacagatagaaaacgccaagccgaagaccaatgattacaaacttaccgatggagggagtttgtatctactggtacgaaagactggtggaaaatactggcgtatgaattatcgttttgatggaaaacaagtgacattggcattaggggtctacccagatgtctcacttgcaacagcgcggaaacggcgtgatgaagccaggcaactactagccgatggtcgtgatcctcgcgaagcaaagaaacccaaaaaggaagacccaatttcccccacgttcgagagtgttgccagagagtggcatagtggaacgatggggcatcctgagtggaaagagatcacccgtaaaaaaattctccgagaaatggaaaaccacctctttcctgccatcggttcaaagcctatcgatacgctcaaaacccgtgacttgatgccgatgctggttgagatgactgagaaaggaattggtgccacaacgagccgggtaaaaaccactatgacgagcatcttccgttatgccgtgcaacgtggaattgtcgattacaaccctgcccacgatctaaaaggtgcaattacgacccccaaagtacgacatcgccccgcactacctctcgaacgtttacctgaactgttagcgaaaacgagaagttacacgggaagaccattgactcgcctagcagttctattttccctgcacacttttgtgcgatccagcgaactacgacatgccagatgggaggagatcgacattgaaaatgggctatggacgataccaggacaacgtgaagagatcgcaggggttaaattctcagagcggggtgcaaagatgggggctgctcattatgtcccgctatctagtcaggctatcggggtactggaggatataaggaaaatcagtggtgaatatctgctggttttccccggtgacagcaacccatataaaccgatgagcgaaaacacagttaataaagcactgcgaacgatgggttacgacactcaaagtgatgtttgcttgcatgggttcagggcgatggcctgctctgcactgaccgaatcaggactctggtcacgcgatgcagttgaacggcagatgagtcaccaagaaagaaacgaagtgcgggcagcatatgtgcatcttgcgcagcacatgcaggaacgccgcagaatgatgcaatggtggtctaattatctggaactaaataaggacgaatttcatgctccttatgacttatcaggtattaacattatcaattaa

SEQ ID NO: 379886 - DNA, 882 bp, Salmonella enterica
atgcagcattcaaaagagaatgaaactatattcttaggaaatctatggattgacaaaaaaataccaccattagaatattgttcatttgaacgcgcttcaagactattagaatgcgagattgatgatttattacacctatacgaaataggcgcttttaatatcgcattcaaggcggatggacttgcagttagatttaatgttaatttcctctataaaaaccagaaaatggaaattgacttaattcatcccgtattaactaatcaatcactagagatggaattttcaacaatatggtatgaccttaaagatgactcctttgaacattttgaaaatgggcttcaaattataggatttgcctgtggtatttggtacgccgatgatatgataagtgacataaaaaatggattagctatagatccagattatgaattcaggcttaaaccggtaaaaatacgagataatgttttgatggcaacggcctcatatgaaggaaataaggtcattgatattccatttgaagatcttcttatcatgcgaagagatttagagttaatatggaaatcagtaaaaactggaattcctatgccaagtttacttacgaaaagaatttcatctgaacctaaaatccccaagcgattaaataacactgctgagcatcatgcaaaaaatagggaggggttattaaatgcagccatatatatattagcaaaatacccaagcgaatgtcgtggtgaaagaaaagagataagtcctgaaaagtggactaacgccataattaaacatttaggagagctacctccaatatttatcactaatgaacaagaaatcttaagaaaattacgattagcggttaatcatgcgggattgaaacaaaaggggtag

SEQ ID NO: 379887 - DNA, 177 bp, Salmonella enterica
atggctaaacagaagtgtacctggttatttgcggcgatcaaccgcagtcaacgtaatgcccgtccggtgatgttaaggatcaccgcagataacgagcgatcagcgcggcgcagacttgccccggactatgtactgagctttgccgggcgcattccctgcggaggtgaacatgcgtaa

SEQ ID NO: 379888 - DNA, 360 bp, Salmonella enterica
atgcgtaattatccgcatcccggcgaacgctggcagcatgaacgtggctggacggtcacgattatccgattaatagaagcctcgccctctgtggcgctggttaatcctgaattcagctgtgaagtgctgatacgtcatgacagcgacaaccagctttcttcctgccctctggcatggtttgaacagcgatatacgcgcctgtttgatgtaccgctctttaagcctgcaccagctcctgcaggcggtagtggttccagcccgctgacactgcatccgtctgtgctatttatccgctggcgggagcgtagcatatggcgttctgctgagcctgatgacggtcactattcaaagtttctctga

SEQ ID NO: 379889 - DNA, 285 bp, Salmonella enterica
atgaatatttcaaacgggcacaacggtgctcagggccagactttgcctgaaaaacacaataccggtgcttttgcctatgggttgtcagaggacggtttcggaaagctgacccgcgcaagaaatgcctgcgacatgctccagcttctcttttctgaatacccgtctcaggccggagcactggacgcaggctgtgcgcctggtgtcgccgcgctgatggagtacctgcgggcagatttgacggatattgcacacagctgcgcactgattgaaggaggtgccagatga

SEQ ID NO: 379890 - DNA, 384 bp, Salmonella enterica
atgaaccagccgcaggtttccattttcccggcagaaatgaccaccgcgctttaccggcgggctattgcttcagcatggcggcagaaaatgctgaacgaaactggcaatgatcagtatggtccgcacagcctgacggtggagcgtattgaaatggccattgcgctgcatatcgagtgcgcactgattaacgagtacggcgaagcacagggcgccgctgccgcgctggcactgctaactgacatgctggagccgtcactgctgaccgcgccgccggtactgaccgcgcgcggttgtgaagtaatggcggagatgtaccgcacgcttccggcggcctttgatgtctgctgcagtaccggtgtgacgttgtatcagggggaagtatga

SEQ ID NO: 379891 - DNA, 516 bp, Salmonella enterica
atgcttataatttcatacattgcattatgcttattatttatagtttatctctatactctttccgtaagaattgagggaaaaataataaatgtaatggtcccatacctgataataacagtccctacactgtacgtgtttgaaggtatatttgtatacctctcagaggtgcagaattatacagtggaatatttgtttttctatacttgctatataacatacatagcatcatttgttatttcttatctttacacacaaagaaaacccatatacaacaaatcaaacacgaaaaataaaccaaggtatgtgtttacttcattgttattcaccttccttgcttttatcatttaccttccagtgttgatggagttcagagagtatatacttagcccaagaagaatatacgaattaaccagaacagggtatggtatatacttctatccttcattaatgttttctcttgtcgcttctactgtctcttatacacatctgacgctgccgacgactccttacgtgtag

SEQ ID NO: 379892 - DNA, 414 bp, Salmonella enterica; identical to SEQ ID NO: 376887

SEQ ID NO: 379893 - DNA, 1263 bp, Salmonella enterica
atgaaactcaacgctcgccagatagagactgcaaagccgaaagagaaagcctataaaatggctgatggaggcggcttgtatcttgaagtctcccctaaaggttccaaatactggcgcatgaagtatcgccggccgtctgacaaaaaggaagatcggctcgcttttggtgtatacccgacgatcactttggctgaggctcggggtaagcgcgatgcagcaaagaaattgttgtctcagggcattgaccccaaagtggagcaaaagggggcacaagctgaaattgagggggcatatttatttgaaactatcgcaaggcaatggcacgcaagtaatctaacttggagcgaagatcatagccatcgcgttctgctgacccttgagcagtatattttcccctcgataggtcaaattgacgctaggacgttgagaaccagccagcttctcaatccgatcaaagctgtcgatacggcaggtaaacatgatgttgcgcagcgactgatgcagcgcgtaaacgcaattatgcgtttcggtgtgcagaatgaccttcttgaatcaaatcctgccagtgatatggctggagcgcttttaagcgttaaggcgacccatcacccagcgctacccccaaaaagaatccctgagttccttgaaagattatcacgctataaagggcgactaatgacacggcttgccgttgaattaacgctacttacatttattcgttcaagtgagatgcgttttgctcgctggagtgaagttaactttgaacgaagcgagtggacgatacccggaattcgtaagcctattcccggcgtaaaacactctgagcgtgggatgaagatgaaaactgaacatattgttccgctgagcaaacaggtatttgatatttttaaacgtttacatgccttgagcggtaaaggtgaggtgatatttcccagcgatcatgaccctaaaaaagtaatgagtgaaaatacagtaaatagcgccttacgtgtaatgggatatgatacgaaaacggaagtatgtggtcatggatttagaactatggcgcgtggtgcgctaagtgagtcgaaactatggaatgatgacgctattgaaagacagttaagccacgttgaacgaaaaaacgtgaaaggttcatatatgcacacttctgaatatcttgaagaaagaagattaatgctgcaatggtgggctgattacattgatgctaacaagaatggatctatcacaccatatgattttgcgcgtgtgcatggaaaataa

SEQ ID NO: 379894 - DNA, 429 bp, Salmonella enterica
  misc_feature (11)..(20): n is a, c, g, or t
gtggtctggcnnnnnnnnnngttagaacgcgtggaagagtttgtagagcagcgtaaagctaatttttcctatttgaaacaaggtttgcaatcttgcactgaattcctcgaattaccagaagcaacagagaaatcagatccatcctggtttggcttccctatcaccctgaaagaaactagcggtgttaaccgtgtcgaactggtgaaattccttgatgaagcaaaaatcggtacacgtttactgtttgctggaaatctgattcgccaaccgtattttgctaatgtgaaatatcgtgtagtgggtgagttgacaaataccgaccgtataatgaatcaaacgttctggattggtatttatccaggcttgactacagagcatttagattatgtagttagcaagtttgaagagttctttggtttgaatttctaa

SEQ ID NO: 379895 - DNA, 4089 bp, Salmonella enterica; identical to SEQ ID NO: 377189

SEQ ID NO: 379896 - DNA, 627 bp, Salmonella enterica
atgcagccccgtctcgtcgtcaaaatactgccccggcagccgcagcggctggtgaaagtacgccccgctgttgctgatgtccgccgcattctctccaaaccccctgatataccccgcccacaccagcgttccgtccgccgccgtcacctcctgcggcgtgcccgtcacgtccgtgtggtaataccacacctgcctgctttctccccgccccgtcacgctcgccaccggcgtgtacggctgttccgcatcgtacacatatgtccgccagccctgctgctgcacgttctcctgcaacagcctgaacccctcccacacaaagtccgtccggctccgcgccgtatggcccgtgtgccgcccgtacgtcgccttgcggattcgcctccccagcgcatcgtagccgtagtgcgtctccgtgttgccgctgatgacccgcgtcagctgcccctgcgcgttccactccagttgctggtcgcgccgcgtggtcagctcgccccactcgttataaccgtaacggtcacgaccacagcccggcagccggttgttcatcaccggaccctgcccttcgttatccagcaggttgcccgccttatcgtaataataacggtcatggtcatacatctgacctga

SEQ ID NO: 379897 - DNA, 255 bp, Salmonella enterica
atgcgtcaggtgctgcccgtccggcagcgtgatgtccgtcgggttgcccagcgcgtcgcgctgataacatatgctaccgttccccgcgtgctccgccgtcagccagccgctgcggtcatactcaaaacgcaccgtgtcggcctgcatccggtgctgctgttgccccgcctccgtgggcgtgagcgtcactgccgttatctggtccagccggttgtagctgaacgtccgctggccgtgttcattctccgtccgtaa

SEQ ID NO: 379898 - DNA, 933 bp, Salmonella enterica
gtggccgggcgtcagcatcattttcgggtaacgcagttcccgcccctgtacgccggtcagcgtgatgtgttcatcgtcctcgcgcaggctggtttcccagttcagccgccagccctgtcccaacagtcccacggtttccaggtggctggcgtaaaaacgcgagcaggtgaccggcaggcgaccgggcagggtgaagtccgtttccggcagcaggattttctgcccggtggtcacatccaccggattgctgaacagcccgctgatagcctcactcacggccatcccggtaagctccccgccgataaacttagcggcacatttagtgccaaatttcgtccccagctttgccgcctgccgccacgccccggccagcccgccgagcagactcgccacgacaaacaatacatccaccaccttgcgcagccagtccggaatttcagaactgatttccagtaccgtctgtgtgccgccgccgagaaacacattcggcgaaccgtcttcaaccaccgcatcgcattcggtatggtcatccttacgggcggcaggctggctgttgatgtaaatattgccggaaccctgggcgatgcgtttttctgcgatatggttatcgcatttcaccgtactcagtaccgcgcgcgccgccgggcgactgttggtgctgacattctccgaaccggtgaggatttttcctgccgtgtggtggatggagcgcccgatggcctcgcccagttgcaataccccggaggctatttgatcggccataaaacccagaatcagcccggcaagaaaaccgcagctaaagaaggcaaaggcggcaagcgcgataatggcgatgccgatgatagcgccgataagaaacccggcgagcgcactggtgtggtagatagggtcatccacacgggctgcttcatacatggtcacacctccgtgtga

SEQ ID NO: 379899 - DNA, 225 bp, Salmonella enterica; identical to SEQ ID NO: 376789

SEQ ID NO: 379900 - DNA, 2688 bp, Salmonella enterica
gtgagtcgttatttctggatgtattatttactgggattgtgcagttttaccagccaggcaactcttattccccctcctggatttgaatctctgctggaaggacagactgagcaaattgaagtgttgctaccagggcattcactgggattatttccggtggtggttaaaccggacaccgtgcagttcatgtccccattgatggtacttgaaagcagtgggcttgccgcgttgccggccgcagaacggcaaaaagcgctggctgcactcagccgtccgttgctacgtaacagcaatctggtctgtggtgtctcagaagcaaaagacagcagcgagtgtggttacgtggcaacagataaagaggatgttgcggttatttttgatgagaacaacgctcagttatctttgtttcttaaccgggactggttgccggatgaagaacgacgtgataaacgctggctgactccgaccccggagggtgtcagcgcatttattcaccgccagacgctgtatctgagtgatgatctccacagtcgtaatatgacactgaatggtagcggtgccctggggcttggtgacggtcgttatctgggaggcgactgggcggctatctggaatcagtcagaacattacaataacagtcaggcctggtttgacaatctgtttgtccgtcaggatctcggcaatcagtattatctccaggctggtcggatggatcagcggaatctgtccagcgccacggggggggattttgggttcagtctgcttcccctgagccggtttgatggattacgaaccgggaccacccaagcttatgttaaccatgaggtggaccataatgccactccggttatggttcaggttacccgaaatgcccgtattgatatttatcgtggcagcgagttgctggggagtcagttcctgaccccgggaatgcataccctggatactcattctcttccaccgggaagctatcctctggcgttgcgggtgtatgaggatgggattctgcggcgaacggagacccagcccttcagtaaggggggcaatagcttcagtgcacagacccagtggtttattcagggcgggctggaagataccggggataaagccagccattatgacggtgagactgtcatggctgccggattccaaactgggctgcggaaaaatatcagtctgaccgaaggtatctctctggcacatgaggcctggtacagtgaaacccgactgaattcacagcatgcagtgctggatggcacgctggacctttctgccgggatactgcatgggacagacagcacgagcggtaacactgagcaggtgacatacaacgacggattttccgcgagtctgtggcgtaaccatacggaaagtgatgcctgtagtggtcgtcatccacagtcagtgcatgccagtatgacctgccagacttcgatgaacgcctccctgtcggtttcggtggggaactggtatgccctactgggatacagtaccagcaggacagaaggtcggccggtttaccggggatatgatgataacagtgacaaagaaaatgtgttctggcgacaggcatacatccctgcctctcaccgcgaatctgctcaggctagtgcaacgtacagccttaatatggctggcatgaatattaatacccatgggggagtatggcgaacccgaaatgacggagtgaatgatgatggcttgtttatgagtgtcagtgtgtcatatgcctctcaaccaccgacaatgactggcagtaataggtatacctcagccgggaccgatattcacagtagccggaatcaaaaaacacagacgtcctggaatgtgaaccatgtgagatcctggcagcaggatctgtatcgtgaactgtcggtgggtttctccggttataacgacgacagctggagcgggagtctcggcggacgcatgagcggccgtatgggtgaactgagcgccactatcagtaactcccatcaacgtaatgcgggcagcgccagttcactcaccgctggctacagctcgtctctggcgttatcccgtaatggactgttctggggaggtggtcaggacggtgaaccggcctctggcatggcggtgaacgtggagtcagagggggacgagggcagtagcgggaaagtagtcagcgttcgtggcagcagccagccgttcagtctcggttttggtcagcagtcgctgttgctgatggaaggctataacgccacggaggtgaccattgaggatgcaggggttagttcacagggtatggcaggcgtaaaagcgggagggggaagcaggtgttacttcctgacacccgggcatctgctggttcacaacatcagcgccagtatgagccgactgtacgttggccgcgtactggacaaggatggcagaccgctgctggacgcacagccactgaactatccatttttgtcgttgggaccttccgggcgatttagcctgcagagcgagcataaagaatccagcctgtggctgctgtctaaaaacaggatcctgcgttgtccgatgtcagtacataaacgtcgggatgttatgcaggtagtgggtgatgtgcggtgtgaattaagtgacgtggatgccctgccacaggcgttgcaaatatcgccgcgggtcatccgtttgctgaacgtggcaggtttgctgcgccattccgttcaggaagcctga

SEQ ID NO: 379901 - DNA, 156 bp, Salmonella enterica; identical to SEQ ID NO: 376857

SEQ ID NO: 379902 - DNA, 744 bp, Salmonella enterica
atgaacaacaccgcagtgaataacaacctttccacttttccggctgtaacgcagcgggcactggaaaccatgaacacagccagaaacgcatggcttgaagcacgtcgtcagcagaaagcggcagcggataatattgcgacaatccgccagcgtcgcgctgagatggaagccacgacgaacacactgaatgaggagtggcgcacgctgtttcgtgaaagtcagggcgtggtttcaaaggaaatgaaaaaactgcgcacggaaattgcgctgggacgagaaacgcttgaggattttgatgagctgctggcggctcaggaaagcgaaaatgcacttttgccgcagaaagctgcggaattagccggaaagtatatccacgcgcataacattcttgtggatattcgcgcaaaacaaatctgggaagattttatgcaatcgcatggaaaagcgcttattcagacgctgagcctgcttaaatccacaatgggccgggaagccagtgccgttgtgggtgtggtgaattcagttaatgacccggacacagtgctgaaagactttattcataaacatatcaccagaccggctctggctaacgatgcgatgcctgaacaggacccggtgtttaaactggcgggaattgccccggattatgcggcgcgtctggatttcagtaatcaactctctccggcagctatgcataaaattaaggttcgtcaggaacttgctgagaaggagaaagcagtatga

SEQ ID NO: 379903 - DNA, 552 bp, Salmonella enterica
atgacggcccgaggcacgcctgaccaggcacttaccagttttcggaatgcccgtattctgtgggccggacatagtgagagccgaaaagccgttgaacaacagatagcatctctcctcgctgccacagaaaaaccagcagattatgcccgacagctcgaattactgcgggaacgtctggatgtgctgaaatggcaaattaactgtgctgcgcgcgaatgcatttactcgcagcatttactgatggaagcctgcacagaagccgctctcagcaattttatgcaggcgaatggggcagccctgacatctgcactggctccgttcctgaaggggcgcggaggggttgacgttgcgtcccgtatattacgcagtgctctggttcgccagctgacaataacaccgcctgaaattgccggggattatcgtgagatcctggatgaatccggtttgatgcctgaccccgggatgattcgtgattgcctgggctcttacaccccggcacaacatctgcgttttcagcaacgcctgaatgacattaacgatatacaggagtga

SEQ ID NO: 379904 - DNA, 273 bp, Salmonella enterica
atggcacttaaatgtccggaatgcggtacagttgcacacgccagaacagcagcctatgaagctccgtcagttaaacgctcgtggtatcagtgccagaatctggaatgttcctgcacatttacggcactggagagtgtggataagataatcatgaaaccccgacgcaatgaacagctatcagacaaagcacaatccccggaaaaacaacagcaaacacttaatcgctatggctccgcgtcaaaactgtcaagccgtcagcagatttctgtctga

SEQ ID NO: 379905 - DNA, 1107 bp, Salmonella enterica
atggccgaatgtattatcttaaatatggatttaaatgcaaattgctgggtagtaaggcctggaagagattatgaattctttggtcattttctccatggaaaggttgcagcaatagggcattttgacgactttattactaatgatggtccaataagtgaagacgattttgaaagtctaatgcatgaatattatgttgatgccgcaaaaaaaggctattctcagcagatcattagcgctaacgttaaccaagttaaaaaattcctcttcaatatgaatgttggtgatttgattttcactataggttcaggagtcgttgttgctggaataataacatcagacgcttattgttctgatgaagttatcaactataatatcgatgacaaaatatccaaggatcttgattttaaaattagacgtgatgttacatggggccgctcttataaccgtgaaaacatacctgatgcagtaaagcgctcttttaaagccaaccagactgttttttctgcagctgagcatctgagatcgatttatcattggttaaataccgtatttatcagtgacggaaccgtttattcaagttctcgcataaaccaagaagatgatatccatcattactcagtaactaaatatgcagaggttttgaataaattagaggctttagcaacattagttgaagataagttcaatgaaaatacatttgactcttctattagtctcgatgatatcaaaaagcagttatctcttctcgccagcaatgatttattaaatcttactactcagcaatcatttatgtcccctggtgattactggacggggtttacaggtaagaccagggtttccgtaattgcttttactatcgctatatgtgaacttctcagtgtaaccccaacatttgcagatcagcaagatattgaaatagcaaatcagattgcagttccaattaagctagctgtacatgaaataaagaatgataatgatatggaagttgttatcaaaaaacttgaactggcaatgcctatgcagaataaaaaagttattgagactattaaaaaaattagtgatagtgaatttccagaagttgaagattcgaataaaggtacaagataa

SEQ ID NO: 379906 - DNA, 897 bp, Salmonella enterica
atgaagtttaatattaatgaggtggaggaccttttcaaagatgcaaaactatgttttggtggagagattaaaaagaattttcatgatttggttgtattctatcaaagaataacggcggaaagattatcactcgctgaggagcagattcaaacaaacttggcagaacttgaggccgttaataaacgtttgcaggagttaaataaagagcgctctaaaagtttgtcatatatcagttgcgtaagtgcttttgataaatatagagatttaaataagtatcttattgatttaactgtagagatcaatgcattaaagcaaaagctagaagtaagccgtgaaattggggagttaaaagaagtaataacagataaacaacaggaaaaaaacgatattgttaagtctattaaaataaaccgagattacgttgttaaaactcctggtaatatatattctaatataaaagagatgtttaaagttttcgtcaaaaatgttctcgataaaaatggcttattaactacagaacaaaataaagaagggcatttagagtactgggctggcttagttaataatcaaggacaacaaaccagtgaaagtgatgggcatagttatcaaaaaatattatgcatggggtatgatatatcagtcgtttcctcttatctagataagaatttcatccggtttatttatcatgacggcggattagaaacattagatgatcgtaagaaaaagaatttcttagaattcattaattggtattcaaacttaatgggattccagtatattcttacgttaattgataccgacttaccaccagactataaatttgctgacgatgatattgttaaggtcttacatgatgatggtaatgacggattattgttcaaaatggcaccttggtag

SEQ ID NO: 379907 - DNA, 258 bp, Salmonella enterica
atgtatctttatattttttatttatttacactaagttacaatgtttgtcgagtccggccttcgcaccatacaaagcttttttcaagtctactaacgtctactttaatccacaaaaacagtaagttaagcgaatttctgacttggcttagtctgttcacgtctactcaattccttgaacatataccaaccgatgatggtataactgatggtattcccggttcgattgattttggtaccaacactggaggtatcaactga

SEQ ID NO: 379908 - DNA, 762 bp, Salmonella enterica
atgaacaacaccgcagagaataacaacctttccacttttccggctgtaacgcagcaggcaatggaaaccctgaacacagccagaagcgcatggcttgaagcacgtcgtcggcagaaagcggcagcggataatattgcaactatccgccagcgccgtgctgaaatggaagccacgacgaacgcactgaatgatgagtggcgcacgctgtttcgtgaaagtcagggcgtagtctcaaaggaaatgaaaaaactgcgcacggaaattgcgatgggacgagaaacgcttgaggattttgatgagctgctggcggctcaggagagcgaaaatgcacttttgccacaggagactgcggaattagccggaaagtatatccacgcgcacgaggcacttgtgggtattcgcgcaaaacaaatctgggaagattttatgcaatcgcatggtaaggctctcatccagacattgagcctgctcaaatctacaatgggccgggaagccagcgcagttgtcggtgtggtacattcagttaatgatccggacacactgctgaaagactttattcacaaacatatcaccaaaccggctcttgctaacactgcgatgccggaacaggaccctgtgtttaaactggcgggcgttgcgccggattatgcggcttgtgtcgatttaagcaaaaccccgtcaccggcggcccttcataaaatgaagatccgtcatgaacgtgaaaaacagcagaaacgtaaccgtgatatggagagtatctga

SEQ ID NO: 379909 - DNA, 273 bp, Salmonella enterica
atggcgcttaaatgtcccgaatgcggcactacggcacacgccagaacctcagcctatgaagcaccatcggttaaacgctcatggtatcagtgccagaatctcgaatgttcctgcacatttactgcactggaaagtgtggatacgataattatgaaaccccggcgcaatgaacaggaatcagatgaaccggaaaaccatgaaaaacaaaagaaaacgctcaatcgttatggctctgcatcaaaactgtcaaaccgccagcaaatccctgtctga

SEQ ID NO: 379910 - DNA, 948 bp, Salmonella enterica
atgaaatatgactactgcagtttatcggcatttcaatttgaaagcctagttgtttacctgtgctatgatcttttaggtataggaactcaatcctttgctgatgggcgggatgggggacgtgactcaagattcgatggtgtagctgaagaataccctagtagagccaggccatgggatggtttaactataatacaggctaagcatactataaatcataacagaaaattttctgatgctgatttctttggtaatactacctcagttttgaatgaagaattaccaaaaatacaaaaattaattgatgaagataaaattaataattatttgttatttgccaatagacgactacctgcggaggcaaataaaaatattctagattttataagtgcccaaaccgggctagataaatttaacataggattgattgggatagaaactatggagaaatactttaaggtatttccacatgtgcctgaaatggcaggtcttaacccattcgacgtgcttattaatatcgatccagaacaactagcggaagttattataggtataaacgaatccctaggtgaattaacagacaaggccatttcatcacatatttttagagtggattttctagagaaaaacaaaataaataatttaagcaacagttatgctaatcttattaagaaaaaaatcgctgagattactgaaatttcagattttttatctcatcctgataatagcacatatcagaaaaaatatattgaaagcgcagatgagcttgcagctaaaatatgtgtttataaaaaggattatcatgattttgatcgaatccttgaggtgatgattgaactactgattgcaagagattcagatctgcacaaaaataaaaaattaacaagaataatggtttactatatgtactataattgtgatataggagatagctgtgagcttgcttcctaa

SEQ ID NO: 379911 - DNA, 240 bp, Salmonella enterica
gtgagcttgcttcctaataagaattcacatccagatttgaccgtcttggcggtagctgcattcttaatgaaaaagctacgcaaagctaaatttggtaaatatgctgagctttatgatgcacttgagaaatatgatgagcgagctatttccttattcaaccccgcactaggtttgttatatttattgggtctaatcgaatatcattcgaaaaatgacttaattgagtggattaaaaaatga

SEQ ID NO: 379912 - DNA, 288 bp, Salmonella enterica; identical to SEQ ID NO: 156221

SEQ ID NO: 379913 - DNA, 216 bp, Salmonella enterica
atggttcaaaacaaaacagataaacatccgaaactgattcgtttaccggaagtaaaaagaagaacagggtttggtaaaacgtggatatataccttaataagagcgggtaaatttcctaagcaagtaaaaaccggattgcgctctatcgcatttattgaaagtgagattgatgaatggatttacaaaatcatttctgattctcgcaatcatatctaa

SEQ ID NO: 379914 - DNA, 864 bp, Salmonella enterica
atgactacacaaaaggaaatggaagaaatcagggcagcgttatcttggtttgatgtacgccgatatgatggcctgaaagacctcaccttagaacaaatctatgcagagcttgaaagacggatgttggcttacaaaacaagacaacaatgggaaacagcaggcaaagataatcaaatgcaagcgatataccatgatgccacaatccgatgtggtgatgtgatacttaaatcagactggatttcagacaatcacagactgtcgcatagctatgctgtaagaccaatgaccagagttcaattgttcaactatgggcgggctatgtatcggctggagacttcagagcaaacagaccctgttgcagtgagttccgactacatctctgagtatctgaaacaaggaggcatgaaccctgctaacaagatgctgattgaaattgacttggaagaagccagcagtgacgatctcgcagaacatctgaaagtactgattgctctatggcaaaagcacctgaaaacgcctaaacccccgaaacgaaaatttaggtttggtcataagacctttgaaagaatacttgattacaaagtcatccctttgatggatttgatctcatgggaacagctctacaacgaaggtaagaacatacctttcaccattttagctgacatcctgcatggtaataatggggccagaagtagtgagaacatcaaagatactgattatgattacgcgaaaagttatcttgataacgatgagtacttcaaggttttaaatgatttctatattaaaaacaatatgttgaaggattggtatatcgttgatgtgataacacttaacgataaatcctcggataaaaacaaaaagtaa

SEQ ID NO: 379915 - DNA, 135 bp, Salmonella enterica
atgaaagaaaaattctggaaaaatataatctccctaaaaataatttttcggtatatatatgggattttggtgacggttatcaaaaattatcgccctatgatgccgaggatgaattttattgttttcctgatataa

SEQ ID NO: 379916 - DNA, 333 bp, Salmonella enterica
atgaacaacattaagattattacgctctttcatacaaataaaaaaataccatttatgacttgtattgttaaagatgttgaagaaaatgaacaaggaataaaactcactttggaaagtggtgacaatatccatgtcaaagattatggctatttcttcttatcagaatcagcacatgagtgtgatcaggaacgaatgattaatacatacagaagattgatttctgaactgagccaagttagcgaagaaacaatagagtccttagttccgaagatatcgaataatatgaaaaccaatttcccagcaagcggtgtgagtgctttggaagatgattga

SEQ ID NO: 379917 - DNA, 567 bp, Salmonella enterica
atgaaattacggatagtgatgccactggtactgtctgctgccgcactgacaggatgccagcaactcaacgatggcgtgaatacaattaatggagcaatcagctcgtcgttgtcttcagtaggtaaagcgctggggggaacagccaccactcaaagccttggcccggtatcatctgtatctggccttggtgctgtttgcaaagactatgaagaaaatgcaatggcagcagaaaagaaatggactggcaaaaggatctctatcatcaatgccactgttcttgaagttacgaagggcagaagtgccagcgatatgatgacgggaatacccaaaacagcccctaactattaccttttatttaaaacctctgatacgagttactgcggcggtatggtctggctggattactactctggtattgatgatgcagttcttacttataagaaagggcagaaagtcagcgtcaccggaacggtaaacaatttcgaagtccgtgggttcgctaccgtcaacaatgccgatatgccagttcgtcttgttgttctgagaaacggcacaatcaaccattaa

SEQ ID NO: 379918 - DNA, 552 bp, Salmonella enterica
atgcgtaaatttttactcgtggcgggtcttgctgctcttgtatcgggatgcggtgaaaaaggcgattttgaaaaagcgatcaacgcaaaaatatcacaatcaaagctgtgctactccctgcaggacaacgatattgtattcaataaaggttttccaattaaggttaaccgtggctaccgttctgccggatacagtgccagtgatgaaatattgaaaggtctggctaatcaggggctgcttgatgtttctcaacaagctaatggtttcagtagtgtcgatgttctggaagtaacagacaaaggccaagcggttgagttttgggatcgtaaagatggtgcctgtattggtcatcgtgcggttgctgagataaaggaatggactgaaccgggaaacggtaatcagaaaattgttcgcgtgtcttatacatggaagttggcggatgttcctgcatgggtggacaaaaaagcgttctccagcgtcaagggtatgaatgaacctgaagacggcatgattaatcttgttaaaaccagcaatggctggaaagcgatctaa

SEQ ID NO: 379919 - DNA, 504 bp, Salmonella enterica
atgccagttagccgttatctctgcattttcataaacgttggtttgggagaaggttcggcattacccgttggtgtgcctgttccgtggccttccgccactccgccaacaggctggctgaaatgcaatggtgcggctttttctgctgaagaatacccggaactggcaaaggtttacccgacaaataaattgcctgatttacgcggtgaatttattcgtggctgggatgacggacgtggagtggatgccgggcgacaattattatcttcacagggggatgcaataagaaatattgagggattcgcagatggcgggatcggtatgtcttttgatgcaatcagaggggctttttatgatgcaggaacacgatctgcgagaatgccgaataacacaactgatataggcaaaaccgatgaccttggattcgacgcctctcgtgtcgtgccaacagctaatgaaaaccgtccacgtaacatcgcctttaattatattgtgagggctgcataa

SEQ ID NO: 379920 - DNA, 372 bp, Salmonella enterica
atggaggttgataagacacagttcgtgaaactttatgttgacggagtatctgctattgaaggactgtcttcatcgggtaaaaaagttttcaagatcctttatcttgctatcagagataataaggatactgatactattttgatgtcatacgatattgttgatcaagatgtcgtaaaaatatccagaacaacatatttcaaaggcatgaaagaacttgctggcaagaagtttattgcagagaccatgatacagaactattacttcattaatccagactatatgtttaatggcgaccgtttaacatttatgaaaacatattatctttccagcagtaactctaataaacccagtaataataaggtgaagaaatga

SEQ ID NO: 379921 - DNA, 867 bp, Salmonella enterica
atgaagtatgtctttattgaaaaacatcaggctgagttcagcatcaaagcaatgtgccgcgtgctccgggtggcccgcagcggctggtatacgtggtgtcagcggcggacaaggataagcacgcgtcagcagttccgccaacactgcgacagcgttgtcctcgcggcttttacccggtcaaaacagcgttacggtgccccacgcctgacggatgaactgcgtgctcagggttacccctttaacgtaaaaaccgtggcggcaagcctgcgccgtcagggactgagggcaaaggcctcccggaagttcagcccggtcagctaccgcgcacacggcctgcctgtgtcagaaaatctgttggagcaggatttttacgccagtggcccgaaccagaagtgggcaggagacatcacgtacttacgtacagatgaaggctggctgtatctggcagtggtcattgacctgtggtcacgtgccgttattggctggtcaatgtcgccacgcatgacggcgcaactggcctgcgatgccctgcagatggcgctatggcggcgtaagaggccccggaacgttatcgttcacacggaccgtggaggccagtactgttcagcagattatcaggcgcaactgaagcggcataatctgcgtggaagtatgagcgcaaaaggttgctgctacgataatgcctgcgtggaaagcttctttcattcgctgaaagtggaatgtatccatggagaacactttatcagccgggaaataatgcgggcaacggtgtttaattatatcgaatgtgattacaatcggtggcggcggcacagttggtgtggcggcctcagtccggaacaatttgaaaaccagaacctcgcttag

SEQ ID NO: 379922 - DNA, 150 bp, Salmonella enterica
atgcttgaggaaacatttggcattgaagagttcaaactctattcttttcttgaatgttatattgatagtaaaaaacagtccttttatcatgaagaacataatactgttgtaataaaagaatcgtctcttttgataaaaatatcgatgtag

SEQ ID NO: 379923 - DNA, 420 bp, Salmonella enterica
atgctgcacgctcccggtcagggaggccgggtatccggcgaacccttttccggtcagataggggctttctcccgtgtgactctctttcatcagggccgccacggtaaggctcatatcgcgtttaggggctttttgcctggcgggcttaacgggcagttcctgcacatccggcacattaagcacctgcgccacctcctgcgctgcctttctgacgccgtaaccggttatgagcttaaccagatccagaccatcaccattgccgcactggctgcaaatccacgtcccgcgcccgtcgaggtcatcgaggcggaagcgatccttgcccccacatttcgggcagggaccgtgcctgccgttttcaggtacatcaatacgcagcatctgcagaatgacgggccatttcccccgcgctgcggctga

SEQ ID NO: 379924 - DNA, 384 bp, Salmonella enterica
atgaaccagccgcaggtttctatttttccggcagaaatgaccactgcgctttaccggcgggctattgcatcggcctggcgccagaaagcgctgaccgaaaccggctgcgatcactatggtccgcacagcctgactgttgaacgtattgaaatggccattgccctgcatatcgagtgtgcactgattaacgaatatggcgaagcacagggagcagcggctgcactggcgctgctgactgacatgctggagccatcattgctgaccgcgccgccggtactgaccgtgcgcggctgtgaagtgatggcggagctgtaccgcacacttccggcggcatttgatgacttctgcagctcgggtgtatcgctgtatcagggggaagtatga

SEQ ID NO: 379925 - DNA, 285 bp, Salmonella enterica
atgaatatttcaaacgggcacaacggtgctcagggccacgctttgcctgaaaaacacaatagcggtgcttttgcgtatgggttgtcagaggacggtttcggaaagctggcccgcgccagaaaggcctgcgacatgttgcagcttctcttttctgaatacccctcgcagggcggaacgctggatgcaggatgtgcgccaggcatcgccgcgctgatggagtacctgcgggcagatttgacggatattgcgcacagttgcgaactgattgaaggaggcacccaatga

SEQ ID NO: 379926 - DNA, 360 bp, Salmonella enterica
atgcgtaattatccgcaacccggcgaacgctggcagcatgagcgtggctggactgtcacgattatcagattaactgaagcctcgccctccgtggcgctggttaaccctgaattcagctgcgaagtgctgattcgtcatgacagcgacaataagctttcttcctgccctctggcatggtttgagcagcggtatacgcgcctgtttaatgccccactctttaaaccttcgccagctcccgcggggggtagcagctctggctcgctgacgctgcatccgtcggtggtatttacccgctggcgggagcgcagcatacggcgttctgctgaacctgacgacagtcactattcaaagtttctctga

SEQ ID NO: 379927 - DNA, 186 bp, Salmonella enterica; identical to SEQ ID NO: 252101

SEQ ID NO: 379928 - DNA, 231 bp, Salmonella enterica; identical to SEQ ID NO: 208461

SEQ ID NO: 379929 - DNA, 1521 bp, Salmonella enterica
atggctatttttcatcttgattttaaaattgtgaaacgttcagaaggcaggtcttccgttgcgaaggctgcctatcatgctcgtacacgcataacagatgaaagaacaggtgatacgtatgattacagtcgccgtactgatttatatgggcatttcatattagctccagctaacgcaccagaacacatcgtaaaagactctacagcattgtggaatgaagtagaaagagttgagcgccagaacaatggtcaaacatcccgttatttcgatgttgctattcctgccgagttaaacaatgacgacaagaaaagacttgtccttgagtattgtcagaaaaatttcgttgataaaggcatgattgctgacatcgctttccatgatcttgatagtgataaccctcatgctcacgttatgttgacattaaaaaccataggcccggaaggttttggtaaaaaagaaagaagctggaacgacagaataatgtctgtgttgtggcgtgaatcatgggcatctatggcgaacagctaccttgctgctgctggttcgtcagaacgtattgatcatcgttcccttcaggcccagcatgaagaagcattagaaaaagcggcggttgctctggataatgaagaaaaagcactatggcttgccaaagccgctgaaacaaaccgtcctccaatgaagcgtatccacagtgccaaatggcgtagtaaagcagctcaagagcaaagagccgcagaacaggctgttcgtgatgctaccaagcaagaagccgttgaagtctacaaaacattcagtgagcttgatcttgaaatcatcgttgatgtcagaagctttacgattacacatcttgctgaaccagaagagattgtattaccaaaaacaagctccagttcttctgccaatgaaacgcaaagacctgtacttgtagcaccacctcctcatactcgtatgcgaggtgttaaatcttaccgtgataaaacaaaagtcagtaaggttgtggctggtattccgccatcaatcagtatttctgattctggtacaaatactattctgaaaacatccacctctcaaaacccaaacagggcatccagaagcgcccctgaacgtgttaagaggaaacagactactccacgtcaggataatatttttaaacgcttcacaactcttgtcatagattttttcaagcagaagtttgtatgggctaaagcaaacaaatcccaaaatgatcttatcagtgaagaacatgataaacgtattgctgaaaactatgtctttgatgaggtattaggccgtcatgtttcacgtaatgaatatgaacaacgtgctaaattcaataatgatgaaaaacaaaaacaaactgagatctgcgccacgaaaccagcggcaggtgaaatttatcgtttcccaagtcgtgtgaaaaaatctgaacaacctagtaacacaccagactacatacctacactctcatctggtaagcgcaatgggccaaaattaagaccgccgggtttccccccaaaataa

SEQ ID NO: 379930 - DNA, 216 bp, Salmonella enterica; identical to SEQ ID NO: 18568

SEQ ID NO: 379931 - DNA, 405 bp, Salmonella enterica
atgagtgaagcattaaaggtactgaacaatattcgaacacttcgcgcacaggctcgtgaaactgatctggaaacgctggaagagatgctggaaaaactctctgttatcgtggatgagcgccgtgaggaagaacatgcaatactcaaggaacaagaacaacgtcaggctaagcttgaagccttccgccagaaactgttagaagatggtatcgatcctgcggagctactttcagcggtaggttccactaagcctaaaaccaaatcgacacgcactccacgccctgctaaatataaatatacagatgataacggtaatgagcagacttggactggtcagggccgtactccgaaagcaatagtggctgctattgaagcaggtaaaacactggaagatttccagatttaa

SEQ ID NO: 379932 - DNA, 468 bp, Salmonella enterica
atgaggaaagtaaaattagacaatgatgatttaattcagtgcatgaacaccattaaagcattaaaaaaatatccaacgatgtctgaatacagagaggaatatcgcaggataagaaccgatggttcaccgttgagtgaagccaagaaatttaaatcggcacataccgaacttctgagattagacaggaagaaaaagtcactactcgaaaaatttattgaagaactcaaccctgtaagtcacgcatcagcccttgcatcaagaaagcttgaaaaagtacaagagtccattatctaccgaaagtcattacttgagaaaagccctgatgaactcgtcgctctggtcataaaacagcgcacagaagcggctcttgagttccagcgttctgttgagcaaagtcttgagcaactttctaacatttcgtcagagttcgaaccatcaagtcaactacaacgaaaaatggccctataa

SEQ ID NO: 379933 - DNA, 291 bp, Salmonella enterica
atgagtaaaaatattgaaattaaaaatacatcaactgagttattttatgatttggcaaagcgttcttttgaagcaagctggaaaacaatgcaggatatgtgtagtgacagcatttcgcatcttgtcgatgacgctgattttatcagtgcatttatacggctcacgattaatcatatttgtcataactttgacaagtttactacgcaggaaggtaatcaaggaaatattgaagaagttaactacgaggaggtagcagaacgacttgtacgtaatgcttgggtgttttgttaa

SEQ ID NO: 379934 - DNA, 381 bp, Salmonella enterica
atgaagaaagataatctgagtaaaaaagatgaaacgatgatattcgccatttcagcaacgctaatgttgtatgtggacaggatatacagcatggcaagtgtaaacaaagatgatgcaatgatttatgtaaatgatgaagatgttgttgagtttgcactacgaatccacatgaaggaagtattaactgagtttgagtattacaaggctgcttatggtacaggaaaggaaaagtatgaatatataaatataacagagctattaaaaagggtgatgttttttcatgatttatatgtcaaggatatgttgataagaaatatagagtcgggacgatcttttgatgattatagtgttttggactgggatatggacataaatagataa

SEQ ID NO: 379935 - DNA, 459 bp, Salmonella enterica; identical to SEQ ID NO: 377279

SEQ ID NO: 379936 - DNA, 459 bp, Salmonella enterica
atgggggacgaaaagagcttagcgcacacccgatggaactgtaaatatcacatagttttcgcgcccaaataccgaagacaagcgttctatggagagaagcgtagggcagtaggcagcatattaagaaaattgtgtgaatggaaaaacgtacgaattctggaagcggaatgttgtgcagatcatattcacatgcttctggagatcccgccgaagatgagtgtgtcgagtttcatgggatatctgaagggtaaaagtagtctgatgctttacgagcagtttggggatctaaaattcaaatacaggaacagggagttctggtgcagagggtactatgtcgatacggtgggtaagaatacggcgaagatacaggactacataaagcaccagcttgaagaggataaaatgggtgagcaattatcgatcccgtatccgggcagcctgtttacgggccgtaagtaa

SEQ ID NO: 379937 - DNA, 468 bp, Salmonella enterica
atggcgggcgagctggcaacccgtctgggtatcaccggctggcctgagggtgaagcactgcgggcaacccgcgtctgcctgaacgcatggctgaaagatcgcgggcacaccgccaatcaggaagatattgccgcactggagcaggttcgtagtttctttaccgcgaatcagtacagccgctttgcagactggtatgacgagcgcaaccgccccggcaatatggtgggctggcgcagggtggagaaaggcaataccgcgcagggcacggaagctgtcactacgttctatgtcatgccgtccggctggaaagaaatctgcaggggatttgacccgcgcaaggtggctcgtctgtgcgcagatcgtggatacctgctgccctccactgatggcaaactccagacaaccattcgcccgccagagatgaatccccgcaggctctatgtcttcaacagcgaggtgccgggttaa

SEQ ID NO: 379938 - DNA, 237 bp, Salmonella enterica
atgtttgcaaagctgcgcaccacaaaatacctgaaaactgccgccagcgccgactctgccagtgtacagtttgaaggcaaggtgcagcgtattgcccgtgttcaccattacggcctgcgtgatcgcgtcagtcgcaaaggaccggaggtccgttacgcagagcgtcgcctgctgggtgtaaatgatgatgttgaggcaatgacccgcgacatgattctgcaatggctggcggggtga

SEQ ID NO: 379939 - DNA, 324 bp, Salmonella enterica; identical to SEQ ID NO: 33973

SEQ ID NO: 379940 - DNA, 2415 bp, Salmonella enterica
gtggtaaaaatcggcgctgacggcgaggtgacgcgtctgcgtgatgtcgcccgcgtcacgctgggcgcagatgcctatacgctgcgcagtttactgaatggcgaagcggcgccagcgttacagattattcaaagtccgggcgccaatgcgattgacgtttctaacgcgattcgcggcaaaatggatgagttgcagcaaaacttcccgcaggatatcgaataccggattgcctatgatcctacggtcttcgtgcgcgcatcgctacaatcggtggcgattacgttgctggaagccctcgtgctggtcgtccttgtcgtggtgctgttcctgcaaacctggcgggcgtccattattcctctggtggcggttcccgtttcgctggtcggcacctttgccttgatgcacctgtttggcttttcgctgaatacgctttcgctgtttggtttggtcctgtcgataggtatcgttgtcgatgacgccatcgttgtggtcgaaaacgtggaacggcatatctcgcagggcaaaagccccggagaggcggcaaagaaggcgatggatgaagtcactggtcccattctttctattacctcggtgctgacggcggtctttatcccttccgcattcctggcgggcctgcagggtgagttttatcgtcagttcgcgttgaccatcgctatttcgaccatcctttcggccattaactcgctgacgctctcccctgcgctggctgccattttgctaagaccgcaccacgatactgcgaaggctgactggctaacgcggttgatgggcacggtcactggcggttttttccatcgctttaaccgtttcttcgacagcgcgtcgaaccgctatgttagcgccgtccgtcgggccgtgcgcggcagcgtcattgtgatggtgctctatgctggctttgtggggctaacctggcttggcttccatcaggtgccgaacgggtttgtgcctgcgcaggataaatactatctcgtcggcatcgcccagctcccaagcggcgcatcgttggatcgcacagaggcggtcgtgaaacagatgtccgctatcgcgctggcggaacccggcgttgaaagcgtcgtcgtcttccccggtctgtcggttaacggcccggtaaatgtgccaaattcggcgctgatgttcgccatgctgaaaccctttgacgagcgtgaagatccttcgctttccgctaacgctatcgccggaaagctaatgcacaaatttagccacattcccgacggatttattggcatcttcccgccaccgccggttccagggcttggcgcgacgggcggctttaaattgcagattgaagatcgtgcggaactgggatttgaagcgatgacaaaggtgcaaagcgagattatgtctaaggcgatgcagacgcccgaactggccaatatgctggccagtttccagacaaacgccccgcagttacaggtggatatcgaccgggtaaaggcgaaatcaatgggggtatcgctcaccgacatctttgaaacgttgcaaattaacctcggctcgctttacgtcaacgatttcaaccgatttggccgtacctggcgggtgatggcgcaggccgatgcgccattccgtatgcagcaagaggatatcggcctgcttaaagtccgcaatgcgaagggcgagatgatcccgcttagcgctttcgtcacgattatgcgccagtcggggccggacagaatcatccattacaacggcttcccctcggtagatattagcggtggaccggctccgggcttctcctccggacaggcgacggatgcgattgaaaagatcgtgcgtgaaacgttaccggaagggatggtcttcgaatggaccgatctggtttatcaggaaaaacaggccggcaactccgcgcttgctatctttgcgctggcggtgctgttggccttcctgatcctggcggcgcagtacaacagttggtcgctgccctttgccgtcctgcttattgcgcctatgtcattactctcagccattgtcggcgtgtgggtatctggcggagataacaatatctttacgcagattggtttcgtggtgctggtcggcctggcggccaagaacgccattttgattgtcgagtttgcccgcgccaaagaacacgacggcgcagacccgctgaccgccgtactggaagcgtcccgcctgcgtctgcgtcctatcctgatgacctcattcgcctttatcgcaggcgtagtaccgctggtactcgcgacgggtgccggcgcggaaatgcgacatgcgatgggcatcgccgtgtttgccggcatgttgggcgtcacgctcttcggcctgttattgacgcctgtattttacgtggtggttcgcaggatggcattaaagcgtgagaaccgcgttgattcacatgatcagcaagcataa

SEQ ID NO: 379941 - DNA, 711 bp, Salmonella enterica
atgcgcgaaattggcgtggatattagcggcttcgccaccaccgccgaacggttagggcaggaagggaaatcgccgctctatgcggctattgacggtcaactggcggcgattatcgccgtggccgatccgatcaaacccagtacgcccgccgcaattaacgctttacatcagctcggcattaaggtcgccatgatcactggcgataatgcccgcacggcacaggctatcgccagacagttaggaagtgatgatgtggttgccgaggtattgccagaagggaaagtcgaggcgatacggcgcctgaaagcggcgtatgggcaggtggcgtttgtcggcgatggcatcaacgatgcgccagcgctggcggagtccgacgtggggctggcgattggcaccggcaccgatgtggcggtggaatccgccgacgtcgtactaatgtccggcaacctgcaaggcgtgccgaatgctatcgcgctgtctaaagcgaccatccgcaatatccaccagaatctgttctgggcctttgcttacaatacggcgctgattcctgtcgcggcaggcgcgctatttccggtctggggcatattattgtcaccggtattcgccgcaggggcgatggcgatgtcgagcgtgttcgtgctgggcaacgctttgcggctgcgccgtttccgggcgccgatggcaaccccatccgacacatccacgacatga

SEQ ID NO: 379942 - DNA, 3363 bp, Salmonella enterica
atgactatgttgcagctttataaacgttcacagcattttgtttttattacaattagcgtccttattatcttgctgtcctgtcagtctctggcatttgcccgggggcaaacgaatggcgacctgccgtcaaaagcggatgtgcaaaaccagctggatacgctgaataagcaaaaagatctctccgcccaggataagttcgtccagcaggaccttattgatacgttagctacgctggagaaaatcgagcgggtgaaagaggaaaccgtacagctacggcagaaggtggcgcaggcgcctgaaaaaatgcgtcaggcgacggctgcgttgaatgcgctgagcgatgtcgataatgatgatgaaatgcgaaaaacgctgagtgcgctttcgctacgtcagcttgagctgcgcgtggcgcaggtactggatgatttgcaaaattcgcaaaacgatcttgccgcttataacagccagcttgtttcgctacagacccagcctgagcgcgtgcaaaacgccatgtataccgcctcacagcaaatacagcaaatccgtaaccgtctggacggcaataacgttggcgaagccgcgcttcgccccagccaacaggtgttattacaggcacagcaggcgctgcttaatgcgcagatcgaccagcaacgtaagagtcttgaaggaaataccgttttgcaggacaccctgcaaaaacagcgggattacgtgacggccaacagtaatcgccttgaacatcagcttcaacttttacaggaggcggtcaacagtaaacgacttacgctaacggaaaaaacggcccaggaggccatttcgccggacgaaacggcgcgtatccaggcaaacccgctggtaaaacaggaactggatattaaccatcaactcagccagcgtctgattgtcgcgaccgaaaacggcaatatgttgatgcagcaaaacattaaagtaaaaaactggctcgatcgcgcgctgcagtcggaaagaaatatcaaagaacagattgccgtcttaaaaggcagcctgttgctgtcgcgtattctttatcaacagcagcaaaccctgccctccgccgacgaactcgaagatatgaccaaccgcattgcggatttgcgtctggagcagtttgaaatcaaccagcagcgtgatgccttattccaaagcgatgcctttgtcgacaagctggaggaggggcataccagcgaggtgaatgatgaagttcatgatgcgttgcttcaggtggtggagatgcgccgtgagctattggatcagctaaataaacagttgggtaaccagctgatgatggcgattaacctgcaagttaaccagcagcagttgatgagcgtctcgaaaaatctgaaagccattctgacgcagcagattttttgggtgaacagtaaccgccctatggactgggactggcttaaagcgttcccccaaacgttaaaagagcaattcagcgccatgaaaatcacggtgaactggcaaaaagcctggcccgcggtatttattgcttttttggccgggttgccgctcttgctcatcgccggtttaatccgctggcgtctgaaatggttaaaagcgtatcaacagaagctggccgccgccgtgggatcgctgcgtaacgatagtcagctcaatacgccaaaagctattctgatcgatctgatccgcgcgctgccggtgtgcctgattatcctcgcgcttggactgatcctgctgaccatgcagctaaatatcagcgatctgctctgggcctttagtaaaaagctcgcgatgttctggctggtctttgggctgtgctggaaggtgctggaaaaagagggcgtggcaatacgccatttcggtatgccagcgcagttgaccagccactggcgtcgccagattgtacgcattagcctcgcattgctgccgctgcacttttggtctgtggtggcggagttgtcgccgctgaatctgatggatgacgtgctggggcaggcggttattttcctcaatctgctggtcataacattgctggtgtggccactgtgccgggaaagctggcgcgataaagaatctcacggcattcgactggtgaccgtgacgattctttccattattccggtggcgttaatggtattaacggcgaccggctatttctataccacgctgcgcctggcgggacgctggattgaaaccgtctatctggtcattatctggaacctgctttatcaaacggtgctgcgcgggttaagcgtagcggcgcgccggattgcctggcgacgcgcgctggctcgtcgtcagaacctggtaaaagagggagcggaaggcgcggagccacaggaagaacccgccattgcgttggagcagattaaccagcaaacattacgtatcacgatgctgctaatgcttgccctgtttggcgttatgttctgggcgatttggtccgatttgatcaccgtattcagctatcttgatagcatcacgctgtggcactacaacggctccgaagctggcgctgcggtggtgaaaagcgtgacgatgggcagcttgctattcgccattattgccgcgatggtggcctgggcactcatccgcaacttacccggcctgttggaagtgctggtgctttcacgtctgaatatgcgccagggggcttcgtatgcgatcaccacgatccttaactacgtcattatcgctgttggcgcgatgacagtattcggatcgctcggcgtctcgtgggataaactccagtggctggcggcggcgttgtcggtgggtctcggttttgggctacaggagatcttcggtaactttgtctcgggtttaatcatcctcttcgaacgtccggtacgcattggcgatacggtaacgatcggcacctactccggcacggtcagtaagattcgtattcgcgccaccactattaccgattttgatcgtaaagaagtgatcattccgaacaaagcgttcgtgacggagcggctgattaactggtccctctccgataccacgacacgtctggtgatccggcttggtgtggcctatggctcggatctggagaaagtgaaaagagtcctgctacaggcggcgatggagcatccgaaggtgatgcacgatccggaacctgccgtattcttcaccacctttggcgccagcactctggatcatgaactgcgtctgtatgtgcgtgaattgcgcgatcgtagccatacggtggatgaactgaaccgcgcgatcgatcgactgtgccgtgaaaatgatatcaatatcgcctttaaccagcttgaggtgcatctgcataacgcgaagggcgacgaagtcactgaagtgaagcgcgatctcaacggcggcgatctggcgcctacgacaagctaa

SEQ ID NO: 379943 - DNA, 852 bp, Salmonella enterica
gtgttgtgcccggatctgggcatcgtttcggacgccaaagcggcgctaacgttgctgatcgatgtcgcgcaggagatgcaaaaggcggggcgtttgccatgccggaagacctgggtggacgaatgccagcagcgtaaacggactttgctgcgtaaaacccactttgacaacgtgccagtgaagccgcagcgcgtctatgaagagatgaacaaagcctttggtcgcgatgtgtgctatgtcaccaccattggattgtcgcaaatcgcggcagcgcagatgctgcatgtgtttaaagacagacactggatcaactgcggccaggcggggcctcttggctggacaatcccggcggcattaggggtttgtgctgccgatccgcaacgcaatgtggtggcgatttccggcgatttcgacttccagttcctgattgaagagttagccgtcggcgcgcagtttaacattccgtatatccatgtgctggttaacaacgcttatcttggtctgattcgccagtcgcaacgcgcatttgacatggactactgcgtacagcttgcctttgaaaatatcaactccagcgaagtgaatggctatggcgttgaccatgtaaaagtggcggaagggttaggctgtaaagcaattcgtgtctttaaaccggaagatattgcgcctgcatttgaacaagccaaagcgctaatggcgcaatatcgcgttccggtggtggtggaagtcattctggaacgcgtaaccaatatttccatgggcagcgaactggataacgtaaccgagtttgaagaggttgcggatagtgcgaaagatgcgccaacagaaacctgttttatgaaatatgagtaa

SEQ ID NO: 379944 - DNA, 879 bp, Salmonella enterica
atgaaactgggatttattggcctgggaattatgggctcgccaatggctatcaatttggcacgcgccggtcatcaattacacgttacgactattggtccggtcgcggacgaactgctctcgctgggggcggtaaatgttgagactgcacgtcaggtaactgaatttgcagacatcatcttcataatggtgccggatacgccgcaggttgaagacgtgttatttggcgaacacggttgcgccaaaacatcgcttcagggaaaaaccatcgtcgatatgagttctatttctcctatcgaaaccaaacgttttgcccagcgcgttaatgaaatgggcgctgattacctggatgccccggtttccgggggagaaatcggggcgcgtgaaggcactctgtcgattatggtcggcggcgagcagaaagtctttgaccgcgttaaaccgctctttgacatccagggaaaaaatatcaccctggtgggcggcaatggggatgggcaaacctgtaaggtggctaaccaaattattgttgcgctgaatattgaagcggtttctgaagccttagtgtttgcttcaaaagcaggcgccgatccggtacgcgtgcgccaggcgttaatgggcgggttcgcctcttcacgcattctggaagttcacggcgagcgcatgatcaaccggacgttcgagcctggtttcaaaatcgcgcttcatcagaaagaccttaatcttgcattgcaaagctcaaaagcgctggcgctgaatttaccgaatacggcgacctgccaggaattattcaatacctgtgcggcaaatggcgggagccagcttgatcattcggcaatggtacaggcgctggaattaatggccaatcataaattgtcctaa

SEQ ID NO: 379945 - DNA, 147 bp, Salmonella enterica
atgtttgaaaaattaggtctgccaaaaaatctattatggggctacattggcctgacaatatttatgataggcgatggcgttgaacaagcatggatttcgatttggcttgttgaaaaggtttgtctgttgcccaggcatcttatttaa

SEQ ID NO: 379946 - DNA, 1488 bp, Salmonella enterica
atgcagggcacaaaaattcgactcttagcgggcagtctgttgatgttggcctctgccggctatgtgcaggcagatgcgctccagcccgatccggcatggcaacaggggacgctggctaatgggttacagtggcaagtgttggctacgcctcagcgccccagcgatcgtattgaagttcgtctccaggttaataccggttcgctcaccgaaagtacgcaacagagcgggttcagccatgagattccccgtatcgcgctgacgcaaagcggtggtctggatgccgcacaggcacgttctttatggcagcaagggtttgatcctaaacgtcccatgccgcccgttattgtttcttatgattccacgctctataacctcagtttacccaataaccgtaacgatctgctgaaagaagcgctgacctatctggctaacgtctccggtaaattaaccattacgccagagacggtgaatcatgcgttaagcagcgaagatatggttgcgacgtggccagcagatactaaagagggctggtggcgttatcggctgaaaggatcggcgttattggggcacgatcccgcggaaccgttaaagcaaccggtagacgcagccaaaattcaggctttctatgaaaaatggtacaccccggatgccatgacgctgattgttgtcggcaacattgatgcgcgctccgtcgccgagcagatcaataaaacgttcggtacgctgaaaggtaaacgcgaaacgcccgccccggtgccgacgctttcgccgctgcgggcggaatcagtgagcattatgaccgatgcggtgcgccaggatcgtctctccattatgtgggatacgccgtggcaaccgattcgcgagtcggcggcgctgttgcgctactggcaggcggatctggcgcgcgaagcgctgttctggcatatccagcaagagcttactaaaaataacgcgaaagatattggtctggggtttgactgccgggttctgttcctgcgcgcgcagtgcgccatcaacattgaatcacctaatgataagctcaataccaatttgagcctggtggcgaatgaactggcgaaagtacgcgataaaggtttgtcggaagaggagtttactgcgctggtggcgcagaaaaatctcgaattgcaaaagctgttcgcgacctacgcgcgtaccgatactgacattttgactggacagcgtatgcgctcgctgcagaatcaggtggtggatatcgcgccggagcagtatcagaagctgcgtcagaatttcctcaacagcctgaccgttgatatgctcaatcagaatttacgtcagcagctatcgcaggagatggcattaattttgctgcaaccgcaaggcgagccggaatttaatatgaaggcgttaaaggcgacgtgggatgaaatcatggtcccgacaactgccgccgctgttgaagcagatgaggcgcatccggaagtgacggagacaccggcggcacagtaa

SEQ ID NO: 379947 - DNA, 297 bp, Salmonella enterica
atggcgacgttaacgatgaaaaacggcgttccaccggagaaagtggatgtcgtcagcgggaacgcgcaagggacggggccggtcgggttttccgccgccttactgcctttcctgcaaaatcgcgacgcccaggccgtgcagcgacagcgggtcgcagaccattttcctggcagcgatgcctattacaactatgtgctgactctctttggacaaggctgggatcagcaccgttttcgcttcaccgtcaaaggtgaattattacctgactggggccaggaatgcgtaagttcacgttaa

SEQ ID NO: 379948 - DNA, 183 bp, Salmonella enterica; identical to SEQ ID NO: 373614

SEQ ID NO: 379949 - DNA, 1191 bp, Salmonella enterica
atgacaatcaatccagtttcccgcaaggtcgcgtggctacgggtagttacgcttgctattgccgcttttattttcaataccacagaatttgtgccggttggtttgctatcagacattgctgaaagctttcatatgcaaaccgcgcaggtcggcatcatgctaaccatttacgcctgggtagttgccgtcatgtcgctgccttttatgcttcttaccagtcaaatggagcgccgtaagctactcatttgtctgtttgttttgtttattgccagccatgtgctctcctttctggcatggaactttaccgtgctggtcattagccgtattggtatcgctttcgcccacgctattttctggtcgataaccgcctcgctggcgatccgcctggcccctgccgggaaacgcgcacaggcattaagtctgatagcgaccggcaccgcgttggccatggtgcttgggctgccgataggtcgcgttgttggtcagtattttggctggcgcaccaccttttttgccatcggcatgggcgcattaattacgctgctatgtctgattaagcttctaccgaaattgccgagcgagcattccggctcactaaaaagtttacctttgctattccgacgcccggcgctgatgagcctctatgtactgaccgtcgttgtggtgactgcgcattacacagcttatagctatattgagccgttcgttcagaatgtcgccgggctcagtgcgaattttgctaccgtcctgttactgatcctcggcggcgccgggatcatcggcagccttgtgtttggtaaactgggtaatcgtcatgcctcgtcgctcgtcagtatcgctattgccctgctggttgtctgtctgcttctgctgctgcctgcggcggatagcgaagcgcatctggccatactgagcattttctggggcatcgcgattatggtgatagggctcggtatgcaggtgaaagtactggcgctggccccggacgcgaccgatgtcgcaatggcgctattttcaggcatctttaatattggtattggcgctggcgcgctggtaggcaatcaggtgagtttgcactggtcaatgtcggccatcggctatattggcgacatacccgcctgtgccgcgctggtatgggctgtgctcatattccgcaaatggccagtgacgctggaagaacaaccgcattaa

SEQ ID NO: 379950 - DNA, 1083 bp, Salmonella enterica
gtgattgaacgcgattatccggccacctatgaacggtttacctcgctgggtcccctgctggataaattaggcaacggcggtaagggtattgcctggaatacgcaagatgaagtcgatttcctcggtaagctcaattacaccaaacacgatggtccggcgaaaggacgtccgcgaatagacaccgcgctggatgcttcggaagtgattcttgccttagcgccggaaaccaacggccaggtggcggtgaaagcctggcaggcgttgggcgagatgaccgggcgcgagcacacccatctggccatcaataaagaagatgagaaaattcgctttcgtgatatccaggcgcaaccgcgcaaaattatctccagcccgacctggtcagggctggaaagcgagcatgtctcttataacgccggctataccaacgtacatgaactgatcccgtggcgcacgttgtcggggcggcaacaactctatcaggatcatgcgtggatgcgcgcttttggtgaaagcctggtggcatatcgtccgccgattgatacccgcagcgtcagcgaaatgcgagaaattccgcccaacggtttcccggaaaaagcgcttaacttcctgacgccgcaccagaaatggggaattcactccacctacagcgaaaacctgctgatgctgaccttgtcgcgcggcgggccgattgtctggatcagcgaagccgatgcccgtgaactgggtattgaagataacgactggattgaagccttcaacgctaatggcgcccttaccgctcgtgcggtggtcagccagcgcgtcccgccgggtatgaccatgatgtaccacgcccaggagcggattatgaacattccgggttcggaagtcaccgggatgcgcggcgggatccataactccgtgacccgggtctgtccaaaaccgacgcatatgatcggcggctatgcgcaactggcttacggcttcaactattacggaaccgtgggttcgaatcgcgatgaattcatcatgatcaggaagataaaaaacattaactggctggatgatgagggccgggatcaggtacaggaggcgaaaaaatga

SEQ ID NO: 379951 - DNA, 168 bp, Salmonella enterica
atgcttattttacgcgattacattgttgtaccggatgtaccgtcgttgtatcagttacttcagcagcagtttggtctcggcgtaaatgatgtaaagcacggttttaccgaggcggagctggccgcggtaatggctgcatttgatacccatccggaggcgggaaaataa

SEQ ID NO: 379952 - DNA, 552 bp, Salmonella enterica
gtgaattacgatgtggtcggcaaaggcagcggccagccggtgtgggacgaacagtatgacgtcaggacgcttttgcgcgagcaaaacgtcacagagtgggtgattgtttcaaccggtatatttacctcttttctcttcgaaccagcctttgatgtggtcaacttagcccaaaaaaccatcaatgccctcggcggatgggaaaggcaggtcaccgtcacgtcgcctgcggatattggtcgcctgaccactgaaatttatctgcatcagccgcgtatcactaacgaagtcgtctttgtcgcgggggaaacgacctcttatgcaaaactggcggaaacggtcgaacgcgtgacgcagcaaacctttacccgaggcgtattgacgctacctgacttacaggagcagctccgtttacatccgcatgacccaatgctgcgctatcgcgtcgccttcgcgcgtggtgacggtatgtggtggccgatgagtgacacctggaatgcacaacatcatctgccgacacaggatattgccgcctggctgaaaacacagcaatga

SEQ ID NO: 379953 - DNA, 1380 bp, Salmonella enterica
atggccgaaatccgccgtatttccggcgtaacggatgtccgtaccgttccctggatgccgtccgaacgtgaacatctggccctgagcgcgctgcttgaggcgttgccggagccggtgctctcattggatatgaagagtaaagtggagatggcgaacccggcgagttgtcagctttttgcccagaaccaggagcgaatgcggcaccataccgccgcacaattaatcaacggcttcaattttcagcgctggctggacggtaacccgcaaagctcccataacgaacatgtcgtgatcaacgggcaaaacttcctgatggagattacgccggtacatttacaaaacgaaaatgacgaatacgtgttgaccggggcggtcgtgatgttgcgttccacgattcgtatggggcagcagctacagaatttgtccacgcaggatctgagcgcgtttagtcagattattgccgtgagcgcaaagatgaagcacgtcgttgagcaggcgcgcaaactggcgatgctcagcgcgccgctgctgattaccggcgatacgggaaccggcaaagatcttttcgcctatgcctgtcaccaggcaagccctcgttcagcgaaaccgtatctggcgctcaactgcgcttcaatcccggaagatgcggtagaaagcgaactatttggccatgcgccggaaggtaaaaaaggcttttttgaacaggcgaatggcggttcggtgctgctggatgaaattggcgaaatgtcgccgcgtatgcaggcgaagctgctacgttttctcaatgatggtacgttccgtcgcgtcggcgaagatcacgaaattcatgttgatgtccgcgttatctgcgccacgcagaaaaatctggtggagctggtgcaaaaaggactgttccgcgaagatctctattatcgacttaacgttctgacgcttaatttgccgccgttgcgcgattgtccgcaggatattatgccgttgaccgaactgttcgtggcgcgttttgccgacgaacagggcgttccgcgaccgaaactgtctgccgatctgagtacggtcctcactcgttacggctggccgggtaacgttcgccagcttaaaaatgcgatttaccgggcgctgacgcaactggaagggtatgagctgcgtccgcaggatatcctgctgcctgactacgatgccgcgacggtggcagtcggcgaggatgcgatggaaggctcgctggatgacattaccagtcgttttgaacgttctgtcctgacccagctttatcgtagctatccgagtacgcgtaaactggcgaaacggttgggggtatcgcataccgcgattgccaataagctgcgtgaatatggtctgagccagaagaagggtgaagagtag

SEQ ID NO: 379954 - DNA, 207 bp, Salmonella enterica
atgcgaaatctgagaatgatgctcttcggcgcaagcttgataatggtggtcgggtgctcgtcaaaggaaaatgccctgtgccatcctcagccgaaacctccagcgcctccggcatgggcaatgatgccaccgtcaaactctctccagttgctggacgaaacgttctcggtatccgggacggaatcatcagtgaccaaacagcactga

SEQ ID NO: 379955 - DNA, 2007 bp, Salmonella enterica
atgaaggggagattattgcaacggcttcgtcagctcagtatcagcaacagtttacggggcgcatttttaacgggcgcattactgacgctgattgtcagtatggtcagcctttattcctggcatgagcaaagttcgcaggttcgctattcgcttgatgaatattttcctcgcatccactccgcttttttaattgaggggaacctgaatctagccgtggatcaactcaatgaatttttgctggcgccgaacacgacggtacgtttgcagttacgtacgcagattattcagcatctggataagattgagcgtctcagtcaggggcttcagcttgctgagcgccggcaactggccgtcattttacaggatagccggaccttgctggcggagctggacaacgccctctacaacatgtttttggtgcgggagaaagtcagcgagctttccgctcgcatcgactggctccatgatgatttcaccacggagctaaattcgctggtacaggattttacctggcagcaagggacgctgctcgatcaaattgaggcgaatcagggcgatgcagcgcagtatttgcaacgttcgcgcgaggtgcagaacgagcagcagcaggtatataccctggcgcgaattgaaaatcagattgttgatgacctgcgcgacagattgaatgagctcaagtccggcaataatgacgggatgctggtggagacccatattcgctatctggaaaacctaaaaaaaacggcggatgagaatattcgtgcgctggatgactggcccagtacgatcacgctacggcaaaccatcgacgaactattggaaatcgggatggtaaaaaataagatgcccgataccatgcgcgattatgttgcggcgcaaaaagccttactggacgccagccgcgccagagaggctacgctagggcgctttcgcacgctgcttgaggcgcagttaggtagtagtcaccagcaaatgcagacgttcaatcaacgcctggaacagattgttcgcgttagcggcgggcttattttagtggcgacgctcctggcgttgctactggcctggggactcaaccactattttatccgttcccgactggtgaagcgttttaccgcgcttaatcaggctgtggtacagatagggctggggagaaccgactcgactatcccggtttacgggcgcgatgagctaggacggatagcccgtttgctacgtcatacgctgggccagctcaatatgcaacgcaggcagcttgaacaagaggtcgccgaacgcaaagagatagaagccgacctgcgcgccatgcaggatgagttgattcagacggcgaaactggcggtagtcggccagaccatgaccacgctggcgcatgaaattaaccagccgctgaatgcgctttcaatgtatttatttacggcgggacgcgcgattgaacaaggtcagagcggacaggcgagaaatacgctcaccaaagcggaagggctcattaaccggattgacgccattatccgttcgctgcggcagtttacccgccgggcggagctggaaacgccattgtatcccgttgatctgcgccaaaccttcgtggcggcatgggagttattagccatgcgtcaccaatcccggcagggagcgctttcactgccaaccgacaccgtatgggttagcggcgatgaagtgcgtattcagcaggttctggtgaatgtgctggcgaatgcgcttgacgcctgttcgcatgatgcggcgatcgcggtgacgtggcagacgcagggagaggcgctggaggtttatattgcagataacggccctggctggcctgtggcgctgttgccctctttactcaagccgtttactaccagtaaagctgtcgggttgggtattgggctgtcgattagcgtgtcgctgatggcgcaaatgaagggcgacctgcgtctggcgtcgacgctgacgcgtaacgcttgcgtggtgctgcaattctctgtaacggatgtcgatgatgttgaatga

SEQ ID NO: 379956 - DNA, 264 bp, Salmonella enterica
atgttattggatacgaatgatgatataagaattgaggttatatcaggtctggcagagagaaaggatgaacgtgttctggaaaccataattaaagaacttaagaaaggtgtgatttttgatgaaattattattgcagccgggaatgccgggagtaaagaattacttcctattctaaatgaactattaaatgaatttagagatgaacgtattatagacaaaattaatgaatcgataaaaaaaataaaagaaaatgtttgtgaataa

SEQ ID NO: 379957 - DNA, 1236 bp, Salmonella enterica
atgttaacaaaagatttgtctgttaccttttgcggcgttaagtttcccaatccgttttgtctttcttcttctccggtaggcaattgttatgagatgtgcgccaaagcctatgataccggctggggcgggatcgtttttaaaaccattggtttttttattgccaacgaagtctctccacgttttgatcacctgacgaaagaagataccggttttattggtttcaaaaacatggagcaaattgctgagcatccgctggaagagaatctggccgccattcgacggctaaaacaggattatccggataaggtgctgattgcttccatcatgggggaaaatgagcagcagtggcaggaactggcgcgtctggttgaagaagccggcgcggatatgattgagtgtaacttctcttgcccgcagatgacctcgcacgccatgggaagcgatgtagggcaaagcccggaactggttgaaaaatactgccgcgccgtaaaacgcggttcatctttgccaatgctggcgaaaatgacgccgaatattggcgatatgtgtgaagtcgcgctggccgccaaacgcggcggggccgacggtatcgccaccatcaacaccgtgaaatccattactaacattgacctgaaccgcaaaatcgggatgccggtggttaacggtaaatccagtatctccggttattcaggaaaagcggtgaaacccattgcgctgcgttttatccagcagttgcgaatgcaccctgagctgcgcgatttcccgattagcggtatcggcggcattgaaacctgggaagacgctgccgaatttctgctgctgggcgcggcgaccctacaggtgacgacaggcattatgcaatacggttaccgcattgtagaagatatggcgagcggcctcagccactatctggccgatcagggatttgcctcattacaggagatgatcgggctggcgaatggcaatattatcccggcggaagacctggatcgcagctatatcgtctatccgcggattaatcaggagaaatgcgtcggctgcggacgttgctatatctcctgctatgacggcggtcatcaggcgatggagtgggatgaacacagccgcacgccgcattgcaatacggaaaaatgcgtcggttgtctgctgtgcggtcatgtctgcccggtcgcctgtattgatttaggcgaggtcaaatttaaaaaaggcgaaaaagagcacgcgttaacgctgtag

SEQ ID NO: 379958 - DNA, 1161 bp, Salmonella enterica
atgattaaggcggagacgatggaacgtaatgtcacgctggattttgtacgtggcgtcgctatcctcggtatcctgcttcttaacattagcgcctttggattgccgaaggcggcttatctcaatcccgcctggtacggcgcgatcgttcccgaagacgcctggtcctgggcgattctcgatattgtggcgcaggctaagtttcttactctgttcgcgttgttgtttggcgcggggctacaaatgctgcttccgcgtggtaaacagtggattcagtcgcgcttaacgctattggtactgttaggttttatccatgcgttattcttttgggacggcgacattctgctggcctacggtctggtcgggttaatttgctggcgactggtacgcgacgcgccttcggtaaaaagcctgttcaatactggcatactcctttatctggtcgggattggcgtgctactgctgctgggcgtggtatcgagtagcgaaaccagccgcgcctggacgccggatgcgtcggcaatattgtatgaaaaatactggaagctgaatggcggcatggaggctatcagcaaccgggcagagatgctgtcgaatagtttactggcgctcggcgcgcagtatggctggcaactggcgggtatgatgctgctgggcgccgcgctaatgcgtagcggctggctgaaaggtcagtacagtctgcggcactatcgccgtaccggggctctgctggtggcgttagggctaatgatcaacctgcctgcggtcatcttacaatggcggctggactgggcgtaccgctggtgcgccttcttattgcaggcgccgcgcgaactgagcgcgccgttgcaaacgctgggctatgccgcgctgatgtttggcttctggccgcagcttagccgatgcagactgacgcttgccattgcctgcgtagggcgaatggcgctgaccaattatctgctgcagacgatcatctgtaccacgctgttttatcagtttggcttatttatggaattcaatcggctggaactcttgttctttgtcgttccggtatgggcaataaaccttctcttttccgtcatctggctacgtttctggcgacagggaccggtcgagtggttatggcgtcaactcacgttgcgcgcgtcaggatcgctcagataa

SEQ ID NO: 379959 - DNA, 375 bp, Salmonella enterica
atgcgtttctttgacgtatccggcgtgacggttacagaccttcaggacgcggagcttcaggtgaaagccgctgaaaaaagcgagttcagggagtggatactgcagtgggggccgttacacagagtgctggagcgcaaagcgccggaacgcgttaacgcgcttcgtgaaaagcaaatatcggattatgaggaaacgtaccggatgctgtctgacacagagctgagaccgtctgggctggtcggtaataccgatgcagagcgcactatcggagcaagagcgatggagagcgcgaaaaagacatttttggatggcctgcgacctcttgtggaggagatgctggggagctatctgaacgttcagtggcgtcgtaactga

SEQ ID NO: 379960 - DNA, 183 bp, Salmonella enterica
atggtgttattttcgatcataagtcaactcctggttttcagccccgggctttcgctgtaccccatcgggattcacagtgatgtcactcgcggcgacttaacgccgtcgtcctcggtaatcgtcgcacccggcctgttgcccgacatgttcccctgtagacatgggcgcagggcgaaagattaa

SEQ ID NO: 379961 - DNA, 753 bp, Salmonella enterica
atgagtgcgatcgaagtcaccaacctggtcaaaaaatttcatggtcaaacggtgctgcacggtatcgaccttgaggtgaagcccggagaagtcgtcgccattatcggcccgagcggctcagggaagacaacgttattacgctgcattaacctgctggaacaaccggaagcgggcaccattaaagtgggcgatattatcatcgataccgcgcgcccattcagccagcaaaaagggttgattcgccagctacgtcagcatgtcggctttgtctttcagagttttaacctgttcccgcatcgtaccgtgctggaaaatatcattgaaggtccggtgattgtaaagggagagccgaaagccgaggcgacggcgctggcgcgggaactgttagccaaagtcgggttggccggtaaagagacccgttatccgcgccgcctgtcgggcgggcaacagcagcgcgtggcgattgcgcgcgcgctggcgatgcgcccggaagtgattctgtttgatgagccgacgtcggcgcttgatcctgaattagtcggcgaggtgcttaatacgattcgccagctggcgcaggaaaagcgcacgatggtgatcgttactcacgaaatgggctttgcgcgtgacgtggctgaccgggcaatatttatggatcaggggcaaatcgtcgagcaggggccggcgaaaaccttgttcgccgatcctcagcatccgcgtacccgccagttccttgagaaatttttagtgaaataa

SEQ ID NO: 379962 - DNA, 171 bp, Salmonella enterica
atggtaatgctggcctgtgggttcgtttcgcaacagcaattgctccagacatctcttgtgctggattataatcaattaagccattctggacggcatatcgcattattactgtggttcgttgttgcagacgtgcagctacttctagtcgtccagaagccgcaacagttttga

SEQ ID NO: 379963 - DNA, 312 bp, Salmonella enterica
  misc_feature (282)..(291): n is a, c, g, or t
atgatgataattatttctttgacgatcttaattattatccttacctactttatagaaattaattcagtggttcatggtcagggcgttatcactactaaagataatgctcagttaatatctctttctaaaggagggacgatacaagatatttatgtagccgagggtgatactgtaaaaaaaggagaactccttgcaaaggtcgttaaccttgatctgcaaaaagaatatcaaaggtatagaactcaaaaagggtatctggataaagatgttaacgaaatatcnnnnnnnnnncgaaatatctttcattcttga

SEQ ID NO: 379964 - DNA, 951 bp, Salmonella enterica
atggcaaactggccaaacccgtttattgaacaacgtgccgatccgtttattttacgcgacggcagcgattactactttattgcctccgtaccggaatatgacaggctggaaatccgccgggctaattcgctggaagggttgcgcgccgccgaccccgttgtcgtctggcgtaaaccggaaagcggccctatgagccagctcatctgggcaccggaaatgcaccgcatcaacggcaagtggtacatctattttgccgctacccatactcaagcgcttgataagctgggaatgttccagcaccgcatgtttgccctggagtgcgccgatgccgacccactcaccggcaagtggacggagaaaggtcaaattaaaacaccgtttgataccttcgccctcgatgccaccactttttatcatcagggaaagcagtggtatctgtgggcgcaaaaagcgccggatattgccggtaactcaaatatttatctggctgaactggaaaatccgtggacgattaaaggcgagccggtaaggctcagtaagccagagtacgactgggagtgtcggggtttttgggttaacgaaggtccggccgtcgtggtgcatggcaacaagctgtttatcagctattcggccagcgccaccgatgaaaactactgtatggggttactgtggattaacgtaaacgacgatccgcgcgatccggccaactggcataaatcaccgcgcccggtctttaccaccagctatgaaaatcgccagtatgggccgggacataacagctttacgcaaacgccggaaggtgaagatatactggtgtaccacgcgagaaattacaccgaaattgaaggcgatccgttgtacgatcccaaccgccatacgcgtctgaaacgggtgcgctgggacgaaaacgggatgcctgattttggcgtgccgccagccgatacgatctaa

SEQ ID NO: 379965 - DNA, 1392 bp, Salmonella enterica
atgtccgttaacgccatcgagccggcagatgcgcaaccggttgcgcagacgcaaaacagcgaattaatttaccgtcttgaagatcgcccgccgctccctcaaaccctttttgccgcttgtcagcatctgctggccatgtttgtcgcggtaatcacgccagcgctgttaatctgccaggcgttgggtttaccggcgcaggatacgcagcacattatcagcatgtcgctgttcgcctccggcgtagcctctattattcaaatcaaagcgtgggggccggtaggatcggggctgttatccatccagggaaccagttttaactttgtcgccccgctgattatgggcggtaccgcgctgaaaaccggcggcgcggacgtcccgacgatgatggcggcgctgttcggcacgctgatgctggcaagctgcaccgagatggtgctttctcgcattctacatctggcgcgccggattatcacgccgttagtctccggcgtcgtggtgatgattattggcctgtcgctgattcaggtggggctaacttccatcggcggcggctatgccgccatgagcggcaacacctttggcgcaccgaaaaacctgttactggccggcgtcgtcctggccattatcatcctgctgaatcggcaacgtaatccctacctgcgcgtggcttctttggttattgccatggcggcaggctatcttttggcctggtttatgggcatgttgcctgagaataacgcgccggtctcgcaggacatcctgatggtgccgaccccgctgtattatggtctgggcattgactggaacctgttactgccgttgatgctggtctttatgattacgtcgctggagaccatcggagatatcaccgccacctctgatgtctccgagcagccggtatccggccccttgtacatgaaacggctaaagggcggcgtactggctaacggcctgaactcatttgtttcagcggtatttaatacgttcccgaattcctgtttcggtcagaacaacggcgtaattcagttgactggcgtcgccagtcgctatgtgggatttgttgtcgcgctgatgctgattgtactcggcctattcccggcggtaagcggttttgtgcagcatatcccggaaccggtgctcggcggcgccacgttggtgatgttcggcaccattgccgcctccggggtgcgtattgtctcgcgtgagccgctgaaccgccgcgcgattctgattatcgccctgtcgctggccgtgggtcttggcgtctcgcaacagccgcagatcctgcagttcgcgccggaatgggtgaaaaatctgctctcatccggaattgccgctggcggcatcacggctatcgtgctgaacctgattctcccgccggaaaaaccgtaa

SEQ ID NO: 379966 - DNA, 396 bp, Salmonella enterica
atgctttcgtttttaaaagccccggccaacgcgccgctcatcaccgataagcacgaggttgacgcccgctatcgctactggcggcggcatatcctgatcaccatttggttgggttacgcgctgttctatttcacccgtaaaagctttaacgccgccgcgccggaaatccttgccagcggcatactgagtcgcagcgatatcggcctgctggcgacgctgttttacatcacctacggggtgtcgaaatttgtctccggcatcgttagcgatcgctctaacgctcgctattttatgggcatcgggctgattgcgaccggcgtagtgaatattctgttcggcttctcgacctcgctgtgggcctttgcgctgctatgggcattgaacgcctttttctag

SEQ ID NO: 379967 - DNA, 489 bp, Salmonella enterica
gtgcccggtattggcggccttgaggcgacgcgtaaaattgcccgatcgacagcggatatcaaagtgatcatgctgaccgtccatacggagaacccgttgcccgccaaagtgatgcaggctggcgcagctggctatctcagcaaaggcgctgcgcctcaggaggtggtgagcgctattcgttcggtgtattccggacaacgttatatcgcctccgatatcgctcagcagatggcgctcagtcagatcgagcctgcaaaaacggaaacgccgttcgccagtttgtctgaacgcgagttgcagattatgctgatgatcaccaagggtcagaaggtcaatgagatttcagaacagctgaatctcagtcctaaaacggtgaacagctatcgctatcgtatgttcagtaaattaaacattcatggtgatgttgagctgactcacctggcaatccgccatggcctgtgtaatgcggagacgttaacaagccagtga

SEQ ID NO: 379968 - DNA, 1044 bp, Salmonella enterica
atggctgagataacggtatccggcggggtgttcgccaccctgacgcccatttttaccctttggtacggacataaagagatcacttacgacatcgcgccttatgtcaccagcatcagttacagcgacagcattaaaaacgagtcggatgtcattgccattgcgctggaagatagcgccgggcgctgggtaaacgaatggtatccgagaaaaggcgacacgctggcgctgcgcctgggctaccagggcgaagatctgctcgattgcggaatctatgtcattgataaaattgatatcagcgcgccgccttcgacggtcaatatcgacggtatcgccacctcggtcagcaaagcgctacgcaccaaaaacagccagggctttgaggagacgacgctttccgccatcgccagtcgcatcgcgcaaaaacacggtttaacgctggcgggcaagattgcgccgctgacgattgatcgggtcacgcaatatgccgaaaccgacgtggcgtttctcaaacggctggcgagtgaatatggctataccgtgaaagtgacggcgacggagcttatcttttcgcatctgccgacgctgcgctgtctggcgccggtgaagacgctcaggcggacggatatttcgcactacacgttcaaagataccatcaaccggatctacaaaaacgccaccgtgcaacatcaaaatagtaagcaaaaagaactggttatctatacccatgatagccaggaaaagacctcggcgcgcggtgcggcgaccagcgccgataccctgaagatcaacagtcgcgccccagatgccggcgcggcgcaggctaaagccaatgctgcgctggacagccacaacgaataccagcaaaccggcacgctcagcatgatgggctgcccgcagttgacggcgggcaacaagatagaactgagcgattttggcgtgctttccgggcagtggctgattgataaatccatgcacaaacttacgcgcagcggcggctacactaccgaaatcgacatttcacgcggaccggcaaccagccagtaa

SEQ ID NO: 379969 - DNA, 351 bp, Salmonella enterica; identical to SEQ ID NO: 373858

SEQ ID NO: 379970 - DNA, 231 bp, Salmonella enterica
atgcgtgatagccagcaaggtcagggtattcatgtctttagcatcaatgggccgctaaaagtcaccgagcgttttgcgtatgacaaccgctatgtttatacgtggattggcagccagctttaccgaacagcatccccctgcccggataagacgcatactctgaataggaacgtcatgtacaccaacaataaagacatcatcataacgcaggcaccggaatgccaaaaatga

SEQ ID NO: 379971 - DNA, 480 bp, Salmonella enterica
atggcaaagattctggtgctctattattccatgtacggacacattgaaaccatggcgcatgcggtggcggaaggggcaaagaaagtcgacggcgcagaggtcattataaagcgtgtgccagaaacaatgccgcctgaaatcttcgcaaaagctggcggtaaaacacaaaacgcaccggttgccaccccacaggagctggcggattacgatgccattatttttggtacgccaacccggtttggcaatatgtcaggccagatgcgtaccttcctggatcaaaccggtggactgtgggcatccggctcgctatatgccgcacaggaactctttgacgtctcccaggttcgcggcggcacgccttacggcgcaacgactatcgccggaggcgacggttcacgtcaaccaagccaggaggaactctctatcgctcgctatcagggggaatacgtcgccggtctggcagtcaaactcaacggctaa

SEQ ID NO: 379972 - DNA, 2598 bp, Salmonella enterica
gtgctagaagaataccgtaagcacgtagctgagcgtgctgcccaggggattgtgccgaaacctttagacgcaacccaaatggctgcgcttgtcgagctgctgaagaccccgcctgtgggcgaagaagaattcctgttagacctgttgatcaaccgcattcctcctggcgtagatgaagccgcttatgttaaagccggttttctcgctgctgtcgcgaaaggcgacaccacctccccgctggtctccccagaaaaagccattgaactgctgggcactatgcagggtggttacaacattcatccgctgattgatgcgctggacgatgcgaaactggcgccgattgcggccaaagcgctgtcccacaccctgctgatgttcgataacttctacgacgtagaagagaaagccaaagcgggcaatgaatatgccaaacaggtgatgcaatcttgggccgacgccgaatggttcctgagccgtccgccgctggcggaaaaaatcaccgtcaccgttttcaaagtgaccggcgaaacgaataccgacgatctttctccggcaccggatgcgtggtcgagaccggatatcccgttacatgcgcaggcgatgctgaaaaacgcccgtgaaggcattgagccggatcagccaggcgttgtcggccccatcaaacaaatcgaagcattgcagaaaaaaggctacccgctggcttacgtgggtgacgtggtgggcaccggttcttcccgtaaatccgcgaccaactccgtgctgtggtttatgggcgatgacatcccgaacgtgccgaataagcgcggcggcggtttgtgccttggcggcaaaattgcgcctatcttctttaacaccatggaagatgcgggcgcgctgccgattgaagttgacgtttctaacctgaatatgggcgatgtgattgacgtctacccgtacaaaggcgaagtacgcaatcatgaaaccggcgagctactggcaaccttcgaactgaaaaccgacgtgctgattgacgaagtgcgtgccggtggtcgtattccgctgattatcggccgtggcctgaccaccaaagcgcgtgaagcgctggggctgccgcactcagacgttttccgtcaggcaaaagacgtggcagaaagcagccgtggcttctctctggcgcagaaaatggtcggtcgcgcctgtggtgtgaaaggtatccgtccgggcgcgtactgcgaaccgaaaatgacctccgtcggttctcaggatactaccggcccgatgacccgcgacgagctgaaagacctggcctgtctgggattctccgccgatctggtcatgcagtcgttctgtcacaccgcagcctatccgaagccggttgacgtcaccacgcaccacacgctgccagacttcattatgaaccgcggcggtgtctctctgcgtccgggcgacggcgtgattcactcctggctgaaccgtatgctgctgccagataccgtgggtaccggcggcgactcccatacccgtttcccgatcggtatctccttcccggcgggctctggtctggtggcgtttgccgccgcgaccggcgtgatgccgctggatatgccggaatccgtgctggtacgcttcaaaggcaaaatgcagccgggcatcaccctgcgcgatctggtccatgccatcccgctgtacgccatcaaacagggcctgctgaccgttgagaagaaaggcaagaaaaacatcttctctggccgcatcctggaaatcgaaggtctgccggatctgaaagtggagcaggcgtttgagctgaccgatgcttctgccgagcgttccgctgcgggttgtaccatcaagttgaacaaagagccgatcattgaatacctgacctccaacatcgtcctgctgaagtggatgattgcggaaggctacggcgaccgtcgtacgctggaacgccgtatccagggcatggaaaaatggctggcggatccgcaactgctggaagccgatgctgacgcagagtacgcggcggtgatcgacatcgatctggcggatatcaaagagccaatcctctgtgcgccgaacgatccggacgacgcgcgtctgctgtctgacgtgcagggcgagaagatcgacgaagtgttcatcggttcctgcatgaccaacatcggccacttccgcgcggctggtaagctgctggatagccacaaaggccagttgccaacccgcctgtgggtagcgccgccaacccgtatggacgccgcgcagctcaccgaagaaggttactatagcgtgttcggtaagagcggcgcgcgtatcgaaattccaggttgttccctgtgtatgggtaaccaggcgcgtgtggccgacggcgcgacggtggtttctacctctacccgtaacttcccgaaccgtttaggtaccggtgcgaacgtcttcctggcttctgcggagctggcggcggtggcggcgctgatcggcaaactgccgacgccggaagagtaccagacctacgtggcgcaggtggataagacggcggtggatacttaccgttacctgaacttcgaccagctctctcagtacactgagaaagcggacggcgtgattttccagactgcggtgtaa

SEQ ID NO: 379973 - DNA, 531 bp, Salmonella enterica; identical to SEQ ID NO: 373876

SEQ ID NO: 379974 - DNA, 675 bp, Salmonella enterica
atgaaattattagaggttaaattttcatattacagcaaaaaccttttggcagaaaaagtttttattaaatgtgagaaacaacccagaaaaataggtcaaggtattccttcaatagaatttccttccttcaaagtattaatgacatcaggcgtttttgatagagaaccgtcgcggcgggacgatgctaattccgtttcagaatcacaaaaagagtttattgatttagcgtttagattatcattaattgatatcattactaatgaaaataattctcctgctatgattgtaatggagacgccagaggctagcttagatagcttatttatgcataatgcaggtagactctttcgtgagttttcatatgcccaaggtcaacgaaatgtatttatcgccagtaccaatctaaataaaagcgaaatgataccaacgctgttaggttctataaattcaccaaaaatctttgataaaactgatatagacttgatactagatagggctggtgttgaagaggataaggtagaagttggagttattccacctaaccagcgtgctaatcacataataaacctgttggagttatctgcaccaaatctttcgttgaaaactcacagagatgagtattttgatatgtataataaagctgtatatcctgaaggaggcaaaataaatgaataa

SEQ ID NO: 379975 - DNA, 258 bp, Salmonella enterica
atgatagtttcagaagcaattttttattcttctattattgcctgggttctttattggtggtttattggaaatattactaaaaaggtagggatgcttgttgttccactcacgcttaccttcggatgttacatttatgcaattcatttggatgattccgaacagcaaaccaatttaggttgggagcagatcggttttattacctttataattgtgataatgtgggcagggaagtttgtgatgaaaagactatctgaatga

SEQ ID NO: 379976 - DNA, 1320 bp, Salmonella enterica; identical to SEQ ID NO: 376308

SEQ ID NO: 379977 - DNA, 204 bp, Salmonella enterica
atgtcctacatgctttcgctaagcgaacagacaaaactgaacgctttcctgtcagggatcctagatgattacaagactggggttatcactcagatacaagctgttggtagaatcggtaacgtgttttctgctctggaaagtggagactcaaaaaaggtagtgcatttgttgactgaaggacgaaaactcctgcggacgggctga

SEQ ID NO: 379978 - DNA, 2886 bp, Salmonella enterica; identical to SEQ ID NO: 25667

SEQ ID NO: 379979 - DNA, 1182 bp, Salmonella enterica; identical to SEQ ID NO: 376167

SEQ ID NO: 379980 - DNA, 1110 bp, Salmonella enterica
atggatgaaaaaattgtcctgacgcgccagcaaattttaagctctgcactaaaagtcagcaaatgtcgctcgctcgtaaaaaggcgctttcagtctttgggtttaaagtacgcagattctcaggaagttcgagatcggctaactaagatagaaaaaaacgcgtttcatcatttgggaaaattttgtcagagcaacgatatcgattccctattctccatggcaaataccctgtctgagcttttccttttaaagggagagttgatcacgactgatccctttggggaccgtgaaaccagctactggtcggtaccacaaggttcatgccatgaatggattcaatcgctgaccaccagcgaaggtcctgaacgtaaattcgttagtttccgtatttctttcgataacaatgacgaacggtgtgatcttgtaaagaagaatgcccgtatgcttggttgttatcttttgccttatttcgtcgatttgacacgcacggtgggcgcattcattaatttgccaggtagtgtctcttttaaacaagtacagcgcatcaaaccccagattcatccagaaacaacacatagtcatatagttactattgaggactctccctttctttctcggttaaaatttaaaatcattactgccatagatcggcttcctgaccctaatggcctttatacaaacacctttaacagcattattgaccgtgcactgctgactcatctcaaaaccgaacaggaaaaaatagatagtccaagagtctgcaaaaatgtgatttcggcttttgccgactcaactctttctctgccggtgtttaacatcggcctaaacgagcagtacagatactggacgccgtggggcatcaactttatagaattttcccgccaggccgcaaaagcaaggaccgctgtatttgttcctgatgtgggacagatcgagtggaaaagcgcagagcataaagaactggcggagttaagcctcatcgaccaaatcatacctaaacagtaccactggctcctgggtatcccgacgatgtggcgtaacaactattgcaatcacgatcagaggctagctctttttcgtgaatggagggaaagcaatggctgcggataa

SEQ ID NO: 379981 - DNA, 288 bp, Salmonella enterica
gtgaaaagtaacttttacaccgcaattcagaaaaaagtttcagttagtcacattacgaataacccggcttactttcgcatgtgcgttcccctgcatgttaaagtaaagccctccgggcagactcgtcgcccacttaacgcctcgctcagccatacgcttcggtgtttccagccaaccacgaggaatattgcccggaacgttaccgataacccgtcaaatgcatgctgctacccggatgccgccgggaatatcgcatttggattcaacaatatgcatgacctcagataa

SEQ ID NO: 379982 - DNA, 2385 bp, Salmonella enterica; identical to SEQ ID NO: 376129

SEQ ID NO: 379983 - DNA, 903 bp, Salmonella enterica
atggtatgcgttcagaaagaaacatccgatcaaatactgcgttcgtttgagctgcatgtattccctaagctgggtaagtatccggcgcatcagttgacgctgcacaactggcttacagttctggaccgactggcgcagggatacactgagatcacccggcgagtaattagtaacggtcggcagtgctactcatgggcagtgaagcgccagttgcttgaggttaacccactttctgaaatgtccggtcgtgattttggtattcagaagaaaatgggggagagaacactggatcgcaaagaaattgcgattgtctggcgagctattgaggattcccgccttattgagcgaaacaagatcctttataaattgtccctgatatgggcgtgcagggtcggtgaactccgtcaggctgaagtttcgcatttcgattttgaggagggcgtctggaccgtaccgtgggaaaatcataaaacgggacggaaaagtaagaagccgataatccgcccgatcatctctgaaatgctcccgctgatacaacgagccattgagctggcgccaggccgttttgttttctcaaaatatgcagacaagccgatgagcgaaggctttcatatgagcatcagcagcaaccttgttaagttcatgctgaaggcttataacgagcaggttccgcactttacgatccatgatctacgcagaactgcgcgaacgaatttctccgagctgactgaaccacatattgctgagatgatgctcgggcacaaactgcctggagtgtggtcggtgtacgacaaatacacctatatcgaagaaatgagagaagcttatagtaaatggtgggcccgactgatgagcatcatcgagcccgatgttctggagttcacgccacgtcagaccggatga

SEQ ID NO: 379984 - DNA, 1047 bp, Salmonella enterica
atgactcgtattgcattagcgccttcaaagatggttttgcttatgtctttggtaattactggtgcccacgccagccctgagcaacccctaataaaagatacgccctttgtatcaggccaggcttataagaagggtttcttctggtatgacgatcctgctaaaaaaagcgaagctgaagaagaaaaggttttgccaccaaccggtgctgctagctcgccttcaaaagaggaaaaggtagatttaaattcaaaatggctaaaagagaatatgcctcgactgttaacgcaggcaatggataaccctaccgcagaaaatctatcacgttattacacggcgcaaaggttaatgctggatatcagtacgcgtttttctgacaaatcaaaagattattttcttaaaaacccgatgatgtctgaaaaacgcaggcaaccagtggaaaaggtggcactggatgctcaccgcactgttgttgaaaaaaatcagcaaacggtaatgaaagatatctttactaagtcaggtttatttttctttttccagagtacttgccagttttgccacgaagagagccaaatacttcaatttatgcagaactattattcggtagatattcttccaatcagtatggatggaaggccattgcataatggcctttttcaggattttaacatccccaatgcacaaattattgatcaatttaaaattcgagaggtacctacaattttcctggtttcaaaggatgggacatcagctcagcgcattagtgaaggcatgatctccgctgatgaattaaagaacactattatacttgccgcgaagggcatgaatctgatcgatgacgcttcgtttcagtcaactctagatattaaaaggcaatataccatcggtgatgatggcgttattaccgttaataaatccgaaatggaatcagacccattcttacttcaaaaaataatggaccaaaaactcgaaggctatgacatgcctacggccgatccggtcaattatctcaatgctggcggcagttttggaggcacttatgcgcagtaa

SEQ ID NO: 379985 - DNA, 1416 bp, Salmonella enterica
atgcgcagtaatgccgttttcaacttcaaaaagttacttttgtctctttctgtttgtgctgcaattttagccccgactgcaaatgcagacaacgcaatgcgtaacattttcaatggcatgatgacgtctaccagcccggccaccttttccacagcaacccgtacaggcatagttggcgggtcaatgtcttaccgaacaacaaacgttaataccaaccttgtttccatgtcgtttccaaaagcttctgtcggttgtaatggtattgacgtttttcttgggtccttcagcatgatcaacggggaccagcttgtgcaggtggcccgtggtattgcccagggtgcggctatctatgcttttaacgttgctgtttcagctatttgtgctgactgtgctgcaacgattaatgacatccaaaacaaactgcaagcgctaaataaatttgcgaaagattcatgcaatgcaacttactctttcctttctgaaaacgtgggtacgccaagccagttcgctaactcagttagctctggaccagcctcaattctgggatcgattaatggtctcattcctgattttggctcatcgatgacaaagtcacctgaagctgtcacttctcaggttaaagcaaaggatcccgaagagttcgctgaaaaattcagtggtaacctcttctatatgtcgttcatggatattgataagggaacaatgaacatcggaggggtaacggagttatccggttataaattggcagaacaacttatgtctctcgtgggtactgtcattatcaactgggatagcaaaggcgaaaaagcgggaatggaagtccgcccgtctaccatgactgtcacggattacatcatggggccaccagctggcggatcaattaaaatgctcaagtgttctccggcaccagatccatcatccccacgaaaggctcagtgccttgtcatgtcagaagttaatgacggtggttttaagggattgaaggataccatttctgatcttcttttaaacgtacagaaaaaaatcatcaacgacgttcgtgtttcagatgatgaattacgcattatctcctatatcggcatcccgaccattatcgactctttgcaaacattcgaagcaccggaagggtacgcatacattcaggacataagcactattgctgcgacgagcctcgtaatcaacatgttgcgccaggttgaggccaaaatttcaaccatgagcataccgagtgagtcgctgtcgggtaaaagggatgatctcaaccgattaacagacaatctctcaaaacaggttaaagccgcctatgagctatcgcacagccaggtcggtaccagctcggacgtcatttcaacctgggataaccgtcgcctgcaacggaaggctttcactgaaagtattcgtggcacacgtaactga

SEQ ID NO: 379986 - DNA, 519 bp, Salmonella enterica
atgcagaaaagccctcttcatgaagaagtatgtgttcctgaagaaacaacagctggtttatggggccctctccctgattcgcatgtcgtgcttttcttagatttcgatggggtttgtcacaggtgcaaaaatgaaacctttgagcgaatgccattggtggaaaaattactggataaatgcccttccatggtgattgtcatctccagttcgtggcgtgaatgtgccagtataacttacctgaaatctcttttccggctaccttatagagacaaagtcataggtgctaccgattcggtatatttaaaacctaatcagtcaggtgtgcgggctgctgagtgtgaggactttgtattttcacatcgagttaaagcatttatctgccttgatgacgacgaatcattattcccggtcggttatccacatttgcacaaaaccaattattacaccggcctcaccgaatctgatcttgcagctcttaacaccaggtatcatctgcttatgaaacgttgggcttcctga

SEQ ID NO: 379987 - DNA, 135 bp, Salmonella enterica
atgaaattaaaataccttctgttatgtgcaactctgtctgtcgcctttacctcctctgcggtccttgcatctgaaaacgggaaaaaaccgatcccgggcaaatcagatgtgatggttgctaactatgcatcttga

SEQ ID NO: 379988 - DNA, 351 bp, Salmonella enterica
atgaatgtaaaaaaattattcgccctaaaagccccatgtaaaaactgcccattcctgaaagaaaatggcatcgagttagtcgaagggcggcttgatagcatcaaagaggacttgatcaataatgatgaaaccccatttttttgtcacaaaacaacgtattcatcaggtggtttttatgacgaagaaacagaggcatatgtaaactccgggcaggagtcttactgtatgggtgcaatggcatacctctatgcaaagaaccgcctgaatgttccaacccgaatcggccttgttatgggaatgtgtgacattgaagacatcaaaaacaccatccctttcatcaaaatagagtaa

SEQ ID NO: 379989 - DNA, 537 bp, Salmonella enterica
atggatatcttacgtagcctgctcgatgcgaacccaaacatttatctagtgggtttagttctgatagtagcaatcgtcgttaagtcatttgtagggcagtcaggaaaaggggcaagggataattattcgctcaataactatactctcgttccgtctgtcatgactaaagccgaaatgacattttatctttcattaatatcgactgtaggcgataagtacacagtcatggtaaaggttagacttgccgatatcatcactgtaaaaaagagcagcactaattacatggctcactttgggaagattaaagctaaacacgttgactatcttctctgtgataaaactgatttaaaacccttgttggctattgagcttgatgataaaagccaccagcgtgaagaccgtattgctcgtgataagttggttgatgggatatttaaagctgttggtttacctgtgattcatcacccggttaaaaacacgtacagtcagagtaatttgattatgattatttctgaggcaatttataaccgtcactga

SEQ ID NO: 379990 - DNA, 291 bp, Salmonella enterica; identical to SEQ ID NO: 373835

SEQ ID NO: 379991 - DNA, 462 bp, Salmonella enterica
atgggggacattgtgattaaaaggcgtaacattcgacgatcagtttatggattgcttattgttcttatcgccggaaatgtgtggttaggccttagagctgataaaattcataaagtgcgttatcaggatttctggtcaccggcaactgtgattaaagtaactgtaatgccttcaacgaatgaaacccagctcagtggtaaaatccctaaatcggtaagagtttcaaacaattatgttgagtactcgttaccgggcacactctcggccaagaccatttaccgaagcgtgttagaagatgagatgctcactttgcttaatgctggaggtcaacttgaagttaaatacactctggacaagcagacaaatcgaactaaggtatgcactaagtgcttacgggtgattaaagatattaaccatcaatattcagccactgaggtaaagcatgggcagtccaaaatttga

SEQ ID NO: 379992 - DNA, 282 bp, Salmonella enterica
atgggcagtccaaaatttgaaattgctgagcaaattaaaatgtggatcgttgtttatctagtttgctttttagcactttactgtgtgttaagcgctctacatgcgctttatgatccgctaaatttaccagccctgacgtggcctatcagctggttcctggtgcctgaaatgacaagttttggcagtgcattattagcttttgtcctaacgccaggcctttgctctataattgctgttttattcggtaagtctatctttaaaaaagctaaaacaaaaatatag

SEQ ID NO: 379993 - DNA, 627 bp, Salmonella enterica
atgttatacatgctcttatgctgttttctgatgctcaacagtacattcgttatgttcagagcaatgtctgcaataagtaaaggatccgctaaagaaaaccggtctgaaatatcgctgatagtcctagcaacacttggaatcgcatcaccattcattgtcgcaatgattactattaatgaaagtatgacatctaaaacagtaacagatttttctttgggtgctcagtggtacggaatggtttcagcggtagcgctaatggggttatatgctcgacgcgtttggaaagagaagaagtccttatttactggcgctttcctggcctcttccttaatggcctttatttttactgacagccttgttttcgtatcccagaaggacaccggcgttctggctactttcgtactcgataaaaacgctggagatattgattgtagtcgcccggctatgattgtccattacagtaaaggtgttccaacggactggcgttgcccaaccagtatcatgttgatggcgtattcttcatatccttttttaccctggcctgagtatagccatggtaccagccagtctcttacggttgttattgatacatttatggaaaacgctgttaatctcagccaaaaataa

SEQ ID NO: 379994 - DNA, 2457 bp, Salmonella enterica
atgcgtaaaactctaattggctgcatggttgcaactgcccttgctactgtatcttcggcacatgctcaggtatttagctactcatttacagataccaataaggctgttcggaatatcaaacctgcaacacaaacatatcttaatcccgctggtgttttgactctgaacttgatatcgggtcttgatcggtacgagcgagtgacggtcacacgagacagcgataaaaaggttatgtattcctccgtctcgaccaaaacgagcgttgcagatcgtatcgttgctgccgatggaacagaatactatggaaaggatatggttctaccggcgctcggagaagggacctttactgtagtcaatgaaactctggatattcgccagactgtagtgagcacatctacttatcatttcatcgttgatacaactcctccacgctataagagtatttatccgagtcaaaacgcaggttacgacatggtactttctgggccactttgggagttgggccgaggcggtagtggccagttttctatatttgcagacggtattgaggatgctagtggaattgacaagatccgtcttgtcattaaacgaagtaatggttctgtggtctccgacaataacctgagttatgacacagccaataaacgtgcgttctatccgtggattaaagatatgaacacccaggctggcatgccctcaagtgatcttgatgaagaattcaccttcaatttcatcgttacggacctggcaggaaatacgcttaacattcctccccagcggtttttatatgacgatcaaatgggagaatttacgccatttgcagttcatgactcacgtgtaagcaccagtgttgtacccggcatttcttcgggatacgtcccgtttaaacgaggccttacagtgctggaaaacccctacaagttggttatacgtatcccaagaactaactggaagccatatcgaaatggtggcatgagcattaccaataactatggcggagtacaggtcctttccgaagatgccacctatgtctacgtggaagttaagctgccacagggtgccttagatggaaacaactatagacctgtgaatacatatcaatggtctggaggagatcttggtcagtatgccagctggctcaactgggatcctgcctctgtaaagagtccggcttggggaagttcacccatagaacgacaaaaggctgatggaacatggttcaacagcgtaaactggaacctgttcaaggcatctgatatgcctataaaacttactaatatccgattcaatgtacaggccaggccatatgatcaaaaaatcactggcggagcaacatgcagtattccagctggctcaacaacctgtaccgtctctttgccccaggatattataaatggcactaccggttatcttcatagtggctatgaagtaaggtcaaccaccgaagcaaccttctttgcccctatatgggagaatatagcctggcatacactgggtccctccgtcactggatttgattacaatgaaaccaccaacattctccaggtttacgtgaatcaacctggagatggttcatatttcgaccatgtttatgtaaatcgagtttggttgtcagataaaaaccgtaacaacgcagaaataagcgtaaccggcaaacaaacaggtagaaatatggcgtctgggaactacacgtatgagttcaacatgaaagaggtaccagaaggcagttataacgtggtgattaatgcccaagatacattcaacaataccggtaacctcccttatcaaacagttgtcgttgataatacagcaccatctgtaagtattagctacgaaggaaaaccgatcagcaaaaacgtaacagtatatgggctggagaacgtccgtatacagctcaccgatgctctaactaaaccatccttaagccgtatgactcttcgcggtggccctgtttctgatgcggtggaattgtcttgggtgaatctgggaaacaacctgtatgcacctaattatcccaagatctttccgtctcttaatgaaggcgaaacatacactctcacagttcaggccaaagatgagatgaacaacgttaaagaaagctcagtcgaatttaactaccttccaaacaatctcgtcaggctagagaatctgaaaaccttagctgtcaatgcttctctcaaaacatctgacaatactgctctggctgttctgtatgccagccagctgcgtaaaaaggatggttcaatcgctacagggcttcaggacgcagtgcttactgtccgtaaggacgctgcattcggcgtgactgtaaatggcgtttctgcgatgccaggtgaaagcaaagagcttcaactggatttggggctcggggacagccgtagctttcctattttccctgctgtatccggccttactggcagatctgagttcatgattaacattgaagaattaaaataa

SEQ ID NO: 379995 - DNA, 1089 bp, Salmonella enterica
atgactaaagagaaagatactgagcagcaggacctggtcaccagggctttctctgttagagagaaagaatcaggtaaagacatcattttgcgtcctaacagcaaccgtacggtgcagtctattgctttgatgcggctcgggctgttcgtcccatcaccaaagagtgtggggcgtcaaaatcgggaatataaaacggttggctttgacgcaacgaaagagttacagacgctctctttaatggagagcgaggggttcaccaatatttcaattgtcggtgagcgtcttaatatgtcagtagattttaagacgtggatgggcatcattcgaacctatgccaatcatccgattaacaatgacacgataagcttaaaattcactgaattcctcaagctatgtacgcctgaaaattatcgctcatctacagcgtccagaaaacgtatagacgcctccttacgcaggttagcatccgttaccttgtcgttcaccagtaataactcgtccaaagtctatacaacgcatctggtacagtctgccctgttagacccggaatcagatcaggttgtccttcaggttgatcctaagattttcgagctctatcaatacgatcataaggttttgatgcagctgaaggcaattaaggagttggccaagaaggaaagcgcccaggctctctatacgttcatagagtcattaccgccaaatcctataccgatatcccttactcggctgaaaaatcgtctgaacctcaaaacacgagcaaatagtcagaatgctaccgtgagaaaggctcttgaagagttggcatcgataggatacctcaagtacaccgaaattaagaaagacggaaaagtatacttccagattcataagcgggatcccgatctgaatttgaacaatactcagcctcctttagaagtggttgaagatgaagaagagaactcagggtcttctgttttagaaggtgagttatgcccaccagctgacccgattgacggcgatgatgttcttaccgtccatgatttaaccgctgaagaactgcgctatattcgtagtcttcgaagccagaaaaagaacagcaacgccagctaa

SEQ ID NO: 379996 - DNA, 852 bp, Salmonella enterica; identical to SEQ ID NO: 10372

SEQ ID NO: 379997 - DNA, 840 bp, Salmonella enterica
atggctacccataagcctatcaatattctggaggcgttcgcagcagcgccgccaccgctggactacgttttgcccaacatggtggccggtacggtcggggcgctggtgtcgcccggtggtgccggtaaatccatgctggccctgcaactggccgcacagattgcaggcgggccggatctgctggaggtgggcgaactgcccaccggcccggtgatctacctgcccgccgaagacccgcccaccgccattcatcaccgcctgcacgcccttggggcgcacctcagcgccgaggaacggcaagccgtggctgacggcctgctgatccagccgctgatcggcagcctgcccaacatcatggccccggagtggttcgacggcctcaagcgcgccgccgagggccgccgcctgatggtgctggacacgctgcgccggttccacatcgaggaagaaaacgccagcggccccatggcccaggtcatcggtcgcatggaggccatcgccgccgataccgggtgctctatcgtgttcctgcaccatgccagcaagggcgcggccatgatgggcgcaggcgaccagcagcaggccagccggggcagctcggtactggtcgataacatccgctggcagtcctacctgtcgagcatgaccagcgccgaggccgaggaatggggtgtggacgacgaccagcgccggttcttcgtccgcttcggtgtgagcaaggccaactatggcgcaccgttcgctgatcggtggttcaggcggcatgacggcggggtgctcaagcccgccgtgctggagaggcagcgcaagagcaagggggtgccccgtggtgaagcctaa

SEQ ID NO: 379998 - DNA, 207 bp, Salmonella enterica; identical to SEQ ID NO: 31408

SEQ ID NO: 379999 - DNA, 213 bp, Salmonella enterica; identical to SEQ ID NO: 31409

SEQ ID NO: 380000 - DNA, 2130 bp, Salmonella enterica
atggcgatttatcaccttacggcgaaaaccggcagcaggtcgggcggccaatcggccagggccaaggccgactacatccagcgcgaaggcaagtatgcccgcgacatggatgaagtcttgcacgccgaatccgggcacatgccggagttcgtcgagcggcccgccgactactgggatgctgccgacctgtatgaacgcgccaatgggcggctgttcaaggaggtcgaatttgccctgccggtcgagctgaccctcgaccagcagaaggcgctggcgtccgagttcgcccagcacctgactggtgccgagcgcctgccgtatacgctggccatccatgccggtggcggcgagaacccgcactgccacctgatgatctccgagcggatcaatgacggcatcgagcggcccgccgctcagtggttcaagcggtacaacggcaagaccccggagaagggcggggcacagaagaccgaagcgctcaagcccaaggcatggcttgagcagacccgcgaggcatgggccgaccatgccaaccgggcattagagcgggctggccacgacgcccgcattgaccacagaacacttgaggcgcagggcatcgagcgcctgcccggtgttcacctggggccgaacgtggtggagatggaaggccggggcatccgcaccgaccgggcagacgtggccctgaacatcgacaccgccaacgcccagatcatcgacttacaggaataccgggaggcaatagaccatgaacgcaatcgacagagtgaagaaatccagaggcatcaacgagttagcggagcagatcgaaccgctggcccagagcatggcgacactggccgacgaagcccggcaggtcatgagccagacccagcaggccagcgaggcgcaggcggcggagtggctgaaagcccagcgccagacaggggcggcatgggtggagctggccaaagagttgcgggaggtagccgccgaggtgagcagcgccgcgcagagcgcccggagcgcgtcgcgggggtggcactggaagctatggctaaccgtgatgctggcttccatgatgcctacggtggtgctgctgatcgcatcgttgctcttgctcgacctgacgccactgacaaccgaggacggctcgatctggctgcgcttggtggcccgatgaagaacgacaggactttgcaggccataggccgacagctcaaggccatgggctgtgagcgcttcgatatcggcgtcagggacgccaccaccggccagatgatgaaccgggaatggtcagccgccgaagtgctccagaacacgccatggctcaagcggatgaatgcccagggcaatgacgtgtatatcaggcccgccgagcaggagcggcatggtctggtgctggtggacgacctcagcgagtttgacctggatgacatgaaagccgagggccgggagcctgccctggtagtggaaaccagcccgaagaactatcaggcatgggtcaaggtggccgacgccgcaggcggtgaacttcgggggcagattgcccggacgctggccagcgagtacgacgccgacccggccagcgccgacagccgccactatggccgcttggcgggcttcaccaaccgcaaggacaagcacaccacccgcgccggttatcagccgtgggtgctgctgcgtgaatccaagggcaagaccgccaccgctggcccggcgctggtgcagcaggctggccagcagatcgagcaggcccagcggcagcaggagaaggcccgcaggctggccagcctcgaactgcccgagcggcagcttagccgccaccggcgcacggcgctggacgagtaccgcagcgagatggccgggctggtcaagcgcttcggtgatgacctcagcaagtgcgactttatcgccgcgcagaagctggccagccggggccgcagtgccgaggaaatcggcaaggccatggccgaggccagcccagcgctggcagagcgcaagcccggccacgaagcggattacatcgagcgcaccgtcagcaaggtcatgggtctgcccagcgtccagcttgcgcgggccgagctggcacgggcaccggcaccccgccagcgaggcatggacaggggcgggccagatttcagcatgtag

SEQ ID NO: 380001 - DNA, 285 bp, Salmonella enterica; identical to SEQ ID NO: 31406

SEQ ID NO: 380002 - DNA, 1530 bp, Salmonella enterica
atgaattttatcgataaagctatcagcatgatgtcgccgggatgggctgtatcaagactccgatcgcgggcagtaataaaagcttacgaggctgcaatacccacccggacacataaaattaagcgtgaaaaccgcaacgccaatcaactaaaccagattgccggaaagtccctgcgggagcaggcccgctggttcgataacaatcacgatctggtggtgggggcgctcgataagatggaagagcgcgttatcggggctaaggggatcatcgttgagccacaaccactgacggtggccggaacgctgaataacgcgctggcggaacaaatccgcgccagatgggcagagtggtccgtgtcgccggacgtgaccggacaatatacgcgcccggtactggagcgccttttgttacgcacatggttgcgggacggggaggtgttctcccagatggtggcgggaaaaatgccggggcttgagccggtggcgggcgtaccgttctggcttgaggcgatggaaccggattatgtcccgatggaacagacggacagtacaaataatctgattcaggggatctattttaacgactggcaaaggccaaaaagttacatcgtctgtaaatcctggccgggatttgccaccgctatggtggccaccaagcttatcgatgcagaaaatatgctgcatcttaaattcacccgtcgcctgaatcaggcgcggggcgtcacgctgctggcgccggttattatccggctgctggatctgaaggagtatgaggacagtgaaaggctggccgcgcgtatttcggcggcttttgccatgtttatccggcgcagtgacgcaatggtacaggatggtgacgcgccagattatgcggataaagaccgcgatctggatattgaacccggcaccattctgaaagacctgcagccgggagaactgacggcagatgcagaagataataactatcttgatgacgagaacgctgactggaaaagtaccacacagggacagaagtctgccggggatacttctgtgacgctggcgtggaagccaggtgaggacgtacagaaaaagcttattcaactgttcacgaccgggcagaagcgcggattccggatcaagtatccgaacggcactgttgatgtgttcagaggctgggtgagctcgctggggaaaacggtgcagagtaaggatgagatcgcccgtacagtaaaaattaccagtgtgggccgtccgtacatggctgaagaggatgcaccggaagtggttagtgttaccggactgacagtggagccgacaaatgccaccgtgaaggtcggcgccacaacagcggttacgttcacggtgaaaccggataacgtgacagataaatcactgcgtatcgcaacgtcagatccgactacagccaccgtcacgcaggcggaaaatattgccactgtaaaaggtgttaaggcaggtacagtgaaaattattggcatgacaacagacggtaattttaccgctattgcggatattactgttcaggcataa

SEQ ID NO: 380003 - DNA, 822 bp, Salmonella enterica
gtgggctatggcgcatatggtgaacgctggatcattgaccgctacaacatccgttattccctgagagtgaatgaggatggcgaaagccagcctgtcaatccggctgcaagaccggaagactgggatttgctgaaaacggatgtgctggaaaagacgtatccgctggcggcagatcctgaacagtttatgccggtactggcaatggcggtggactcaggtggtgaagacggtgttaccgataatgcctacgcgttctggcgaaggtgtaagcgaaaaggcgttgccgggcgcgtttatctgttcaagggagacagtacccgacgcgagaagctgatcaccaaaacctatcccgataacaccgaacgctcagaacgtcgggcaaaagccaggggggatgtgccgttgtatctgttacagaccaatgccctgaaagacagggtagctgccgcactggagcgtgaggagccgggggcgaattacattcattttcctgactggctggggccgtggttctacgaggaactgacctatgaagagcacagcgcagacggaaagtggaaaaaaccgggacgcggtaataacgaggcgctcgatctgatgtgttacgcccacgcgctggctattctccgtggctatgagcgaatcaactgggaaaaaccaccaggatgggctcgcttaccggaaaaagacgccgcaaaaaccacgcagcctgttgaggttcgccagcaggagcaacacgaaggaggagagaaagccgtgaaagccaggaagaaaaaaattttacccgcctggggcggtggttccggaggagggtggttatga

SEQ ID NO: 380004 - DNA, 1311 bp, Salmonella enterica
atgacaacggtgacgaagggcaagaggaagagcaggaatagtttagcctctgccgttgttgccggatgtgatatctcatcgatgttcaggccgccgcgcaggatgaaaatatcggatgcggtcagaaaatatatgcgcgtaccacgcgatgcgggaaattctgtggcatgggaatccaccctgaccccctatgtggtggaagccatgaactgcctgtcatcacgcagctacgatgccgtggtatttgtcgccccggcaagaactggtaagacgctggggctgattgacggctggatttcctacaatattgtctgcgatccgtctgacatgctggtggttcagatgactcaggacaaggcgcaggagcactcaaagcggcgtctggcaaagatgtttcgccacagtccggcgatagcaagaagactcagccctcaccgtaacgataataatgtgcatgataaaacgtttcgtgatggctcgtttctgaaaattggctggccatcaatcaatgttttttcgtcttcggattttaaatgtgtggcgctgactgactacgatcggttccccgaagatgttgatggtgagggggatgcattctcgctggcgtcgaagcgtaccacaacgtttatgtcgctgggtatgacactggtggagagctcgccggggcgggaaattaccgataccagatggaaaccgtcatcaccgcacgaagcaccgccgaccacaggaatactttccctgtacaaccgtggcgatcgtcgtcgctggtactggccgtgtccgcattgtggcgaatattttcagccatcaatggcgaatatgaccggctatcgccatattgccgaccctatggaggccagtgaagcagcgcggattcagtgcccacactgccataagttgactgaaccacagcagaagcgtgagctgaataatcgtggcgtctggttgcgggaaggtcagcacattgaccgcgacggcaatattaccggcgaagcccgccgctcacgtatcgccagtttctggatggagggaccggcggcggcttatcagacctgggcgcaactggtttacaagctgctgaccgccgaagaggaatacgaacgagccggcagcgaggaaaccctgaaagccgtcatcaatacggactggggattaccctatcagtcccgtcgctcgctggaggcacgcagcggtgacgcgctgatggcacgcgctgaggacgtatcaaaacgtaccgtttctgacggggtgcgttttattgtggcaaccgttgacgtacagggcggtaaaaagcggcgctttgtggtctag

SEQ ID NO: 380005 - DNA, 1254 bp, Salmonella enterica
atgaatttacttgaaaagatcgccctcgttggtcagcgcatgaaaagcgagcagatttctcttaaggaatctctgatggcttcatcaagagtatctgtttctgatgatagtgttgatggtgttgatagactgatctacaaccactgtttaaataaaaaaaatctctctgatttttttgggaagtcacgagtaacgttcaataaaatactttcggacttagaagaaaaagaacttgttggtgcacctatttatcaaaacaaaaatcatctttacacccgctgggatgttcaaaaaataatggatgccctgggttatcccaagtaccgcgatcattactttagcagagctattgttactcagaatcataaaggcggtacagggaaaagcactacatctgtagctttagcagtagcagctgctttagatctacaactgaatgcacgtgtattaatgatcgaatgggacccacaaggttcgattggaagcagcatgattcaaagtgtctcagaagatgatgtcttccttacagcaattgatgcaatccttggaatttatgaagaaaattctgagtataaaaaatatttagattcaggattctctgaagaagaaatcatcactaatatgcctttttcaacgcatctgccaaacttggacgtgataacggcatttccgacagatgctcgttttaaagataaatactggcaatgttctagagaagaacgaacgtctttgttactacgtttcaaggaagttatcttaccggtactgaagcagaactatgatttgattattatagacactccacctgaagattcacctttgatctgggctgctgacgaagcggccgatgggattcttgtcgcagtgtcaccacgtgaatatgattacgcctctactacagacttcatgcttacaataagtgaaaggtttaaacaatcaccaagtaagggcgataatttaaaatggttcaaagttcttgctgtcaatgttgatgacaaaagtccatatgaaagaatagttttggataaattaatcagaactgttcaggaccttttgatgtccgctaacataaaaaattctgaagcatttaaggcagctgcttccaaagggcgtacagtgcttgatatcaaaaaatcagaggaactttgttccgcaaagcaacttgatgtcgcagaagaatctgtattacaggtatatcaacaatttataaatgaaataaaaagtttttcagctaagcaaggagttaacgcatga

SEQ ID NO: 380006 - DNA, 603 bp, Salmonella enterica
atggcgcacgaattacaactcatcaagcagtcatctggaattctgatccccgctacgccggagaccagcgaaattctgcaatcaaaaattaaactcggtgccgtgctggtggctgagttccgtcaggtgaggaatcctgcattccatcgccgctttttcgcgttgcttaatcttgggtttgaatactgggaacccaccggcggcgccatttctgccaatgagcgcaaactggtaaacggttatgcaaagtttctcgctgcatatggcgggaatgaaagcgcattactggatgcggctgaacagtatctggaacagattgcaaaccgccgggtaacaaacggaattagcttgtgtaaatcattcgatgcctaccgcgcatgggttacggttgaggctggtcactatgacgccatccagttaccggacggcacccttcgcaaacatccccgcagcatcgctttttccagtatggatgaggtcgaatttcagcagttgtataaatctgcgcttgatgttctctggcgctggattttatcacgtacattccgtactcagcgcgaggccgagaacgccgccgcccagctcatgagctttgcggggtga

SEQ ID NO: 380007 - DNA, 1776 bp, Salmonella enterica
atgaccattgccattaccgacgtcgtcctgcgtgacgcccaccagtccctgttcgccacccgcctgcgccttgatgacatgctgccgattgccgccgcgctcgacgacgtgggctatggctcgctggagtgctggggcggcgccacctttgacgcctgtatccgctttctcggcgaagacccgtggctgcgcctgcgcgagcttaaaaaggccatgccgaagactcccctgcagatgctgctgcgcggccagaacctgctcggctatcgccactacgccgatgacgtggtggaacgcttcgtcgaacgcgccgtcaaaaacggcatggacgtcttccgcgtcttcgacgccatgaacgacccgcgcaatatgaaggccgccctgcaggcggtacgcagccacggggcgcacgcccagggcaccctctcctacaccaccagcccggcccacaccctgcagacctggctggatttaacggagcaactgctggaaaccggcgtcgattccatcgccatcaaggatatgtccggcattctcacgccgatggcggcgtatgagctggtcagcgaaatcaaaaaacgttttgaggtgcgtctgcacctgcactgccatgccaccaccgggatggcggagatggccctgctgaaggctatcgaggcgggtgttgacggcgtggacacggcgatttcctccatgagcgccacctacggccacccggccaccgaagcgctggtggcaacgcttgccggcacggaacacgacaccgggctggatatcctgaagctggaaaatatcgccgcgtacttccgcgaggtgcgcaaaaagtatcacgcctttgaaggccagctgaagggctacgacagccgtattctggtggcccaggtaccgggcggaatgctcaccaacctggaaagccagctgaagcagcagaacgcggcggacaaactcgaccaggtgctggcggaaatcccccgcgtgcgcgaggacctcggctttatcccgctggtgacccccacctcacagattgtcggcacccaggcggtgctcaacgtcctgaccggcgagcgctacaaaaccatcgccaaagaaaccgctggcattctgaaaggcgaatacggccacaccccggtgccggtgaacgccgcgttacaggcccgcgtgctggaagggggcgctccggtgacctgccgcccggcggatttactcaaaccggaactggctgaactggaagcggacgtcaggcgccaggcgcaggagaagggcatcactctggcgggaaacgccatcgacgacgtgctcaccgtggcgctgttcccgcaaatcggcctcaaattccttgagaaccgccacaacccggcggcgtttgagccactgccgcaggcggaagccgcgcagccggtggcaaaagcagagaagcctgccgcctccggtatctataccgtggaagtggaaggcaaagcctttgtggtgaaagtcagcgacggcggcgatatcagccagcttactacggctgttccggcggcctcttccgcaccggttcaggctgccgccccggcaggcgccggcaccccggtcaccgcgccgctggcgggcaacatctggaaggtgattgccaccgagggccagacggtggccgaaggcgacgtgctgctgattctggaagccatgaagatggaaaccgaaatccgcgccgcgcaggccggcaccgtccgcggtatcgcggtgaagtccggggacgcggtttccgtcggcgacaccctgatgacgctggcgtaa

SEQ ID NO: 380008 - DNA, 204 bp, Salmonella enterica; identical to SEQ ID NO: 151872

SEQ ID NO: 380009 - DNA, 738 bp, Salmonella enterica
atgaccgacgcaattatcacggacaatgagcgtattaacattgaaccaaaagatgtaatggtaaaaggttcaaataaaaagcaaggcgtaaacgctcaaacttctactcaacgtagaccagagcaccagggtatggccaaagttattattaaccccggcaccccagattttaaccggtttttaactgccagaaatggagcagtcatcagaggttttgatgatgtgagtatcgctatttcctctctctttaaaacggttgatgcagttaaacatcctgaccttgttcaggctattcaggattggttcaacgagctgcatgaagaaaacaataagatgaaagaaaatcttgttgcttatattaagtcaattgagttcgacaagaatgactcattcatgtcatcaactcagtttgtacctttcagttttgaaccagtacaactcaacttcaataaccacaacaccatgaggttttacaagtacatcttcgagatgaaccagctcatgaacacaatgtatgagtacaactcattgggtttactggctgtaagcgactatccggttatgtctcacaacattataaagagtattaatttatatgttgagaatgtgaaaaagactctgaatgtttctcgccgtaaggatgggccatacagtccagcagagttcatcaccaaagtaatgcaatataaaagtgtgcaggcatacattgcagccgaactgtcaggcaaacgtcgataa

SEQ ID NO: 380010 - DNA, 255 bp, Salmonella enterica
ttgcccgccttttttaaacctccatgtatcgttcttgccccgtttatgcggggctttttttttgcttctttctatgagttgacatctttaagttttattcagagacataaaaaactttttcgtgtcactgaacctattaggttactgagcgacgttgctatcctggtaaaagttttttctaaaggaccggtaaaatgtcatctcttgattctgaagctaaacccgataatgcaggtcacagcgtactggctttaa

SEQ ID NO: 380011 - DNA, 936 bp, Salmonella enterica
  misc_feature (801)..(810): n is a, c, g, or t
atgggaatgggtgacgattactataagctccctgaggttgaagaacacatctacaacatcaagaatgcctacattcgaggtgactatgtagaccctatccgagtacgtgtcattgatggggtaccttttgttcgccaggggcactgccgtttaaaagccgcaatgatggcatgtgatgaagatcatgacatcacaatcctttgcgttgagattaaagaagatgaaattggctgtgagctcgcgaccattgatggtaaccgtggtcttgcgctttctcctgttgcgcttggcgagtcctatcgtcgcctacattctcttgctggctggtcactcgaacgaattgctcaacgtgaaaataaaagcccgacgaccatcagttctcttatccgcctgacaacctgttctgttgttatcaagaaatggattcatgctgacgctatttcgtatgttaacgtgctttcactgatcgatgagctcggcgaaacagaagcaatttcacgtatcaagaagatgatcgcagaacttgagcaggccgatgcgaatggcatcacggtgaaaaaaacccaacatggtcaggtacgagtcagaccttcagacttcaagccagcacggattccgccggttattgccacaaaagccgtagaaggcgtcaaactcatcaccaccagcttattacagaaactgggggatattgaattgccggagctgacagattcaagtgctgacgaagaaatcaacattacgttgaaccgcagtactctggagatgttgagaaatctttcaaaagagatcacagaatcnnnnnnnnnncgccgtgcggagaatcgtcaggcaaaacttaatggtgagaagccaaaatacccacgtaaaaaaaatgctaagaaggcaggggaagagaccgatcaggatactgacccacagccggacgcagaataa

SEQ ID NO: 380012 - DNA, 558 bp, Salmonella enterica
atgaaaaatattattttatccactttagttattactacaagcgttttggttgtaaatgttgcacaggccgatactaacgccttttccgtggggtatgcacaaagtaaagttcaggatttcaaaaatatccgaggggtaaatgtgaaataccgttatgaggatgactctccggtaagttttatttcctcgctaagttacttatatggagacagacaggcttccgggtctgttgagcctgaaggtattcattaccatgacaagtttgaggtgaagtacggttctttaatggttgggccagcctatcgattgtctgacaatttttcgttatacgcgctggcgggtgtcggcacggtaaaggcgacatttaaagaacattccactcaggatggcgattctttttctaacaaaatttcctcaaggaaaacgggatttgcctggggcgcgggtgtacagatgaatccgctggagaatatcgtcgtcgatgttgggtatgaaggaagcaacatctcctctacaaaaataaacggcttcaacgttggggttggataccgtttctga

SEQ ID NO: 380013 - DNA, 153 bp, Salmonella enterica; identical to SEQ ID NO: 376358

SEQ ID NO: 380014 - DNA, 804 bp, Salmonella enterica; identical to SEQ ID NO: 6089

SEQ ID NO: 380015 - DNA, 1218 bp, Salmonella enterica
atggtcaaagtcggcgataaagttgccgctgaacagtcgctgatcaccgtggaaggcgacaaagcctccatggaagtgcctgcgccgttcgcgggcactgtgaaagaaatcaaaatcagcaccggcgataaagtgaaaaccggttctctgattatggtcttcgaagtagaaggcgcagcgcctgcggccgctccggctaaacaggaagcggcggcgccggctccggcggcgaaagctgagaagcctgctgccccggctgccaaagcggaaggcaaatctgagttcgctgaaaacgacgcttacgttcacgctaccccgctgattcgccgcctggcgcgcgagtttggcgtaaacctggcgaaagtgaaaggcaccggtcgtaaaggccgtattctgcgcgaagacgttcaggcttacgtgaaagacgcaatcaaacgcgcggaagctgcgccggctgctgcgggcggtggtatcccgggtatgctgccgtggccgaaagtggacttcagcaagtttggtgaagttgaagaagtggaactgggccgtatccagaaaatctctggcgcgaacctgagccgtaactgggtgatgatcccgcacgttacgcacttcgacaaaaccgatatcaccgatctggaagcgttccgtaaacagcagaacgccgaagctgagaagcgcaaactggatgtgaaatacacgccagtggtcttcatcatgaaagcggttgccgctgctctggaacagatgccgcgcttcaacagctcgctgtctgaagacggtcagcgtctgaccctgaagaaatacatcaacatcggcgtggcggttgatacaccgaatggcctggtggttccggtctttaaagacgtgaataagaagagcgtgaccgagctgtctcgtgaactgaccaccatctccaaaaaagcgcgtgatggtaagctgaccgctggcgaaatgcagggtggttgcttcactatctccagcatcggcggtctgggaactactcacttcgcgccgattgttaacgcgccggaagtggctatcctcggcgtttctaagtcggcgatggaaccggtgtggaatgggaaagagtttgtgccgcgtctgatgatgcctatctctctttctttcgaccaccgtgtgatcgatggtgctgatggtgcgcgtttcattaccattatcaacaatatgttgtctgacattcgccgtctggtgatgtaa

SEQ ID NO: 380016 - DNA, 672 bp, Salmonella enterica
atgagcagccccatcacgaaacactgcaatgaagaagttagcattgacccgttaagtcgccgagaaacgaaagctgagatgacaacacccaaattcgagttgttcggcgaaacctacatgttcgttgagaccttttctgcaactgtcattagtcccctcccaatcactgaccaggtttgggttaaaaccgatactggggatgagacacagattccagcctttggtatcgcatttagaaaatctcacaaaatgtgtaaatacgagcttcgccagtatagagttgatggttcatttagtgtcttcaaagatgctctcattgttaatgcaaccactggtgaatacgaagtcaacttagatagaaagacagttattatcccggcgtttctcaccgtacttttccctaacacttcgatggcattttattttagggcgatgcctgttcctaattttttttcgaccatatttatcttgctttgttgcactgcagttgtttcattttttgtgttgccatggggttttaaatctggatatgtttttgatgaacacaaatatatgtggctaacctatttcgcttcacgaattggaagctttacctgcattaaatggataaagagaagaagccaaaagtttgataacgcactcagaagaattattaagtcattaaaattttaa

SEQ ID NO: 380017 - DNA, 207 bp, Salmonella enterica
atgggtaagccaacagaagagcaaagacctgttatcgagaatgctagcgcaaacaatatggtgatagcagcgcctggatcaggcaaatcattcaccatgatagaagcggttatatcgattctcaaaaagtatccatatgcaagaatcgggatggtgacctttactcgcgctgcaacaaacgcgctgatatcgccgtgcactctatga

SEQ ID NO: 380018 - DNA, 183 bp, Salmonella enterica
gtgaaacttagaaaaacaatcacctcagcgattattgcatcaatggttgccaatactatgagttgggctttttatgtcactttcattagagttccctgccccatacttcccgagattaagattagcggattcggctttacccacgtatttctcggtgatcttcccactgacattctcgcctga

SEQ ID NO: 380019 - DNA, 228 bp, Salmonella enterica
atgtgtgagaaaacgtgggaatactttacaccacgttcccagtatcggctttcaatgcttttccctactcctgaggcgaagggaccggattgctgtcatcgtcttggtgattcggtacacgactggtcaacccttaaaggtgggcgcaaaaaaataggcaacgataattatgtctatatgttgtggcgttacaatgactgttgtgttcgctacgttccaggcgtttga

SEQ ID NO: 380020 - DNA, 603 bp, Salmonella enterica
atgggcggaaagtggcataaagctgtaaatcgttactatttagaggaagaggtaaaaaaacttcttaatacccagcttggtacgatgatgcagattttactcaaaggcgatataaaaattggggtttgcccttctgattacgcccctatccgcacatcattcactgatacttataatgcgcttcaagcattcaactatgccaatgtgaatatttttcagagccagtttctattcggtatggaccatgccgtaataccaatgatgataaatgacgtcaaccttatggtcctaggtaggaatcctgtaaacagcattcgaaaagcccatggtcgtactcaaaacaatcttccagtactgatcggtaattgtttacatataaatactggatcactctatatgtcaaaattagaagaccaggtaatagttgctccgggtataccgccaactgactcaccagcacttacattagtagaaataatcatgaagaacaatccagttttattgtgtcatcagctaatacaaacaacaaacaagttttattcacttaaaacctatcctttagaactcgattcgattgaaaacaacattgaggtaacaagatga

SEQ ID NO: 380021 - DNA, 486 bp, Salmonella enterica
ttgttttactccctgaatcgcctgggctataacggtatgtgccgctataactcagaaagaatctattcagtgccgtgggggaaacatacagaactgaagcttgacctcaataaaatagactacctttcatttcgtctttcaggtattgaactgatcaccgctggttttgaggagactctggccgcaaccggtgaaggagatcagatttactgtgatccgccatatgacaaaacaagcaaaactagttttgtcagttacgatggtaaaccgttcagccaaagcgaccacgtgctgttagcaaatatgctcgttgacgctcacagaaaaggcgctgctgttgcgatatcaaatagcctgacatcattcactttgggcctctatgaagagcgtggattcgtcatacacagactcagcgcttaccgatccgtaggaagtaagccgaatacacggaaaacggaaacagaaatactggccgtgctgaaatag

SEQ ID NO: 380022 - DNA, 447 bp, Salmonella enterica
atgtctaaaaataaagctcgcagtaaagcccttcatcaaacctttagtgaaattattccagagatggataaggcgctaaacaaacagctcttagaagttctgatgaaatatacagaacgtgataatgaactgattgttattttgaatgaggacggcccaaatatcattgaacttaagtctcttaagcctgtgtctttgttggccgaaaagctttctgcttattcaagctattatcatgtggatgttgtggagctcgtggtcaagaaaattgatttcgaaggagcttataagcttcttaaagcttccccagatgtaccactttttaaaagcttaactgaactggataaatatcttgttgaggagtttgaaaaatacggattaaattcatttcttgacgtggataatctggattactcacttgaaaaagccagtgaactcaaaaattga

SEQ ID NO: 380023 - DNA, 174 bp, Salmonella enterica
atgactggagctccgggcaaaattctggcagccgcgatgttgatctcaagcgtatatttctctgtccttaagcctaacccgggcctggcactggtttcattattcatgatgctggtaatggccaacggcgagaaaattatcagcacctttatggatgctggcgtaccgctgtaa

SEQ ID NO: 380024 - DNA, 219 bp, Salmonella enterica
atgtttttgagcatacaaaagcaactcaggcctcatttggatacaaccctgaaaaacagaaagcagctctggccacatgtaaaattgatatggcagtcgtcaataaatggagtacctgtgatctgccctctaagcctgatgctgatgttttccctacagattcaatgtacagctttcaggcgattcgccccgcaacaggaaccgaaattcctcagctaa

SEQ ID NO: 380025 - DNA, 138 bp, Salmonella enterica
atgacatcatttaatttcaatgaaatcacttctaaattcgacaatttccttgtgatttctaaatattcatccccaaaagaaattttacaagcaatagttgcatttaaggccccatctttaaccctcgaacgaaaatag

SEQ ID NO: 380026 - DNA, 186 bp, Salmonella enterica
atggataagaaattaacatggtttacgattggtagtatagtgaatatcaatgatttcgctgatgagaacaaaggaggtcttgagagtaaaatgcttgtcagggttaagcacttaggtggtcatgagcaaatatatgtatatgttggtttgaataaattagaagcaacaaaggatgagttaatataa

SEQ ID NO: 380027 - DNA, 195 bp, Salmonella enterica
atgtattcaacctgtttcactggtataaatcagggtgatgagttgatggtctccggttatattgttgtcgatactattatgattgaagggagagaacatcctcttgactacatgagagtggtagcaacaagtaagttggctcacatacctaaacctctaaaaggttttggacaaagtagctttaatcagatctga

SEQ ID NO: 380028 - DNA, 177 bp, Salmonella enterica
atgcaggttggccatcagggaaaatatgtaaatcaattagcaatcaatcagaccgttgccgtggagattataagtcattcatatatgtccatcttgatctacatagtggtgaagctaaagaaatcacatgggagcaagcagacgatatgctgtctagtccaggaaaacccccattaa

SEQ ID NO: 380029 - DNA, 228 bp, Salmonella enterica
atgagtaagttaaccggagaagttatccatgggattcttctttccttacctgaatttattgatatgccagaagtgctcgcttaccaggtcagggatgaaattcttgcttttaacactcgctgtggagacgggatctttcatggttggaacacggcttcagaattgtggaagtttgaaatctttccccgcaccaccatcatgatgcagcatacttcggcaatacattaa

SEQ ID NO: 380030 - DNA, 339 bp, Salmonella enterica
atgttgaaaaatggccctgaaaaatctgcgccacagacgttattgggtacccattttttcatttattatcagagtgcgaacaattgttggttttatgattatgcatataatatgatgcctgtatgtattaacatgaatatcatgttgtgtccttttgggctcattttatttgatggttttaatgttaacctgttattaattttttgtgtggtaatgttgtccttaatgatggggtttcttaatctctgccgggttaagatcaccaaattcttgtctcatgtattattagggtgtttattattaaggaaaatagtgtgtgtaaaaccattaatttgttaa

SEQ ID NO: 380031 - DNA, 537 bp, Salmonella enterica
gtggtgctcttgcagcagcgctatgctaacggcaaaactatctacaatagcctgcaaaccaatggcgcattaatcactgaagagtgggcggccttctttgcacagcatcattttctgagcagtatatcgattgatggttcgcaagttgagcattgttttctggtggagcagaatggcgacgtttttagcagtgactattttgtttttcccgcctataagatgggcaatttacggcaatacactttagaagagatagcggtctcccccctttcagcggcaatttggcaagctaaagcaaatctttcctcacgctgccagaactgcgcgtggcgctttgcctgccatggaggcagtccgaaacaccgaatttgtatggataacggcgaacggcaaaattatctctgtaaaggatacctggagttctttcaacatgtgacgccctatatgaatgtgatgcgtcaattactcttgaaacatcgattcgccgcgcatattacccgcatcgttgacatgattgcggatgacgttcgtcagtga

SEQ ID NO: 380032 - DNA, 1068 bp, Salmonella enterica
atggtgactcgccgtgagcttcttttgaaaacagttggtgtagcagtttgtagctcattagagcttaattcgtttgcgggtataaaagatacatcactcaatgtaccatcctgggattttttaaaggaaggggatgtcattgatgttatagctccatcctcgccaatcgatgatccacaagaacgttataaaaaaatagaaaagtactttaaagaaaacacgccttttaagataaacattccggaccatttaatagagcctacagcgttactggatgaagcaaatacaatctggaagcgcgcgaaatttgtctatgatgctttcagttcggagtcaaaagcgatctgggcgatatcaggtggaggttggggcgctagtatacttggcgaattgatgagttatccgaaaccagataaaataaagccaattattggatattctgacattacggcattacatatttatgcaaatgaatatttaaattttccctcgatacactccgttgtgctaggtattaatggcgatatttcccctggatacaataaaaatggagtaggagcaacactggatattcttagcggaaaaaaaacagaggtcatgtatgaattatcaccgctcaataaattagctgcttcaatgacagaggttacaggtaaaattgttggtggaaattctcttttggtatctgcgcttaatggagcgccgggtctttcgcttaaaactaaggggaaatttctattccttgagtctattgcagatgatccaggccagttttccaggaagctgatggggctggcctattcgccagtaataaaggattgcttaggggtaatatttggggatgttattaaagatggtggcaaaacaaactcacctctggtgcaaagtcagtttgattatattattcaccgattcgcagaacaattcattgaagataaaattgctttgaaagcaaataatctttttggccatggtgcgataaatatgccattgccacttaatacttttgctgtggtaaagcgtagtggagcgaatataactgctacaattagtactaatagagtttga

SEQ ID NO: 380033 - DNA, 234 bp, Salmonella enterica
atgctcggggatttctttagccagggtgtcgcacagcttaacctgtttgatgacaatgccccacgtgctggcagcgagaagctgatggaggtgctggatcaactcaacgccaaaggcgggcgggggacgctgtattttgcaggacagggcatccagcagcaatgggcgatgaaacgtgagatgctttcgccgcggtacacaacaaggttttccgatctgctgcgcgttaagtga

SEQ ID NO: 380034 - DNA, 549 bp, Salmonella enterica
atgaaaacgacaaaaaacaaaacgagcgaacagtttttaaatattaaaaatttcaccccctatacaccggaaccagaagaggcattattaacaggtgccgcacatcttaaatcagaggatggtcaggactggtatatgtgccagaaattattttcagcagatacgctgaaaataacctacgacgataacgatgttattacgtgtattacacgggatatttccgggctgtggcctgtgggccagagcgtggcggagctacctgatacggatgaaaaccgccgcgctgatatttcaggcggctggcagtttaaagacggtaaaatcgttcagcgggtttattcgccggaagagctgcgcaaaaaggcggaggctgaaaaagttcgccgccttgctgaggctgaggcggctattgcaccactggcgcgggtagtaaaactaaaaattgccacagatgaagagattaaacggcttgaagcatgggaactctacagcgtaatggtaaaccgggtggatatatctgcccctgactggccggatataccacgttaa

SEQ ID NO: 380035 - DNA, 1437 bp, Salmonella enterica
atgcacagaattgatacgcccaccgcgcaaaaagataaatttggtcagggaaaaaacggatttacgaatggtgatcccgccacgggccgccgcgcaacggatctcaacagtgatatgtgggatgcagtccaggaagaggtctgtacggttattgaagccgccggcataccactcagtaaaggcgaacatacgcagctttacgccgccattggcaggctgatcgatgaacaggttaaaacccgtcttgaaaaaaatcagaatggcgcggacatcccgaataagccgctgtttctccagaacgttggtttaggaaaaacagtagatcaggccgctggcgccatgcaaaaagaccagaacggtgctgatattccggacatagatttattcgtgcgtaatatcggagcagcaagagcattcaatggcgggattaatattggtggcgacagtggaagctggactacggcggaatttatcacctggctggagtcgcagggcgcatttaaccacccctactggatgtgtaaggggtcgtgggcctatgccagtaacaaagtcatcactgacacggggtgcgggaatatctgtctggcgggcgctgtggtggaggttatggggactggcggtgcgattaccattcgggtgacaacacccaccacaacgtcaggtggtggtgtacccagcgctcagttcatctatatcaatcacggcgatggatatgctccgggatggcgacgagattttagccgtactggcgacgggatgaccggcaacctctaccttaaaaatgagggtcgtataaatcttgctattgtggatgaagccgaaacgccccgcatgtggctcttcaaggataaaggcggcgacggtgttcatattaacaatggtaatgatggcggcggggatttcgttttcggtaaagaaggcagtttttatgcaccattagcagtccgtgcaggtggtagcaaaatgctttctgttcgttccgataataattcggcactgagtgctcactttaatttatgggggggcggaaatcgccctacggttattgaactggatgacgagcagggatggcacctgtatagccagcgaaatccggatgggactatttcattcactgttaacggtattgtctactgcacagcgttaaatgtaggcggcgctatttatcagaataacggcgacatctacggttctgtctggggaaatagctggctgagtacgtggattcacaacaatgtagtaagaggggtcagacttggccccgtggcgctttctggcggtctgtggcgtgattttcaactcggcggcggacaggtggtgacgggcttccatactgacggtaaatgggaaatggaaggtgatgatgacaaggtctattaccgtcccgttcagtatctggttggtgatacgtgggtaacggcccccagtgtataa

SEQ ID NO: 380036 - DNA, 1080 bp, Salmonella enterica
atggctgacagtcaatttgcacggcctgaactcccgcaactgatagccaccatccgcagcgatttgctgacgcgcttccaggaggatgtgctcttacgcaggatggatgcagaagtgtacgcgcgtgtgcaggccgctgccgttcataccctctacggctatatcgattatctggcccggaatatgctgcctgatatgtgtgatgaggactggctttaccgtcacgccaggattaagcgttgcccccgaaaggatgccgtggccgcggcgggctatgtgcgctgggatggaataagcgggacgccaacgctgcccgcaggtacgcagatccagcgtgatgatcaggttacattcacgaccctgcagactgtgaaagcttccggcggcctgttacgtgtgccggttattgctgatgtggcgggaactgccggtaatactgacgatggtacagcgttacgtcttggcacgccgattactggtattccttctacaggttacgctgacactctgatcgggggagctgataaagaggagcttgaaacgtggcgcgcgcgcgtcatggagcgctattactggataccacaggggggcgctgatccggattacgtcatctgggcaaaggaaattgcgggtataacccgtgcgtggacattccgtcattataagggtaccggcaccgttggtgtgatggtggctaccagtaacccggttaatccggcgcctggagacgatctcgtcaaagctgtacgtgaccatattttgccgctggcacctgtcgctggcggcggactctttgtcttcgctgccactgaaaaaagcattccggtaacagtcgcactggccaaagataccccggaaattcgtactgccattattgcggaactgaatgcgctgatgctgcgtgatggcgcgccgtccggaaaaatttatgtttcgcgaatcagcgaggcgataagtctggcgaccggggaggtggcacatcagttgcgtgtgccgacggcagatgtggtactgggaaaaactgaactgcctgtcctggggaatataacctgggccacctataccggggagaacggataa

SEQ ID NO: 380037 - DNA, 324 bp, Salmonella enterica
atgctggatttgaatatagtgaaacagcatttacgtctggaacctgacattactgacgatgatgagttattgcgtctctatacaggggcagcagtggcttatgttgaacaatggacacgccggaagctgtatatgacccgtgaggatgatggctttcgggaagatcctgacagcctgttgcttacggacaacgtgagagccgcattgttattgttagtggcattctggtacgaaaatcgtgaaccagccgggatgggggagatttcagaaacgccttttgcggttgaagccttgttacaaccatatcgcatttacggcctgtag

SEQ ID NO: 380038 - DNA, 270 bp, Salmonella enterica
atgaaaataattgcacaaaagccgctgtacataaacggtgacgtggttactgagggctcggtattcgaaaccattgagcagcacggacgcgaactgattaataaaggatatgcacagctgattgaggtcgataattctgcgcagccggaacagccggaacagccggaacagccggaacagccggaacagccggaacagccggaacagccggaacagccggaacagccggaacagccgaatactaaagcggataaaaaggtcaaaaggtaa

SEQ ID NO: 380039 - DNA, 1218 bp, Salmonella enterica
atgtctgaaataaatgaaattctgaaaaaagtcaccgccagcattgaagaggcaaccggcaaattcaacgcgaaagcagaagacgcactcaaagaggcgcagaagtcaggcaggctgtcagaagaaacaaaggctgccgttgacaagatggcgtctgaatttaacgccctgcgtgaagctgaaaaaacgctgaaggcggcaataggagaacttgagcagcatgttgcgcagatgccgctggccagtgcaaaacatattgttgagacggttggccaacaggtcatttctgcggaagctctcaaaacattttccgccagcgtggaaggagggaaacgcgtcagcatcccggtaaacgctgcacttatctcctccggtgtcgcggagggcgtggtggagcctcagcgcctgccgggtattgatactgcacccagacaacgcctgtttatacgtgatctgattgcacctggccgcacatcatccccggcaatcttctgggttcagcagacgggctttaccaataaagccgctgtggtacctgaaaacacgcagaaaccatacagcgatattgcattcgccacgaaaatcaccccggtgaccaccgtcgcgcatatgttcaaagcatccaagcagattctggatgacttcgcacagttacagtccactgttgatgccgaaatgcgttacggcctgaaatatgttgaagagcaggaaatcctgtttggtgacggtaccggcgttcatctgcacggtatcgttccgcaggcttcggccttcagcgcagaattcagagttgaacagcaaaacggcattgatgacctgcgcctggcaatgctgcaggcgcaactggcacgcttcccggcgtcagggcatgttctgcactttatcgactgggcaaaaatcgaactcactaaagacacgcttgggcgttatatccttgccaatccatcaggtcttactggtccgacattgtgggggcttccggtggtggctaccgaagctgcggcatttaagggcaagttcctgacaggcgcatttaacgctggtgcgcagatttttgatcgtgaggatgccaatgtggttatttccactgaaaacgccgacgattttgagaaaaacatgatctcaattcgttgtgaagagcgtctggcactggcagtcaaacgtccggaagcattcatctatggttccttcactgtcccggcatctgctggcgcataa

SEQ ID NO: 380040 - DNA, 849 bp, Salmonella enterica
atgagtaaaaaacaacttccggcagcgccggcgggtcgaccctgtgcgcgggttacctgtgaaaccctgccttccgcactggaccgctgggatggcgggattaaagccgcggccaccgacgataacagcatttctgtttttgatgttatcggccaggactactggggcgagggggtgacggcgaaacgcattgccggtgcgcttcgggcaatgaatggcgctgacgtcacggtgaatattaactctccgggcggcgatatgttcgaaggcctggccatctacaaccttctgcgtgaatacgaaggacgtgtgacggtgaaggtgctcggaatagccgccagtgccgcctcggtcattgcgatggccggggatgatattcagatcggtcgtggtgccttcctgatgatccacaactgctgggtggtggcaatgggtaaccggcatgactttgctgaattatctgcctctctcgaaccgtttgataacgcaatggctgacatttacgccgcacgctccgggcttgatatggccacagtgcaaaaactgatggatgccgaaagctacatcggcggcagcgatgccgtggagaaaggtctggccgacagccttctttctgctgatgccgtaagtgacggtgacgaaactcctgctgcagcgttgcgtaagctcgatgcgttgctggcaaagtcgaacactccgcgctctgaacgccggaaactgattaaagccctgtccggtggcatgtctggcgctgccaccaaccacgacggcacgccgggcgctgccgaagaaatcaaacctgaaatcatcaattctcttgaaaacgccctcgctgcgttagtcagataa

SEQ ID NO: 380041 - DNA, 1305 bp, Salmonella enterica
atggcgaataataaacaccccgggcgaataaaaagcgcccttttaaactggctgggcgtccccgtcagcctggctaacggcgagttctggcgcgagtggttcggaaccagcagcagtggaaaagttgtgactgctgataagattatccgcctgtctgctgtatgggcctgtgtcaggctgttgagtgaatcggtttccacgttaccgctgaaaatatacgagcggcaggctgatggctcccgaaaactggcttctgataatcctgcttaccaggtgctttgccggcgccccaatcctgaaatgacgccgtcacgttttatgctgatggtggtcgccagtatctgtctgcggggaaatgcatttgttgaaaaactgtttatcggaagaaaactggtatcgctggttccgctgttaccacagaacatggtagtaaaacgactggatagtgggcaattgcagtactcatatactgagaacggaaaacagcgaattatacctgtaaaccggattatgcatatccgtggattcggtctggatggtgtatgtggcatgatgcctgcgatgacgggcatcgatgtttttggtgcggcaatgtcggtggatgaagccgcggcaaaaatctttgaaaatggccttcagagtacagggtttctttcttcaaaaaatgcgctgaccaaagagcaacgtgatcgtctgaggcaaaaccttcagtcttttatcggttcaaaaaatgccggaaaactgatggtgctggaaaatgaactcacataccagaatgtcaccatgaatccggaagcggcacaattgctggaaagccgttccttcagtatcgaggaaatctgccgctggtttcgcgttcctccttttatggtcggtcataccactaaacaaagcagctgggcatccagtcttgaagggatgaaccttcagttcctgacgcacactcttcgaccgctgctggtgaatattgaacaggaaattggccgatgcctgctcgatagcgatgatgacgtgttcgcggagttctccgttgaaggactgctgcgcgccgacagcgcgggccgtgctgcgtactataccagtgcgctccagaatgggtggatgtcccgtaatgacgtgcgccgtattgaaaatatgccaccgattgaagggggtgacatttacaccgttcaactcaacctgacgcagctgaaaaacctcgaaagcgttaaccctgcggttcaggcacttgctgtcagagaactgcataaccacgtattccccgatattccttacgaacaatctccgctgaaacaggccgcttag

SEQ ID NO: 380042 - DNA, 1740 bp, Salmonella enterica
atggtggagagaaagaagacccgctcaaccagttcttcggttgaccccaccactcgttatgcgatggatgtggcgtccggtaaggaaattgccggaccggacataagaaatgcctgtaaacgacaccttaaggaccttgaatcctgtcacgcccgggggctgttttgggataccgaagctgcgcagcgcgctatcgactttttcgcgaaagtgctgaagctcaacggcggcgagcatgaaggtaatccctttatcctcctgccctggcagtgtttcattgttggttcgatatttgggtggaaaaactctgaaaactaccgtcgttttcgcatggtgtacgtcgaatctggtaaaggttcggggaagtcaccgctggctggcggagtagggctctactgcctgacagctgataaagaaccacgtgctgaggtatatgccgcggccacgaaaaaagaccaggccatgatcctgtttagggatgcggtggcgatggttgatcagtcaccagcgctggcgcagcggattaataaatcaggcggaaccgggaaggagtggaacctggctttccttcagacggggtctttcttcagacccatcagttctgatgatggacagtcaggtccgcgtccgcattgtgcactgattgacgagattcacgagcataaaaacaaccaggtcgttgagatgatgcgcgccggtacgaaaggacgtcggcaggcgctgattttcatgatcaccaacagcggccacgataaaaccagcgtctgttatgactaccacgagtacgggcgcaaagttgcagaaggttcgatcgaggatgacagtttcttttcgttcatctgctcgcttgatgaaggggaggacccgtttaaggacgagtcctgctggaaaaaggctaacccgtcgctggggcacacctttactgagcgctatctgcgtgagcaggtcacgcaggcccgcggaatgccgtcgaaggaaagcattgttcgacgtctgaacttctgccagtgggtggatgctgataatccctggatgagcagtgatgtctggatgggatgcgaggaggatttcgacctgcaggagctgcggggcgaggaatgctatggcggtctggatctttcaggcagccgggatctcaccgcactggcgctgttctttccgaaaaagagaaagctggtggtggaattctggacgccaaaagacactctgacagaccgggcgaaaacagaccgggttccatatgacgcatgggaacgggacggatacatccacaccacaccaggtaaagccgtgaagtatggttttgtggctgaacgtatcgcagatcttgcaatgcagttcgacatcagggccattgccttcgaccagtaccgtattaaataccttgagccggaactggacgaagcctcagtatcagtgccgctgatcccgcatgggcagggctactacaaggcaaaagattctggtctgtggatgccgcattctatcgagctatttgagcagatgctggatgatggcgcagtcgttattaaaactaatccctgcctgcgctggaatgcagcttccgcagtaaccgaagccgatcagaaagaaaaccgcatttttgccaagaaaaaaagtaccggacgtattgatggcgtggtggcttccgctatggcaataggtgcatcagaagaggatgtcactgatgatggcgatgttgatggtttctttgatgatccaatcatagtgggtatctga

SEQ ID NO: 380043 - DNA, 462 bp, Salmonella enterica
atggcaggacgacgtccgaaaccgacccacctcaaagtggtaaccggcaatccgggcaaacgtaaactcaacgataaagaaccccaacctgcaaaagaaatccccagcccgccagcacatcttagcgactggggaaaagtggcgtggggcaggctcaccgttttacttgatggcatgggtattcttaccgttgccgattcactggcgctggagcgtctttgcgatatctatgcagatatccttcagcttcgtctgacgatcgcggacgaagggagaacttatacagtccagactgaagggggatttttgattaaggcgaatccggctgttgcgatgctggctgatgccgatcgacggtttaaaagttacctggtcgaattcggtctcaccccggccgccagaacaaaggtgaaagttgatggtggagagaaagaagacccgctcaaccagttcttcggttga

SEQ ID NO: 380044 - DNA, 345 bp, Salmonella enterica
atgaacaaatcgccccgtatctacggcagcaaatgggaccgtgagcgactcatatttcttcgtgctcatccgttgtgtgccatgtgtcatgagcagggaagagtgacggcggcaacggtggtcgatcatatcatcccgcacaaactgaaagaggcgctgaaaagcggaaacgtcgaagcgatagcgaaggcacaaaagctattctggagccggaagaactggcaggggttgtgtaagcagcaccacgactctacgaagcaacgaatggagaaacgcggtgtcgtcgtgggctgtgacgagaacggtattccacttgaccgtgcatcgcactggttcagacgataa

SEQ ID NO: 380045 - DNA, 510 bp, Salmonella enterica
atgactatgcgccgtatattagccacctctgccgcactttgtcttggcggctgcattactgtgtatggtccggttaaaacgggagggcagcaacagcagggcagccagaccgggcagcagccagggatgagcgaacagatatcaacctcattcatcggtaaccgtaaaccggatgagttgctgaatgccgtggcgctgtatttcagggagaaagccatcacagccagtgttaacgaccagaccacagggattatcgccggtaccggggatgatccggaactgagttcgttgtatctggactgttcactgttaccgcagacacaaaatatccaggagcattaccgtatcgtcgcgcaggtctggagtgccggtgaaggcagtaatgtttcggtaatggtgacaggcactgccggactggatactgccgatggtaacgataaggtgaagccggtggagtgtaaaagtaccgggatatttgagaaagatttgctggaacggctacgtaagtaa

SEQ ID NO: 380046 - DNA, 237 bp, Salmonella enterica
atggcagaaaaattcatgataaccgcctcggatacaaacgctcgccgaagtggtgaaaagcacatgatcggttatggcaaatgtgatgaagattttaagcggcttgtccatagtgcgacgcaccatacgcttttctatcctgacgttattgaggtctatgacgtcaatttcattaaacgcctgaagttatacgaatgtgatggtgatggtactttacaagaaattaaattcgagtaa

SEQ ID NO: 380047 - DNA, 465 bp, Salmonella enterica
gtgaaccgaattttagtcagcgcgattgttgttctgctgattgtgaccgcagtgctggcatggactacagaacgctatcacggtaacgcgatccgctacaaagaacagcgcgacacaaccactcacaacctgaatctggcgaacgagactatcagtgatatgcaaacgcgccagcgtgacgttgccgccctcgatgcaaaatacacgaaggaattagctgatgcacagaccaggaatactgatttgaagcgccgccttgctgctggtggccgggtgcgcgtcgaagggcggtgttcagtgcccacccagaccgaaaccgccagcaccagccgcgtgggcaatgctgccaccgtcgaactctctccaggtgctggacaaaacgttttcaatatccgcgccggaatcatcagcgaccaggaaaaactgaaatatttgcaggagtacatccggacacagtgctattaa

SEQ ID NO: 380048 - DNA, 696 bp, Salmonella enterica
atggctcaaattagggaaatgttggatcaatcacaagaagctcaaactaaagaacaacttcaattcctcataaatgcagctcaagggaaattaaatgagcaaaaagagaagctagagaaaatttttttgaatccgtctgctgaagaaaaaataagagttattcctgatacgcaaattagatggtacgatgagtatcgttgtaatgtaaaatctggagcttcggatagtattgataaagtaattgatgccttttttaccggagaaagcggattagtcgatgggtttaaggggttggtgaaaactggcttgtcgacaattttaggaaatgagcaggctggagaatgtcaacaaaatatatatgttgttggtatggaacataatgcgataattcgagttgatatatcttcatggcgttataattatacatctgacggtattattgggaaagttaaggatgtctattgcaccactttctgcaaatcagtcgtagaccatactaaggtacgtttggatacattagtatatttgatctcagaacaggctggagatgatattgacaaactggaagattatataaacaaattaaaaagaatttggaagcttattgaaaatgaatcaccattatccgtgcaaaaacgagtaactcccctgttaaatgctcgatatgatgcttatctgagattaaataagctttaa

SEQ ID NO: 380049 - DNA, 837 bp, Salmonella enterica
atgaaactggaagcatcgctaaaacacttcagcccgcagggtatgcacatcagcgacgacgtgaaaggaacctctccggatcgtctcaccggtacagatgtaatggcggctattggtaccaccagcagccgcgcgcggtttggtctggctgctttcttcggaaaggccgggatcagcaaaaccgatgagcaactggcggtacaggcgctggcgcgacatgcgatggagacggctccgaagaacgtcaggaaggccgccggatgtgagttcggatggtgtatgcaggtactggcgcagtttgcctttgctgaatattccctttcggcggccaccactgtggcatgtcacacctgtaaaggcagcggacgaattaccaggacgcagacaacacgcaaagtatcttatccgtggggaaaagcgccatactgggccagccgttcccgtgccgttcgtccgtcagactgggagcagtggacagaggtaacggagatagtgccgacagtctgtgacgcctgcgaaggtaagggaacgataagcgcccggtgccgttgcggtggtaagggtgaggtgctcgaccgcaaagccacaagcgagtgtggtgcgccggtgtttaaagcctgtgagcgttgcggcgggaagggattttctgcggtaccgtctactgcagcctataaagcgatactaaaacgtgttccagatctgcatgtcagaacgtggacccgcaactggaaaccttttctggagtcgctggtggagatttgttacagagaagaatccagggcagacagtgcatttcagaatgccacgcgttttaatgatgatggcgaaaaaatttag

SEQ ID NO: 380050 - DNA, 273 bp, Salmonella enterica
atgattaatccttctgaagttggtaagtctggtgaaatggttcgccatactgctggtagggaactcggtaacggatatggttattctgaacatcataaaacagtgtatgaccgtgagcattatctcgaaaaattgctggcaaccatcaaacccgtgacgcgtgctgaagccgaggaggtgtgccgctggttccttgcaagcggaaaggatgaatatatggaagacaaaggtgcggcggttattcttaatctggttggagagtgtgaagaatga

SEQ ID NO: 380051 - DNA, 990 bp, Salmonella enterica
atgagagcacttctgacccctgaaattgctcctcgtatgggcgttgtattgttcaggccgggatcggaactgatgcccctgtttatgcaggggcgtgttctgcttgaaccagagccggagcaattttcatctttcgccagcggcgcggtcccggcggtatcacagccgctggcggatgatcctgctgttcgtgatgtgttccgtaatgagtcggttatttatcgtgctggtggtctggatagtctggaaagctggctactccgggggaatgtctgtcagtggccgcattcagactggcacagcgaacagatgacaaccatgcgccacgctccgggagcaatccgactgtgctggcactgcgataacctgctgcgcgaacagtttacggaacggctggagtcaatagctgtggagaatacgacaaaatgggttttatcggttgtttgtcgtgatctgggttttgacgatatgcacgcagtcacgctccctgaactgtgctggtggatggtacgcaatgacttggcagacgttttgcctgagagcgcagagagaaaagcattaaggatgccgaagactattgtccagtcagctacccgtgaaagtgaaattgttccctcggtgccggccaccagcattgtacaggataaggcgaaaaaggtactggcgctcagggttgatccggaaacgccggaaagcttcatgttacgtccgaaacgccgtcgatggatcaatgagagatatacccgctgggttaaatcccagccgtgcgcgtgctgcgggaagcaggcggatgatccgcatcacctgataggctacggtcagggagggatgggaacaaaggcgcatgacctctttgtgctgccgttgtgcagaacgcatcacaatgagttacatgcggacaccgtggcattcgaagagaaatacggctctcaactggagttgatatttcgttttatcgatcgcgcgctggcaactggcgtgctggcgtaa

SEQ ID NO: 380052 - DNA, 522 bp, Salmonella enterica
atgagaacaacacctcctcaccttcagccagttttatccagggtgaaacgttacgtggaaaagatgccggaaggcacaacactgacccagttatcgcagaaagttccggcttacagccagcttaacaaaaaggataaggaaattcttattggcatcattcgtgacagcggccttctggtagttacccatgatggaagagccacaacattacatcaccctaagtttgggcataaagccataaacattgtggcatcagcatcattagtaaccgaggagccaacagtgattaaaaagaccgttacacctgaagaattacgtaaacaggcagaagaattgatccgtgccgctgaagaggcagagaagaaaattaacgacaggtctgagattaaaaaacaactggaccctctccgacttgaagttcttcaatcctatggcatggccagtcgcaaatttgatgaatttgttgatgcaatggcagacatgggaaaagcggtacaaaaactcaaacaaattgcgctgtag

SEQ ID NO: 380053 - DNA, 801 bp, Salmonella enterica
atgaataatttaatggtcattgatggtattgaagttcgtcgcgacgttcagggacgctattgcctgaatgatttgcatcgtgcggctggcggtgaagacagacacaaaccttcaaattttatgcgcatggattccactcgcgaactttgtgcagaaattgaccgttgctcagatgtgagcatcggttgtattgagattatccggggcggtaacggtcagggcacctatgtttcgcgtgaagtggtgtttgcttatgcaatgtggattagccctgcatttcacctgaaggtaattcgcacgttcgacgcggtagttaaccagtatcagcacaccgccaatctgatagcgacggataagattcaggcgggtgttattctgcttgaatcggcggccagaatgctcaacctctccaactcgtcaaagcttggggcttaccagaagttacagaaggtcgccggccttcccgatctgatgccgtcctacgcgattgatgcgcctgctggcgcgccggagagttcaagccgcccgacgctggcactgagcgcgctgttaaaacagcatggtatccggatgacggctaatcaggcatatcagcagttagcgaagctgggggttgttgaacatcgtgagcgttacagtcgttccgcgattaacggcattaaaaaattctggtcgctgacggcgaaaggctgcatgttcggcaaaaacatcaccagcccggcaaaccctcgcgagacgcagccgcatttcttcgcgtcaaaattccctgagctgctgaagctgctcgacacagtgcattaa

SEQ ID NO: 380054 - DNA, 483 bp, Salmonella enterica
atgagtcttatgggagacgttcagaaattcattgaatcccatccgggatgtacttccagcgatatagcgaatgcttttgcagatttcccgcgtaaaagcgtcctgcagtcgacaagtaagttatgccagtgcgggcgtgttgctcatcgctttgaaggtaaaactcgcagacattttgctcttgagacagacatacagccggatcaggaaccagatatcgggactaaacctgtgcggagctgttatgtcggaaccaacgacccgcaggtgattatgcacctgatacgtcaggcagaaacgctggagtcgggagggttgttccgtcgtgcagctacggtatggatggaggcattccgggagagtcatatcccgtcggaacgtagcgcctttctggcgcgccgtgaacggtgtttgcggaagagcagaaagtatgttgcatcaggtagtgaatggtatctgtcagggaattatatggggtcttaa

SEQ ID NO: 380055 - DNA, 672 bp, Salmonella enterica
atgacaatcgacaaacaggcgctgcgtgaagcggcggagaaggcagggaaagataagtggcaggctaagaaaataaatggcgacttctatgtcattcgcagcggtagttacataaagcaatgcggcatcacatcgtttcaacctatagcggagattgatcataagccagtcagggactttgttgccatggtcaacccggcaaccacgctggcactgctggatgagaatcttcagctccaacgggaaaaagacgcaatagaggccgtagcgctggcgctgcgtgatgatatgcgacaggcacgggagcaactggaagccgcagaacgcagcatagcagaacaaagcgcgattgtagctgctgctgaaaaactggttcgctgcaaaggtcgttaccacagtgaactgaattaccgggcgctggcaaaactttttggtgtcattacgccggatttaccaccacttgaggatgaaaacgttcattacacagacgctgctgaggtggaaatttcggcattacgccagcgcattcaagacctggaggcgcgggaggtgacgctgcctccgacattctggtacgagcatgatgatttatctcgtgatgttcctgtgcttgataagcggctcgtgaagaaagcaatccgcgccgctggcattggcgtgaagggggagtga

SEQ ID NO: 380056 - DNA, 1257 bp, Salmonella enterica
atgagcgctaacgcagcaataatcgtcccttcagatatcagcatgatggttcgtgaaattgagttggcttataaccgttatctcactgaatttcgcattccggacgaccacaaaattattgtgaatttttctgccggaaaggacagcaccaccacggcgacgattgccaaccatctgttcggcgaccgcgtacaaaacgtaatggcagatacagacaatgaacatgaattgaccgttgattttgcaagaaatattcatcatcaaattggttgtaagccggtgcagatagttaagcgcgtttacactgaatctgagtttgaacgccgccgccaatccctgattaagcgatgggcgcagtgtcagcctatccgtatgggtgcctatcgcggcgtggttatgccatctcttgcccggtcggatactaagttcggccaggcatggcagcgtaccgccgaacggtggggaattgagtttgaaacaccgctagaagctgcgctgtcggtcatgcgtccaagcggcaattcattcctggatgcggccctgttgcatggaaaattcccgatgatgcgcgaccgtttttgtactgaagaactgaaaattcagattgcgttcgatgctgcaataaagccacttcttgatgatggagaggtagtcgttcagtggtctggcgtgcgtgcagatgagtccgacaaacgtgccggttacgcaagatttgcatgtgatgaacgtgacccgggcttcctctacaacttcctgccaatccacaaatggacggcgactgacgtattcacgctgcataaatatttcggtattaagcctaacccactttatttgcagggggctgaccgggtcggatgtatgaactgtgttttatgcacgaaagaggaaatcgcgcaaaccgccgcacgatggcctgagcatatcgaaaagcatcacgcatgggaaaaaaaggttcgtctcgcgtcccgctgggtacactggatgagcgtgggaactgaaagtcaggcgtggatgcgctctcagttaggcgttcgggaagtcacctggtttgatgaggatgagttcacaggggaagaaatagcgatgcgcaagcggtatccggtaaacctcggacaggaagtcaggctgcatggacttgaacctgacgttcagcgaatcgaatggtctggtttctacggtccgcgcggtggaatgggtgcgccatctgcgctggatgttgttgaatgggccaaaacaggacgaggtggcaaggtctag

SEQ ID NO: 380057 - DNA, 156 bp, Salmonella enterica
atgcaactgataaataagaatttgaatgatatttatttttatttcaataattttgatgttgttagcgattcagcttcagaagtttcgaaatgtttcgacccgataaccgcactaagggggattgttatcatttttatgctttactttatgaaataa

SEQ ID NO: 380058 - DNA, 1644 bp, Salmonella enterica
atgaaaaatatcaaagtcatcaccggcgttattacgacgctgggcatatttagcgccttattgctggtaacaggaatactgttttattccaccgtcagcagcgatcggctgaattttcagaatgcgagcgcattaagttatcaacaacaggaactgggcggcagttttcagacattggttaaaacccgcgtcaccattaaccgcgtggcgatacgcatgttaaaaaatcagcgcgatcccgcctcgctggacgccatgaacactctgttaaccaacgctggcgtgtcactaaacgacgcggaaaaacatttcaacaattacgcaaactccgaagcgatcgcgggcaaagatccggcgttagatgcccaggcagaagccagctttaagcagatgtatgacgttttgcagcagtctatccgctatctcaaagccgataattacgccgcctacggcaaccttgacgcccaaaaagcgcaggatgacatggagcaggtatataaacagtggctctctcaaaatacgcaattaataaaattagctggcgatcagaatcagagcagctttacccagatgcaatggacgctggggattatcttacttatcgtgctcgtcgtgctggcgtttatctggcagggacttcagcgcgttctactacgcccgctgcaacggattatggcgcacatccagactatcgccgacggcgatcttacccatgagatagaggccgaaggacgcagcgaaatgggccagttggccgccggtctcaaaacgatgcagcagtcgttaatccgtaccgtcagcgcggtgcgtgataacgcggactctatctataccggcgcaggcgaaatttccgcaggcagcagcgatctctcttcccgtactgaacaacaggcctcggcgctggaggagaccgccgccagcatggagcaattaaccgccacggtacggcaaaataccgataacgcccgacaggcgaccggccttgcgaaaaccgcatcagaaaccgcacgtaaaggaggacgcgtggtggataacgtcgtgaacaccatgaccgatatcgccgaaagttcggaaaaaattgtggacatcaccagtgtgattgacggtatcgccttccagaccaatatcctggcgctgaacgctgcggtagaagccgcccgcgctggcgaacagggacgaggattcgcggttgtggccggagaggtacgcactctggccagccgtagcgcgcaggccgccaaagaaattaagatgttgattgaaaactccgtgtcgcgcattgataccggctctacacaggcacgcgaagctggggagaccatgaaagagatcgtcaccgccgtgacccgcgtgaccgatattatgggcgaaatcgcctctgcctccgatgagcaaagcaaaggcatagaacaagtggcgcaggcgatatcggaaatggatagcgtgacgcaacaaaacgcctcgctggtagaggaatccgcggcggcggcggcggcgctggaagatcaggctaacgaacttcgtcaggcggtcgccgcgttccacatccaaaaacagccgcgtcgtgaggcatcaccgacgccgttaagcaagggcttaacgccgcaacccgccgcagaacaggcgaattgggaaaacttctaa

SEQ ID NO: 380059 - DNA, 1998 bp, Salmonella enterica
atgagcgatattatttatttaaaaatagtcggcgaacgtcaggggatcatatccgaaggctgcggcagtgaaccctctgtcggcaatcgttaccagactggacatgaaaatgaaatttttgtttttagcctgcaggcactggtcagcagtactgtggacggcgtcaaccatcatgggattcgcttttgtaagctgattgataaaagctcgccgctgtttacccaggcgataaataacaatgagtgttgctctctggattttagcttttatcgtattaaccgctggggaaggtgggagaaatattatcatattgaggttcgcggagcgggtattacagcatactcaatgcattcccgaacagagggaatgcctgaagaatttatcacaatacattatgattatatccgctcaaaacatctgatagctaatacggaatacagtgtcctgttaacgccagaaaactacaatcgactctttccggcaacccttcccgtggttgaacgacctgatatccctgcaaaaaaaagagaaattgtcttaaccattggcgtcttctttgacggtacggggaacaacctgctcaacacgaatttacggatgcagaaatgcaacccagaaaactatgggcttgatgtgcggacgttaacggagtttaaccagagttgcataaagaaagcggggtttgacggaacggaagcaggcagttatctgaattattatacgaatatttactggttgaataagttgtatcatatagatgtaaaaatagatgatgaattagtgcatattcagaaaaaaatctatatcgaaggtattggcaccgagaataacaaagccgattctctgtgggggatggggctgggaaataacgataccggggttatcgccaaaaccgatcgcgcgatggtccaactgcgcaggatactgacggaagtggttggcgctcttcagggcaaagatattatgatcgcgggtttgcagtttgatgtctttgggttctgccgcggcgccgcagccgcccgccactttaccaaccgcgtctttgagcaagatcctgtgctggtcaggacgatcgcgaccgcttttcagcccgttgaataccggggaaaaccggcaggtgaggtgcaatttttaggccttttcgacaccgtcaccgccgtagggggaatgctggacggtcttgacccccatgacggtaataatctggcggttaaaataggtttaccgccgggggtggcaaaacaggtttttcacctgacggcgatgcacgagtgccgttataacttttgccttaatagcgtaaaagagcaatggcctgaattaagcttaccgggggcacatgccgatattggcgggggatataacccgcaggaagaggaatatctttttttgagtcggcccgctgttgaaaccgtattagccgacgtgccgacagaggcgaccggcgtctatcagaaggcggtcctgcaggcagaaactttgccgcattactttgcgctggcccccatgttgccgtcaggcgttatgaaggtcgagaccaatacggatgaaagggtatcgccggatcaccttggcaatgcgaaaaagcgcgtagccgctgcggtcaccttccagcgaatcgtcagcaatgactggtctaaagttgccctcagggtgatgtatgaggtcgccaaagaggctggcgttgtgtttgatgcaattgactctgataatcttaaattaagatatcctacccatttaaatcaaatatgcgaaaaagcaattaaacaaggaaaagcttttttatctggtctggaagcccccacttttacatcagaagaactgaacactatcggcaagtatattcactgttcggccaactggaatgccgttgattatcacctgaaaaataatatttcatctgcagtctcgttttccaagacatttagttttgttaaccggccggatgaaaactggacccggaccgtttatgacatggcagggaatcctcaaaaatga

SEQ ID NO: 380060 - DNA, 591 bp, Salmonella enterica
atgtctgcaggaaacattttttggggaactcaaaaccccaatacggttaaaattaatttcggcgtcagtaattctgatacagggagtcaggatggcttatctcagcaaaacccttttgccgaaggttatggtgttttgcttattctccttatggtcattcaggctatcgcaaacgataaatttattcaggttcagaagaacgctgaacgtgccagaaatactcaggaaaagtcaaatgaaatggatgaggttattgctgaagccgccaaaggggatcctaaaaccaaagagacggtgcctcaggatgtaattgactacatgagcaaaaatggtattaccgtcgatggtatgactattgaacagtatatggctaaatacggcgatcatgggaaactggataaaggtggtctacaggcggtaaaagcggccctggataatgacgccaaccggaataccgatcttatgagtcagggacagttaacaattcaaaaaatgtctcaggagcttaacgctgtccttacccaactgacggggcttatcagtaagtggggggagatttccagtatgattgcgcagaaaacgtattcatga

SEQ ID NO: 380061 - DNA, 588 bp, Salmonella enterica
atggaagcgagtaacgtaatgccggtattatcgacgtattccttgtcagcgccttcttccactcaatctcaatccgggggaggtggggatattgaaatattatttcagttatttgataaaatctgggagacgctaatagagcttgccaaaaagctgcgcaatatcatgcgcgactataacgaagtaagacagaagttgaattgggaactgcaaatcaatgccgtaaagacgcaaatggaaacgattgatcaaacgtttaaagcatcaatgattaatgcgactggcgcaatgttgtcgggagtgctgacggtaggatttggggctacaggcggagaaaccggccttatattaggtcaagccgcaggacacacctctggggggatcatgggcctgggagcaggtgtagcgcaacgtcaaagtgatcaagataaagcgattgccgagctgcaacaaagtggggcccaatcttataacaaaaccttgatggatattatggataaagcgggtgatattatgcatcaaatcatggggatgggggcgtcactggtcgaggttcttgctcatatactccagtcattaacgaggtaa

SEQ ID NO: 380062 - DNA, 255 bp, Salmonella enterica
atgaattcgggctccgtttgggaaaaggaaaatatggacggcatcaatctggcgctgaccaaaatggctgagtcctgtccgggaaccacgcgagcttcgctggaaaacatgcaggcatggtatatccgcgataaaacatactctgctgcactggctgaactggttaatgcccagaagtcacgtccgctggcggcattatggggagacggttcaacctcatcttccgacggtcagaattttcgaattgagtgttga

SEQ ID NO: 380063 - DNA, 891 bp, Salmonella enterica
atggcgataaagttgttaacccacgtcaccttatcaacgccagccggaatttacggcgcaaacagaaggccttgtcacgcaagaaaaaaggtagtgcaaatctccggaaagcccgcatacatcttgctggcgtacacaggaagggtgggggaagatactccggtttatctgacgtggcaagccgatgcaccgttgtttgaaaagggtgagcaggggatggttgcgggcagtcgtaaaacaaagatatcgggtattgttacgcttgcaaaagtgccgggtgttgatgctgcgggaactgcactgtccgataacaaggatgcggcttattatcagatatatcaggaaggtggctggttacctgccgtcagtgttcagaaaatatcgcagtacgcgttaggcgaactgggctttgccacgctggataaagcccctgcaagctttgacctgattgatggtataaatcagccgaataatgtggtgaaagggattctggagcagttatataaagcggcgcaggaggaaacccgcaccacccacgcactcaataagtacaactacaagcgcctactggagttgattgacagtaaccaggatgggtattactcggagcaggagtaccttcaggcgaatcacaatgtttcctaccgtgaccatctgtaccgggtgatagcaaagcatgccagtgaatggtactacggcaaggacgatcaactatggaagacctatctggaagtgtttctggataagatgacgtggatgaaggatggaaaaaaccagcctgtaggtttcttccgcagccttatcaactcgctctatgaggctgcgaccggtgatacccgaactcgcacggtgatttctgggaagatgatatggattactcggaagccgtga

SEQ ID NO: 380064 - DNA, 342 bp, Salmonella enterica
atgaacgctgatgctgcatggggcggtactgacggaggatttgatatcccgcttgatataaacaagcaaccccgtatctggcttgattatgaggtaaatacagacggttcgattcttgtaaaaacataccatcgtacacatccgcaatcgccaaaatttgccagaaacgagattgataatctgacaaatggagatccgattgatataccgtcagactcatttgtttctgtgcgtgttgaaatgccggctgacagcatctggaatcagaaacaggaagccgtccatatcgctatggtggaagccaggatgaaggaagagcggactgatggcaataatgtgtag

SEQ ID NO: 380065 - DNA, 723 bp, Salmonella enterica
atggcgagaactaagggtgctgtagcaaaaggggttgataatacagctgtacgcattttcttacgagggtatggctccttgggggagttgccacgcattgtggaagattgtatctgcggtgcattggggcaggaagaagagacaagaaggttcaaaggagagcgaattcttgcaatcttagaacaactggatcatatcgatacgccaacagtacatcggcagatgtgggattataatatttctcaaggtaaaaatactgagccatccaaacggaacacggaacgcatgacaagggttctaagatgtgcttccagggcactgtatcatcatttgaaattgtgtaacggattgtcgcgtgaagacgaggtggtccagatttccgctcccgatctcacggtagatgagatagaacatgcccgtcgtttggctctagcaggtaaaattgaagcgttcacacaatttgtgaactcttgccggagcgtgatcaaaaactatgagccgccagtgttcaagtatacaggggaaaatgtggtcgctttatcttcttgtacggaggtatctttaaggactgcggttagtcgtccgtattatggttatgttaaaaaagccgtaaaagatgaacagccagaagacctatttacagtcaaaggcagtaatacgaacctccaaccactgattgatgaggttgggcgatcctacattgtagtggaaaatgtagcttag

SEQ ID NO: 380066 - DNA, 492 bp, Salmonella enterica; identical to SEQ ID NO: 234559

SEQ ID NO: 380067 - DNA, 150 bp, Salmonella enterica
atgacagcgcaatccagccagaccaaggggcaagagagccccgttaccgtcatcgacgaagatgcattgaagcgagccattcagaaagcaaaggagattgcagacgctaccccggaaaaataccgtcgggtacatccaactttacaataa

SEQ ID NO: 380068 - DNA, 285 bp, Salmonella enterica; identical to SEQ ID NO: 166121

SEQ ID NO: 380069 - DNA, 564 bp, Salmonella enterica; identical to SEQ ID NO: 234557

SEQ ID NO: 380070 - DNA, 573 bp, Salmonella enterica; identical to SEQ ID NO: 234556

SEQ ID NO: 380071 - DNA, 279 bp, Salmonella enterica; identical to SEQ ID NO: 234555

SEQ ID NO: 380072 - DNA, 1209 bp, Salmonella enterica
atggatattagagtaattagaacagataggcagcatcaggagtatttggaacgtatacattcgttattagttatgatgccgtctcctggaactgatgaaaatgaggagttagagttacttatcacacttgtagaagcatacgagaactctaaatatcctatagagccaccagatccaatcgatgctattacgttccgtatgcacgagaaagggttaaaacaagttgatcttgtaccctatttgggaacaagaagtagagtttctgaaattttgtcaaggaaaagacctttgactgttccgatgataaaagcactttcaatcggacttggcatttctactgatacgttgataggtataaatgctgatcagaacaaaacaggtgatgataatgttgactggtctaagtttccgattaaagaaatgattgggagaggatggatttctgaagccagtgatacgataaaaaaatccacagaagaactaattaaaggatttattaatcaaattggctggcaaacaggtaatgtcgcatttaagagaaccctttctggggatgcgtattctccttcgacaaaatatgcactttatgcatgggttagtagggttgtgcagcgagcgcgtgaacgtaaaaatctgcttgggaactttgacccagcaattttttctacaagcttcttgagggatttggcacaactaagctggttcgaaacaggtcccttacttgctcttgaatttcttgaaaaacatggaatagccgttgttatcgaacgaagcttaaaaggcactcgcatagacggagcagcattaaaggatattgacggcatgccgattgttggtttgacattgagacatgaccgtctcgataatttttggttcacactactccatgaagttgctcatatatggaaacacgttcattctgaagagacatttttagatgatattgatgctacttctgacgataggcaggaatctgaagcaaaccggcttgctagggaagcatttatacctagggcagtctggaagagaagtgatgcatactcttctccgtctaaagaaaccatcgattgtctttctagggaactgaagattaatccggcaatcattgctggaagaataagacgtgaaagtggtaactaccgcctgtttgctgatctcatagggcaaggcgaagtaagtagaatattaaacgcttcaaacatgaattga

SEQ ID NO: 380073 - DNA, 1128 bp, Salmonella enterica
atgtaccctacatacgtgccgatcctaagagcaaaagctggtgagtttgaagcattgaaaagactgaaacctgtttactcgcaaaaaatttggccattttttgaaattccccaattaactgagaacgataagaaatctaaggccttaagcggctcatctcagatgaaaaaggattttcttactaaaattgcggatggaatcaataacgcgaattcatcatcatcaatatttttcgacttttttgattggaaagcagatagctacattgaaacaggtgagcatgttttgagctacatgtacagagcattagcctcaagtggatcacttgtacatccagttataggattcgaccgttgggatatcctagactatcaaaatgccttgaaaggattagttgtacccgaagggacaatgtactgtttacgtattgattctacatctatagatgatgcttacgacgtagattattttacagatacgattcatgagattctggattcgcttgggctttccggtgctgaagtgatggtaatgtttgattttggagatgttactcataagtctattgtatcaatgcatgccgatatgcagcatctcattaccgccgttgatgagtttggctttgctagtatcatgatagcgggttgctcgttcccaattatcataaatgatgcagtaaaggaagtggattcaacagacctcgttgaacgtaaggaaatgcatgtttggaaggcaatttattctgatatgaaatcaccatttctttttgctgattatggtattcggaatcccaaaggtgctgatggtgtaaaagcaattcatgctaacgggaaaattaggtatgccattgaaaataaatattttgttgcaaggggtcactctaagcaaaaaggtaataaaggggcgcaaatgtatgacttggcaagagtcattgtcaaatctccttactatttaggggctggctttagttggggggatgagagaattgaggcttgcagcagagaagaaattaagggtggcccgacccagtggattagctacgataccaaccatcatatgagttttgttgttgaggaagtctcagagtttcaacgcagtcgtattacgccaagaattgttaccgcataa

SEQ ID NO: 380074 - DNA, 954 bp, Salmonella enterica
atgccaactcgtagaatcgcttatgcatactacgatcctgattggattaaaggcgagcatacgcttctcgccctcaaaaggaatactgtcgagccgcttgcttattcactgtctatgaaaggatatattttttgtccttcttgctatgaacatataactcgagtgcctgccgatcctgacaagggcatgactacgaatgaagttccggcctattacaaacaccttaaagatgataatgcgcctttctgtagtttgagatgtggccccattcagtacaaaaaatatgcatctcaagaggatgcaaaaaaagccgttgaagatgaagagcttatagtcataagcggttttctcgagtctcgtcctgataacaatccaaggatcgattctgagggcagtgaggtgcctgtcgattctcattttgagagaaaaaatggcaaagaggtttcattgcctatttcccgccatcatggtgagtctttcaaggttccgagccaagtaactagtgttcagtctttatgcgttaatttcgatcataattattaccgtgagatttaccttgttggcgcagatggtaaagcaaagcgctacagattttgtgactcactaaaagaaatcaatgacataactgagggttctcctgatccagcattcttttttggtacgttttggaaaattgagacgtttacaggccatagtaatgtctggttaaagatcaaccaaggaacatcatttagggatttcagagtacgtatcactaatgataccgctgaagggagaggattttttaatgataaaaatcgtgggaggataactgttttttatagtcgagtagatgaggtcggcatgggttatatgacaccccagctagggtggggggaggtggcacttttgcctgcaaaatatgatgattttttaatcagtgattatgcgtcatctcgtaaggacaatcattaa

SEQ ID NO: 380075 - DNA, 1089 bp, Salmonella enterica
atgtcgcatctgatgctttcccgtcacgggatctggtactaccgtagggtctacctgacacctcggaaacgccgtgaaattcgtatttctcttcgcacacgttccaagcgtgaagctttgctccgtgtggagaaatatctcacctcacaacctttccactgcgttccgcagtccatcccggcacacactgcaaccccgtctgcttccttccaacaaccacaacagaaaaagcctttcaagagcctgaagagcgagcttgataagtacactagggctaaaacaggagaggttggtgaacgggaaatactgacgatcaataggtgcgtaaatgcatatctgaattctacaaaagagcctttcagcaaacgaagcgcggcggcgtttgttgatggccttgaaggttcagcatccaccagaaaccgttacatcaaaaagaactcggcgtttttcaaatggcttgcaactcgcacggatgatgagattcgaaacccatttgaggggatgggtgttaaggaaataaccgcaccaatggatcgccgtccagcatacacgctcaacgatctgaaacgattgcacattgctttacatggcgtgaaggattggaaacggtggatcattctgattggtcgctattcggggatgaggcagaatgagatctgccagctttaccacaatgacgtgatgaaagttgacggagtttggtgcttccgtgttgataacttgaatccgaatcagacgcttaaaacggacagttcgcgccgattcgttccgatcaattcgcaactgctgacacttggtctacttgattttatcaaagaaagaaaaggacatctgttccctgagctaacattgcatcttgggagctatggtcactatttcagccgttggtttacgaggttcagaggcaagcatagcctgcctgaatatcattcactgcgccactatgccgccacaacatttaaacagaatggcttccctgaacagttcgcttcgcaggtgctcggacactcgaacgcaacgatcacgtacaaccgatacgggaaggggattgctgttaggacgctcgtcgagttaattgaggtactctaa

SEQ ID NO: 380076 - DNA, 1287 bp, Salmonella enterica
atgaagatagcgatgataaaaaccacactggcttcactggcgctgctgcctgggctaacgatagccgcgccggcggttgccgataaagctgataatgcttttatgatgatttgcgccgcactggtgttgtttatgacgataccgggtatcgcgctgttttatggcggattaatccgcgctaaaaacgtgctgtcgatgttaacgcaagtgaccgtcacctttgcgctggtctgtattttatgggtggtatacggctattcgctggcttttggcgaagggaatcatttcttcggccatatcgacggggcgatgttgaagaacattgcgctgacggcggtaatgggcacgatttatcagtatattcatgtcgcgtttcagggaactttcgcctgtattactgtcgggctgattgtcggcgcgctggcggagcgtattcgtttttcggcagtactgatttttgtcgtggtgtggttcacgctctcttatattccaatttcgcacatggtgtggggtggcggcctgctggctgttcacggcgcgctggattttgccggtggtacggtggtgcatattaacgccgctatcgccgggctggtgggggcgtatttaattggcaaacgcgtcggttttgggaaagaagcgtttaagccccataacctgccgatggtttttaccggtactgcgatcctttatattggctggtttggatttaacgcgggctctgccggcagcgcaaacgagatagccgcgctggcctttgtgaacaccgtggtggcgaccgccgccgcgattctggggtggattatcggcgagtggacgctacgcggtaagccttctctgctgggggcgtgttccggcgcgattgccggtctggtcggcgtgacgccagcctgtggctatgttggcgttggcggcgcgctggttatcggcgttattgcgggtctggcggggctgtggggagtcaccatgcttaaacgtctgttacgggtagatgacccgtgcgacgtatttggcgttcacggcgtttgcgggatagtcggctgtatcctgactggcatttttgccgccagttcgctgggcggtgttggctttgccgacggcgtcacgatggggcatcaggttatgatacaactggaaagtattgctattacggtagtctggtctggcgttgtcgcgtttgttgggtacaaactggcggatatccttgttggactacgtgtgccggaagagcaggagcgggaggggctggatgtgaacagccacggtgagaacgcgtataacgcgtga

SEQ ID NO: 380077 - DNA, 150 bp, Salmonella enterica
atggtaaaaaagatgattctggctctcgatgctaatgcgacggtgagaactgacccggtgacgcgtttggttgaggtggaaacgtcgctatccggagaacagatggccatagccctgcaaaagaccggtttcctgccgaacgatctgtaa

SEQ ID NO: 380078 - DNA, 237 bp, Salmonella enterica
ttgaacgatattacgccgtggcccttccgcgacgatatccgtgttaaaacatatgctgatggcagacaagaagagatttatatgatttatctcatcttcgactgtgtttccgccaatcgcgatatatgcatcaacgacgagtttcaggactacgcctgggtcaggccggaagaatttgcgctgtatgatttgaatgtagcgacacgccacacgttaaggttgaaagggctattataa

SEQ ID NO: 380079 - DNA, 372 bp, Salmonella enterica
atggtctgtggggggcttattgccacgaagttcccgtccccggatgaagccgagaaatggctttcaccactggtgagttatattactggcgccattaccgctgcaaccggcgttttcattattccggcggcgccctacctgcaatcgcttcagctaaataaaaacgatcttgtccaggcgctcggactggcgtttacggcttcaaccatcgcactggcgatgcgtttgtcattgggcagcaagctggatcacgttgactattatttatccgccattgccttaatccctacaattgccgggatgtgtgccggtcaatacctgtgcaaggtgatcagcgaactcacgttccgctactgttttttatcggattga

SEQ ID NO: 380080 - DNA, 222 bp, Salmonella enterica
atgaaagtaaaactgcttgctgccggtattttgttcacgctgccgttctgggcctgtgccaaagatgtcaccattatttacaccaacgatcttcatgctcacgtagagccttacaaagtaccgtggattgctgacggtaaacgcgatattggcggctgggccaatatcaccacgttggtgaaacaggaaaaagccaaaaataaggcgacgtggtttttttga

SEQ ID NO: 380081 - DNA, 627 bp, Salmonella enterica
ttgcattaccactggaaaggaattgcgccgcccgagggtgagaatggcgatattattcaccgtatcgccattaaagaacggcaatttttacagcgcagccagttcgatgagattcagtatggcccggcggcgcttaaacgtaacgcgcaagggacaatacttcgcccggtcattacggcgcatgatcattttcgggtgctgaaaaaccgctttcctgatgtcgcgacacacatcattgcccatgagtgttttttgcgcggcgcggtcattacggcatgggcggagcggtttcgccagcgtctctcctcgctgtggttcgttgaggaagaaataaacgatgacgattgccgcgcagagtggcaactgttaggcaaaacatggcagggatggtggcaaaatcagtggcaactctgggggcaaggtcacaaccgcaaaatggtctgttcgttaaccggttcccacttagaacaaggtatcgccgttaatctggcggccagtcgccgctttgttacctggctatggcaacaacctgaattccagcaaagcgcccactattccgccaaacgcgtcacgcaaattctgtatttgctgacggaaaaatataactcacaatggaatcacatttaa

SEQ ID NO: 380082 - DNA, 2100 bp, Salmonella enterica
atgaatagcgaaatattaaaaaagtacatttcccggttagaaatcagcttgttcagacgtgtacctgttatccatcagacagaatcgtcagaatgtgggattgcatgccttgcaatggttttcggtcactatggaaagagtatcgatctgttttccctgcgccaacaattcaatatatcctcccgcggggcaacgctttacagtattcgtacaatagcagtacagatgggtatgactgcgcgggcattatcactggatctcaatgaacttaatgtgctacggcgaccctgtattctccactggaactttaatcactttgtagtactggtgagtgtgaagcgtaatggctttgttcttcatgatcctgcccgggggagaattattgttagcaaagccgaagcctcaaaatgtttcacaggcattgcgctggagctctggccagggagtacattcagaagagaacgagttaaaaagcggctgaatctggttacgcttataaatagtattcatggaataaaaggtgcgctgctaaaaatttttgctctctcaatagtagtagaggctattggattaatcttaccagcaggaacccaactggttatggaccatgcacttccagccggagatcgtgggctactgtcgatgatatgtattagccttatgttttttattttactgagggccacagtaagcacatcacgtgcatggatctcattaattatgggaacgcttgtcaatatacagtggcaatcagggcttttttcccatcttttacgccttcctctctcttattttgagcggagaaaacttggcgacatacagtccagatttggctccctgaatacattacgtaccactttcaccaccagtatggttggggccattatggatggaatcatggtttgcggactgctaatcatgatgttgctgtatggtaagagcctgacctgggtagtgtttgggttcaccttggtatatatcgctattcgtctttttacctatacctattatcggcagctttctgaagaacaactgatcatggaagcccgagtatcttcatattttatggaaaccctgtatggaattgctgctgtcaaaatgcaggggatgacagatcgtcgccatactcactggtttaatctgcaaacggacgcaattaatactggaattcgcgttactaaaatggatcttttttttggcgggctcaatatatttatcagtgcctgtgagcaaactataattctctggcttggtatcagtctggttatggacaatgaaatgacaattggcatgttcgtagcctttggtgcgtaccggatgcaattttcagacaggatctcaactctggtgggattcctactacagctcaggatgatgagtttacataatgaacgtatctcggatattgctctaaacgagcaagagtcagtaaaacctgatattccagtgtcggagaaaataacgccagtatccctggaggtaaaatcacttacttttcgttacgatcaacagtcaatgccggttttcagcgagttgaatcttactgtctctccgggggaaagtgtggctataatagggccttcaggctcgggtaagacaacgctgatgaaagtattatgcgggctttttaaggcggactcaggacaggtacttattgacggaaacgatatacaacagatgggggttaataactacagaaaaattaccggttgtgtaatgcaggatgaccgacttttctcggggacaatccgcgaaaatatttgtggtttttctgagaatattgatgatgagtggatggctgaatgtgccaaggctagttttattcatgatacaataatgtcaatgccgatgggttacgacacattgacgggagaattgggcgagggtctatccggagggcagaaacagcggttatttatcgcacgagctttatatcgtaagccacgtattttatttatggatgaggcgacaagtgccctggatagtaaaagtgaaaactatgtcaatagcgcgataaaatctctgaacattacccgaataattattgcgcacagagagtcaacaataaaatcagtagaccgagtatttagtttaacttga

SEQ ID NO: 380083 - DNA, 159 bp, Salmonella enterica
atgaaggatgagtctgcggaagctgcggcccggctttgtgagtctgaagagaccaaaagctgccttttgcaaatggcctcaggtaaaattgcgccgcctcaggatgctgttgctcctggaatagcaacagatgataagaaattgcgtctggatatgtag

SEQ ID NO: 380084 - DNA, 951 bp, Salmonella enterica
atgcctgttacgttaaattttggtgatcgtcgttatgaagttaatcatacacggatagcccgtttgctgagttctgacaaaaaagaagcgctatacatggggctatgggatcgatttaaggaattgttcagaacacataaaaaaaaagaggctctggaagcattgcatacgctcatccacggatgcgatagtgaaaagcaagctgaacttggcgttgatgtaagcggcatgagtaagatatatgcctttgaacaattaaaacaatacgctaacccagctcaacaagaccgctttgttatgtgttttgatgtgaatcagacagaaattttatttttgatcgacggtcaggttattgataaatgtaatttgaaacgtctcctcaatgtttacgatgactgtattttaaaaccgatgaagtgtgaggaagaagcgttgtttttaaaaatatgtatttgctatggtaagaaaatttttttagatccagaattgttaggaaacttaactgccaaccttaggagtgcagttaatgaagatgactcaatcaaggatgcagtttatgaacttatgcgatctggagaagatcgacacatggcatccgttgaatggaatggtacgcttactgatgaggagatagaaaaagtaaaatgtcttaatatgggttcttttggagttactacccaattttttaaaataggttacagggaattagaggggaaagtcttatttgatatgttacatccaacacttctctttctgttacggggatatgtaccgttattaaggcatagattgattaataccatgatgtttaaagaagcattaaacgcggattatgatgattatcataataataaaagagaaattgattgtattttggaaagactatacaggtcacataatggcactttatttataagtaaagattcttattgtcgcaatatgcttatataa

SEQ ID NO: 380085 - DNA, 2445 bp, Salmonella enterica
atgaaaactgagatccctgatgtcgtgctggcagccgaggtgagccgtcgtggtttagtcaaaaccaccgcgataggcggcctggcgatggcctgcagcgcatttaccctgccatttacccgcatcgctcacgccgcagaggcgataagtccggcgaaaataggcgagaaagtcgtctggagcgcctgtacggtaaactgcggcagccgttgtccgctacgtatgcatgtcgtggatggcgaaatcaaatatgtagaaacggataataccggaaacgatgattacgatggcctgcaccaggttcgcgcctgcctgcgcggtcgctctatgcgtcgtcgcgtttataacccggatcgtctcaagtatccgatgaagcgcgtcggcgcgcgtggcgaaggtaaatttgagcgtattagctgggatgaagcctacaatatcatcgctaccaatatgcagcgtctgatcaaagagtatggcaacgagtccatttatctgaactatggcacgggaactctgggtggaaccatgacacgttcatggcctccgggaaaaacgctggtcgcccgtctgatgaactgctgtggcggttatctcaaccattacggcgattactcttccgcgcaaatcgccgcgggtctgaactacacctatggcggctgggcggatggtaatagtccgtccgacattgaaaacagtaagctggtggtgttgtttggcaataatcctggcgaaacccgaatgagcgggggcggcgtaacgtattaccttgaacaggcgcggcagaaatcaaatgcgcggatgatcattatcgatccccgttacaccgataccggcgccggtcgcgaagatgagtggattccgattcgtcccggtaccgatgcggcgttggtcaatggcctggcgtatgttttaatcactgagaacatggtcgatcagccgttcctggataaatactgcgtcggttatgacgaaaaaaccttgcctgccagcgcgccgaaaaacggtcactataaagcttatatcctgggccagggcaaagacggtattgcgaagacgccggaatgggcggcgcagattaccggcatcccggcggatcgtattattaagctggcgcgagaaatcggtagcgctaaacccgcgtatatttgccaggggtggggaccacagcgtcacgccaatggggaaatcgccacgcgcgccatctcgatgctggctatcctgacgggtaatgtcgggattaacggcggtaacagcggtgcgcgcgaaggctcatacgatttgccgtttgagcgtatgcccacgctggaaaacccggttgaaaccagcatctccatgtttatgtggaccgatgctattgaacgcggcccggaaatgacggcgctacgtgatggcgtgcggggtaaagataagctggatgtgccgatcaaaatgatctggaactatgccggcaactgtctgattaaccagcactctgagattaaccgtacccacgaaattttgcaggatgacaagaaatgcgaaatgattgtcgtcatcgactgtcatatgacctcgtcggcgaaatacgccgatattctgttaccggattgcactgcttctgagcagatggactttgcgctggatgcctcctgcgggaacatgtcttacgttatcttcactgaccaggcgattaaaccacgctttgagtgcaagacgatttatgagatgaccagcgagctggcgaaacgtcttggtgtggagcaacagtttaccgaaggacggacgcaagaagagtggatgcgtcatttgtatgagcagtcgcgtaaaactattccgaatctgcccaccttcgaggagttccgtaagcaaggcatcttcaaacagcgtgaccctgaaggccaccatgtcgcctataaagacttccgcgcagatccgcaggcgaatccactcacaacgccgtcgggcaagattgaaatttattcacaggcactggcggacatcgccgcaacctgggaactgccggagggcgatgtgatcgatccattaccgatctacacgcctggttttgaaaactataacgatccgctgacagataaattcccgctacagttgacgggcttccactataaagcgcgtgttcattccacttatggcaacgtagacgtactgaaagccgcctgccgccaggaaatgtggatcaacccaatggatgcccagaaacgcggtatcaacaatggtgataaagtccgcatctttaacgatcgcggcgaagtacatatcgaggctaaagtgacgccgcgcatgatgccgggcgtggtcgccttgggagaaggcgcatggtacgacccggatgcaaaacgcgtggatcagggcggatgtattaatgtgctgacgacccaacgtccttctccgcttgcaaaggggaacccgtcacatacgaacctcgttcaggttgaaaaggcgtaa

SEQ ID NO: 380086 - DNA, 264 bp, Salmonella enterica
atgagcggtaagcgttatcccgaagagattaaaattgaagcagtcaaacaggttgttgatcgcggtcattctgtttccagcgttgcaacacgtctcgatatcaccacccacagcctttacgcctggataaagaagtacggtccggactcatccattaataaagaacagtcagatgctcaggccgggctccgccggctccagaaagagctgaagcgggttactgacgaacgggacatattaaacttcgcaaagctgtccgactga

SEQ ID NO: 380087 - DNA, 201 bp, Salmonella enterica
atgagcaaaggaaccaccagtcaggatgccccctttgggacattattgggctacgcccccggcggcgtagcgatctactcttcagattacagctccctcgatctgcgggacgacgacgatgccgcttttcgtagctacattgacgatgaatatatgtgcccgccgttttctctttctgaattatggcgttgtttttactga

SEQ ID NO: 380088 - DNA, 252 bp, Salmonella enterica
atgaaaaaaagaaatttcagcgcagagtttaaacgcgaatccgctcaactggttgttgaccagaactacaccgtggcagatgccgccagcgctatggatgccggcctttccacaatgacaagatgggtcaaacaactgcgtgatgcgcgtcagggcaaaacaccaaaagcctctccgatgacaccagaacaaatcgaaattcgtgagctgagaaaaaactacaacgtattgaaatggataacgaaatactaa

SEQ ID NO: 380089 - DNA, 999 bp, Salmonella enterica
ttgcagggtgaagagtcgcaggctcagcgtattcccgtctgtcgtgcactgggacatcccaccgatggacataaaggcgtgcaacaactggccattcaactggatgagacctggaaagctgtcgcatcccgatttgaagggaatgcggaagtccatgtctgcaatgatggtaaatatccttccctgaccatcagcagcctggagagactggaggagccaccttcgttgctttgtctcaacagtcgggtaagacagttgcttcctcctgttgatttgacggaattactgcttgaaatagacgccagaacaggatttacacgggaatttatgcatgtcagtgagtccggagcacgggcgcaggatctgcacgtcagcctgtgtgcggttctgatggctgaagcctgcaatatcggactggaaccgctaataaagcacaatataccggcactgacccgccaccggctcagttgggtgaaacaaaattacctccgtgcagaaacgctgatcagcgccaatgcccgcctggttgattttcagtccacgctggagcttgccggtcgctggggcggtggcgaagtggcgtcagccgatggcatgcgctttgtcacgccggtgaaaagcgtcaattccggtcctaacagaaaatattttggttccggacctggtatcacctggtacaactttgtctcagatcagtactctggatttcacggcattgtggtgcccggcacattgcgggattccatttttgtgctggaaggccttctggagcagcagacagggctgaatccggttgagatcatgacagacacagccggtaccagcgacattatttttggcctcttctggctgctgggataccagttttcccccggcttgccgatgccggcgaagcggtattctggcgggtggataaatcggcaaattacggtgcactggatgagctggcgcggggatgtgcagatctgtcgaaggcggagaatcagtgggatgagatga

SEQ ID NO: 380090 - DNA, 225 bp, Salmonella enterica
atggattcaggatactggcaattacagtttgaagactggctacgtcaccaccaccagcaggatgccgcccatgacatctaccatttccgtcgtgtctggacaactgcgcaaacgcttggtgaaagcagcccgttgactggctggtggttctatcggcatgttatttccatgacattgtcagccgggcgaaaaatcatccgcagcggcatcgctcttccatgttag

SEQ ID NO: 380091 - DNA, 873 bp, Salmonella enterica
atgcagatgaatgttcaattgcatcatgccgtatcggatattactggcgttaccggtctttcaatcgtcagagctattgtcagtggtgagcgcgatccttcagtattgatccagtatcgtgatgtcagatgtaaaaagacgccagaggttcttcaacaggcactgacagggaactggcagcctgaacatctttttgcacctgaacagtcggtggcatttttcgatttttaccaggaaaaaatccgtgagtgtgatgatcaaatcgaaacttcattattgcagctcagcaccggaactgaagagcctgaaggagtattgccctccgccagacatcgtacaaaacagcccaatcagctttcctttgatgtcagaccattactctggaaaattaccggagcagacctgacacagatacatgggtttggtccttatctggcactaaaattcgttgccgaatgcggtactgacatgaatcgctggccggatgcgagccattttacctcgtggctgtgtttgtccccggggaataagatctccggtggaaaagtactgtccccgaaaacacggcgttcatccagtcgaattgctgctgcactaagactggcagccacaacaattggccggagtgataccgcgctgggtgctttttatcgtcgattatcatcccgtatcgggaaagcaaaagcagtcactacaacggcaagaaaactggcaatactgttctacaatgcccttaaatatggtcagaaatatgtcgatcctggcgcggattattatgaagagcgctaccgtaatcgcgtactcgacgggcttaaacgaagggcaaaatcactgggttactctctccagcaagatcctgagttatgcgtgtga

SEQ ID NO: 380092 - DNA, 210 bp, Salmonella enterica
atgattgtattctctgcgccactggtcgagaaaggttatttaacagtcaacccccattttgtcttacaaaaatcgcatgacccggagagcaggctgggtaccagacggaacgccgctgtaaaacgtgctggcattcgtcaccgtaatccgtaccatacgcaaatactttgcctgccggccatcatttataatacccatttttgttcctga

SEQ ID NO: 380093 - DNA, 3420 bp, Salmonella enterica
atgcccgtaacattagaacatgtatctttcagacctgtacagcagaagttaaatacaaaaggtatcaaaacttgggacaccataaagtatctttcagctttagatagagcgcataaggatactgtttttcatgagcaaatatctaatctacccgaagagtatattcatctggatgagatggccagagatgaaaaagaatatggtttaaacatttatgaattcttctttgaatcaacggctgaaattatctgtgaagatattaaatcaactttggatttttattatttgaaaagtccaacattccggcggttggttaattatagggtcaattatagtataggcaacgacattgataccagcaagtgtgaagtaatagtatccccaaattatagttatcagaacactgaaggaagtagtgtgtatttatcgttgccgttcgataagaaaggctttcccattaatcctgagactaacgactgcgataataacatatcatcagaaaaagtattattagatttatttttgaagcatattttatacgatgacttgaaggtggatcatgaagttacaaatctatactccaatgtcatttataaggaaattgactctacggcaatggcacatgcatcgttgtgtttttctcaggcagcggtgagcgatgagcatgagttatttaatattgacagcgtaactgttctacctaaaagcactgagcaagtcatatttgctggagaggaaatacaaaaagaaattttattgttttttgaaagggagaataattttcagccagcaaccgttcataaaatggagagaaatataaaaaatattgcagtaacgggtttgttactgtcatccagattaacagtagcagacggttatgggagaaaaaatgataattcagaaaacaagaataatttttcatctgataaagaacctctgagatatgcaagggctctcccggaggatcatcccgccccaaatatggagcctcatccgttaggtaagatgatagatggtatagttgaacattcttcatttgctgcaggattttcacttttcgaaacactcaaaaaaattggagatgagcaactgatgaatgattataaaagaggctatcatgaattacttgtattttctcaaacagggcagtggacgcatggtggtagaagacttactgctgaatatatgttcaatggccttataattcatttaaatgagattgaaatacttattaatgatggaggaaaggtttcttttgagcattttgtaagagaacatattgaacatcaatataaaatatatgagttaatcgctcgtgatatgctggttcatcctatatatatcagatccagaatttttgcaaccagacgaattgcctctgccctggcaaatgaaagccattatacgaaagtgctaaatcaaaaatttccagagatttctagttcaaactttgatactttctatggcaaggaggctatttttacagcattaaaaattgtgaattattacagggaagaaaaaaggatgcccacttttaacagtaaaaagatgaaagatctttttaagcgagttcaattagtgatacatcatttatccagaaatggtggtgataaaatattgcttagccctgatggcataaaatataattttagcatcatgcgtaatattatttattggtgtacaaagataactggtccagttaatgataagaaaataaatgccctatcaagaaaaattgtggttaataatgaattttccagacatattaagtctctatttcccagaggaaacggattcttagagcttttaatgaaggccgctattgacacacaactaaattgggcagagaaatattataaagcagtgacacatgtcaaggatcatatacaagattgtgatgtattagggttaatgaatataaacaaaatgttgcgagatacagttgttgggcttattcatgagattagcgatattgcacaatccagttggctgacagcagaagatcaacatgaaaaacaggttcaggctctcgaagcattcaaaagtaaagtctcatccatggatggcggacaagctttcgtgtatggttttgataaagtcattcaggaggggctatggggattaattgaattgagttttgatatcgatgataccgttcatcatcgaactgtttcttcactaagtcctgcgtcaagagcaggtcttcattttttaggaactatctggaatattgtaatgagttttgtccctggttttaatgctctggctggtaccagcagcattcttaatcgggctattgtggaaaaatctactgatgtatgtgggtacattcaggatgttatacgtattggtatggaagctgctcctgttgcagaagcgaagtttacagaaagggcgtccaacgcaaagtatacgggcctccgatttgttgaaaataaaatagaaagaggtgtaatacaatcgccgattcagaaggggagtaattataaagttatagagtcaatagacaatattgattttatttatcaaaaaagaaataataaaattctcgagctaaatcccgagggaaacgatggactctatcgtgctacagggtttaataaagaaacgcatggttattataaacagtcaggagaaggcttttacagaaagcagaaatcattttcaccgttgtcaacggaagcacctaatacgataaaatatggcgagagggaaatcgttttatctaaagagcctggttcagaaacgtatcagggaaccttttctgataccggaaaaaatgtagggatgacattttatagaacttctgacggtaaattttaccaggcctctgggctgaaagggggagggcctattcggcatgttgacaagccttattcagagttaagagaaggcgacgttggttatgatgaggatcttctggatatttccgatgattcaccactactggaggacatgctgccttctctgtcagaagaattatatcctacatcagaagaaaatgtgcaaagtatatataaaaaactccagagtggtgatactgcagcaggcgagactgaagttgtattatgcagggggacaactggtccgcaggctgaaaatattgttaagcttaaaacagcaggaggtgtggagggcgccgatccgaatgtattgcctgtctctgaagaaacagccaggctgcaggttcggaatggaagagtggtacctgaatatacaacagatcttagtgttgcagacaggtttagcagggagcattatcttattatcgttaaggtaaaagccaaatatattacacgaggtagtgtaagtgaaagcggctgggttatgccacatactgccccagtggaacctgttggcataattgaccggacgtatggtcatgcagaaaatatcggacaggcaaacgcttctaagtaa

SEQ ID NO: 380094 - DNA, 285 bp, Salmonella enterica
atggtgataacgccgctgttttcgtgggattctgaactctggtttgaccatttttctatattgctgtcgcctggcgcggtcagcgaatcgatgccacataaatccggcgttatcgaacatgtggtagtgattcagggacgtctggatatgtgtactgacggcgtatggcaaacgatagacgcaggtaaaggtttgcattttgccggcgatcaggcacatacctatcgcaacagcagcgatcagacggttcattttcactcgctgatcccttacccacgtgattaa

SEQ ID NO: 380095 - DNA, 279 bp, Salmonella enterica
atggctcgcgaatacgttcccggcgtgcgcagacagcgcgcgatagggacgatgacgcgccgtcatcagcgaagcggaccgaagaggatgtgtataaaggcttcagtattcctgagtaccgctaaatcctttcagggacaaaaaacgcgttatgttgtctgcaattcaaccagtaagcgaaaatttgccagcacatggctgccgtcatgttgcaataattatggatggcaatggtcgctgggcgaaaaaacaagggaagatccgggccttcgggcataa

SEQ ID NO: 380096 - DNA, 726 bp, Salmonella enterica
atggcaactgtttccatgcgcgacatgctcaaggctggtgttcactttggtcaccagacccgttactggaacccgaaaatgaagccgttcatcttcggcgcgcgtaacaaagttcacatcatcaaccttgagaaaaccgtaccgatgttcaacgaagctctggctgaactgaacaaaatctctgcccgtaaaggtaaaatccttttcgttggtactaaacgcgctgcaagcgaagcggtgaaagaagctgctaacagctgcgaccagttcttcgtgaaccatcgctggctgggcggtatgctgactaactggaaaaccgttcgtcagtccatcaaacgtctgaaagacctggaaactcagtctcaggacggtactttcgaaaagctgaccaagaaagaagcgctgatgcgtactcgtgagcttgagaaactggaaaacagcctgggcggtatcaaagacatgggcggtctgccggacgctctgttcgttattgatgctgaccacgagcacattgctatcaaagaagcaaacaacctgggcatcccggtatttgctatcgttgatactaactctgatccggacggcgttgacttcgttatcccgggtaacgatgacgcaatccgtgctgttagcctgtacctgggcgctgtagctgcaaccgttcgtgaaggccgttctcaggatctggcttcccaggcggaagaaagcttcgtagaagctgaataa

SEQ ID NO: 380097 - DNA, 210 bp, Salmonella enterica
atgttctcttttcccgttacgattggccgtcaggtcgtgattaatcccggcataacgattggtgggaattcggtgattggcaccggtagcgtcgtaacaaaatatattccgccaaatgttgttgccgttagcgttccctgtcgtgtactgcgtacaattacgcagcgggataaagcatattattatcgcgacttaaaaatcggaccctga

SEQ ID NO: 380098 - DNA, 234 bp, Salmonella enterica
atgtattacctgaagaatacaaatttctggatgttcggctttttcttctttttctattttttcattatgggcgcttattttcccttttttccaatctggttacatgatattaaccatatcagtaaagggggggccggaattattttcgcctgtatttctctcttttcgctgcttttccagccggctttcgggctaatgtccgataagcttggtttacgcaaacatttactgtag

SEQ ID NO: 380099 - DNA, 1371 bp, Salmonella enterica
atggtcaaattaacctgtttcaaggcctacgacattcgcggcaggctgggcgaagagctcaatgaagatatcgcgtggcggattggccgcgcctacggcgaatatttaaaaccgaaaaccatcgtgctgggcggcgacgtgcgtctgaccagcgaggcgctgaagctggcgctggcgaaagggttacaggacgcgggtgtcgacgtgctggatatcggtatgtccggcaccgaagagatttacttcgccaccttccacctcggcgtggacggcggtattgaggtgaccgccagccataacccgatggactacaacggtatgaagctggtacgcgagggcgcccgcccgataagcggcgacaccggtctgcgcgacgttcagcgtctggcggaagcgggcgacttcccgccggtgaacgaggccgcgcgcggcagctacagacaaatcagcctgcgcgacgcctacatcgaccacctgctcggctatatcagcgtcagcaatctcaccccgctgaagctggtgtttaacgccggcaacggcgcggcggggccggtcattgacgccatcgaagcgcgcctgaaggcgctgggcgcgccggtggagttcatcaaaatccacaacaccccggacggcaccttcccgaacggcattcccaacccgttgctgccggagtgtcgcgacgacacccgcaaggccgttattgaacacggggcggacatgggtatcgcctttgacggcgacttcgaccgctgcttcctgttcgatgagaaagggcagtttatcgaggggtactacatcgtcgggctgctggcggaagcgtttctggaaaaacacccgggggcgaagattatccacgacccgcgcctgacctggaacacggaggcagtggtgacggcggcgggcgggacgccggtgatgtcaaaaaccggacatgcctttatcaaggagcggatgcgtacggaggatgccatttatggcggggaaatgagcgcgcatcactattttcgtgattttgcctactgcgacagcgggatgatcccgtggctgctggtggcggagctggtgtgcctgaaggagaaaactcttggccagttaataagtgatcgcgtcgctgcttttcctgctagtggtgagataaattgtattgtcgataatcaagaatatgtgatcaaaaaaatccttgataactataaaatgcaggccaagcatattgactacactgacggtataagtattgaatttgaagattggcggtttaatttgcgaagttcaaataccgaacccgttatacgcttaaacgtggaatcaaaaaatagctctttattaatggaagaaaaaacacgagaattacttaagaaaataaaaggataa

SEQ ID NO: 380100 - DNA, 1362 bp, Salmonella enterica
atgtttaaaccagaactcctttcgccggcgggaacgctgaaaaacatgcgttacgcttttgcctacggcgccgatgccgtctatgcgggccaaccgcgctactcgttgcgcgtgcgtaataacgaattcaaccacgaaaatttgcagcttggcatcaacgaagcccacgcgctcgggaaaaaattctacgtggtggtgaacattgctccgcataatgccaagctcaaaacctttatccgtgatctgaaacccgtcgtcgagatgggcccggatgcgctgatcatgtccgatcctgggttgattatgctggtacgcgagcatttcccgacaatgccgattcacctgtcggtacaggctaacgccgtaaactgggcgacggtaaaattctggcagcagatggggctgacccgtgtgattctttcccgcgagctgtcgctggaagagattgaggagattcgccagcaggtgcctgatatggaaatagaaattttcgtccacggcgcgctatgcatggcctactccggtcgctgcctgctttccggctacatcaacaaacgcgatcctaaccaaggcacctgcaccaatgcctgccgttgggaatataacgtgcaggaaggaaaagaagacgttgtcggcaacatcgtgcataagcacgaaccgattccggtacagaacgttgagccaacactcggtatcggcgctccgacggataaagtatttatgatagaagaagcccaaagaccgggcgagtacatgactgcgtttgaagacgagcatggcacctatatcatgaactcaaaagacttgcgcgctatcgcccatgttgaacgcctgacaaaaatgggcgtccactcgctgaaaatcgaaggtcgcaccaaatccttttattactgcgcccgtaccgcgcaggtctaccgtaaagccatcgacgacgccgctgcgggtaaacccttcgaccccactttgctggaaacgctggaaggtctggcccatcgcggctataccgaaggtttcctgcgtcgccatacgcacgacgattaccagaactacgaatacgggtactccgtttctgaacgccagcaatttgtcggcgagttcactggcgagcgaaaaggccagctggcagccgtggcggtaaagaacaaattctcagttggggatagtctggagctgatgacgccgcagggaaatatcaatttcaccctggaacagatggagaacgccaaaggcgaagctatgccggtcgcgcctggcgatggctataccgtgtggatgcccgtcccgcaggacgtcacgctgggctacgcgcttttgatgcgtaatttctcaggcgaatcaacgcgtaacccccatgccaagtag

SEQ ID NO: 380101 - DNA, 1023 bp, Salmonella enterica
atgaaaagactactatttttattaatgatgatgcagtttacgcagttgggttacgcggtgtgtaatgcgaccttaaccaacacgaaggattatacgattcaatccgatagcttaatgctggggggggaggagtcagccattattacaaatggtttcactgatgccaattgttctaatagtgatgttgtgactaaattagagacatccgatcatattatcggtatggggccgaatgatagtgttaagttaaaattaaaagttgaatggcaaagcagtagtgcgataaatatgcgcaatcaaaacggtgtaatcgaagccccctataagataacgatttcagaaataaactcactggaggcggttactgtgtctgccagaggggggtactcggttacgatagataatatagcggtgatgtcgggtgcaaagaatcaatggagtagtagcgattggattatatttattttaaggtatattggctgttggggaaatagagagtgtgttgcgaacgctatcactgacctgaatggtaaaggtgtttataaagctaatgtaacgataaattacaaccgcaaagaaactacctgcgccccccagaatctcaccatcacgctggacccggtgcctatgactaaactccgcgctaaaggagaggttagtgaattttataagcagggtgatattatactggattgcgaaaatcaggtgcggaatgcgacgctgacatcacggcaaatagcggtgaatctacgtagtgatttagtctgggatgagaatgacgcagttctgaaaccggataacgataatggcgttgggtttatcttaagagattcaaatcggagcctgcttaaaataaacaaaggagcaacaataaacagtattttcaaaacctatgccaaaggcagcgcagtgaattcggtggaagctattcctgtctttgccacatattatgttctcgatcctgcaaaagttaaagcggggccattacaatcgaaagcattaatcgtggtatcttataattaa

SEQ ID NO: 380102 - DNA, 168 bp, Salmonella enterica
atggctaaagtgacaagcgcaattattgtaggtggcggaatcggcggcgcggcgatcgcgctgtcgctggcattcagcttgggccgaacgctttctcggcgctggatagtctcggggtggacgatgttgcccgccagcgtgcggtgtttaccgatcacattaccatga

SEQ ID NO: 380103 - DNA, 336 bp, Salmonella enterica
gtgccgttggtgggctggcacggtatcctggcattaggcggcatcctgcctttgatgctgtttttcggcctgctgttcgcgctgccggaatctccctgctggcaggtgcgccgtcaactgccgcaggcgattgtcgcccggacggtcagcgccattaccggcgagcgctatcacgatacgcaattctttctgcataagaccgccgccgtcgccaaaggcagtatccgccagctttttaccgggcggcagcttattattactctgatgttatgggggggtctttatgagcctgctcattatctatctgctttccagctggatgccgacgttgcttga

SEQ ID NO: 380104 - DNA, 198 bp, Salmonella enterica
atggcgaactgggcgcagaaattgaaattacatcacctgcaaacgctggttgcgctgggcgaacagggcaacctgacgcacgtcgcccggatgatgaatatctcccagccggcgttatcaaagtggttatctcaactcgaagatgatataggcatcacactttttgagcgccacagcaaagggttgcgcccctcgtaa

SEQ ID NO: 380105 - DNA, 1965 bp, Salmonella enterica
atgccgaggccagttggaaataaagagtatgtgcttattgatatgtccttcatgcaggatgattctgttcaaaaggtcgtcaatgtaaataaccgatctttccagacgataaatccagcggatctgccattaataggtcacagtagttcaacttcaaccttaaatgatctcctggatcacgcagaagaccgatctttccaatctgctagctcggagtatcggggtgcatcgagccgaagcagttcgacgttaacacttaatgatactctcgatagcgccgaaaaccgcctcttccaaccgattaactcagacagtttgggcttgataacgcggaatagttctacgttaacgttaaacgaccttctggatgcaatgggaacaaaagcgacagtttcagaaacggctgtcaatcaatacggtgattgtataataaaaatccctgatgacaggatacccgctgtcaacgacgaaatcacatacaccgaaaccagggatacctgtgtcacgatccctgaagaaattctctctcctcgtgaagcagacgccagtgatgtatgccttgagattgatgctaaaattctgaagattttaacgtgttcttatcagtatcaattagatgatatcgtcggtgatatcatgccagcagagagtgacaacgccgaaaaagtccgccaaataatgagaatgtacgctgaacaatacagacacgtttatgagcgatctggctatttttacaaagcatacatgtcattgcataaatgtgtggaaaatttattaccctattctttcagagcgggtgggaatattagttttcatcttctgctacaggcgcttttttttgatggaaaatataataatgcggctttaatacgcgaaacaataccaacagaaccacccgcaccaataactatgaaaccggatgctttctttaatagtatcctctcattaaacttatcgcaagttaaactctttggcgacgttatatctgcattactcttccatttcccaactattttttaccagtatcctaagttaagagatgaaataaatcagtgcatagagaaacgtgcggtgacgggatccgttgttgccagactcacattatgcctggcgagcacgctattagcgattgcaccgcttgtaatgctaagcggtgcaatgtcggtaggaacaatacttcgacatgtaggaagaggtatcagctatgtagatatccctatcgtcttaattatattaggtgaaagctggtatcaagcatacaaatttggttcatcaagtaacgagaaagcggcgcagaagtttatcgctcaagaagctgcattcaagacaacacaacgggtcctgactcaggggttaagtttgttctcatctttatctggcacaattatgcgaagtgtaggtaagggaacagctccagaaatgatgttaatgtttattataaatacattgaatcttttgctgtatcaaaatccatacgaaggtacgtcagttgacggaaaagcattaaaaaggacggcttacctggctggcaatgaggagattactgtacaaacgatagccttgttggtagatcttaagagtacgggggtcattacccagcgattatttagctgttcagacagactcgcttacgcgataaatctacgaagaacacaaccaggtgatcaagtgcatatattaaaagaggtcattagcgcttgcgcgcgcggacatcgcgctattttacaagaaaaggataaacagatatgcctgacagccatagaccatatctattatggtaattttaatcccgctttattagaaagtatccccgaagagtttgctgctttccttacttacttaaatacgttacgaaaaagagatgcgtcatgtctgagtctgggcaacgaggtaaacgaaaaaatcattgcgacactcataaaagtgctttccttccgcgaaaccgttttgcttgagagtgcctga

SEQ ID NO: 380106 - DNA, 126 bp, Salmonella enterica
atgcagcacgaagcccgtcgtctgcgtgcgaaacgctggcaggctgaaaatcaggaagggatggccgaggtcgccctgtttattgaaacaaacggctcctttgccgatgaaaacagggactggtga

SEQ ID NO: 380107 - DNA, 267 bp, Salmonella enterica
atgaagaaaatacgtttcaccgaatcccagatcctgagagtccagaaagaagttgaaggcggtcgacatgtgaaggaggtttgtcgtgagaatggtgtttccgaagccagctacgataactggaaatccaaatatggcggcatggagtccccggatatcaaacgcatgaaagagctggaagaagaaaaccggcgattgaagcaaatgtacgcgtctttgagcctggatcatgaaattcttaaggatgtcgtcgcaaaaaaactttaa

SEQ ID NO: 380108 - DNA, 228 bp, Salmonella enterica
atgacagaaaatcaggtcagttatttctttgccaaactcagcgatgcctgccacagccgtttttcctcacaccgctaccgccataccgtggcgaccgaactgatgaagaaaccggagcaaaatttatacgtcacgcagaagctgctgggggacagggatattaaagttacgctcagctatatcgaacataatgtcgagatgctcagaagttacgtggagagagattga

SEQ ID NO: 380109 - DNA, 222 bp, Salmonella enterica
atgctgttacccagcggcgtaacagttctggctcaggaacgcttttttattgtgtatattaacgatgaagagatcagcaccgaagcctggagcgatcatgaacggctcgttatcaatgactatcactggtggacgcctgacgagctggaaaaaacaactgacgttatttttcctgaacatatatccgcgatcctctccgagtctgaaaagccccgccgctaa

SEQ ID NO: 380110 - DNA, 978 bp, Salmonella enterica
  misc_feature (959)..(968): n is a, c, g, or t
atgtgtataagagacagtgttgattcatcgattctattatcgatccttttgttatgcagtgtgaacaatatttatgagaaattaatttttgacatatccgctaaaaaattagatgctaaggatatcatttatctattacataaaaatgaaggcgcagcacttcatttattgagtcgtaatcctgacattatatgcgaccctgtgataaaacacttatcagcaagacatatcattcagatatgttcagttgagagcattcgtaacaacattgatataatttcacgcttagttaaatatttactgcccactaatgatcttgatatagcagaattcttttatcaaaaatatcctaaacaacttgttgctgcatatatagattatcttacctcaagatttacatttgatatatcaagttgggaatcccttgcactttcagttatagagcaagactttgtaacttacacatcattatcagtaaataatatagaaacaatagcatatatatttgacaagatagattatgagcaaccttctattaacaatacagcaattagccattggctaaattttttcagacataatcaccatatgcctcttacaaataacactattgttcttttatcttatatttatagtaagctaatatcgcaaaatgatagaaatagttcaaaggaaatagtattaattttcatatcattacactcatactttatgaaagatagtgattacaaccataaagcatgggcgatactaaataaatcactcccccgattccatgagtggaaatcatgggataagtgttttagactccggctctcaatattgaaactatgtcttaataacaattatgaaaacgtaatgtttgacaatctaaagtcagaaaaagaaataatgaaattaattaatcaagatattaaatcaataaaagaaaatcctgattttcgagatttattatgggnnnnnnnnnntttttcatag

SEQ ID NO: 380111 - DNA, 324 bp, Salmonella enterica
atgaagcaatacaccaatgaactcaccccgcccgtgcttgcatcatttaagaatccattcagtgcagagcaactggcaaacgcagacgacgaacaacgccagattttcaaatctcatgttgaagaaatgaaagaccgttctttactgacgatttggcgttttgctactactggagcactcacccagaacggcgggaagattgagaaagccagcgccaatgactcgtttacgcttgaggacgggagtgaagttaatcgggcaatggttggtgattacgttgtttaccctgacggaacacgcgcgaaaatcatcaacggatcgtga

SEQ ID NO: 380112 - DNA, 723 bp, Salmonella enterica
gtgattgaatttaaaaacgtctccaagcactttggcccaacccaggtgctgcataacattgatttaaacatccgtcagggcgaagtggttgtaatcatcggcccttccggttcgggtaaatccactttattgcgctgtatcaacaaactggaagagatcacgtccggcgacctgattgtcgatggtttgaaagttaacgatcctaaagtagacgagcggctgattcgccaggaagccggcatggtgtttcaacagttttatctgtttccgcatctgaccgcgctcgaaaatgttatgttcggccctttgcgcgtgcgcggcgcaaagaaagaagaagcggaaaaacaggcgaaagaactgttagcgaaagttgggctggcggaacgggcgcaccactacccatccgagctttccggcggccagcaacagcgcgtcgccatcgcccgtgcgctggcagtgaagccgaaaatgatgctatttgacgagccaacctccgccctggaccctgaactgcgccatgaagtgctgaaagtcatgcaggatctggcggaagaaggcatgaccatggtcattgtcactcacgaaatcggctttgccgaaaaagtcgcctcgcggctgattttcatcgataaaggtcgtattgccgaagatggcagcccacaggcgctgatcaaaaatccgccaagcccacgtttacaggaatttttacagcacgtctcctga

SEQ ID NO: 380113 - DNA, 432 bp, Salmonella enterica
atgctcctgacggacatttttgtactgatgttttccgggctgacaactgctcaggttcagatatttcatcagacgcccggcacggtaacggctcatcgggacgccgttttgggtcagcatttcagccagagtacgcgcgcctgcagagccacggctctggttccacgcccggcgtatttcgctgtacaacctgaagcgcaccggattaacggtatcgcgttgttttcgccagtaccggtaactgctacggtgtatttccagaacggaacaaaggctgacaaccgtgtggttgtcactcagtctggcagctatcgtgaaccgttcagtgagtcggacatcaagagcgcggtagcttttttaatatcgtattttgttcctccagacggcgaacctgcttttccagctcgcggatacgttgctggtctggagtaa

SEQ ID NO: 380114 - DNA, 282 bp, Salmonella enterica
gtgttcctggaggtcacggtgactacagataaaataatacaagcagaaaacacgttcatccggtggctgaaaacgacggaaaagggtaccgtctctcttgataataaaaaggtaacatgctggtactgtggcggagtatggcttcactacacagttaatattaatgtgatatttttatacctgcactcgagtggcgaggatgcctttgactctctggctgactgtacaaatgaaatcgcccagcttttatatcaaaacaaccctgacgtcagtatcagatag

SEQ ID NO: 380115 - DNA, 1089 bp, Salmonella enterica
atgacgctgtttgccgtattgctggcggccgtcatacactattttggcaagcagattattgatgtcgttgccggagaggctactgcagatgtaaaagatctggcgctaatctatctggaattaacggttctcagttatccggcggccgctattgctctgattggcagcggtgctttgcgtggtgccggaaatacgaaaatacccctgctgattaatggcagcatgaatatgctgaacattatcatcagcagcattcttatctacggttttttttcctggcaaggactcgggttcattggtgctgggctggggttgactatctctcgctacattggcgctatcgcaattatctgggttttcatgattgggtttaaccccgcgctacgtattccccttaaaagttattttaaacccttaaactttgccattatttgggaagtgatgggtatcggggttccagccagcgttgagtcggttttgtttaatagcgggaaattacttacacagatgtttgttgctggtatgggcaccagcgtcatcgccggtaattttattgcattttccattgcggcgttaattaaccttccgggaaatgctttaggttcagcatccactatcattacagggcgtcggctaggaaatggacagataacccaggcagaaatccaacttcgccacgtgttctggctttctactataggcctgacggccatcgcgtggattagcgctccctttgccggtattatggcgtcattttatacccacgacccggacgtcaaagatgtcgtggtgatccttatctggctgaatgcggcatttatgcctatttgggccgcctcatgggtactgcctgccggttttaaaggcgcacgcgacgcgcgtttcgccatgtgggtctcaatgcttggaatgtggggctgccgcgttgttgcaggctacgtgctgggaatagtacttggctggggcgtggtcggtatctggctgggtatgtttttcgactgggccgtacgtgccgctctcttttactggagaatggttagcggaagatggctatggaaatatccgcgctctgaacgaaaaacaagatga

SEQ ID NO: 380116 - DNA, 1041 bp, Salmonella enterica
atgcgcgcgcttatttcgttcttttttttgataatcattgtctcgaatgtagaaacggcgttagccggaaccgggctattgcactggacgcgtgccgatcgggcgattccctggcgacaaacggcaattagtgcgattaaaccctggaaactgtgtgcattataccccagcctgaaagattcttactggctgtccgtcaactacgggatgcaaaaagcggccaaattttatggcgttgatttaaaagtgctggaagcgaacggctatcggcaactggcgacacaacaacagcaaatgatgcagtgccgggagtggggcgccgacgcgattctgttggggagtagcaccgatcgttttccggagctggaacggtatgccggtaatgtgccggttattgaactggtgaatatgattcacgatgccagtgtcgcaacccgtgtcggtctgccgtggtttcagatgggctatctgccgggacgctttctggcgcagtggagcaaaggaaaaacgcttaacgttttactctttccggggccggatgaagccggcggcagtcaggagatggtagcgggttttcgtcaggcgattaaaggcagcgcaattaacattgtggatatcgcctggggcgataacgacattgaagtacagcgaaacttactccaggaaatgctggagcgccatcccgacgccaatgtaatcgccgggtcggcgatagcggcggaggcggcgatgggcgaagggcgaaattcgacgaccccgctcacgaccgtctcattttatctgacgcatcaggtctatcgcggtttaaaacgcggccatgtcctgatggcgctcagcgatcagatggcctggcagggagaattagcgatagcgcagtcgattaaggttttacaggggcaaccggtgcctgaaaatatcagcccgccggtgcttattttgacgcataaaaatgccaacagcgcacacgttcgtcgctcgctatcaccgccgggatttcggcccgtctatctgtatcaatacacctccgaggctaaaaagtag

SEQ ID NO: 380117 - DNA, 1134 bp, Salmonella enterica
atgtctcagccggaaaacggcccattcatcccggccattcgctggccggtgccgaacaaccggggcggggagttcagtaatctcgaggagatgctggcgcatctggagggcgagaccgccgggcactggcttatcggccgcaatggtatgtggcacagcggcattcacatcagtgataccaccacgccgtggtgcgctctcagcggtcaggcgatgaatgaggccgttgattttcctgtaccgtttaagggggagcaggccgtgcgctgtatggctgacggtgaggtggtggcctaccggattaaccgggattacctcagcgtgccgtggtactggggggatttgcactactcaggctcctttgtgctggtccgccaccgtatacagccagggaaaacggcagaaagcgggctgaccttttacacgctgtgcatgcaccttgcgccatggctggcctatccggagaaggacagcacggcgtttaaagtcgctgacggccagcacctgaaggcgtatgtggatacgtcccggcagtgggtcgcggcggagctgccgcccggcacgcgggtgacatggaataaggcggtccatgccgacaccctgaccggggccaacgggcggcagtatgcgcacgtcacgctggaggagccggtcacgggcaacatgagtttgaacgccggtgatcgggtgtggacggtgtgcgacaggggaaatctggttccggcccgcgacagcgccacccgcccggcgtggtggtccccgtttctgccgccgtcacgcgaaaccctgcaatttgatacggtggtgtgcccgacgccttacccgattaaggccggggacccggtggggcatctggggtattttcaggtacccagcgaggacgggcatgaaaaacgctatcaggtgcatattgaatgcctgacagcggacgacctgccgcgcttcctgagcaacccggagggcgtggggcgcgacacacctgcctttgcccgctgtccgggcagccctacagcaaggcggaggcgttcaactaccggcagctgctggacaagattgatgatggaaaatccacctggtataacgcagagcagtaccggcgtgcggtgcagaacccgtcaatgcgcgatcacctga

SEQ ID NO: 380118 - DNA, 135 bp, Salmonella enterica
atgaatattattactatcctcatctatggcagctttcatctctgtgacaaggtgagtaacctttacgttttcgatagcaatactatctatggtttttctttgggaaacagattcctgatgacatctatcaagtga

SEQ ID NO: 380119 - DNA, 126 bp, Salmonella enterica
atgcatcatccgagccgctttccagattttttggcaggttgctgcaacgacgcgataaaagcggaaaaagggacgcaaaatgcaataatctggcgcaaaaagtgtgacaaagactacgtcgcataa

SEQ ID NO: 380120 - DNA, 216 bp, Salmonella enterica
atgaacatgcttactattgatattcatgcctcaacgaataacccgacgttaatactgctctcggcaaatacgctatctcagtgtgaagcctacttgaaaacaatatcgcatatccgttatttctggtatccggcagaacgagcgtccgggcatcaccgttggcgaaaaaacagtactgcgccttttacatcccatgatgagcgtcattgggtttaa

SEQ ID NO: 380121 - DNA, 2277 bp, Salmonella enterica
atgtggccagttggtgattactcggggcgtattgcccccacagcatcagaagcattccccgcagcaaatacaagctattataccttatggcaaacctgggctagtgaagcagttgttggagctggggaacaacgagatatagcggttgaaagattatgtgcctgcctttgcaataaggagagtatgcttgatttagcgggacttaacttgcgtaccttacctctattgcctgagtgtgtttcaacgctgaatgtcagcaataatcatttatctgccttgccaaatctccccgaaggattaacagatcttaattgcgctggcaatacattgacttcactttccgcgctccccccgtcgttgcaactacttgattgttcacaaaacaatttacccgaactacaaaacttacctccttcactaacggcgcttaattgctcaacaaataaattgaaggatcttccttatttaccttatacgcttaaatcattagattgttctggtaatgctattattgcacttccagaattaccagacagtttagaaatgctcgattgttcaggaaacttactcgaaatcctaccagatctccccacttcattacaatcacttaattgttctgtaaataaattaataggctttccatttatgcctttttcactgagaatactcaattgctcatacaatgaattaaccggtctccccccatttcctgattcactcataaatctcgatatctcctataatgaatttaagtctctaccacaacttcctccttcattggctacatttatatgtacaggcaatccactttatgaacttccggcattaccttcttcattgcaaatacttacctgcgccagcacgtcactaacagcactcccgcctctgccatctacactgcaagaactttattgccagaataatgatattatcttactgcctgagttgcctgcttcattaaccgatttgaattgctcaaataattatgtggtgagaatgcctgcgctacctgactcgctcatttcacttgattgctcatacaatcgtttagaaacgcttgctgtcttaccccattcacttcaattgatgattgtcattcacaatcgattaatagttcttcctcaattacctgaatcgctgagatttctcaactgttcgagcaataggcttaccgcactcccagctttgcctgatgcgttagatagtctttattgccacaccaacgaactggaaatacttcctactttgccaaacggcctgcaagagcttggctacaatggtaatcctctggcaacgttacccgtattgccagcctcactcataaacctgaataacgatccatttgccggaggcgctactgcgcctcttcagctcattcaaagtattgaatattggtttccgttatcgcagcgcgctgaaatgctcactcgttttgagagtatagccagcgaagagaatgccgacatattcagcggttttcttaacaggcttcgacatcgttacagagaaccacagtatgaaggtttcagatcccaggttaaggagtgccttatccgactggttgacaatcctgaattgagagaaagattatttatgtgtgcctatgaatcaacccaaacctgtgacgatcgcatttctctcacatggaatatgatgcgggtcgctgaaatggtttttaccgtagaacaagagggtcatgagggcaatctcccggaaatggtcgatatagctcgtcaagtatttcgaatagagatgttgacggatattgccactagaaaaatccagcagctccagaggatacacaatacattcgatgaagatttagaggtaatgttaggcctacaaacccaactgcgcgacacgctttgcttaacgcatgtcgccccagacatgtatttcttccgtttttctcaacttactgaaatagatgtaaaaaccgcagagcgtcaggtgcgaatagcggaaaacaggcagtttgaatcatggctcaacaattgggaaccgtggcaaatgttgctaaaacgtatcgatccactgtggtatgaaaaggctatggatgaaaaatacgcttttgtgaatggcccggatttccaaaaccgactggacgaaaaattccagttacatcaggttcctcctgagatccgtgatgataccagccatattttagggaagatcgttatcgcagaaaagacacaagaaatttttgcaaatcagacacgtaaaattttggaagcgaaggagcaatcatcattgttggaaccaacatggaccgaataa

SEQ ID NO: 380122 - DNA, 222 bp, Salmonella enterica
atggaaacggcaattctccttgtgtttgtacaggggccgtccattacattaggttccggtctctacccagagattacccacttagcaaacgaagcccgggaacctgatttctttaatctgctcagtgccatacgcaatgccggaaatgaggatatgatagaaagagcaggctggattcgatcttatatatccaggcttcttttctctctatggttgcgataa

SEQ ID NO: 380123 - DNA, 138 bp, Salmonella enterica
atgtgcttcacctcaaaaaatcgctacaaaaccggtaacttttcttgcatgctgaagcataaagatccagacttcttgaaacgtttcagcgcgatcttgttttttagacaaaccagattggcgctttttttctcatag

SEQ ID NO: 380124 - DNA, 291 bp, Salmonella enterica
atggaaagaagaaaaattatcctggattgcgatccggggcatgatgatgctattgctatgatgatagcggccaggcatccagcaattaatctgctgggaattactattgttgccgggaatcagacgctggataagacattagttaatggattaaatgtttgtcagaaacttaatattgatgtgccggtttacgctgggatgccgcaaccaattatgcgtaagcagattgtcgcggacaatattcacggagagtctggtctggacggcccggtatttgaaccgctgaactga

SEQ ID NO: 380125 - DNA, 1590 bp, Salmonella enterica
atgctccccgctggtcagggccatcccttccggagccgagaaaagcacggcttcattgagcggtttcagccgctgctcaaacatccatatctggctgtccacatccaccttcagcgcctgcgcctgctctgccgcgatttccagctgctgcagttgctggttaagccggtcgatttcctccagggcggtactcatgtccagcatctcaccctgtgccttcgcctgcgcgtcggcactgacaaacagcccctttccggcgcgtatcgtgccccactcatcggtgcgcagttcagcacccgtgccgcgacgctgcccctgcgcgtccaccaggtgcccgctgttgagctgcgtcttgccgtattccgtcgcgagcctgacatgctcctcaccacgcctgtcttccatccgcagcttgttgttcgccggcgtgcgcagcacgttacgggtgtgattatcgcgggtgacgtggtccgggtgctccgagtcgtgcagcgcatacgcgatgtacggcaggtcaatatcaccgttgctgtacgcaatggccacttccgttccgtcgatgagcggcgtatgccagcccagcgtttcaccggcataaggctttgccatccgcagccaaaggtagccgtaaccggattctgtcccctcccggtcgaagtccagtttcacccggtagcgcccctgctcgtccaggtgagcgtaaatgtcgttcttctcccggctctctatccgtgccggaagcgtccctgggatgaccggacgcgggacttctacaggacggaagcagtaacgttcggtgtaaggcattccccagaccgacacgtgcaggcgggaatcacgggccccccggtaggtcacctgggtgaggataacgccttccttcagggccgtaatggcatccccctgcggctccagcacctgcccgggcgtgaggtgggccgcattgctgaacaggtgaatacgggccgacctgttgagctcccgctcgtgatggatacgcgcataaaacgcgccggattcggtttccggctcagggctggcgtcatcacctgcgacacgatacggtgccgcgtagcggtaatgctcccccgtggtgaccgcatcattacgcacgctgaccgtcgcatccatcggcgtggtggctgtccggtaattgtaattccgcgtggcgacggtgccggtggcaatgttgtgccaggttcgcacatcccagaccgattctgccgcgccgtcgaacaaccccgatggctcgctgtagggcaactgcacatcaaactggtagttaagctggctgtcggccagtatataggtatccagaccgcgcacatcgtccatcatcgtgcgccagtaaattcccacctcagacaaaatacgctggatgaattgcagatccgtttcctgccactgagtgataagttcacgtgctgggtaggtgcgctccagtctgaattcaaaatcaggaccttccagaccgtgtttacgcagcacctgctcaaccacctcaggaacggactggttctgatataccgcgcactgcggggtgtatcccaggagcgtcaggcgggaactgagtgtgagccggtagtgtga

SEQ ID NO: 380126 - DNA, 1242 bp, Salmonella enterica
atgctccagaatatccccacccgagcctttcatgccatggcgaagcccagcggttcagactgtaatctcaactgcgcctactgcttttatcttgaaaagcacgctctgtataaccatacgccgcaaccaagaatgactgacgccatgctggagcgctacgtccgtgattacattgcgtctgtcgcgccggaggcggaagtcgcctttacctggcagggcggcgaacccacattattggggctggaattttatcgtcacgccgtcgcgttacaggccaaatatggcgcaggacggcagatctccaatagttttcaaactaatggcgttctactggacgatgcgtggtgtgagttctttgtccgccaccatttcctgatcggactgtcgctcgatgggcctgaagagattcataatgaataccggttgacgaaaggcggacgtccaacgcataaactggtcatgcgggcgttggccctgctccagcaacatggcgtagagtacaacgtactggcctgcgttaaccgacgcagcgctcgctcggcggaaaaaatttatgattttctcgtcgccagcgacgtggagtttattcagtttatccccgtcgtcgaacgtctggccgatgaatctgcgcagcaatcggggctgacgctacacgcgccgggcgacgcctgcggtacattaaccgactggtctgttattcccgaagactatggtcggtttctgtgcgccgtttttgacaggtggatcacacgcgatgtcggtaaggtgttcgtcatgaatatcgaatgggcattcgcgaatttcgttggcgcgccgggaacggtctgccaccaccaaccgacctgcgggcgttcggtggtggtcgagcataatggcgatatctatgcctgcgatcattacgtttatccgcagttccatttaggcaatcttaacgaacagacgtttgccgctatgttggactccccacagcaggaggcgtttggcaaagataaatatgcaacgctacctgagcagtgtcggcaatgcccggtactacgcgcctgctggggcggttgccctaaacaccgttttgcattaacaaaagagggtaagcccggactcaattatttatgcgcagggtttcgcgcttatttccagcatttacctccctatctgaaagcaatggctgatttgatggcaatgggacgtccggccagcgatattatgcatgctcatttacattacgccagaagcgataagtaa

SEQ ID NO: 380127 - DNA, 267 bp, Salmonella enterica; identical to SEQ ID NO: 375323

SEQ ID NO: 380128 - DNA, 606 bp, Salmonella enterica
atgatgcgacccgttcagcaaaaagcccctttttctggcttgcatcttttgtatgtttcctggtacagttttgctgttgccgcaaaatcggtaaccgggcgtaggaacccgagcaactcgaaggcgacaccagacgcgccatgcgtctttttttgtgtcgcaatcaacgccacagagcgccagattgtggtgtggtgtgcagacattcgtacaggtgtgactctccgtctcctgtacgtattcgtacattatgccatcatgacaatggtagctcaggcggggcagccctcgggctggccggtattcttcgaggccggtattcctacccccgtctgggctatcgccaatcacgagcgtaggaactccggcgatagcaataatttgctactcgaaggaggttgccttatggccacgcccctcaccccgtctcaccctgaatttatctttgtgtttgcggccattcgccgtacggagcgtaaaccgcttatctgcatgctccgcaccgttgccggtgacgaacacaccgcacgtcgttcccttgtccgcgactatgtcctttctcttgccgcccgtctgccgcttgcggaggtgtcacatgcaaactga

SEQ ID NO: 380129 - DNA, 267 bp, Salmonella enterica
atgcaaactgctttttcttctctgtctcctgctcccgctgttcccatgatgtcggtatctgataccgctcaggagcgatttttacgcctgcctgaagtgatacatttatgcggtctgtcccggtcaaccatttacgacctcatcagccgcgaggcattcccgaaacaaatcaatctcggcgggaaaaacgtggcgtgggcgcagtctgaaatcactgcatggatgactgctcgtattgctgagcgtaaccggggatatgacgcatga

SEQ ID NO: 380130 - DNA, 738 bp, Salmonella enterica
atgaccgataccaccgccattcctgactacctgaaacccgcgatggaacgccttgaggttgcccggtcagcgcatcttgccagtgccagtcgtatggatgaaaccacggcggccatcagccaggtaaaagcacaaaaaaacgaactggagcaggaaaacggccatgattccggtgcatggcgtactgcctttcgtgccggaggtgcagttattaccgacgagctgaaacaacgccatctggcgcgcgtggcatgtcgggaactggtgcaggaatgtgacaatatggctgaggtgctgtcttttgagctggacaaccttaagggagcctgcgaccggacggccagaacgtatcgtcaggcacatcactgcgtcctcagccagtacgcagagcatgagctaaatgctgccctgcgtgacacctgtagtgcgctggtcagggcaatgaaactcaatatactggtccttaataatccgcttgctaatacgaccgggcacgagggatatatcgaaccggaaaaggttgtgatgcagcaggtgaaagcgtggcttgaacaggccgtgaagggctacagtatccgtctgaccaatgagccggtgctgtttaaaacagggttgtcggcctccacgctgccgcatatagagcatgatgttgcggccacgcccgttcagcgtaaggtctggcaggaaaaaatgagggcgcgtgaagccagcctgaaagcaagggggttactgtcatga

SEQ ID NO: 380131 - DNA, 261 bp, Salmonella enterica
atgatgcgctgccctaattgtggtcaggccgcccacgtccggaccagcaaatatatgtctgagaacgtaaaagagagctatctgcagtgccagaatgtgtattgctcaacgacgttcaaaacgcatgaatccatttttgagattatccgctcccctgcggaagagaagaaggccgaacccgctccgccgaaaaccagaaccccccgcaaagtgaaagggtgttacagctcgccattcagccataatcaggagagacgataa

SEQ ID NO: 380132 - DNA, 564 bp, Salmonella enterica
atgactggcccgaccttacaaaatgcgttcgaagcctgtcagacgaacaaagcagcgtggatgaaccgtaaagctgagctggccgctacagagctggaatatcgggatttattgctggacgacgcaacgggttcccgccgcttacagacgctgcgtgagctcatcgatataaaaaaatgggagattaatcaggccgctggtcgctatatccgctcacatgaggaagtacagtgcatcagcattcgtaaccggcttcatgattttatgcagcagaacggtgcagagcttgccgccgcactggcaccagaactgatgggggttaagaaccagcccgcgatgataaaaaaccgcgcgcttgaccgttcaatggcatatctccgtgaagccctttccgtctggctggccgcaggaaatgaaattaattattcagcacaggacagcgatattttaacggccatcggatacaggcctgacgcgccttcgcgggatgataatcgtgaaacatttacttctgcacagaacatgatttacacccgccgacgcgctgagctggccgcgcagtag

SEQ ID NO: 380133 - DNA, 1623 bp, Salmonella enterica
atgataaattttacccatgagcaaaaagttgcaatagattacccatatagtatggtactgacggcttgtcctggaagtgggaaaacagcagtaatcgtagagaagattgtccgtgacttggcgggatgcaaggaatatcagggagttattgctatatcgtatactaacaaagcaagcgatgaactgaaaaagagatgtttaaaggctacaccaaattcaaaatcaagcttttttgggacaatagataagttttatttgaccgaagtgatttatcaattcattaagcaattatggggaggagttgatgatttacatgtagttaagtttaatgagctaaattcttctgaacaagataggctttctgctttctttaatgtcgaatccatatgtgaaaagattgatgagtatgattttaaggatgttaaggaactatacgctaagggtattctaatactggaatttataccattacttgcattttatatattgtgcaactcgttatcgtgtcgccgttatatcactaaaaaatacacctctatatatattgatgagtatcaagatgctggatttgtccaacatcttctttttcttttgcttttcgatcttggaataaaagcagttgcagttggtgatgttgaccagtccatatatttatatgcgggtaaaagctcaaaatacttaacctctttactggataaaaaaagtggattcaccccttttaaaataactataaatcatcgctcacattcatctataattaattatgcctctcgactattgaatgaaaaatctgatttgttaattactgatgaaattcgtgtctacagaaagcttgttaatggtactcagcgtgaaatagccaagtggattgatattaatattgacaatattaaacagaaattcaatatttcaaaagaaaaagaaatagcgatacttactgcaacaaatagttctgtatctttagtatctggccttataaattctaaagcaagagcatatcttgatgatgagttatctgtgcttggtggagaagtatctattttgttaaagagccttttaaattatcgttttaataaagtaattacagcacaggctatcattgatagtttaaatcacaaagtactagaacgaaatacaataaggaaaatgcggggtgttattagagaggttagggattctgatgatgaccaacttattccagctttacgcaaggcaataaaattattaatcagcggtgatatttcagctcaccatattgatgccatcaactcaattttacacaataaaatgatgctaaataattacttgccagttggtgatgatgagttacaaataatgactttacataaagctaaaggactagagttcgactttgtttttcatttagatctttatgattggatattaccacgaagagagtatataaagggttgttttgatgaggttttttcgcaatatgagcaatgtctgaatcttcattatgttggggtcaccagggcaaaaaaagctgtggtattaataaatactaccgagcgtttaaattaccagggggaattaaaaaaagcgaaaccttctcagttcttgtcactaaaaggacttgaaggtctgtataaaaaaatttaa

SEQ ID NO: 380134 - DNA, 1704 bp, Salmonella enterica
atgtatattgataatgtatatttaaagggatttaggaactattccgatagtttcattaaatttaatcattcaactcttataattggtagtaatgacattggtaaaacaaacctattgtattcattaaggattttgttagataagagtttttcagatttagatttagaacctaaaaatagcgattttcacattgatgcaaaaggaaatcaatgtgaagagttagaaataataattaattttcgtgagataaaagaggatgccgttctctctaagttagcggggtatgtcagtgaggatgcgcaaacatacatcaaatataaagcgcacagaactactcttgattacaaattatatatagggcacaaagaatccgaaatggatgagattagtggtagattttatcttaaatatctaaatttacgctatgtgaattcacaacgagatcttgctaaatatatatctacagagaaaaaacatttacttcggcttgctcaagaaatgagaagcgaggaacaggttaggaaggatgaaaatactttaaattcattaactgatttactaaatgatgttaataataaggtaaaagaaataagctacgtttcgaccgctacggaagagttaaatgatgagttgaagaaattatcatataacaatgaaaaggtttctgtaatgctcgattctggagcaattggtgttgatcagtttattgaaaaattagaattaagttcaaatacaaatggaaaaaaggtaatgcttggaggggatggattcaataaccaagtattgcttgcattatggaaagccaagagtgtacgcgaacatgacactgaaaatgaagtggttatatattgcgtcgaagaacctgaatcacacctttatccgcaccaacagagaaaactatctgagtatttaattagtaaattgccggggcagtcactagttactactcactctccacaaattgccgttaattattcaccggattcgataattaaaatttgctcttataacggcgaatcttacgcagcaagtgaagggtgttctgattgtattagtgatgcatggagtggaatgggatacaggatgagtatactcccagcagaggcattcttcgctaatgtcgtatttttggtcgaaggaccttctgaaatgttgttttatcaggctcttgcaaaagagtgccaaattgatcttgatttttttaatataagcatattatcagttgatggcgttcaatttgaagtttataggaaaatacttgatgcattcgagattaaatgggttgctcgtacagacaatgattcgtctaaagttccaaagaaaaaagagtggcaatattcaggtttaaatcgagctttggttctatgtggtatgaaaccactaaagaatgagttaatggaaatatctcaagttcaaaggatagagaaacataaagtttataaagacgcacttaaacgtaataatatatttgtttcaattaatgatctcgaaggtgatattagcgttgagttaagcaagcaactgaaagaatatgtaggtgttgataatgaggaaattgctgctgattatctaagggggaaaaaagcaataagaatgcaagagttcttgagagaatactctcatgcacttaaaaccatttcaacaggtgaattaattcaaccccttttgactgccgtaaaactggctacagaggagttgaaatga

SEQ ID NO: 380135 - DNA, 312 bp, Salmonella enterica
atgcgtttttctcaccgatttatccttctgttctcgctattattagcaagtttgcctctgtatactcaacgcgccacggaagaagaaaaatccgtacgcgccatcgtctccggcatcatcagttatataccctggccgacgttatccggcccgccaggactatgcatattttcatctgcgcgttttgccagggtgcttagcgaagaggctggctgggcttttccttatcaacctcttatcatccatacaacacaagagactctgagcgcccgctgtaatggtttttactttggtaataaattggcatcttag

SEQ ID NO: 380136 - DNA, 303 bp, Salmonella enterica
atgggacgctggcttgctggcaggctcatgaaagagccggggctggtcagctgtcagcagccgactcaccggtataaacgtggtggccatgaacacattgctatcccgaatcaccctgagcggcagttcgccgtgaccgggccaaatcaggtgtggtgcggcaacgtgacgtatatctggacaggtaaacgctgggcatacctcgctgttgttctcgacctgttcgcaagaaaaccggcgggccgggcaatgtcgttctcgccggacagcaggctcaccatgaaagcgctggaaatggcttga

SEQ ID NO: 380137 - DNA, 345 bp, Salmonella enterica
gtgtgccactacaaacaccaccgagttaagccctccctcctgtatgtaaaatctcttgaggaaattccaggagaattaatcgaaacagcgacagaagtttattcaacaccgccctctgtggaagagtgggctgcattaaatgatctcctcgaatattcaagcggagtgtattatcgcccacgtaaacgcaaagtttacacctgggatgattcaaatttgaaaaaatggcagagcctcggttttgaatcactaaaccactacctcacatacaacgcaatgaataataccatggcgggagccaggggctttgatgaattattccacattttggagatagttacatag

SEQ ID NO: 380138 - DNA, 327 bp, Salmonella enterica
atgctcaaacctattttctacagtacaagtgcaaaggttccgcaatattcggaaacagataaggcagaaaatgccggatgtatctctctatcttcagtcattcagcatgttaaaaatgttgttgaagatgttccagcatttccagaaagcagaacggtgagtggttctgttagcacagcgtacaggctttcttttgaagaggaattttgcggtctcagcaatgaagaacgtaaaaaggtgtatggtcgtctttttggaaaacaagtacttgcacatattaattccatctatcagcgtgacgctgacttaataagagaaaagcattaa

SEQ ID NO: 380139 - DNA, 411 bp, Salmonella enterica
atgggaagtcatttttttgaactaaatgataatgtcaaaacaaattgtacattctcaccttttgatatctacggtcacagatttggtctggataccagtaaattatctacattctggcatatggagaaactcattgcattctgtcaagatgatttgttcggttataattgctttaagaacttagttaaaatggctaagggtgaaaaattttcagatcactctaattatggtacgggttatgaaggaaattatatagaggctcatattcatggtgacgtatatttatttagagacataaaatacgctcatttatatatgaaagaaagctcttattcgaaaaatcaactggatgattatgcaaaacaaataaaccaagcgcttaataaaaattgcataatactatatcaataa

SEQ ID NO: 380140 - DNA, 324 bp, Salmonella enterica
gtgccggaaatagcgggggaattactgaaaggaataatgcgacgcgcctggccaagcaatgtgcgcgaactggccaatgcggcagaactttttgctgtcggcgtgctaccgctggcggaaacggtcaacccacagttgttccttcaggagccacccccgcttgaccggcgcgttgaagagtatgagcgacaaattattaccgaagcattaaatattcatcaggggcggatgaatgaagtagcggaatacctgcaaattccccgtaaaaaactttatctgcgcatgaaaaaatatggtttaagtagaggacattataaattctga

SEQ ID NO: 380141 - DNA, 267 bp, Salmonella enterica; identical to SEQ ID NO: 375323

SEQ ID NO: 380142 - DNA, 2655 bp, Salmonella enterica
atgatgcgcagtggcaccctgaccgaacaaacggtggacagtctgtaccagaaaggcgcgtcgttcgtcgattttctgccgtgggtggagtaccagccagaaagcaaaacgctgctgctggatgacgggcgctcggtcggcgcggtgtatgacattacgccgttcggcaccgaagggcgctctccggccaggctggaagaactgcgcgatattctgaaggatgcgcttcaggacagcttcacggaatacgaccgccatccgtggatagtgcagttttactgccaggatgaggacgacaccgcaagctggctggccgcactgcgtgactacgccgtaccggaagcacggaactctgattttacccgtgcctggctggaggaaatggaacgccatctgcacgccgtttccaacccggaaggctattttctggacgatgccgtcagccatacccgctggcgtgctcagcagcgccacacccggatggtggtctaccgctggctacccaataaatcccgcgatccgctggaagactcgccggaagaggcgctgaacaccgtttgcgaacggatggtctccgcactggcgggcgcgggtattcacgcccgcaggctggaatgtgaggccattcgccactggctgctgcgctggtttaatcctgccccgcagatggccgactcaccccggcagttctggcaacagatggcgcagcaggatgacacaccggagttgaacgactttgccgagagcctgctgtgtagcgaaccacgctcacaggccgcgcaaggggcgtggctgttcgaccagcgtccgcataaggtcatcgtactggacaggctgcgtaaaccgcccaccgtcggccatatgaccggagaatccgcacgcggcgacggcattaacgcgctgttcgatctgctgccggaaggggtgatcatggcgctgaccattgtcgtctggccgcaggaccggctggaggaacatttaagccgcctcagcgaccgcgccatcggcgagaacgtcgaatcggagtacaccaaaaaagactgtcaggaagtgcgccactggctgaaggacggccacaaactctaccgcagcgcactggcgttttacctctccgccccggataacggcgaactgacccgacgcgtgcgcagtctgaacagcctgctgctgaatgcgggtatggttccggtacaggaaaatgacgaactcgccccgctcagttcgtggctacgctggctgccgatgtgcttcgacccggcgcgggacaaacgccagctctatacccgcttcagctttgtgcaacacctcgccaacctgttgccgctgtttggccgcgagagcggcaccgggcatccgggtgtcagctatttcaaccggggcggcgggatgctgtgctgggatccgcttaaccgcgaggaccgcgcccagaacggccacctgctgctgctcggcccgaccggcgcaggtaaatccgccacgctgaacgccaaaatagcgcaactgatggcgctgcaccgcccgcgcctgtttatcgtcgaggcgggtaattccttcgggcttatggccgattacgtccgcgaacatgggctgacggtgaataaaatcagcctgaagcccggctccggcatcacgctgccattgtttgccgacgcatggaaactggcggaaagcgacgtgccttcagcagaaccggatgatgacgagcctgaggataccgacaacgaacagcgcgatctgctaggcgagatggagatcacggcccgcctgatgatcaccggcggcgaactgaaagaggacgcccgcctcacccgctccgaccgggcactgattcgcgaagcgattctccacgcagcccgactcaccgcctgcgaacaaagacagacgctgacgcaggatatccgcgatgccctgttcacactggctcaggatgcggcgctaccagaatcccgccgtaaccggctgtgggagatgggcgaagcgatgaatatgttctgttccggattcgagggggaactgtttaaccgcgagggcaaggcgtggccggaggcggatatcaccctggtggatctggcgatgtttgcccgcgaaggttacgaagcgcaactggcgatcgcctatatctcgctgattaaccatatcaacaacctcggcgagcgcgaccagcatctggcgcgtcccatcgtcaatattaccgacgaagcgcatatcatcaccgtcaaccctctgttagcgcggtttctgaccaagggttcgaagatgtggcgcaagctgggcatctggctttggctggcgacgcagaacctgagtgacttcccggatgatgcaaaaaagctactcaatatgattgagtggtgggagctgctggtgatgccgtccgaagaggtggagcaggtcagccgctttaaatctctgacgccagaacagcgtcagctcctgctcagcgccaccaaagcaccggggaaatacaccgaaggcgtagtgctttcgccgcgtgttgaggcgctgttccgcgtggtctcccctgccctgtggctggcactgggaatgatggagaagcatgagaaggcggagcgaatgcgaattatgcgggagtttgcgtgtagtgagctggaggcggcgattagggtggcggagaggtgtttttccagcggttga

SEQ ID NO: 380143 - DNA, 390 bp, Salmonella enterica
atgcgtactctgattttgctgttatcgctgcttctgagcgcctgtagcaccgaccagaaaacgctgctgccggtggatgaaaataccaccatgctcaatatctggggccgacagaataacgatgcgcaggcgctgtacgacgcgcgatcggtgctgcgtcgcccgctggatgacaccacgctgaccgcacaacagcagcaggccacacgcagcgacggcaatgccacacaggcactattccggcgactgcctaatccggatatggagatgtatatcttccctcatctggcgggtagtgaaggtgtcccggtgccgggctataccaccgtcttctcgttctataaccgggtgcagtacgccctgcccggcgagcggaccgatccgctgtga

SEQ ID NO: 380144 - DNA, 1338 bp, Salmonella enterica
atgaagctccaggccaatatcctgctgcgggttctgacgccgctcatcctgctggcaggcagcgtcctgctgtttcatgcctgccaggaccgtaaaaccacaccgtcaaaatcctctgcgcctgcaacgcccctcagccacgacgagctgaaagcgctggggattgagggcgacacgcccgccgataccgtcgccacgctggtcggccagatgaaactctggcgcaaggaactggaaacggtgaaagccagtaacgccgcactggtgcaggaaaatcagcgcctgcgtgaacgcgagcagaataccgacagccgtatcaacgaggccattaaccgccagcaaaccagcgcttcagagcagcaaaacgaattgctcagctcgctacagacacagatccagcagcttaagggaaacaggacaacggacgactcgctggccgggctggggattgatgaaccggaaacggcctccggcgaaccactgcgctggataacgcccgccgatgccctgccaacggataaaaacggtcatccgctgcaacctgcgctggcctttccttccactatgcagaacaccgcgcctcagcctaaaacaccaccgcccgccaccgtcaaaccggtctacaccctgccgcagaacagcaccttaatcggctcggtggcgatgactgcgctgctggggcgcattccgcttaacggcagcgtcaccgatccctaccctttcaaggtgcttattggccgcgataacctcaccgccaacggtatcgagttgcccgacattgaaggcgcagtgatctccggcagtgccaccggcgactggacgctctcctgcgtgcgcggcagcctaacgtcaatcaccttcgtcttccgtgacggcacggtacgcacactccccgccgaaggcgacaaaaccggaagcggcacagaaggcaagataggctggctgtccgatcctcacggcctgccctgcatccccggcgagcgtaaatccaacgccgccgtatatatcggctcgcagttcctgctggccggatcgtccgccgccgcacaagcactggcgaacaaccagaccacctccaccgtagaggatggctccatcaccaccgcactgacgggcgacagcgggcagtacgtgctcggccaggcgctgggcggcggactgaaggaaagcgccgactggtttaagcaacgctacggccagatgttcgatgccatctacgtgccgcccggccaggccgttgccatccatatcacccgccagttagctatcgactacgagcctgacggacggcgggtgaactaccgcacggcaggcgagcgcactggagatctggactga

SEQ ID NO: 380145 - DNA, 789 bp, Salmonella enterica
atgaatgcccgcccgctgttgatcctgctggttgccctccccctgcacgctgtcgaactggtgaagtgggagcgcattccgctgccggtggcgctgaacatcgggcaggagcggattgtctttgtggatcgtaatgtccgggtgggttatcccgccgcgctcgaaggcaagttgcgcattcagagcagcaacggcacgctgtacctgctcgccagtcagccgtttgccgccacccggctacagcttcaggacacagaaaacggcgagctgattttgctggacgtctccgccagcaagggcgagcacatcagggaaccgatacgcattgtccgcgaagagaaaaagacgactgacgcgaaacccgatgcagctcctggcccctcaccgtctacgccgcttccggtggcactcacccgctatgccgcgcagatgctctatgccccgttacgcaccgtggaacctttgccgggcgtgcagcccgaaggcgtgcggctggcaaaaaccatcaccactttgctgcccgcgctccccgtcagcaccataccgatcgacggctggcggctggatccttaccacctggtggcgatccggcttcagaataaaagcgccacccgactggaactcgatccgcgccagcttcaggggcagttttacgccgcctccttccagcatcgctggctggggcctgcgggcagcgccgaagacaccaccgtactctatctcatcatccgcaatcagcgccctgaacaggcaatcctgccggagcctgcgcaggagaagaaaaaatga

SEQ ID NO: 380146 - DNA, 627 bp, Salmonella enterica
atgagcacctttaagcacgcgctggccgcgcgggatgcgcatatccgcactctgcatattgcgctggtcgcgttattcctgctggcatcaggcatgggattcggctggtacagctccccacgccagctcacggtgtacctgccgccggatcttcgcgctgccagtcagcgtccgtggtgggaagtgccgcccgccacggtgtacgccttcgcgttttcggtgtttcagcagatcaaccgctggccgaccaacggcgaggccgattatccccgtaatctcagcgccctgcgggcttacctgactcccggctgctacagccagattgaccgcgaatttcgccagcgtctgcaaaacggcgagctgcgcgaccgggtacgcggcgtgtatgaaatccctggtcggggattcagcgataagcgggtgcagatcctcgaccgcgacaactggattgtgacgctggatctgaccgtcgatgagtatttccactccgaacccgtcaagcgggcgatggtccgttaccccatcaaagtactgcgctacaacatcgaccaacagaaaaacccgtgggggctggcgctggactgtttctcatcaccaccgcagaagctggaggcggctaaaccatga

SEQ ID NO: 380147 - DNA, 354 bp, Salmonella enterica
atgaataccatcccctttctcccggaacggctgaaccgcgaacctgctgtgtttcgcggtctgacggtcagcgaactgctgatagcgctgctggtcgggctggctatcggcgccattactggagccattctggcaatactgtggcgcaactggagccttatccccggcagcgccctgcccggcggtgcgctggcgatcctctgtggcggacgctggctggcgcggctgaaacgcggacgcccggagagctggctgtaccgggcgctggatctgaaactggcccgtttcggtatcggcactcagcgttttgtcctgaacgatggcgtctgggctattcgtcggagccgacgatga

SEQ ID NO: 380148 - DNA, 123 bp, Salmonella enterica
atggataaaaccttcccctactaccgccaggtcgctctgctggtgcgagcattaccctatgtcgctaacgaggcctgttttgcgttgaaagggggaacagctattaactcattcatggtataa

SEQ ID NO: 380149 - DNA, 774 bp, Salmonella enterica
atggcatcaaaattaaactggctgttgcaaaacacctctccgggaagcctggttttgcaatcctggctaacccgaaacaacatatcgccttctctggcctttaaatacgcgcaaaatggctggttaataaaacggcgggctggcgtttatgcgcgcgcaggacgagaaccagactggagcgatgcgctatggtgtctgcaaagccagcttgaagcaccggtgcatctggccggactgagtagtctctcctggcagggccgttcccattatctacagcttaagcagagtcaatgctggcttagcgttgaaaacaaagcgatgttgcccaaatggtttaaagaatttcccggcgttgagtggttggtggtatcggctctgaagcttcctgaattggatgaaaaataccgaactgagcttgaggttaaagggaaaaaaataaccgccagcgtaccagaactggcagcctatgagttgctaagcgcagtccctcaggaaatctcatttgagcacgctgccgagctttttcagggactggtcaatctcaacccacgtaaagtggagaggctgcttacgctcagccagtccgtacaaaccaagcgcctgtatctgtttttcgccagtttctatgaacatgcatggttcaaacgcgtagataccagcaaaatcgacctgggatcgggcaaccgacaagtcgttgttaatggcaagctgaatactcattaccagattactgtgcccgaaaattttactaagaagggaataagccatggataa

SEQ ID NO: 380150 - DNA, 684 bp, Salmonella enterica
atgcccgagcatgtgccaccaggaccagcacgccgccccggacttctcggctggctcgcattgttacccggcgtactggttggcttttgcctcggcgcatggatgctggcgatagcactggaatggctgggcgatgcgtttttctggcggaacacctgcgccagccacagtgaacaggtattgcaggcgacatggcagtggtggcggggttctgctggcgcaccggtgtggttagttgaagatctggcgcttgccagcgataagttgcagcaaggaagcgcagcgcttattgcttcgctcaatgggcaaagcgggttgttctggacggcgacggtcactacggctattcgctgcgcgttattgtctgcaagcaataccaccctcacctttctgctgcggctggcgattctgttgcaggcgctacggctatttgcgctgattaccgtcgtcgggcttattgacgggctggtaagacgcgacttacggcggttcggcgcaggccatgagtccgggtttgtttatcactatgccaggcgtatgatcgtctccagcttagtggcaacggggttggtgtggctggcgatgccgatttttcttgtaccagagtatatgtttataccagcggcagcagggattgggctggcagtatccatgacgggcggatctttcaaaaaatacgtctga

SEQ ID NO: 380151 - DNA, 609 bp, Salmonella enterica
atgcttaaacgtctgacttacctgactaccgccagtattctcattctgttggcagcggcgatgatctggtgtttcaaccgactaaataccctgacgctggcgcagcaacagacacaacgccagatggagcagtggcgtgaccagtcgcagccagatgacaattaccgagaactgcaagttgccgtaaaaaacattatcggacgcacggaagcccttgccaggcagcttgacgatgtcaccagctctcaggccgaacgtcttaagcccattaacgagcagctcagggagctggagggacaagtccggaccctgagttccagttatcaacacctgcaacaacagtccgccgcgcgcagccgcgccaaggcaaaacgccccgccccatctccgctttgggccgcaaaggcccctttttcacttatctgcagcgagtttcgcgccggacgacagttcgccgtcattgccccatccggctatcgttcgctttcacagcttcagcttgttgctcccggcaatagcgtacagggctggcaactgctgcaaatggacgataaccgtgcaaccttccgcaagggcggtcaccacctgacgctgaatgccggagggtaa

SEQ ID NO: 380152 - DNA, 339 bp, Salmonella enterica
atggcaaaaccatctactcgaacctactctcgttatagccgtgatgctgcgcgactgctggggctgatgattcgtactgcgcgtattgaacgtaaattgaccgttgaagaactggctgaacgtgcaggtgtatcgcgtggactcgtttatcgtgctgaagaaggggacatggggtgtgcaattggcgcggtatttgaactggccaccattgtcggtgttccactttttacacctgatcaggcatcgatgacgttacataccgcgaacgcagagaaaactttatcgctgatgcctcgctcagtgtatcactccaaaaaggtgataaacgatgacttctga

SEQ ID NO: 380153 - DNA, 1293 bp, Salmonella enterica
atgacttctgataacagtcccgatctggcatatgtatggatctggttgcctggtgcaactcaaccgattgttgcaggtgcgctaactcgtgatggcaacaggttcatcttcaactacgggcgcagttacctggaacgggaggatgctatccctgtctatgagccggaacttccgttggttcggggggcgatttttcccgccccaggcctacagcaggcgagtgcattacgtgatgctgccccggatgcttgggggcgtcgtgttattctgaaccggctgatgggggctcagggcagggatgctgaccctgacagactggatgaactgacatatttgcttgagtccggctcggaccgaattggaggactcgacttccagcgatccgcaacggagtatgtgccgcgtgagtcccaaagcgcatctcttgaagaattaatgcaggccgcatcaatggttgaaagtggcgtaccgctaactccggagctggaacaagcgctttttcacggtagttcattaggtggcgcgcgaccaaaggcaatgattgagtccggggagcgtaagtttatcgcaaaattctcctcctccacagatacctataatgttgttaaagctgaatatatcgctatgcgactggctgcctgcgctgggctaaatgttgcacctgttcttctccgccatacagcgggtaaagacgtcatacttattcaacgctttgaccgtatacaaagccatgcagggtggcagcgccgcctgatggtctctgcgctgaccatttttggtcttgatgagatgatggcaaggtatgcgagctatgaggatttgacggatattattcgccagcgcttcgacgcacctaaggagacattacgagagctgttcgggcgtctggtttttaatattatttgcggtaacacagacgatcacgccagaaatcatgcagcattttgggatggtgaaaaactgagcctgacgcccgcttatgatatttgtcctcagggccgttctggtaatgaagcaacgcaggcaatgctgattattggtgaaaaccgaatgagcaatcttgcggtttgtctgtcggctgcggctaaatttttgctgagcgaacaggaagctattgacgttatcacacactgtatccgaacggttcacgaaaactgggcagaggtatgtcgtgaggcttcattgagcgaagttgatcgcaacttcttgtggggacgagtgttcctcaacccgtttatttttgaaggtactccagaagcgatcgtacgtaacgtcccggtgaactcaccttga

SEQ ID NO: 380154 - DNA, 1572 bp, Salmonella enterica
atgaatatctgtgccggaaaacgtataatatctggcatggatattaccgaacttctctccactaacgatcccgacacgctacgtcagctggcgttatccctcctggaagagaaccgtaaaaaagacgcttccctgagtgaaaaagaccatcagatacacctgatgagagaagccctgatgctcgcacgacagcagcgctttggccgccaggctgaatccttcagcggcctgcaatgctccctgttcgaagaggatgccgacgccgatatcgcttctgccgaaacgcagcttgcgcgcctgctgccggagccggaagaaaagaaagcgcgtccggtccgcaaaatcctgccggaacaccttgtgcgcgaagaaaccgttatcggacctgactcctgcgcctgcccggactgcggtcagccgctgcgccatatccgcgatgaaatcagcgagcggctggactacatcccggcgcagttcgtggtgaagcgttacgttcgcccgcagtacggctgcgagggtagccagcgcgtggtctcaggccgtctgcccgcgcagattatcccgaagggcatccctgagccgggactggtggcgcaggtgctggtcagcaagttctgcgaccgccagccgttgtatcatcagcagcaggtgttcgcccgcgccggagtggaactgccggtcagcacgctggccggatgggtgggcacggcctgcgtctggctgatgccgctggcggagctgctgcgcacggaactgttaagccgcccggtgcttcatgcggatgaaacgccgctgcaaatcctgaacacgaaaaaggacgggaaggcgcagaacggttacctgtgggcgtatgtcagcggagaaaccacgggcgacagcgtggtctgcttcgactgtcagcccggacgggcggcgcgttatcccgaagcgtggctggcgggctggagcggaaccctggtcacggacggttatgctgtgtatcactcgctgaaaaacggcggcagtatcattaatgcaggctgttgggcacatgcgcggcgtggcttcgcggcgttatataaggcgaaccgcgatccgcatgccggaacggcgctgaagatgatccacgggctgtacagtcttgagaaaaagatccgccacaggtcgccggagaagatccgacaatggcgacagcggtatgcgaaaccgcaactggatgcgctatgggcgtggctgacgtcgcaggcgcagaaatgcgcgccgggttcagcgctgcataaggcgataaaatatgtgctgtctcacaaaatggaactgagccggttcgtggatgatggcgcattaccgctggataataaccggtgtgagcgcgcgatccgccaggtggtaatgggccggaatacgtggctgttcgccggatcgttgcaggcagggcatcgagcggcagcggtgatgggcctgctggagacggcgcggctgaacggcgtggagccgtatggctggctgaaattggttctggagcggctaccttcattaccggaagagcggctgcacgagctgttacccttcgcgaaagatcctctgaataactga

SEQ ID NO: 380155 - DNA, 702 bp, Salmonella enterica; identical to SEQ ID NO: 374664

SEQ ID NO: 380156 - DNA, 180 bp, Salmonella enterica
atgaataaatatagagcattgattactttgtcactcattggaactattcttgttggatgtgataattctaaaaatgatactaataaacaacaattagccaacgatattgtcaattccatggtgacagttaaaggggggcggtttcaaatgggggattttctgtctcttatacacatctga

SEQ ID NO: 380157 - DNA, 498 bp, Salmonella enterica; identical to SEQ ID NO: 375073

SEQ ID NO: 380158 - DNA, 228 bp, Salmonella enterica
atgctcctggatggaaaacctgtccccgacaaccgcgccgatgtcacccgacgcctcagcgatcatattcatgagaacaggcacagcaaccgatatgaagatgagatgtttgcgattaagtattttcagaagggaaccgcacatatcacgttcaaacgtcctgacctggtagacaagatgaacgacatcatcgcgaagcactatccggggatgctggctgcgttatag

SEQ ID NO: 380159 - DNA, 429 bp, Salmonella enterica
atggcaacacaattaaaatattttacaacagcattatgtttattagttatatcaacatcagcatattgcgctcttagcaaagatgtattagtcaactccaacaaactaaaaagcaaaggttttttggatggacagatgggtactgtaaatgttgacctgaatggtgatggataccaagatatcattgaatacaccttttcaagtacaacgccacctggtacatgtgatcagtcagattgcatgtctagtctggacacctctccaatattaacattccagataaaaatgcatgatggtaagtctattgatggctcatacatgtgtacctccctgggtgtatcaaaggaactccgcaatggaatgaaagacatattatgcggacccaaatatatacttcgctggaacggtgaagaatatgatgcagattaa

SEQ ID NO: 380160 - DNA, 510 bp, Salmonella enterica
atgaatcattccaaaaaaatctatactctgttaaccactgtgctattgctggtcaactttactgtacattccgcaactgatcacaacggaagtccagtgcaggttgcaaaagaattttattctgtatatatggattattatttcagaatggtgcctcccgacgccactatattcaattctatgatgaacaaatacgtcacccctcgatttaataaggaaataaaagagtctagaatatgtgaaggtgggcatgatccagtgtgtaacatcgatggtgttgaaccagggttaggatatgtctatatcattagggcacaagatgcttacgatgactggaaagaaattaaagctgaaataataaaatccggtaaggaacgatctagtgttaaagtttacttgggaagacgggaaacgcagcagatcattatagtttccatgattaaaaacaatggacagtggcaaattgataatgtttcagatttcagaccagcaccctatcgcttccagtag

SEQ ID NO: 380161 - DNA, 927 bp, Salmonella enterica
atgttcttttcgcataacgtttcacatgcgaaacgttatgcttttaaaaaccatgtggcatctatgattttaaaatatatcagtcgatttacacactgtttaatatgtacttgcaaattgttgtttttaacaatcactttttcatccagtgcttcggtaaatatacctaaagtatcatcaacggtagatggcttgcatattgtcgccattaataaattgccagcagcgcctcagaaaacaccttctgatgagcctgtattaaattgtgatagagatccccccaggactatcgagggaaaagccgtttcatctctgggatggagagtgattaatgaaatctctaacggtgatttgactatcgttggttttttcagcaaaggtgagaatggtacaagcggatcctgctttgtcaaggatggaaatgtggcaatttatagcaagggttctctccaggctttaatttatggtgataaaatcaccgatggctcaaattcgcctttgggtgcagtttccaaaaccaatttaaataatacatttcgtctgagagaattttttccgggtatgaccgcagttgctgatttgttttatgacggtaatgttgctcgtgttcagccaattgcaccgatagaaccattttgtaatgggatagcacctgtaccaaacatctatggaaaagacattaaaagcgccaggaaattgctcaaaaattatggatggaagcctgaaaataccgaagcggatcagagcgactccattgccaaagagttaaattccgaaggaataaccgaagtggattcttgctctggaactggatttggattctgtaatttcgattatcaacgtgaaggagggatctctttgaatgtcataacaatgggggatgattttacagtaaccgattacggtgcccactgtccggaacaatga

SEQ ID NO: 380162 - DNA, 1185 bp, Salmonella enterica
atgaagggtgtaattaaattaagtttactggctttatcaatctcattcagttttgttggttatgctgaaagtaaatctgtagaggtcttaagtgctgtcgttaaagatcaaaaaattcctggagcgcaggttgttattcagcgaaacggcgaacagtccatttcgtccttgagtgatgactctgggaacgcccagatagggaataatgcagccgatacaaatgacagtctgataattatcaaaaaaagtggatattcaacacttgtggcgaaatgtccatgtagcgggatgagttacgcattaagcccgacaatgaaggggcttgatagtatgcgcgtggttttgggctggggacgttcaccagctgaccttgactcacatatggtgtatccgggaaatcatattttcttcaaccataagttgggcgacaatggaaatctggacgttgatgatacagacagttttggtcctgagactataacattaaccagacgtgagaatgggaagccctatgtttatgctgttcacgactatagtgataagtctgatccagataccaggaatctctctaatagtgaagcgaaagtgtttgtttatgttggggagtcgttagttcgaacatattatgtccctaaagaccagtcggggaatttatggactgtttttaaagttaatgaaaatggtgccatcgaagatgtgaacaatataaaaggtatttctgtcggtgccggtgatattgataatgttttaacgccacttttgaatagcaacacaacgttgcctcatcaaaactggggggctgagcaaattgatatttcaaatgcgctgaatcttaagggtgaagaatcataccgtcggaaacaatatgaggaggcaatttcgtttttcacagagtcagtcaataactattcagaaaatggcaaggcatatggcaatctcgggctagtatatcagaaggttggccgtactgctgaagccatctgggcaaaccgcaaagccattgcacttgcctcaggtaaaaatgcatcaacaatccgggctggtgcgaattataatatagggaagatatacgaaggcgaaggccagtataatgaggcccttaattattataagacggcaaaaaatgaaaagcaaaaccctgtttacgacaatgccataatgagagtaagcagcaaaataaattaa

SEQ ID NO: 380163 - DNA, 591 bp, Salmonella enterica
atgggcgcatttttcacccttgcctatcatgataaccagacggatgtgctgctcgccctgacgctcgctcaggatccactttcccgggagcacattccgatgggaatggagtatctcgccttaaccgatcctgtctccactgccatcagtcagcaggaggaggggatccgtggattctggcacgccgtgctgccggtgctgttctggctttgctcggagaacagcgagtggggaagacaggggaaacctgtgagaccagcgcccagacgggtcggaaagcatcaacgcctcatcccgccggacaaacctgtgcagatttttgcaggtgcccgggccggttccgcgctcaggcaagcaccgcgagcgccggaagccagtacatcaggggacagtcactccacaccccatcggcgcctgcgcccccatgtcagcaaagcccactggcaaagctactggaagggcaaacccactcagggggaggagaaaagtatgctgctgaaatggaagccaccacaaatcgtcaatggcaaggacgacgattctctggaagcggtcatcagattcatgaaagacatcgacacatcatcctga

SEQ ID NO: 380164 - DNA, 414 bp, Salmonella enterica
atgaacaggggcattcatcctgcgctggcctttgctaaacaggtagagggctggtctccgggcgtattcagtcaggttgataagtggcgggagaccgattcacttgccccatggcggtttatgacgtttcgccagtgtaaacgctggcttgcggactggctgaagcgtaacccggcgccagaagaagggttcctttgtcctcaaattatgaagcgtttcccgccgcatattgtttatatgacgcttgcggcctggcgaaccggtaaaaccctgcttcattgcgatgaatctctcttccggatgctgggtgaaactcgtcagaccgatgctctgtcaggcgaaatgcttcgccgcctgccattctggggattctggctcgattttccggctgatatggtttttgctgaaggctag

SEQ ID NO: 380165 - DNA, 1266 bp, Salmonella enterica
atgcgcctgtggttgcacattgatcagttcatttgccgcagccagggttgcctgattatgcccgtctggctggatgccatccctgaacaggccccaaaggtagcgcgccctggcacccgccgctggctgctgtttctggcatttatcatgctggggggcatagcactcacgctatggtgctggacgtcagagcgaaccggatttgtcttttggttcactgcgctgggtcttccattttgcacctgggggcttatttttggtttacgtcggtttgcctataaagccgaacaggtgggggccgagtcccgaaatatcgagcgagaagcactcatcgacagtgaaattctgcgcggtcagcgctgcgcctggatcctcgggacttatatccagactccggccggaaacaaaaccgacgacctgctggaggtaatgaaggtcgccgcacccgctatcgacttttcgcgtccaagaggatgtgacaaaccgatcaggtacgcggcattaacagaatatcagacagatttatcgaaagcgctcaaagcagctgtcactaagctgaccacgcgtgtggatgtaatcgttcagccacttccatcagaactgccatgctggctgatgctggactgtgacagtgacctgtatcccctggttgaagagcagctaaaagctgagctctcactcaaaacaggcaggatatttcgcctgatggctggaaaagggctgggcgcatttgatgcctggctggacaagcgatgggacacacctggcatcctggtgaccatcactctgtctttacccgcgtccccgaaggaaggtgacgctgacgccgttactatggtggtattcagcaaccgtaaagctcacgcgtatccggatgcgctacgcttgcatcgcccggaaagaggctcagagggcacgctgacgaaaacgctctcacgagcactgctctgggcaaatatctcatctgacgctcttcagggcagttggatctccggccctgcgttgacacagggtagcggctggaataacgcctgcgaggcgagcggtgtggaatttagtctttctgaagacaattccagtatcgacccagtgctgggctacaccggccatgcggctccatgggttgccatcacgctcgccgatgcagcctttaaacaacgaggggcgcaagttatcgccgcacaacccgccgctgacaaagacgacgtctgggtagccgtcatcaccaaagaagaagttcgcaagggaacgcccaaaaatggctaa

SEQ ID NO: 380166 - DNA, 258 bp, Salmonella enterica
atgaatttagtaaataaatcaatactgacattgttggtatttcctatgttttcttactcggcattacaggattacgctaaaatagaatccaaatgtagaaatgaaaatgctgagataaataattccgttgttatgggatgcgctgaattggcatctgctgctgccaaaaaagacatgaatataatttatcaaaaaatatttaatattattgattcccgcgacatccctgatacgactaaaagttttgaagcctcttaa

SEQ ID NO: 380167 - DNA, 213 bp, Salmonella enterica
atgggaaatgcttgtgaggctggagcaatcagaattatttctatggattctgaaaataaaatccgggtgcataagccaatagactactgcatggggtctgttgtgattaataatgacagtgataaagtcaaaattaatattcaaaatggcgatgattctaaaaactctgaggtgtggatattcaaagacaacaaactagtgaagctaaaatag

SEQ ID NO: 380168 - DNA, 450 bp, Salmonella enterica
atgatttctaaaatgcgaaaattaattatttcactagtatgtacattcccagttatagcatttgcaaatatcgaagagggagtggggtattgggctgtgaagtgtggtggattcggtgggtccgtggaaatcgagtcatcaaacgaagcaaaagtaaatataaatgataacagtctttatatttccggcattatacaagaagatcacaatggccagttaaagttattttataaggatgtaattgagacaatgaacgagacaattgactgggctgtaatttctcagagtaaacctattgctgatattatattcaaaaatggcgtcatgcatatggaatggaaagggttctttgatacaaagcataataattacatctggaaatcagaaccggatttcgttgtcgcttccggtgatcgacttaatgttgaaatgaatagatgtgagttttaa

SEQ ID NO: 380169 - DNA, 879 bp, Salmonella enterica
atgaaaatcaaaaaaatagttagtgctattattttattctctacgtattcatgttacgctgattcgagctgttcttcatcatctcctgaatcaatggttccccaagctgaaacagcgctaaagataaatcaagtcaagagtactgaaagggtttatttctacacgcaaccagaagaaaaatgtaaaacaaaaacgtttgttatcaataatgataggctaatatcgttcaagaggtataatgattttgaatatgttgcatacattaataaatcaggttcgactgtcaatggttgggtgaaaggcgaaaaaatatttgatgttaaatatcctgataggtttataagtgcaagtgactatattgtaaacttagacaaagtgaatatatcactcggacagcctgtatctatagtcaaaaacgaagtgctggccaaaacagggaaggaagtcaaacttaatatgataggtagcgatgaccacgccaccgtatttggcattgattttccgtataatagagatgcgtcagtctatgtatctgatttgaaccattcggtgcgtaataatgcagaagagtccgtatcgcagataaatatatattcggggaaatatgaaacaagcagaggcattaagattggcgatgacttgcatttggtcttgcagaaatatggcaatgatggtattactgatactcagaacgatggagttaaaacgctgagcttccaatatattgacatggatttaactttctcatttaacgctactaacaaagtcggctccattgtgtatgtacttttaccgtggtcatcagcaataaaagacctgcaatgctctaataacgtttccttactttacagaattagcagaattagtcattgcaaataa

SEQ ID NO: 380170 - DNA, 822 bp, Salmonella enterica
atggcatggatgcaggatgtaacgacggagaaactgggtccttcattatggcatatgcatccaataatgtttttgggaaccatacttcaacggcaaagatacgtcatcaaatatactaattattcttctactcttgatttggctcttgataaacaaatggctttagggagtcgaaacccattacatggaccacagattgggactaaccttggatttgctcccgttagtagagaaagggtatcatcttatttggatccaataaattatgaaataggtgaaaaccctaacatgttccaatttatgattttaacctcttttattggaatccctaaatcagcaatagcatcagttctgaaaggtcaaggaatattagatggcaaagaagatgcttttattcaggctgcaaaagaaaataatgtgaatgagatgtatttggttgctcatgcaattgttgaaacgggacatggaaccagcacccttgccactggcaatcggtataatggtcggacctattataatgtgtatggggttggagcttatgatggggtggcagtttcagaaggtactcgttttgcagcaaaaaataactgggatactccagaagctgcaattataggtggcgctgcattcacatcaacgaattttttctcccgaggtcaggatacactttataaaatgagatggaatccacaatctcctggcgttcaccaatatgccactgcgattaactgggcagagacgcaagccagtattatatataagatggcagtcaaatccccagataatacaatctattttgattatccaatttatgcgagatga

SEQ ID NO: 380171 - DNA, 189 bp, Salmonella enterica
atgattccaccattaaatagatatgttcccgcgctttcagaaaatgaattggttaaaactgttaccaacagggacattcagtttacaagttttaatggaaaagattatcccttgtgccttttagatgagaaaacccctaccttaacaatatcattaaagcagcaacaattgaaaaagaacgtgttgtag

SEQ ID NO: 380172 - DNA, 1482 bp, Salmonella enterica
gtgacgaccaacagctatctggaatactttctgacgctgctcggctgggtggtcaataatgggctgtggaatgcgattagcaccaccggattattcgccctgccgctgctgattaagttgctggcgctgtggctacaggccagaagtcagggggccgatgaaggcaacaaagccgcgctgtccctggtatggaccgagcacctgatgtacacctcgctgctggtgattatgttcacctgcgtgccaatgttgaacatcgacctcgataccatcaaatatgacaccacgcgctcgaagcagtgcgggatgtcggtaccgcaacccgccgataccggctatcagccaattattaactcgctgggcggcaaaaccgccgccgtcccggtctggtggtacttcattcatgtgatcagcaaaggcattaccagcgcaacggttgccaccctgccctgccagccagacctgcgtcagatccgctttgaggtgcagcacacccgaatcaaggatccagcgctggctcaggaactgcgggattttgtcgaggagtgttatgccccttcccgcgcccgtctgaaatttcgcgccggagagctggacgatgacaccagtgatgatacggcctgggtggggtcgtcgtacttcctcaacacggctggttactacgataccgaccatgcgcattcaccacacagcgcctggccgtacagtgcatcacgagacgccgggctggccgatacgggcgcgggcggctaccccacctgtaaacagtggtggaccgacgatacggttgggctaaaagcccggctactacaactcccagccccggatatctggacagagtttaaaaagatcggtcagtcacaggcagtatatgaagaggctgtgctgcgctcgctagttagtgaacgcaatatgcaggtatcacagaacggacgcgtttaccccggctatggcggcaatgtcgatggcaccgtcgccaatgccgccaccaggctggcatccagcgccggaaatatcctcggcggcatagcggcgttcccggcgttcgacagcgtgcgtcaggcgctgcccatggtgcaggcgctgctgcaaatggcgctggtgatttgtattccgctggtaacactctgttcggcgtgggatgtgaaagtagtgatgacgctgacgtttgtgcagtttgcgctgttcttccttactttctggtgggaactggcgcggtggctcgatagctggctgctggatgtgctctacaacagcgatacccacagtagctggaatctggccgggatacagaatacgcaggatgatgtgattattaatctagtgatgggatcgatgtttctggtgctgccgacattctggctgggtgcgatgacgtgggctggagtgagagttggcgtggcggtgaatggggcgctggcgggcggggttaaggtggcgcaggatagtggggggaaggctggggggatgattgggaagtga

SEQ ID NO: 380173 - DNA, 258 bp, Salmonella enterica
atgaaacggctgatgctctccagcatcatgctgctggtttattcagcggtggtgttttatctggcatcgggtaacacgccacagattaaccgcagcgatctgctgctctgccgcgtgatgctatacggcgtgattagcgctgtgggctggcgtctgtatgaccgttttccaccttatcgcccgtccatccgccgcattgcgctgtggtttatcgcactgattgtgctcaacgaaatcgtgccggaggtgttccggtga

SEQ ID NO: 380174 - DNA, 1368 bp, Salmonella enterica
atgcgcccggtattctgtcttttattcgtcgcctttctcgccccggcggctgataaataccagtatcagcaacagggggcgatcagcgactggatgtattatcgcatcggcggcggtgcagccattcccccctcagcaacccggcgtaacaccttcccgctgacggcaggcgtaagctggaacagcgacatgatgtgcggcaatttcgatatcgataccacagtgcgcaatcagctcaacggcgtgacggacggcttccagcagctaatgggcgaggttatcgagagcgcgaccagcgcggtcgccagcctgcccgcaatggtgatccaacgtgccaatccccagctctacgatctgctaaccaacggcgttcttcagggacggctcgacttcgataagtcgctgctaagctgtcagaaaatggcgggcaagatgaccgattacgcgctcggcccggcctggacgcagagcgcacaggcagagaactatcagggtattgcggccagcgagaaagacgccgttcgcgccgaccagagagctgccgaagaagcggcggagaaaggcaaacgctgggttggtggcgaacatcgcggcggcaaaggccagccgcccatcaaactggtacgtgatacaacggtcgcaggctacaacatcctcaataatcgcagcgcgaccagcaccagttcggtatccagcaacgactgtcagggtgagctgtgtcaggtatggagcaagcccgatgatgccgcacaatggctgacgcgggtagtgggcgaacagaccattaacgtcgccccggataacgatcagtccggcgacactgaccagcaaagtggcgcacaatccggcgtcgggctgacgccgctgattcaggaagagcaggataagatccagccgctgattatcgatatggtgaatcgcagccagcccgttaacgatgacacgctggcgcaggccagcggtggcgagctgcatctgacgcgtggcgttatcgaggcactgcgtgacgatcccgatgcggctgtacttatccagcggctctccggcgaactggcgctctcccgcgtgatggagcaggcgctgatggcccggcgcacgctgcttgcagggatgcgcgaacctaatatttccggtgaaaaagaggcgcaaaccgcgctgacccagaccaccgcccagctcgaccaggaactgtcacagctaaaactggaactggatatgcgtcaggcactggcggataacgcggcgcttaccatccttgaacgtcagacgatgcgagcgaagaccaaaggccaggctgtcggcgtggaagatgacaccgacaaacgggtggacgatctcagcaagcccacaggcggggatacgcaatga

SEQ ID NO: 380175 - DNA, 933 bp, Salmonella enterica
atgttcaggcgtaaattgtttttcataccgctactgtgcctgtccaatctcgcgcaggccatcaccacgccagaaatcgccgcctccgcgctgtcgccggaatgcgtgcattaccagatcgtgggcgtctgctactggttgttctgctcaccctttggctgctcggtgcgtacatcggtgaaggtacgccatttccgcccggacctggtggtatcagcctacagcgtgaccgggcaaaacccgtgggctgagatgtcgccgctcagctcgccgctgcccggtatcgcagaagccggtggcgataccaacccccgcgcagtcggccagcacagtaaagtccgcttcaagaacgcagatgcaataggctttcctgccggagatgcgttggcaaaattcttctctcagtttggctacgtctgcgccccgtcgtcacagcctttcctcccctattttctcagcactctggatgcactcgcctggcgcagcggcgtacctgagatgttctacccggaagcattaacgccaggactgcgcgaagttagcaaaggtggcgatatgtggggcaatatctacccacgagccggggcactcagccagacgcatgactataaggccggggcggtcatcgcccaacgcgctgccgatctggtaacacgcagcggtcagtcacatgtttatattccgctaactgccacttcacacgacggttactggcctccagatccggttaaggaaggcgacagcaataaccaccagtggcagatgctggttcctaaaaaatccacctcctgcaccatcttcccggatggctccgccaccgactcttacgccgaaaaactggcggaggatggcgcatatgcctggacgctgtggcgaccctataaatgctgcccacgccgtgggcagacctttcttggcagtagcggaggctaa

SEQ ID NO: 380176 - DNA, 1608 bp, Salmonella enterica
atgacaacttatctatctaagaatatcagccggtataaggggagtaatctgcggtacaggttattctttacggcactcacgctgttattttctttttccctccacgcacagtcactttatatagattgctccgctaccgttgacggtgacggcaccgccagcaatcctattaattcgatcagtacgcttaacaaccatgagttgcatccgggagacagcatactgtttcgccgtggaaccacctgtaatggcgaagtggtcgccgcaacttctggctcagagaatgccccagttatctatgatgcctggggcgaaggaacggcgttacctcgcatagaagcaaacggcaacgaagcggctttccacatgacagatgtcagttgggtaacagtacagaatctggaactttcggccagcggtgatggaaaatccccccgccggggattatgggttagcgccaccgacagtggagaacatcaggggatccgccttcagcacctgaatattcatgatgtccgtggagaaatgccagccacaaaaaatccttcggacagcagcataggcaaatatgcccatgcttccggcggcattgtggtggaggcgctcggtaacaccactcccacctcgtttagcggtctggatatcagcgataatattattcacgccgtcgatcgcgagggtatctacacctggtccaactggtgtcagcgcccggaactggtcgagttctggtacagcttatgtactgcgaagtggcagccattcaacaatacccatatcagccacaatatgctttctgatattggtggcgatggcatcgcgcccatgaccagtacggatagcacggtggaatacaacatactgaacggttttaatatgcgctccggctcgccaaatgccggaatgtggtcggccaacagcgacaatatcgtttaccagtacaatttcgcttcaggcggccataccacacaggatggtatgtcttacgatgttgatcactcaacgaatggcattatctatcagtacaatatttccgcgggcaacgaaggcggctttttcctgctttgtccgtatggggacgatgtacccggcaaatcgcgcaacttcgtgatccgctataacctgtccgtagcggacaaaacccgcaccttccaggtatgcagcggcggcgtgattaacggacaaatctataacaacaccattctgctgccgccagacacaaccagcgcccatctcattctgacagaaggagcaaccaacgatggcgcagttgagcttaagctgactaacaacatcctgatgggcgatggctctggcgttactccagtctgggactacaacgactccgccattactggcgaccacaatctctacaacaatgttccggtaatgccctctgacagttatgcgttaatcgacgatccgctactggctaagcccggtccggagaatgtgctctggcgggactatttaccgcaacccggttcaccagccattaatgcggggatcgctgttactggcgctcctgcacacgatgctttaaatcaggctatcggaacaccaccaacaatcggcgcactggaaccggaaagtagctcccggcgataa

SEQ ID NO: 380177 - DNA, 1245 bp, Salmonella enterica
atgattaaaacacatgacacccgatggaatgtgatcctctggggattctttttcctgttctattactacaactggtcttcctgcttcttgtttttacccatgtggctaacccggatggtggggctggataaaacgcatattggtatggtgttttcttccttcgccgttgctgctatctgcctgcaaccgctgctgggctgggtaacggataagctggggccgaaaaaacacctgctgtggctgatcgttatcctgatggtgctcttcgcgccgttctttatttacgtgtatacccctctgctgcaaagccattttgcgattgggctggtggtgggcgggctgtatctgggatttatcttccacgcgggctatggcgcggtggaagcctttgtcgagaaggtcagccgtaatcggggctttgagtacggacgtccacggctgtttggctgctttgggtcggcggcctgcgcgactatctccggtattctgtatggtttcgatccgacatggatttactggattggttcggcgctggctttgctgctggtggtgatcctgctggttgcccgctctgagccgctgccgggtattgaggcagagcaggtccgccagcaaaaggtgagcgtgctggagctattcaaacttcgccagttctggtatttcacattatatgtattaggtgttgcctgtatttatgatgtcttcgaccagcagtttattaatttctttacccgtttttttgaccatcaggaacaggcggctagagcattcggttatatcactacagtaggaaatcttggcgatgctgcggtgatgttttttattccactgctgattaataaatatattggcagtaagaatgcgttattaattaccggcaccattatgactattcggatcgtcggttcctcctttgctaccggaccgattgaagtgctcttcttacgtatgctgcataattttgaagtgcctttcctgctaattggtattttcaaatatattgctgacgtttttgatacacgtctgtccgggaccatctatctggtgggcgtgatgtttatcaagcagtccgccgctattattttatcgaccgtcgcgggtcatctctatgacaccatcggattccatagcgcctatctgatcctcggcagtatcactgccgcgttcactctgctgtccgctttcctgttgacttcaaccccacgccagaaaacggcggacgtccgcacacccgccacactctaa

SEQ ID NO: 380178 - DNA, 1293 bp, Salmonella enterica
atgcaaccgaatattctggtctttttcaccgatcaacagcgctgggacacggtgggctgctacaaccctgccgtcagtaccaccccggtgctggaccagcttgcccgcgagggcgtgaagtttgaaaacgcctttaccgtccagccggtctgcggcccggcgcgttcctgcctgcaaaccgggcgttacccgacgcagaacggctgttatcgcaataatatcgctatgcgacaggatgaagtgacgctggcgaagctgttcaatcaggcgggatatgacactgcctatattggaaagtggcacctggcagatctggatgaaaaaccggtgccggaagaactgcgcggcggctggcgatactggctggcggcagatgcgctggaacatacgtcgcacccttatggtggtcacttttttgataatgataaccagccagtgcatttcgatggctaccgggtggatgaccagaccacattcgcgctcgattacctgaaacaacgcccacgggataatccgttcctgctgtttctctcttacctggaaccgcacttccagaacgatatggcgcgttttgtcgccccgcatggctacgccgaacgcttccagaccgcatcggtgccgccggatctgattaaccgccccggcgactggccgcagaacctccctgattattacggcatgtgtcagaacctggacgaaaaccttgggcgtatcgttgattatctgaaggccagcggcgaatacgacaacaccatcatcctgttcttcagcgatcacggctgccacttccgcacccgcaatgatgaatacaaacgctcgtgccatgagtccagcattcgtattccctgcgtggcgcggggtgggccgttcagcggcggcaggacggtagagcatctggtgacgttgctggatctcccgcccacgatgctgagcgccgcaggtattacggtgccggatgccatgatggggcgtgatctgcaaaccgcactggatgctgagtactgggacgaagaggtgctgatccaaattagtgagtcggaagtcgggcgggcgctgcgcacaccgcgctggaaatatgaaattgtcgcacccggcagcgatccgtggaatgaggcagccgcagagatctatgtagagagccagctttacgatctgctgaatgatccatgggaacgccagaatctgattgccagcccggaacatgcacggatccgcgagaaattacgtcaggatattggccgcaaaatgacggcaattggtgaagacctgcccgttattgttccggtggagtaa

SEQ ID NO: 380179 - DNA, 801 bp, Salmonella enterica
atgactgcatggatgattgccgcactctgcggctgtggtctggcaaccagcctgctctcggcgctgtttggcgtcgggggcagtatcctgctcgtgccggtgctgcatctgttatttccacaatgcgctgtgcaggtgctggccgcgacgtccctgacggtagtgatgctgagcgcattgattaacgtcttcgctttctggcggcaggggattcggttgaatacgaagctgctgatgctctggtcgctggggatggcaacgggaatgcaggcgggcgtgtacgccagctttttgctgtcggataaggtgctgctgatgctgtttgcgctggttctcgtggggctggcgttgcgctgtggaggtttgcgcccgacaactcaggaaaacgtacagccagatagccgaacgcgcagtactgggatgctgctgtgtactgctggtggtgccgtggccgggttaaccgggctgggaggcggttccgtgctcgcgccgctgatgtcgcagctctccgggatcccgcgccagcacatcgctgtgtactgcaactggatgatgctgttcggcagcgccggaacggttgtctgctatctgtatcgcactgcaccggatatcggcgcattgccaccggctatgcagtttggttacgtcaatatggctattgtggccgtgatctttctctgcacgctggtgttccagcctgtcagcatgaggctgcgtactctgctgccggaatgctggctacagcgcgttttctccggggtattgctgatgattgccacgttgatactggtgacgctatga

SEQ ID NO: 380180 - DNA, 1152 bp, Salmonella enterica
atgaaacacgcttttcatctgatggcgaagcctgcgggttggcgctgtaatctggcctgtgattactgtttttacctggcaaaagggcagggtgtgctgcgtgatacctgtgggcagcgacatatgtccgataaggtgcaggaagcgtatgttcgtcagtacatcgctgcatcacctggcccggaggtgaactttacctggcagggcggcgaaccgacgctggccggactggatttttatcgccgggccgtggcgcttcagcagcgctatgccggggataaacgtattaccaacagcctccagaccaacggcgtactgattaacgacgaatgggcggcatttctggctcagcatcgttttctggtggggatatcgctggatggtccggcgcatctgcataaccattaccgcaagacaggcagtggtaagcccgtgtttaagcaggtgatggcggcgctgaacaccctgacgcgtcagggtgtggacttcaatatcctgaccgtagtgaacaacgtgacggcgcaggccccgctggacatttaccgctttctgacgcgtgaggtgggggctgaatttctccagttcattccggtagtagagcatgatgtgcagagcgggttgttgccctggtccgtgacgggagaggattacgggcggtttatgatcgccatctttgatgagtgggtgcgccgtgatgttgggcgggtattcgttcagctttttgataacgcactagcggcgtggctgggcgaacgcccggcgctgtgcgtgatgcagcccacttgtgggcgtgggatggtagttgagcagaacggcgatgtttacagttgcgatcactatgtggatgtggaacatcggttaggcaatctgctacagcagccgctggaaaagctggttgtgggtaaagcacaacgacggttcggccagcagaaagcgcagttaccggatgattgccagcgttgtccgtggcgctttgcctgccagggcggctgtccgaagcatcgactacacgagcggctgaatcatctttgtgccggatatcgcatgatcttcagccatatggatccatacatggcctatatggcgcagcagattcgtatgcagcaatctccggcagaggtgatgtcggtggtggatagtctgaagcagtaa

SEQ ID NO: 380181 - DNA, 1203 bp, Salmonella enterica
atgatgtcggggctacattcatggcttttagataagtcaaccagtgacacctatatgttcatcaagcgcctgtcagccaacgataccggtgcgacgggtgggcatcaggttggcatttacataccttctggcattgttgagcatcttttcccttccattaatcatacaagggatcttaacccgtctgtgacgttgaatgcgcatacctcctcgcacatttgcccggacaccgaggccagggccgtttattacaatggtcgtttctttggtaagaccagaaatgaaaagcgtattactcgatggggcggaggaaaaaatcctctgcaagaccctgagaacacgggtgcactggcgttactggcgtttgaccatcggcagggggcagatagtcattttgtcgatatctgggtgtgttatgacgctgaagaagaagatattgttgagtcttcactcggagaggttgttcccggttcgctagtctatggccccgcaaatgagattctgggcggcctggctttaaaagaaccggtctccagtgggtatcatcttccggaagagtggagaacgaatttcccttctggtaaggagattatccagtatgcagcagctcattattccccaaatgtcgttggcccggataagcaactgattgaacggcgtcgtattgagtatgaaattttcctgctggtggaagaaatgcacgttctgggtatggttcagtccgggtttggttcagtaaatgaatttattgcactggcgaactccgtgagtaacagacgaaaatcacgggccggtaaatcactggagctgcatcttgaacagctttttaatgagcatggactgacaacctttgagactcaggccgtcacggaaggaaataagaagccagattttttattcccctctgcacaagcttatcacgatgaaacgtttcctgagcagaagcttcgtatgttggcagtaaaaacgacctgtaaagatcgctggcggcagatattaaatgaagccgacagaattcaggacatttacctctttactcttcaggaaggtgtttccgttgcgcaatttcaggagatgcagcaggaaagggtcaggttggttgtgcccactagtcttcatgataagtacccgaaaactatccgggaatatcttatttcgttagaaacgtttatcgatgaaactaaaacattgtatgtcgattaa

SEQ ID NO: 380182 - DNA, 1425 bp, Salmonella enterica
atgtctgaattcgatttatttgcgcaggaactgctcgaaaaagcagaagctgaagaaaaacaacaacaagagcgcgacaggaagctgattgatcgggtacttgaaatttacgaccagaagtatgtcgcagaactgctaagaaaaataggtaaaaatgagtggagccgcgaaacccttaaccgctggataaatggcaagtgcgagccaaaatcgctcactatggctgaagaagcgctgttacggaaaatgctgccggagcaacccgctcatcatcctgactatgatttccgctttattgacctgtttgccggtattggtggtatccgtaaaggattcgaagccatcggtgggcaatgcgtttttaccagcgaatggaataaagaagcggtacgtacctacaaagcaaactggtacaacgatgaagacgcacacacattcaatctggatatcagggaagtcacgctaagcggagaagaaggcatctctgaagagaaggcctacgctcatatcgatcaacaaatcccggatcatgacgtcctgctggccggttttccctgccagccattcagtctagctggggtgagtaagaaaaactcgctcggacgcgcacatgggttcgaatgtgaagcgcaagggactctatttttcgatgttgcccgcataatcaaggctaagcagccagccatttttgtgctggaaaacgttaagaaccttaagagtcatgataagggtaaaacgtttaaagtcattatggatacccttgatgaattgggctatgaagttgctgatgccagtatcacagggaaagatgatcctaaaattattgatggtaaaaatttcctgccacaacatcgtgagcgtattgttctggtcggattccgccgtgaccttaatatccatcagggattcacattaaagaatattcataaattctaccctgagaaaagaccaacatttggtcagcttctggatcctgcggttgacagtaaatatatcctgagtcctaagttatgggaatatctctataactatgctaaaaagcatgctgccaaaggtaatgggttcggttttggtctggttgatccgaataatgaaaacagcgtcgcgagaacattatccgctcgttatcataaagatggttctgaaattctcatcgacagaggatgggataaagaactcggcgaaatcgatttctctaatccagagaatcaggaacaaaggccaagaagactgacgcctcatgaatgcgccagactgatgggttttgagcaaccaggtggcaaaccattccggatccccgtttccgatacccaggcctatcgccagttcgggaactcagtggtcgttcccgtttttgaagccgtggcgaaactgcttcagccttatattatgaaagccgcagcaaacaaggcagccaaaaaataa

SEQ ID NO: 380183 - DNA, 738 bp, Salmonella enterica
atgattatttcagacgtcagcttccataacactccctctgctgtccaagttcagcaggctgccattccaccgccagcggaaatgccgtttctcaccgcaccaactcgcaatcacgccactttccactacacccacttttcccgccacaccctgctgcgccctatcacccgtgaagcaggaagcaaaatctatctacaggaagaacccatctgcggtttctggtacctcaaccatggcgtcgtcggtttacatcacacgctggaaaacggcaaagagatgttggtccgcgcctgccaacagggcgactggtttggctatctggggttatttggttcagaattctatcactgccacgcctgcgttttgcagactgcatcgctgtgccacgtcatccctcactccaacagcgatttcctgcgtcatcacccgcagttcgcccagtttctgttaaatcaggtagtggcaagtctgtcagatgcagagcatcgcatgacctggatcgctcgttatcgcacccgtcaccgggtactgagcagcctctggtatctgacgagttattttcccgggtatgactggacgtggcgtgaagtagctgaatttgcaggatgtgagacagaaactgctttgcgattcagtaaggaattaagactggccgggatactggacgattcgcagcgccgtctgcatatatgtcatccagagcgactggcaacactattggctggctctcataattag

SEQ ID NO: 380184 - DNA, 261 bp, Salmonella enterica
atgactaaacaagactggcacccagccgacatcatcgccgccctgcacaagcgcggcaccagtatggctgcggtttcgcgggaagcagggctggcctcctccacgctggcgaatgcgctttcacgcccctggccgaaaggcgaatggctgattgctcgcgcactcaaccttcaccccgcagaaatctggcctagccgctatgaggaagaaggcgaactacggcaaccgaaaaatccgctccccgccaggtgtcggttatga

SEQ ID NO: 380185 - DNA, 264 bp, Salmonella enterica
atggaaaagaccggatcaatcaaaaagctgctaggcaaccgaatcaggcaacttcgtcgggagacggggctgtctcaggaagactttgccgacaaatgcggtattgatcgctcatacatgagtggcattgagcgcggagtacggaaccctacacttgaaattttgtgggcaatatctggtggtctggatttagatcttagtcatttgtttatgttcgaaacaaataccaaagaagaaatagaaaccacgctttgtgactcatag

SEQ ID NO: 380186 - DNA, 1299 bp, Salmonella enterica
atgttagagaacctgcaatccagtatcacccaaggtttacctcaagatcgggaagcgctgtaccacttggtctggcgcgagcccgcggagagaatcgcctctctctataacatcagcaaagagcaactgacaaaacgatgcgttgaattacggataccgagaccgctcgcgggttactggaaagcgctggcgaaagggactgcaccggcggtgccacctctacctgctttgaaaaaaggcaaaacggcaaaaatctcgaaggaagctggcgtaaccgtgtcgtcacctacagtcgcattaccacagctaccactacctcgagcgacgagaaagcaaaccacgattacagggaacggctatgcgttaatcaatgatctcaaaacgtatctcccgaaatccagtgtgactgaagacggttactacaagcctgcgaaaaagaagctcctggatctcaatgtttcggatacggggtttgatagtgcaatagagttcctgagccgattctttgatgcgctggggaaacagggatatcgggtaacgctggatgttcctggcgaaagaatgcaccgtgcggatattgatattaaggaagatccaaaagagggtggatatcgctgggacaatttatggcggccttatacgccaagcatcatatgcattggcgatatgcattttgcgttcaatcttgccgaaatgacggaatatgttcctgcgaaaaaaatcaaaaatcgctatgttcgggatgaacagatggtgcggtggatacggggtaaaaatagcgagccttttcttcatgtttctaagcatacgctgcctaccggacggtttcttttgcaactctattcgccttatgagtccgctgactggcgagtgcagttccgacagacaaaacaatgtggtttgattagccagatcccgaagatgatttcggtattgcaggaagcagttccgctgattgcaaagcaattagaagaggccagaatcagagctgaggaatggcggattcagcgggagcgagaacacgctatctatctggaaaaggagcggatacgtcaggaagaagaggcgtacaacgccagccgtaccgagctgaaatccattatgagtcagtgggcagaagataaacggatggagcagtttttccgtgaagcagagttggatgcggcgagtcttgatgagcagcagaaggttcaggtaatggaacgtctgcaattagcgcgccagttcttgttagaggatacggcagttgagcgattactgaaatggaaaacgccacatgagcgattagataagaaataa

SEQ ID NO: 380187 - DNA, 528 bp, Salmonella enterica
atgcatcaattcaatgagcttgcatatagatgtacatatttttcattgagggtgataaacgaggcctatgatgaaacgatgaatgaattatcagaaactggctcaactcctcttgttaaaattttacaggctctgaaactacaaaagatgatacatatagttggattgttttcaatttttgaagcacacctgcaacaaggacttgcatgtcgaaatggtttcaaagaggcagcgttgattctagaacaagcgggtgagtatgctttaaaagaagactttcataatttttatcttgcaatcaatgcactaaagcatggagacgggacaagttacaagagtcttattagtaaaattagtactcttaacttcgtggtggaaagctcaaacacaccaacctttgaagaaggggatgtttccggtatttttggactagtaaaagtcgatgatggttttattgaaaactgcctagaaataattgaaaaagtttctaagtgcattaaaacacaccgacctgacttcatatcttga

SEQ ID NO: 380188 - DNA, 540 bp, Salmonella enterica
ttggcttttgtatggtttgttcaaaaatatggtaatgacgttaaagagctaattctccggttatctaaagtaaaatttggaaatgctgaagctgaatttactttagggttaaaagccgcggaagatttagctaatgaagctcccttgattgaagtctcaaaagatctgcctgaggaaggtatcgagttttctaaacgtatgtcgcagttagagcgcattgcggacgtatcgcctagggccgcaattatggagtcatggttactaattgaagaagcggcaggaaaagcaggttttgtccagggggcatcaattccaagaattaatcctttattatttattgaatggttagtaagagaagggaaaattgataaatcaaccgctatcttggtagataggatgagaaagctacgaaatgaagcgagtcatctgagagatttcgaactcacaaaagatgaagctgaacgatatctaaaaatagccgttcaaatctctcttcttatcatcgaaccggagtcatctgtagtgttagaaaatgagtaa

SEQ ID NO: 380189 - DNA, 267 bp, Salmonella enterica
atgaagaaaatacgtttcaccgaatcccagatcctgagagtcctgaaagaaggtgaaggcggtcgacatgtgaaggaggtttgtcgtgagaatggtgtttccgaagccagctacgataactggaaatccaaatatggcggcatggagtccccggatatcaaacgcatgaaagagctggaagaagaaaaccggcgattgaagcaaatgtacgcgtctttgagcctggatcatgaaatccttaaggatgtcgtcgcaaaaaaactttaa

SEQ ID NO: 380190 - DNA, 678 bp, Salmonella enterica
atgaaaatacccagcattaacaatcaaaacatttcgttttcggatcggattaatgcaatagatataataatgaaaacttatcctgatgtaacgccttattttttcatggaaaaaccaaatatttatgatcagaaatacatttcaggtataaccagagaacagtctgtatttaaagttaatggatacattaataaaaaggcagaactcactcattatatgcaacgtatgtattcaggctctcacattaattttaagaccatctccagggatgaagccaacacctctgaaggaagttggttaactgttattacagggaaacgtccaatgggacagttttcagtagatagtctttattcaccggtgttgcattcattgcttgaactaccaaatattggatgtaaaattttccccaaagaggacaatagttttttatatataatagtagtatacagaaaagattgtgcgcagggtgaacaatatgcagaccgatttattgaattatacaataaaaaaagagaattaatgtgtgatatgagtgatgagtctaatgaattgaaaacaataaaatcagagcttgttgtcgcaagggagatgggaacaattttaagttacttaccagaggaaatagataattatatctctaaaatgaatttattacttttaaaaaaaactaattaa

SEQ ID NO: 380191 - DNA, 1164 bp, Salmonella enterica
atgaataaaattttatttgtatgtgcgcgctttccttggcctctgcttaccggtgatgctcttcgggcatataatcaaataaaggtactttcagaaaaaaatgtagttgatgttttttcagtagaaaaaccgtttgcttcccagtgtgatataaataaatatcttaatgtaagttcttctggaaaaattacaaagttaaggaaaatatataatatattgtcgcatagcaaagatacagctttacaatgtgcaatgtattatgatcaacaatcttggcaagaacttcgtaagttaataattactaataaatataacattgttatttttcagctagttcgtttagaatatctaatacaaaaaatggtcaacttgagaaatgaactcaatctagacataaaaatttactgtgactttgttgatgcactatcactaaatatgagaaatcgggcaacaacagaaagtttttttatgaaaaaattatgtcagagtgagtctcaaaaattaacattaatagaaaataaaatatatgaaactattgatggcagtatgattatatccgaaagagacgccaactatataggtaaagattcatttgatatagtgccaaatggagtagctattccagaaagaagtgctaatctaattagaaattctgataaaaaaatcattaatttagctttttggggaaatatgagttattacccaaatgtcaaagcagcactttatcttgctgatttatacagtgatttagaaaaaggtaagtataaattacatattataggtgcacaacctaataaaaaaatacaagcacttaattcacgtgatggtattataattcatgggtatgttgaaaatttaaattctttgctatttaacatggacttggctgtattcccaatctttgacggatcaggtttgcagaataaagttcttgaagcgtttgctttgaatataccagtaatcacaactaatattgttttggattcaatgccaagattaaaacaatatgctatggcagctaataataaggaaggttttagatactatatagaatcatttgatgcctgcaaagatttcactgaacatgaaaatggtagtgctgtgcaagtattaagagaacattataattgggatttgataaatactataatagggtcaaaatga

SEQ ID NO: 380192 - DNA, 1026 bp, Salmonella enterica
atgaagaaggtattgatttttaatttctataagggcatattatatagaggtattcctatttattcctcgaatttaattatcgcattgaaacaaaaaggctgcatagttaatgaatggagttgtccaacaagtttggttaaattaccccgtttcattattgatcttctctttgtttttagtgaacaattcatcatgcctttaatgtgttattttggcaagtatgataaggtaatatatccatacaattcatgctcaatcttggctgcatttggtgataaaagccttttaattatacatgactttattcctaataaaaaagctaaggaaaaaattagtttatctgctctgtatataattcttacacaacgtatacacaccttttttaaaagagatgtcgcgttcgtttctgcaacaacaaaaagaatagcaagaaatgttgcttggttgaaagcatgtacattttatctttttccgaattcattctacatacttgaagaaaaactatcagaattaaattttcataaagatagtgattgtaattacacggttttaatttctggcaatggagaaaataaagaattctctaaagcaatggagttatggaaatcgtgtgaaaactgtaaatctcaaaaactaaaggttattggtttaggttcacaacaagaatgggcatacggtatcattaaaagacgtgaaatagaaaacgtgataatattgccaattctttcggatgatgaacttatttcagaaataaaaaatgcctgtttaatgtgggcacattctacacatgagggatttggtagaccggtcattgaaggaagaatatgtggaaaaaatgttttggcctcaaatatttctgcatttagagaacatagggacgattatgtgtttctctataataatcaatccttttgtgaaaaatacctgttagccttattatcaaataatacagataattcacattataaagttaaataccatattattttagaggaacaaatagaaaaatggctgcggaaacactaa

SEQ ID NO: 380193 - DNA, 516 bp, Salmonella enterica
atggtgcatctgcaccgacagtccttcccccggcttgacggtaatgcgcttcacctgatagcgctcgcccgcgtcgatggagtcgtatttgccccacgggcggtaaacctcgcggtgcatgtggtgctcatggcgtccgtcggccttgatcttctccaccacctttttcacgtcctgcaccgcgtggcgatcggcaatcaacacggcgtctttggtctgcaccaccaccagatctttcacgccgacggtggtcaccaggccggattcggcgtaaacgtagctgttttccgttttatggctgatgacgtcaccgtggtggacgtttccctccggggtgtgggcgctgatttcccacagcgaggaccacgagccgacatcgctccagcccgcgtccattggcatcaccaccgcatctgcagtatgctccattacggcgtaatctatagatacatctggacaaggataaaaatcatcctcattaatccgaacaaaattaagatcaatattaagatctga

SEQ ID NO: 380194 - DNA, 225 bp, Salmonella enterica
atgcttaataaggatattgcagtcggcgttctgaacacacaggcactcgcgagagccaaaattaacgctgagaactttaagaaagggattgataaaaagcttaaatacggcgagtcgaaatgtgccagttatgttaaaaaagcattgattgctggcggggcatctgtaaaaaattctgcgattgagtcagctaaaaactatggtccattgatcctacccgcgtaa

SEQ ID NO: 380195 - DNA, 471 bp, Salmonella enterica
atgttgaagagaatgtttctcgcttgttatttactttgtgtgccttatattgctttggcctcaggggagaggactttgtcacctgacgaagttgtaagtatgttctaccatgattacctggtcgcagaagagatgtctgacatggaatcagctaatgatctttctctgaaagcaatggctaaatatacaactgaacatcttagaaatttacgagataatgatgattcaggtgcagattattttgttaatgctcaagatgtatgtgaggaatggaaaaacaacattggtaccaaaacagtgtcagccaatgaccatatggcactggtgaatcttaaattaggttatggaaaaggtacgtctctgtatgttgttagtttagtaaaagccgggggcaaatggatgatcgattctgttaagccaacattcaaaggcagtatttattgcccccaacaggctgaaggagataactaa

SEQ ID NO: 380196 - DNA, 540 bp, Salmonella enterica
atgaaatcattaactcataaactccgcattgcatttgttttcctgtttttgctttcattttcaaatatttcactggctgatgaatcaaaaagccccgagagtattgtgcatgacttttattctgcatatcttcaggatcagtcaggtggtaacgaagcattagtcaaaacatatgtatctgatgatttagcaaaaagcatcaatgactccatcatgtgtaattatgattctgatgattcaatttccgaatcagagttagccaaaaaatgtgcgcagaagcacgagtgtaaacaggataaaggtaattatatctgcgattggtatgggatttgggttgagactgatgtcaactatttcacaaaatcacaagatgtgtttttatcgtggagaacaaatataaacacttttgatgttatacaaaaaggaagcgattcattggttgacgttgttttgggtaatggctctgaacctaaagcaaggtttaaagtgttgcttaaaaaagataatggtaactggaaaatcatcagcgtagcggaatga

SEQ ID NO: 380197 - DNA, 1212 bp, Salmonella enterica
gtgatatccggctcgctgcctgcccgggtggaaagcacacagaaaggcgacacctattcctggctcgatccgcagggccgctaccgtgtgaaactggactttgaccgcaacagtcctgaacagggttatgcctatttgtggctgcggctggcgaaaccctatgccggtgatacgtacggattccactcaccgcttcttgacggaacggaagtggctgtcgtttttgacggcggagacccggatcgtccctacatcgcttatgccctgcatgattcagagcatccggaccacgtcaccagtgacaaccatacgcgtaacgtgtggcgcacgccggcgaacaataagctgcggatggaggataagcgccaggaagagcatatcaagctcgcgacggaatacggcaaaacgcagctgaacatggggcacctggtcaacagccagcgtgaaaaacgcggcgccggttttgaactgcgtacggatgagcatggcgcagttcgtgcagcaaaaggtcttttcctgacagcagatgcgcaggccaaagcgcaggggccggtgcttgaaatggcaccagccgttaaccagattaatcaggccaacagccagatgcaggcgctgaacagcgccgccgaagcggccggagcgctggtatccgatatcagcacccaagtcaacctggtcagggacaggctgaaggatcttcagtcggcggtactgctggcgagcgccccgcagggcgtggcatttacctcaggtgaacaccttcagctcagcagcgcccgcaacacgatgattaatgcaggccagcaccttgatatcggagcgatgaagaatctgtccgtgagcgtggaaaaagccttgggaatgtttgtgcataaaggcggggcgaaggttgtcgccaaccagggagacatcgagatcctggctcagcacaataccatggcgcttctggcaaagcagcaggtgatgataaccagcagtgaggatgggatttccatcagcaccccggaaacactgacgcttaacggtggtgggtcatatctgcgcctgagtaagaacggaattgaacacggttcatccggtgatttcattatgaaaacatcaaactatctggtgccgggtaccggcgcaaaccttcccaatgaaacaccgaacttcagcctgacggatattactcaggaaagcaaaatcagcagcaaatcatttaatgattga

SEQ ID NO: 380198 - DNA, 2673 bp, Salmonella enterica
atggaacatcattcagcagtcctgctacgacgacttaacccttattgcgccagagcactggagggggcggcttctttatgtcaggcccgtgcgcatgcagaaatcacgcctgagcactggttgctgaaactgctggagcagggggaaggtgacctgaccgttcttgcccggcgctatgaatgggatatggatgccgtctggcagtcgctcctgagctggctggatgcacagcctcgttcagttcgcacacgcccggagctttctgcttccctccagaccttactgaaacagtcctggcttgccgccacgctcgcgggagatgagcagatccgcagcatacatttgctcacggccatgattgaaacgtcagggctgacacgctgcgatggcctctggcctttgatgacgctgaccaccagccagctggaaaggttacgtcccttgctggaagcccagtcggatgagcggcatgacgttacgctcagtgagcagcctggcaatgtcagcattattggccgggccgcaccgttacagcatgaagcacaacaccaggctgaaggcggaagtgcgcagcctgccgtttcacaggaagagtccgttctcaatcgctttacggtcgatgtgaccgcccgtgcccgggaaggaaagattgacccggtctttggacgcgataacgaaatccgtcagatggtggatattctctccagacgccgtaagaacaacccgatcctcgtgggtgaacccggcgtgggcaaaacggccctggttgaaggcctggcgctgcgtattgctgagggcaatgtgcccgaaagtcttaagcccatcatcgtcaggacactggatctgggtttgcttcaggcgggtgccggtgtaaagggtgaattcgaacagcgtctgaaaaatatcatcgacgccgtacagcacttcccggtgccggtgctgctgtttattgatgaggcacacaccattatcggggcgggtaatcaggcaggcggggcagatgcggctaacctgctgaaaccagcgctggctcgcggcgaactgcgcaccattgcggccaccacatggagtgaatacaagcagtatttcgaacgtgacgccgccctggagcgccgcttccagatggtcaaggttgatgagcccgatgatgatactgcctgcctgatgctgcgcggtctaaaatcccgctatgccgaacatcatggcgtacatattaccggcgaggccgtccgggcagcggtgacgctatcccgtcgttacctgaccggacgccagttgccagataaagccgtggacctgctggataccgcagcggcccgggtgcggatgagtctggacacgctgccagaacagcttacccggttgcaggctgaactgactgcgcttgccatggagcagcaggagttgctggaagatatttctctgggtaacgctgttgatgccagccgtctgcctcagatcgagcaactttcgctggagctcaatcagcagaaagctgcccttcagtcacaatatgagaccgaaaagcagctcaccgactcgctgaaagcctgccgtgaagacatcagccgccaggaggagctctccgcccttcagcacgagctttctcagattcagaataacagtccattgctgggtctggatgttgatgtccgcaccgttgcgaccgttatcgccgactggacaggggttcctctctcgtcgctgatgaaggatgagcagaccgaactgctgacgctggaagaacagctggcaacccgcgtagtcggtcagggtcccgcccttaatgccattgccgagcgaatgagggcgtcaaaaaccggcctgacgccggaaaacggaccgcagggggtgtttttactggtgggtccaagcggagtgggcaaaacagaaaccgcgcttgcgcttgctgacgttatgtatggtggtgagaaatcgctcattaccatcaacctgtctgaataccaggagccacacacggtctcgcagttgaaaggctcccctccgggctatgtaggatatggtcagggcggcattctcaccgaggcagtgcgcaaacggccttacagcgtggtgctgctcgatgaagtggagaaggcccatcgggatgtaatgaacctgttttatcaggtctttgaccggggctttatgcgggacggagaagggcgtgaaattgattttcgcaataccgtgatcctgatgacgtccaacctgggaagtgacccgctgatgcagttcctggaagagcaaccagaagccactgagagcgatctgcatgagttgttacgcccgatcctgcgcgagcatttccagccagcgctgctggcccgcttccagacggtgatataccggccgctggaaatggatgccatgcgcaccatcgtcggcatgaagctcgcacaggtgagtacgcgtctgcaacgccactacggcatttccacgcacattggcgaaagtcttttcgacacgctgacgaaggcgtgtttgctgacggataccggtgcccgcaacgtggacagcctgcttaatcagcagatcctgccggttctgagccagcagctattaagccatatggcggcaaaacaaaagccgtcctcgctacagctgacctgggatgatgaagagggcattgtgctggcgtttgatgcacaggtagaaggagagccgtcatga

SEQ ID NO: 380199 - DNA, 492 bp, Salmonella enterica
atggcaatcccagtttatctgtggctgaaagacgatggcggcgctgatatcaagggttccgtagatgtgaaagatcgcgaaggtagcatcgaagttgttgctcaggaacacaccctgtacatcccgaccgataacaatactggcaaactgaccggcacccgtattcacacgccgttcctgtttaccaaagaaatcgactcttccagcccgtacctctacaaagccgtgaccacgggccagaccctgaagtctgctgaattcaagtggtacaaaatcaacgacgcaggccaggaagttgagtatttcaacaccaaactggaaaacgtcaaactggtgaaagtcgcaccgaaaatgcacgacatcaaggatgccgccttcgagaagcataaccaccttgagcagatcgagctgcgctacgaaaaaatcacctggacctacaaagacggcaacatcattcattccgattcctggaacgaacgtaccactgcgtaa

SEQ ID NO: 380200 - DNA, 1680 bp, Salmonella enterica
atgcgtagatcagtcatcattccggttgtcctgcacgccctggtagccgttgccacgttgctgtggttgctgtggtatttcatcccgacgggcaacgtttttaacggcatgaccactctgctgatcctccttctggcaggctggtatgtttttaaaaactgtcggagcgaagagcccacatccgacgttaccctcccggctgctgaactgccattacccgacgcccggggccccgttgtactggtgtgtggtgacgggctggatgcgctgtttcaggaaggtcctcttcgtaaaacagcccagggatggtggctgcgggccggtgacgtcaaccggttaactgacgctgtccgcagtatccagacgcagttcccgcgccaggtcggtcagctctcggtgatgtaccgctgcctgccagaccatcatcaggatgaagccgttcttcgttccgcactgaaaacgctccgccagcagtgtaagcagattaaatccctgacgggtttcacactgccggttgtgttgagtgcagaattttccgggcctgaaacgccgtggataattgttcggggtgataagccgatcgtctgtccggttaatgattcgccgcaggcattcattgactggcagcaggcggaagacaatatcctggcactgtcagtcgtcagcgaggcattttcctttatccgtaatacgctggctgatgagctggaaaagcctgagcggttaacgcctcctgaacgagcattctccgtggcaatgcgcctgggtaccgtccttccctgtacagagtcagtctgggccgattggctatatacccgcacctgtttgcagttttcccgaaaaccagggcagtcagccccggcaagtttgtttccggatgcggttctgccgctgctggcaccttttgcatcgactgtacagggtgggcaacgtacccggcgcctggtgctgctgatatggctgtgcgccctgaccgcactaggtatttccgcgctcaataatcgtgacctcatccgtcaggtgagtgccgacttacagcgctggaatgctatcccgatgaatcactaccgtcctaaagcagaatcgctggctgctctgaaacaggatgcgctcctgcttgaacgctggcaacggcagggagaacctttacgttacagcctgggctattacccgggacaacgactgtggctggccttgcagcaggccattgatacctggacacctccaccagcacctgaaccaaaacttgtaccgaaaattgttcgtctcgacagcatgtcgctgtttgattccggtaagtccgtgctgaaaccgggctccaccaaaatgcttgtcaacgcgctggtcggaatcaaagccagaccaggctggctcatcgtggtcagcggccacacagacaataccggcagcgttcagctcaaccagaccctgtctttacaacgagctgaggccgtccgtaactggatgcgtgataccggggacgtaccggaaagttgctttgccgtgcagggttacggtgacagccgaccggttgcatcaaacgacacgcctgatggccgtgcgcataaccggcgtgtcgagatcagtctggtaccgcaggctgacgcctgccgtctgccaggcgcaaaacacgcgtcacaggatgtacgtgacgtttcaactcaagaaatggagaagtaa

SEQ ID NO: 380201 - DNA, 690 bp, Salmonella enterica
atgagacaggatattgatatcgaccagctgatggcggagacctggcttaccgtcactatgctgaagaaaggtgctgtcactctcaacggtaatgcactttacgacaagtgcgttaagcaggttgaaagcgtacgggaagcgctggagcgtgccggttatgacgacgccagtgtggagcatatttcctacgcacaatgtgccctgctggacgaaacggtgatgagccgtaagtctgaaaaaagcgaggaaggagaggagccgaaagttgatgaaggccaggtggcctggcgtaaagcgccgcttcaggcccgtttttttggctcacttcgggctggtgaagcactgtgggacaggattgcagaggttctgcgtcagccctcaccgaacccggccgttctgacgtgctatcaccgggtgatcgccctgggctttcagggactgtacagcctgaaagcagtcagccagtcgcagagggatgaggtggtcaaagccctctctgagcgcgtatctccgccagatacaggcctgtctctggttgttcaccggatggggaaacatcgctggagtctgatgcgctcagtctggttctggatagtgctcgccgtcattctcaccggcgttatctggtggggtggtcacctctggctccagtctcttttgtcagcacaaataccggagttgcatggctaa

SEQ ID NO: 380202 - DNA, 1350 bp, Salmonella enterica
atgaaaatttatcgtccactgtggaacgagggggctttactgtcccctcaacagttccagcagcaggctgaatgggaatcttttcgctgtgccggtgcatcagcgctggcatccccattcccctggggcgtggaaaagattgagtttaatgacagtcttctgtcgtccggtctgattcagattacgcagttacgtctctggctggaagatggatcgctgattgatgcgcaaagaagcgatctgcctccggcgccacgtgagttagatgccagccagctggctggccgtgatgcggtaacagtcgttatcgcactgcctcacatgcagccaggtgttgccaacgtggaacaggaaggcgttagtccagaccggccgctccgttatcgtgaagaatgggtgactttgcaggatgcctttggctctgaagaagaatccatggctgttgcccggtttaatttcaccatccggtttgctcatgaaagtaatgattcctggaaagtctgcccggtagcaaggcttatccgggatggacaaaatgcgtggcgacaggatccgtcttttattcctccggtggcatcttttggggcaagtccggtccttcgcgaacgtctggtgctgctcaatcgccagcttcgctcccgacgccagcgactgatgacaatgcgtcgtgaaagtaacgaaagactcgccgattttgccgtcgccgatgtatcccttttctggttgctgaatgcgctgaattcccacgccagggtgctgacggaatacgaacgttttccttcccgtccgccagaacaggtgtgggcggagctcgctcgtcttgcaggcagtatgctgactttttctctggaccatgatcttgacgccataccgggctatgaccacgaggaaccggccaacgcatttcctccgctgtttgacctgataacgggtttgctggaagcaagtctgccatcccgggtcattgctctggaaatgtcccgaccggacggacagacctggaaagccaacctccacgatatccgcctgcgagaagaggccgatctttatctctctgtgcgctcggatatcccggcctggcaggtcgccgagaaattcccggcactctgtcaggcgggctcacctgatgatgtccgcgagatctatggtgcggcactcaaggggatccctttgatcccggtgagcagggtcccggctgcgttgcctgtacgcatggaaaaccagtacttcgcacttgatatggaaagccccgctgcgcatgaaatgcaggagcagggggtgtgtatgttctatgtgcctgagttacttggtgccctggaacttgaactgtttgcggtattgcgctcatga

SEQ ID NO: 380203 - DNA, 498 bp, Salmonella enterica
atggcagattccagcttccagaatgaagtgccaaaagcacgtgtcaacatccagcttgacctgcacacgggttccgcccaaaagaaagtagagttgcccttaaaacttctcgcggtgggaaacttcagcaacggcaaagaaaccctcccgctttctgaacgcagtaagttaaatatttccaaaaacaactttaatagcgttctgtccgagcttaacccagaggtcagcattgatgttgctaacaccctgagaggtgatggttctgaagaaaatatcaaactcagtttttctgaaatgaaagatttcgagcctgaagcaatagcaaagcaaattcctcaacttcgtgccatgttagccatgcgtaatctccttcgagacctcaagtcaaacctcctggataatgccgagtttcgcagatctcttgaaaccatactgaaagacccggctctgagcgaagaattaagacaagaactgaatgcccttgcacctgccgaataa

SEQ ID NO: 380204 - DNA, 1485 bp, Salmonella enterica
atgaacaacaagctgacttcgacggaactccagtcccgcctgctacagggcaatttcgatcgaggaagatcgcccgatgagcgatttgccgatccgcagatggaaacctcgatgatcgtcacgctggagcagcttcgcccttacgatctcaacccccggttgatgcgcaaccccaactatgacgacatcaaggaatcgatccgtcgtcgcgggctggacacgccgccgccgatcacccgtcgtcccgatcaggagtggttcatcatcgccaacggcggcaatacccgcctgtcgatcctcaacgaactgtggcgcgaaacgcatgacgagcggttctggcgcattcagtgtctgtacaagccgtgggccggtacatccgatcaacccatgctgggcgaactgcgctgcctgatcggccatctggcggaaaacgatatgcacggcaaactcagcttcatcgagcgggcgctagggatcaacaaggcgcgggagctgtaccagcaggtggaagagtgtcagctttcgcaacgagagctggcagagcatctgaagaacgacggttatccgatcaaccagtcacacatcagccgaatggaacaggcgctggagtacctgctgccctgtatccccgaagtactgtacgccgggatgggccgctcgcaggtggaaaaactgctgtcattgcgggcggcatcattacatctctggcagcgtcattccgccgaagacgtcggttcctttgataatctcttttcctctgcgctgtcgctgttcaacgaccagcctgaagactttgccatcgagcgggtgcaggatgagctgctggggctgatgagccaggagctaaacgttgactacaacctgctgttgctggacgttgatccttctgagcaaaaacgccaggccgtgctcggccccacgccagagccgccgccctatattccaccggaagaccccgaaccgctcccgataacgcgcaggcgtaaacctgaaacagaggaagaggacgttggcgcgccagtccctctgcctgaaccagaagaagcgccatcgctcttgtgtgaagggaccgaacccgttacggatatctggcgcatcccacaactgtgggacaccacggagtccttacgatcggccagcgatcgtctggcgtgggatctggcggaacattacgccatcgatgatcgggtgatttctgacgccgacataaatggcattggcttccaggtgatgccattcgcatcagatcaccccatgttcacccggccacagtcacgcgcctgctgggcgctgctggcggcgctcaacgagatcccgctaacggaagatctggcctctgcactgacgcctgggctcttttttcaacgtgatgcagacggcttcttcttcagcgatgaatttcttattaaagcattccggctgatccgtattgtccgccgaatcaaagaattacagcaggaggcacaacatgctgccgacgattaa

SEQ ID NO: 380205 - DNA, 504 bp, Salmonella enterica
atgacagaatggaaagatcgcctgctgctcgacgattccgggatcctcaccccatccctgctacgcagtcgggccagacgatcgatgcgccagcatggaattccctcgctgatcgtggttgattatctgcaactgatgcgctgcggtggcgcggaaaatcgcaatcaggagatctcgacgatctcccgctcgctgaaagcgctggctaaggaactacactgcccggtgctggcactgtcgcagcttaaccgggcgctggaatcacgccttaacaagcgcccctgcaatgccgatctgcgcgattccggctctattgagcaggatgccgacgtgatcttattcctctatcgcgacgagctgtacgatcccaacacgctggatcggggcattgccgaagtgattgtcagcaaacagcgcaacggcccgacaggcacggtgcgaacccgatttatcagcgatcaaacccgcttcgaatcgctcagccaccagggagtggagtcatga

SEQ ID NO: 380206 - DNA, 2067 bp, Salmonella enterica
atggatacaaagctagaaccatattatttaagtgcagaaaatgcattgtctatagtttcaaaaaaattcaatataaaaatagacattaaagaggaagatataaatattcgatttaaaaaatatgatagaaataataccgatgactcaatacaaatgaagaattttttcttgtcattaggactttctttacaggatatattatttagtagtggcgaagatctattaaatgaacctatgcccattttactactgacccctgaaatgaaatggatggtatgtatcagcggtgggcaaaaaattaaattagtaaatgcccgaggggaactgtgttatgtagagatacctgatgagtatctaaaaaaactatctgcatttagtatacttcccttaaataaagttgttgatagtataagagtgaataatattattaaaaactctttatcaatgaacaaggttttttatacaaaatactttttttcatctttgtttatggcaatttttgcgctgacaattccagtttttagtaatttgttttatgacaagcttattccaagtgcttctgtttcgtctttatttggtgtcgctattattgtagctgtatttatcgtttttgagtttattctacgtacgtcaaaagatatttaccaatctataacggccagacaagatgacgtcgatattgatatctcgtttctcgaggcggtgctttatggtaaaaagaaaaacggtaaatcaatgtcatcagcatttgttctgtggaatgagtttcagaaggttaaacctattttattgaattctgtttttcaacgtatagccgatatcccaatttttttgatatttatcgctgttatttatgtgaatttaggatgggtagtggttgttcccattattgtttttataatctctattattttgtccattgttaaccatcattatatcaatgagttgatgaataaacaaaaagaaggccaaaagaacagaaatgttttcatatcggaagtgtttttatcaattaaaatgatccatacattaaacaaccagggcttactatttgattgggttaatacatcaaacgaacagtcatatcttaatcttaagataagaaagctaaatcttatctatcaatcaatattaggaagtatgtcatctattactcaaataacaataatgataatagctttttttatggtaattaaaggtgatattaccactggtgcaattgtatcttcagtgatcgtttctggacgtatctcggggatcacctccaacttttcatctacattaatctctatattgtcagcagaaaaaacgggtaaggacttgctttctttctttgatgaagatcaggaagaaaagacaccagcgttacagtcaatttcaaagtgtgagggtgagatttctattcgtggtgttagctatcaatatgatgcgcaatcttcagttattattaaccgtttatctatacatattccttccggacaacgagtggcaattataggtgattgtggtgcaggaaaaagttcattattgggactgttatctggttatctttcacctacagatggcgccattttgtatgatggttataatctagggcacctctcccagaattttttctcacaacatttaagtgtcgttacaacccatgatgttttgtttactgggactgttgaaagtaattttgcattaaaaccacaaaatgacaggggacgggtattgaaagctcttcatataacgaattgtggttttattttacagcatcctatgggtttaaaatttcctgtgaactttatggcgaaaaacctttcgtctggccagcaacagcaattattgttagcacgtagtttaagtagtgatgctagtgtgttcttgtgggatgagccaacatcaaattttgatgagaatacagaaaaacaaatttttgataacctggatgagtttattcaagggaaaacactcattatgattactcaccgtcgttatcttataaaatactttgatagagtattggtgatgaaagggggaaaagtgattcgggattgcactcctcaaaaattaatgggttaa

SEQ ID NO: 380207 - DNA, 276 bp, Salmonella enterica
atggaggcatgcgctggttcacattttatggcccgtcgcatttcaagtctcggacacgaagccagacttatctcaccacaatttgtacgctccttcgtaaaaactaacaaaaatgactatgtggatgccggggccatatgtgaagctgcttcacgaccgtctatgcgttttgttcagcctaaaaccgaaaatcaacaggcgatgcattgtataaaagaatgtcttacgacattccccgctaattttaaaacgaacggtgctgcgcaccgttcttaa

SEQ ID NO: 380208 - DNA, 2745 bp, Salmonella enterica
atgaatagcgaattgcactcttcacattacggttctggtgacattgttatcggtgataaaaaaataataatcccatccgaccttactcctgaaaatctgtttcctattgcagaagacatttttagaaagatccgtgaaagcgacataggctcagccaagacgattgtagatacaataaaaaaactccctgccacaactgtcgccaagcaatttgtagatgtattaaatacagcaatccttgcatcagaaaataccttaaccacaggatttaatgaactgtattctcttgctaaagaagatgatttatcagataaactaagagatgttgttttttcagttattatgctcatagagtttaaaaacaacaatcatgaaaatactatagctatatattcacagtctccaaagaaaaaatactcacacatgttttatcttcagtgccttgcaaatgaagatgaaataaatgatttttggaataagagccgatctctcattagtgaggatgaactttatgcaatatctataggtgccagtcgggtaaataatcaaatatcagcaaaaaattttgcaacactcttagttgaaagatcaccaacctccttaaactctattctgcttaattatattaccgtattggaatttgcagaaaaatatcataatatagatttactatccttggacaaagatgtttatgaacaaataatcaactgtattaatgatacgatctcattttcagaaaaatacccagacaacaaatggttgctttactctttaagcaatttagttatgctggtaaaagcaaatcatcatcaacttattcaaacaatagttaaatataaagataaaatatcatatattaactcatctgttactgactttgttgatatgttattccctatcgatgaagcagcaccactcactttacgggacattaaagaagatgatgagttaacatcagactccctgattgtattactagaagccgcagcaaaaggaacatatattaaggagaatataaaacagcttattctgaatactgacttaaaacaagatgactacattaaaaacttacctttcaactaccaactcatctcgttgaaagctaagttattattaaatgatagtaatgaaaatattaataaaaaaagaatcaaagaagatcttgctattttcattccattagcacataaagataaaacatctctttccggcaatggattggttaatttatgcgacgatctactctggttagatcttgctaaagagagctgtgaccttctcgaacctcgtttacctgaaaatttatggccgtcacgcttagttatagcctattttgagtcgctcatacgtgcagaaaagctaactacattaacagaatgcttgaataggatggataaggcactatgggatcactacacatggatgtttcaggccagaatatatattgcatataacagttggtctcaggcaataatagctctggaagaggctattaagaaagacgatgataattcacactcttggcttctattgattcgttgcaccttaagaactacgcctgctacagccattactattctagacagaataccgaaaactgttttcttatctttcgatacgtatacattatcattattgagacttatctcaaataaagtagatcctcatttttcagaaaaaatcgttacagagaaattcattagttcgccccaaaaatttgcatctatccttttacaaactcacttttcctctttagttggtcgtcaagctaaaaaagctaatgaattaaacacaaaatatccagataaagtcattagagctataaaaataagccgcaatggagaggaagaagagaaagttattgttgatataatccccgatcaagaacagggagccttattgtctgctcacactgaatatggggatcttctttctaatttgactgtaggtgaggaggctgtttatgttatggacagagtaaaaataatcgaagaattaaatccttaccatgttatattcagatatgcactaaatattgtatctgaaaaacctgacattaacttcccgataaaaaaaatagaagttccttcagatccagagttaatgtttcaaaaaataaaagatgaattttcacaatttgattatcaatcaagagaagaaaatattatcaattgccagaatgtacctttataccttaaagctaatgaacttgaaaaaggaaaacctgtaaaatctattttgcagctactaacctctcaggtagtcaataaatctttatcattacccgtaggtgaaatcgaacatccagaacaatttattacagacattcatggtatcatttatttcgctttaactcgagctgacataacattatgcaaaagtagatacaaactaataattacaaatgagactaaaacttgtattgataattggctaactgaagttgaaaatccttcttatctatctatcggtgtgcgcgatgatcatctttttaggataacagcagaagacattcaaagctcaacagcgtccattcgtaactccctgaataacttacttgactactgcgaagttcactcagttccggtagcggatacgccagatactttattaaacgtaaaagagtttttagacacatctgtctattctacaatgaaatatgttctattcacaaaaacgccatattttattattgatgactcctttagtgccctgataaagtcttttgatcttacccaccaatag

SEQ ID NO: 380209 - DNA, 327 bp, Salmonella enterica
atggattttctaacaagtaccattttatcgggattactttatgacggtttaaagactggcgcaacgattagcgcggtctggttaaaagatactctgagaaactggctgattgatgatcatactgcacaaataatgacggataaaatcactcaactaggcataaatgatgatctaagtggaaaagcaataaaaaccagaattgataacgatcctgagttattgaaactattaatggaaattaaaactgcaccgcagaccattaaccatactagtacccatcatggtagcggcgatatcgtgcatggcaataaaatcatcaacaactaa

SEQ ID NO: 380210 - DNA, 387 bp, Salmonella enterica
atggagataatgctctggcgtgatggcccgtttcgtaccgctacgggatgcgccggacaaccccagcgaacgattgcttatccggtcaccgccagccagttttgcgcgtccggtctgtttcaggatgcagcgcaccgccgccatctcgttttgcagggaacgcttcgtgatgccctgcgccagtcgttcacgaacatatccctcaatatgtctcgccttaagctgctccacccggcggatctgcacattctgcgccagcaccagtcgttcacaaaaccgctgcgccagcctgatacggtcgtgaaccgtcttatggctgccacccgcctgctgtgccagccgcttcatttcctgctccagtattcccatatattccccttttcatga

SEQ ID NO: 380211 - DNA, 489 bp, Salmonella enterica
atgcgtggttttatttttggattatctttgttgatttcttctttttatgcgctagctaaaactgacatagtacaagggccttttaagttagatgctaatgatagtgtttatattaagaaggaggataatcctaactatccattggctctttatttcgaaactaatggtaataatatcagggtggagtcttatgaggtcgatggcagtgaacctcatgtggaaacggttttttttactaaagtaaataataaaaaaaatgtaattgtattaatttcatgggagctgcgacaccctgcggagaaaataaatgggattgcgtatcaggtttatggttataactatttttctaatggtctttctataaatacttctgtaaaagaagaccagaatcttaatggtcttaatggagagtttaatggtgaaaagttacattttaaatataaaaatgcagcagaaatcaagacgtatctacaatcccattataaataa

SEQ ID NO: 380212 - DNA, 2388 bp, Salmonella enterica
atgaaaatcagttacccgctcagggacaccagcggcaaagaatttcgctcactggaagatgttatgcggcttatcgacggggaagcgcacgggacgtggctgctgggtgcgaacggcctatggcatggcgggatccatatcagtgatatttctaatcccttttcagccctgaaccctgatgcgatcaataccggggaacctgtgccgctccagtttatggcagacggtattattgtggcgtaccggttaaacaatgaatatctgaccgctccgtactgtggacaacagctgcgttacagcagcagctttgtgctggtgaaatcgcagtgcaaacccgacccgcaaaaggaaaagagctggctggagttttacagcctgtatatgcatctggcgccggtcgctgattacccgaaatctccctgctataaagtcagggacggtcacagtggcatacggttacgccagtataaaaacgggcaacacgggttaccggaaggggagccggacaagggggaagccgggacatatcccgctccagcgaaaacggaaaagagcctgaaggcaggcgaccgttttgtatcctcccggacggggcgtttttacgtcacgaagaatggcaaagccaccctgacaacctttggcctggtccgtttactgaaagagaatattccgggcaatgaacagtactgggtaactctggatccggagttgatggagccggatggtgaaattcaggggctgatgccggaatggatgctaaaggcaaaacaaaaaggtgcttatgattccgtggaactgacggaaggaacggaagaatggaaggtcagctccggaacgcccgtcgggtttatgggatgtacggaatccccgggtgaggggaataaacttgtggacagggaatggtttgtccatctggaggtgctgagtacggacagcagaatgcccggatttttagccaatccggagtgtgttaagggtgaaaaaaggtcagtgctggcacccaagggaaaagccctgtttaccctgcaggatgcggcgggacaaccggtatttaccccgacatcggcgaggctgagcgcgcagtgcctgctctcccgggagtcagcaacgcctgtcacggatgaagagcaaaaatggtggtataaaatcaacgggagtggctggttatcccaaaatgatgttgatgaagttaaccagtacgatttagagaaactcgggtttcaggcgctggaggagagtagcggcggcgatgtgatgaacagcccgtatgagagctggatcccccagacgtttgggacgataagccggatcgcagaacagggcgcggggtatcagtacggtctggtgccgcagttttatcgtgacctgatggcggagatggacagcaaccgtgacgggaaagtgacggcagaggaaatcaggcaggcgctggcagtgcgagatccgctggtgaagaatgtggtcaaccgactggttgtcaaacatcacagcgagtggtgtggtggccgttcgacggggcgctgggaagggttttataaggatctggattcgattgaagtgaaatactgtgagaaatggcaggcagacctggagtggatgagcaaggtgccgccgcttgataaggatgaggcggtgtggcattttcatccagtgttatttttgaatgaattagtatctgcaaaatttattacattggaaatggttcttgctgcaaatctaaacgaaaataaaattcaatgtgaaagagttctgccttatctcaataaatatgcaaaagcctataagatggaagataaaaaagaaattgcgcatttcctttctcaagttgggcatgaaagtggttttagtataacagaagaaaatctaaattatagtgctaaagggatgcgaagaatttttgggtgcattaaaggcccagcacaatataataaaaatactgatgattgtgacttgggacgtttaagagataagctctggactcaggagaatttgtatgcgcatagcccgaaaaatctggctaattatgtttatgccagtcgcatgggtaacgatagagaatcttctggagatggttataaatacagaggtcgagggatgattcaactgaccggtaaaaatggttacagattttttactaataaacataatgaaatgaatccggatgataagagagattttgtcgaacaacctgatctagttataagtgatattgaatatggtgtagagtcagcgttttccttttgggtaagtaagggactaaacaaaactgccagagcattgagtgtgcaagaagtcacacaaatagttaatggtgggcagaatggttactctgatcgcctacagaggtttaatgctgtggctccattattaagagtcgataaggagtga

SEQ ID NO: 380213 - DNA, 1686 bp, Salmonella enterica
atgagtgacagcgggcaggagagcatctgggatattcagactgcctacaatgtggtgagcggaagtgtcgccacccgtgactacaactaccgcgaagcgctgaaacctcaggacagcactgaaagcatttttagcaaagaagggatcaccgccggagaaacgtaccattatgcggaacccttcctgactgaaggtgatactgaaagcacagagaccggagcatacttcgcccgtctgcgtcacgaacgcattctgaatgcgcaatatcacgtcagcgggcattccttcagccctcatctggctccgggtcaggtactggaaacggacggaacgcttcccgataccgtcagggaaggcatcgtcatcaccacggtgcgcaccagcggttcgcgcaaaagtagctttacgctgacgtttgaggggatcccctacagtgaaaccgtctgttatcgtccggcactgctcaatcgtccggtgatatccggctcgctgcctgcccgggtggaaagcacacagaaaggcgacacctattcctggctcgatccgcagggccgctaccgtgtgaaactggactttgaccgcaacagtcctgaacagggttatgcgtatctgtggctgcggctggcgaaaccctatgccggtgatacgtacggattccactcaccgcttcttgacggaacggaagtggctgtcgtttttgacggcggagacccggatcgtccctacatcgcttatgccctgcatgattcagagcatccggaccacgtcaccagtgacaaccatacgcgtaacgtgtggcgcacgccggcgaacaataagctgcggatggaggataagcgccaggaagagcatatcaagctcgcgacggaatacggcaaaacgcagctgaacatggggcacctggtcaacagccagcgtgaaaaacgcggcgccggttttgaactgcgtacggatgagcatggcgcagtacgtgcggcaaaaggcctcttcctgacagcagatgcgcaggccaaagagcaggggccggtgcttgaaatggccccagccatcaaccagattaaccaggccaacagccagatgcaggcgctgaacagtgccgcagaagcggccggtgcactggtatccgatatcaacacccagataagcctcgtaaccgacaaaatcaaggatctccagtctgccgtactgctgggcagcgctccgcaggggatagcattcacctcaggggaacaccttcagctcagcagcacccggaataccatgatcaatgcaggtcagcatctggatatcggtgcgatgaagaatctgtcgttaacggtagaaaaagcgctgggattgtttgtgcataaagacggcgcaaagctggtcgctaaccagggagacattgagatccaggctcagcacaacacgatggcgcttctggcaaagcagcaggtgatgataaccagcagtgaggatgggatttccatcagcaccccggaaacgctgacgcttaacggtggtgggtcatatctgcgcctgagtaagaacggaattgaacatggctcagagggaatgatggtgatgaaagtggcgaactatctggttccccgtaccggggcatcattgaaaggtgtcacggagacgttcaggaaaaccacactggaactggtatcaccgccgcggcgcggacggttttcacgataa

SEQ ID NO: 380214 - DNA, 450 bp, Salmonella enterica
atggaccgtaaatccccatctttatatgaaattcttactggcaactttacaggggaccttccccttgaagctgtaaacgaagaagacccggtcattttatccgtgctggataacatccagagtattttgaacgcccgggccgggacccaatcccatctcccagattatggtttgccggatatgaccaaaatcctgcaaggcatgcccgggaccgcccacgagctgatcgatacgctggccggtgttctgctcaagtatgaaccccgtttgcagtcccttaatgtaaccttactcgaacagcaagtgcccggggagttgcgctacgccatcgatgcggaactaagaggtatcgggcttgtacggtatgggaccgagtttatgtctgagggtaaagtgatgatcaggcacttgaaacaacaacagcatctggaaaaccataagtttatctaa

SEQ ID NO: 380215 - DNA, 378 bp, Salmonella enterica
atgcaagaaaataaaaacattataacaaaactgatgatagccttcctttggtgcatcaccgtcctggtagtacaccattttggttacgaatggtatatggcatattttacaccaaggaataggggggtaggacttgggtttgtaatgttctatatgaaatatgttatcattcctattacatttctgtctgcatttataaaaccaaagcactcttcagtaatctttggcttggttactatcttcatgctttattcatggtatgaaaccaatcctctcagggttatattaatgcttatctcctgttcggcaggatatgtattagtgtttttattgaagaatgtgcaggaaaaaagcagaataaaccgttctaaagcataa

SEQ ID NO: 380216 - DNA, 399 bp, Salmonella enterica
gtgcatagaatcattaaactgctcctgaaaatggcactttggagtcttatatcattatctctcatccttttttctataaagatactggcttatataaaagccacacctagtgaaaaaatgtggaatgaaaaaaacacttgctatgccattacttacattcctaactacaagccttttggcggggtgggacgggtattgcgtcttttttcaaatcaatcatttttcgtcgtctatgacaaaactggagaaaaaataaaaagttcagcttggtatttttgggaatatcagttctctgatttagttgcacctgaatggtcaggcatagattttctttatccttcggataatggtttttcaggctggactttacctgaatgcaagaaaataaaaacattataa

SEQ ID NO: 380217 - DNA, 990 bp, Salmonella enterica
atggctaatgtgaaagttaaatccaaacttactgacaaaaatgagagcaaagaaatcattccagtaaagatattcaaaataacggatatctctgatgtgatggataaaaaaggttggaaaatcgcagctggttttatgagaaaatggttcaatgacccgtattatgaaatgagtaagcaggagaagcttaacaaagtcgacatgcacagcattaataaacaacacatagttgatgacctgccatttgattggctttataccgcatcgactagggtgtcaccaataatcaataatgttgtaaaaaatatttcagaggttcgtgaatataatgaaaccctgggtaaattaaagggggtggctaatcaactttcaaatggtttgatagccatgattggccgtttggaacatttagggcttgttgatagaaaatcaaaagccatgaaatcggcctttcttgattatagtgagatgcccgcaatcgaacttgatagaacaagtcaatttaattacttcccgattggtgatacattatgggagaaggcaaccgatgaacttgatgatgtatatggagcgcttggttcctttattgtaaaaattgcattcctgaatctaaacataacacaggataagactggattttatagaatagaaataaatgaacttggtctttatgtgagagacacttacgaattcatgaacgacggagatgaccaacctcttggttactggggctgggataatgttgttaaaccgggtataataagtgaattatttgaaagtgcaaaaattactgaagatggaaaggattactttcgagtgacaaacggttcctttgttcaatacagagaaaaatgtcataaagaggggaaaaacgttactggtgatttctttgtgtattccacagtaaaaagaatcaaagtggacatcaccattcatcttaatgatattgacattgaagagtacgtaacgaggacgaacaaacgtgcatag

SEQ ID NO: 380218 - DNA, 330 bp, Salmonella enterica
atggatgcggcggtcagcgtacgtaatgatgcggtcaccaccggagagtattaccgttatgccgcgccttaccgtgaggcgggtgatgacagcagcccggagccggaaaccgaatccggggcgttttatgcccggcttcaccatgagcgggagctgaatgatagaactcaagaaccaatatcaaatattagatatgaattgacctctcctacaggttcggtccttaaaggagtttcatgcgagaagggcctcacgagttttataagccattcaaaagaagctgatatcgagttaaccattttaaaacaagattcattatatatagggtag

SEQ ID NO: 380219 - DNA, 180 bp, Salmonella enterica
atgaattattttctaaaatctggcggaatctgccctgagcgcatgtacagagcaacattatcgaaagtgatcatggttgacttacaaaaaatacatttcgcgccaaacgggttttgctcagtaacatcgaatgtcgatgctctgtattgcgaaccatggcaacatggacatctgaagtga

SEQ ID NO: 380220 - DNA, 483 bp, Salmonella enterica
atgcatataagctacaaggattgtattgcattggcaaattcagatgatgaaaaacatgtcactttagtgactaaaatatttcaaatacattctaatccatttaataattttactaagttatgttcattttttactcatgccatttctttaccattatttttagtttatatcaaccataataagggaagaagacttttatccctagacaacgctattattgcattatttaatacttgttgccaaggtattgttaatgcttctgataaacgtaccgcagaggaacgcttagtagcatttaccaagcttattattgatgaccatatataccctcaagggtttatttcatttatcttttcaattttcagctcatttgcacagggccattttcttgatattaactatatgaacctgctaataagtgacgttacaacaacagaaccacccgaggtcacctcaactataataaacgaagcctctaattaa

SEQ ID NO: 380221 - DNA, 912 bp, Salmonella enterica
gtgtttggggacggctttacggacgaggtaaacgccgaactgacctcaattaagattgaagccattttagatgctttcattgaacaatggccgcgcgttgacctaccggaccactggagcagtgatagtcctaaagaagaaaaagcctaccgctttttgactgatttaatttggtcaattgaatcagatattcccgataatgcaatacctgtgctgggacgccttcttaatgatcctcgtttcaacactttgcataaggagttacaaagtatacacgccgctcagctcagaaaaaaagcgctcagagattttgagccaccgacgccagacgagatagttcaacatctggattgtgattcagtggttactgttgaaggcctgcgccagttagttcttcaggagctttatgatttccagaaagcgattgatggcggggagtttaactcggcagatcgcttctatgagaaaaatgaacgccttgatgaggtaaaatccacggaaatcattgctgagcgcctcaatttaagactcgaacctcagggtatatcgataacgcctgaacatcagttaaaagaccaaaacaggagtgacttcacggcatctaagttaattagcggaaaaagacgactgctggttacagaagtcaaaggccagtggcacagagagttatattctgccgcttcagcccaactctatgatcgttattccatccacccggatgccgaacagcagggtatctttcttgtcatgtggtttggagaaagcgataccgttgcgggccgcaagaaccacggtattaaaactgcccaagaacttaaaatcagtattgaagcagtgttaccgattgatctccgtggtttaattgatgttttcgttttagatgtttcacggcacggaggccaccaacattag

SEQ ID NO: 380222 - DNA, 861 bp, Salmonella enterica
atggttgacagcacccgtgagttagctattctatcaacttatttaattaataacattatgcaaacggatagcgatattgcattatccgtactaacaagctcatttgctggcacacgaagcccactattattccctgaacttatagagatatcgaagagtacactattaaatcatatatataagaataaagctcaagacttaactatatgtgaacccaataaatatcctattgaaaatagtgtttcagagaatcttagcgaagatgatcttactgatgcggaaaacattcctaatattttagtaagcattagcagcgaaaaagattcatttattactgagttgagcaaaaattttcactcaaatatagtaaggatgaatcaaaaaatagaatttttacaagaagaatctaatattttgtggtggttagttggcgagtattcaaacttaatgaatgaacattatagttctgtagaaaaacctatagcggcaataacaactgcgctagagttatctgaactaacaatatcatctcttggacctgcatcttcctcacaattattatataaagttttgaatgtttcaaaaaaatcaagaaaagcaaaattcaaatttaatgagtatattgaaaatataccaaccttattatttgaaagatttgctatagatccggtgattgaacagtacaatttcatgttccctgtatacacagcattaaaaaaatactacgagatcggtaatgaacttgcatggtgtaaagcattcagaacagcaacaggtttatctgatgacattgagttatcgcctattgacttgtcgacccaattatatagagaaagccttttgctaaaatgtttcaaataa

SEQ ID NO: 380223 - DNA, 1080 bp, Salmonella enterica
atgagcgactcaaattgctttaatcctgattgccagataagtactactggtagttgtgccgaaaatcatccatcaaaagaagcatgtccaaattataataatgaaaataatacaaatatagatattgacatagattatgacgatgaccgagaagaaggttctgatgagtctaatacacatgatggaatagctaacacaagtattgatattaatataaaagtttatagtggagacccgttaacagaaactgaagcaagcgatattttaagagaacgacctgcaaaaataattgcgttaatgggtgacagtggaagtgggaagtcaacattcatacaagctttatatgaattattccaacgaggaacattgggcgattttctattttcttctagtaaaacattacttggctttgacaaaagatctttttactctagattatcttcaggacaaaacacaccatcaacgcctagaacatctatatcagatgggttaagatatttccatcttgttttaaaacatagaaatgatttgtcaaacagtatagatatacttctatcagacagagctggcgaaaaatataagcaatctagaaatttgccttctcttgccagcgatctccacgaattatatatagcagataaaatatttatacttatggatggcgaaaaaataaccaacaaagaaaatagaacatctgcgtccaatgtagtacgacagaatatcagactaatatctgacaacatccctgttaatacatctaataacattaagatattgataactaaatttgatataattaatacccatcctaacaaggatgatattctcgattacctatctaaatataaagaaagacttagtactgagtttactgcaaagaacataactctagaattttattatatatcatcaagagatccttcaggccaaatgccgttggcttatggtttagataagctaattacagaatggcctgaagataacatatacacaaagtataatactattctcgataactcaatacagacatcaagggaaatagataattttatatataaactacaaattgagggggtgtga

SEQ ID NO: 380224 - DNA, 846 bp, Salmonella enterica
atgaacgatattaatatatctgttttaggatttccagcatccggtaaaacaacatttcttgcagctttatggcattttattgaatcgaatgaaataccatgtacattaaaattaggtaaatttaacctcgatcacactcatttaaataatattgtagagtgttggagccaaggcaaagaagttgtaagaacaactattacatccggtaaagaggtagttttaaatcttgagaactctgtaacaggggaagagataagaataaaattagctgatttatctggcgaaatgtttgaagagcaaataaagacaagattaattacggatgattatattgagagttataaaagttcagatggaattcttcttttcattaacgcaaataagatatgtgacgatgtttcatttcatgatgtatctgatgagttaagagatacattacaaaataaagaatccaaaatatctacatggacgcacagaaatatccctttgcaagttaaaatcattgaacttttacaaatactaacgtctcgtccattcaataataatagaagaaaaattgctataatcatatctgcttgggacatagttcaaccacgtgagatacaaccagagtattggttacaaaatgaaatgccaatgctatatcaacatcttttcactaatccttctctttactacccaaaatattatggcatttcggcacaaggctgcgatctctcattacaagaagaacgagaaaacatcctcgacttaccctttgccagcgaaagaataatatgtgcttgtgataatgtctcccatcatgatattactgctcctttagtatggttagggtctaatgattaa

SEQ ID NO: 380225 - DNA, 177 bp, Salmonella enterica
atgtttaagaatgtagatacgcgtgtagacgcaggcagagtttgtgaagaggccgagaatccaagtccagctaaagatgaacctgatttattgacagaggaagatttgttgtcggttttcgacctggctgagatgacgaaattcaatcatgtggtctgtaaatcttttagcgactga

SEQ ID NO: 380226 - DNA, 264 bp, Salmonella enterica
atgcttcaaataatccgtaaaggcgacaaaaccactcacggtggttccgtcctgaccgcttccgaaacgatgaaattcggcggtatcggcgttgcccgcaaaggcgacaaagtgtcatgcccggtatcggggcatggcccgacaaccattgtagaaggcaatcctgattaccttgctcatggtatcccggttgcgtttcacggtcacaaatgcgcctgtggttgcacattgatcagttcatttgccgcagcaaaggttgcctga

SEQ ID NO: 380227 - DNA, 624 bp, Salmonella enterica
atgaaaagattactattcattctaattgcagtatgctcgtttcattcttatgccagttgtgatgagtcatggaaaaaagctgattacgaacaaaatattcactcatttaaagttctcaataaaacttttttccattcaactccagatgataacgctaagaatagtaaacttttcccgattaataatgacacctttgttggatttttgaaatccggagaatttgagttcgggaggtataccagaaaagatggcagcattgtcatgggatggctcaaagacgatgctctttcagaaacaaaggaaacaaaaaaatcagatcttaatgatggtgacctaagcatctactccccaaatgggaacattgaattaagcgcttcattcgaagacttttacaaagcatggggtaagtgtggtaaaaatgaacaactagaaacgggtgcctggagcaactatatatctaaaggcgatgaaacatacaaatatttcgataactactggaaaggattttccattcgctcttcaaatataaattacaaacaacataacaatgattttgatttgtaccgaattaccaccatcactataaaaaataaaaatacatcaccagcaggggcatctatatag

SEQ ID NO: 380228 - DNA, 801 bp, Salmonella enterica
atgaaattgttcaatataagcatatcctttttattgttacttttggcatgcaactcatttgcggcctatacttgcacagcaagtgccgtagattacccttacaatgggcaccaagagccagcgccaaaaaaggtacagtcaaatagtcgggtttatttttactcttcacctaaaagtgattgtaaaacagatatcttcataattaatggcgataatcttcttaaatatagagagagcaatggctattcttacgtaaactacgtcaataaaagaggcgtcatcattgatgggtgggtgaagaatgagggtattacccaaaatgataagcagaataatgagttaacatatagcgatttttcttggaaggtaaatggcaaagaagttaatcttttaggaaaagcaactccagagttaaataaatgggcaaaagactcaggtttgaaaataccagatccagataatcatggctttaataagggatttgaatcctggacgttaaccatccagaatgaaatggtaacaatatctcaagcaaatgacatcattgagaaaagattaggatttaacgatacatatgtgtcaggaattacatttttagatggcaaatatgaaacatcaagaggcgtaaaagtaggggatgactggaatgtggtcacttcaaaatatgggactaatagtagactggactcggaaaatgagtgtagattctatcaatatttcgatatgaaactcagtttctgccttgactcatctaacaaagtgcagtcaattttatttgaaaactacccaataaaaccttag

SEQ ID NO: 380229 - DNA, 825 bp, Salmonella enterica
atggcatggatgcaggatgttacaactgagaaactgggtccttcattgtggcatatgcatccaattatgtttttaggtgcaatcaagtcaaaacaaagatacataataaactacacgcattactccaatagtcttgaagaggcaattaataaacagatggctattcctgggagcgccgcccctaaatggggcatatcacgaaacgcgacgcgaagtgaagtcatacagcatataaccccttcaaatttgacaagtaacaaaaacatgcttcaattccttgaaattgataaaccaatggaagtttccctcgaaaagttagaagcatttttgaaaggaaaaggttctcttgagggtactgccgcagcgtttattcaggcggctaaagattttggaataaacgaatgctaccttgctgctcacgcggcaatagaaacaggaaatggtcagagcgttcttggtaggggggcttctttttcttataaccaccagccgtctcgaactgtttataacatgtatggcattgctgccgtggatggtaatgcagttggtggtggcaaagcaactgcctattctcgtggttggttctctcccgagttagcaattagaggcggagcggaatggatttcgcaaaaattcgttcatcaaaagcaaaacactctctataaaatgcgctggaatccactcagtcccgcgtcgcatcaatatgctacatctgtaaattggccggagcatatcgcagcaagaatgtatgagatttgtggcgactaccatgagttcgataaagaactagtttttgaggttccagtttacgaagggaccaattaa

SEQ ID NO: 380230 - DNA, 228 bp, Salmonella enterica
atgccattagttgaagatttaatcaaagatggattcttcgatgaacaatttcggatcttgaatgacagtggtaagcctatggctaatgttccgtattttatctccaccgaaagtggggaaacatttaaaggtgtcaccgacaatcaaggtctatgcaagcgcgtgttttcaaaggaagcatccaaacttaccgtatggctaggtgtccaggctctggagagatggtag

SEQ ID NO: 380231 - DNA, 315 bp, Salmonella enterica
atggccattcaccacacgacctcgcaaaaaattcaacatgtccgtgactggcgtgccagcggccttacccgccttcagtattgccggctccacggcctttcttcccgtgatttccatgaatggcttcgcctgccgaatgacggtgtacccgtcactgagaccccggtactgcttcctgtctgtattcagccgccccccgccccctcgcctgccagtggcgttatcacgctgcatcttcccggcggcctgcgtatcgactgcctgcccgcgcaactttctgaggtgctcaggagcgtaaaacatgctgaagcctga

SEQ ID NO: 380232 - DNA, 336 bp, Salmonella enterica
atgctgaagcctgagcggctcttcctcgtccgccaccctgtcgatatgcgctgcggtactgatgtcctcacgcagtatgtgcagaacgctctcagcatgacctggcacgacggcgctgcctttctcttcaccaataaaaatcgcacccgcatcaaactgctgcggtgggataaacacggcgtctggctttgttcccgccgtctgcatcagggccgatttacctggccgcgtgacggcgatatcgcctggtcgctcacgccggagcagtttgactggctcatcaccggtatcgactggcagaaaatgtccggtcacgacctgacaaaatggacatga

SEQ ID NO: 380233 - DNA, 1524 bp, Salmonella enterica
atgcccggtatggatatctccgtgctcctctccacaaacgaccccgacacgctgcgtaagctggcgttatctcttctggaagaaaacagcgaaaaagaccgtcagatccgtctgctgaaggaagccctgatgctcgcccgccagcagcgctttggccgccaggccgaagccttcagcgggttacagcgttctctgttcgaagaggatgccgatgcggatatcgcttctgccgaaacgcagcttgcgcgcctgctgccagaagccggggaggaaaaatcccgtcctgcgcgtaaatcgctgccagagcacctgccgcgcgaagaaaccgttatcgcccctgaatcctgtacctgcccggactgcggccagccgctgcgccatatccgtgatgaaatcagcgagcggctggactacgttcctgcgaagttcgtggtaaagcgttacgtccgtcctcaatatggctgcgacggctgccagcgcgtggtctcaggccgtctgcccgtgcagattatcccgaagggcatcccggagccgggtctggtggctcaggtgctggtcagcaagttctgcgaccgccagccgctgtatcaccagcagcaggtgttcacccgggccggagtggaactgcctgtgagcacgctggccggatgggtgggtgcggcctgcgcccggctgatgccgctggcggagttactgcgcacagaactgttaagccgcccggtacttcatgcggatgaaacgccgctgcaaatcctggacacgaagaaaggcgggaaagtacagaacggctacctgtgggcgtatgtcagcggcgaaaccaccggcgacggcattgtctgcttcgactgccagccggggcgggcggcgcgttatcccgaatcgtggctggcgggctggagcggtacgcttgtcacggatggctacgcggtgtatcagacgctgaaaaacggcggcaacatcattaatgcaggttgttgggcgcacgcgcggcgtggcttcgcagcgttatataaggtgaaccgcgatcctcatgccggaatggcgctgaagatgatccacgagctgtacagcctcgagaaaaagatccgcagcaggcccgcggaaaaacgccggcagtggcgacagcggtatgcgaaaccgcaactggataccctgtgggcctggctgacggcgcaggcgcagaaatgcgcgccgggttcggcgctgcataaggcgataaaatatgcgctgtctcacaaaacggaactgagccggttcgtggatgacggggcgctgccgctggacaataaccggtgcgagcgtgcgatccggcaggtagtgatggggcggaatacgtggctgttcgccggatcgttgcaggcagggcatcgtgcggcggccatgatgagcctgttggaaacggcgcggctgaacggggtggagccgtatggctggctgaaatcggtgctggaacgtctgccggaatggccggaagagcggctgcatgagttacttcccttcgcgaaaaatcccctgaataactga

SEQ ID NO: 380234 - DNA, 468 bp, Salmonella enterica
atggtaaagcccggcgacctgacgctggtgacgttatcacccctgttgccgctgtcatccgcgctgtccagcgtgatgaccggcaccgacagggtggtgtcaacggtaaaatccagcgtccgcgtcgccgtgttgcccgccgcatccgtcgcctccaccgtcagcgtgtgtttaccctcacccacgtcgtccggccagttgtattcccagaccccggcggcattcttcgtcgcgttcacccagttcgtatcgccgtccagactcagacgaaccgtattcacatcccccggtgtcgtcacccggaactccgggcgcagggcgttggtcaggttatcgccggaaattccgtggtcgttcaccagctcgatgccatcaatggccgtctgcgtgtccaccgttaccgtcagcggcgcagactggcgaatgttccccgcctcgtcttccacttttaccgtcagcgtgtactga

SEQ ID NO: 380235 - DNA, 132 bp, Salmonella enterica
atgaaaatggtaattttaaaagggataagaggaatagaaaaattggtatccgtcgctgggcgcaaaatgagggtgtatcctattattcaggcgatggaatcaataaagcacatattagtccagatgaaatga

SEQ ID NO: 380236 - DNA, 534 bp, Salmonella enterica
atgaaaataagtagactgatatcgctgatttttgccgtatatgcaatatctgtacatgctgaagataatactaccgcgaaattcaccagttacccagcggctgtaagtcacgggccctttgctactaaattgttacctaatgacctatatgaacatcacactgatgaatggaagaaatacatccagtcggagctggtaaaacccgtaaacttcgcaggccattatcgaattgcatttactaaaaatggtaccttccctcaggattgtggtaatgatggatgggtatgtggttggattatagataaaaaaacgggggaaataatatccgaattgcctgaatttaatggtaatactaaatactttccaagtatcgacaacggaacaccatctcctgatttatttgacgctgagtattatctaaatagcagtatgatatggatatctggacaaaataaacctgcaaataataagcggggcgagataaagtgttcaatcacggcttataaccttaaagataaaaaattcaagaaatag

SEQ ID NO: 380237 - DNA, 1194 bp, Salmonella enterica
gtgaaggttgcaactcccgctgggagtggctgggtcgatgtctgtgctgataatataatgaagtacagtgatgccgaactgcctgactgggctggatggtctttgattgatgacgatacatccagcgacagccaatgtaattcggaagtaatcaaaaaattacaggaggcaaaaccaaacgatgatgcaaaagtccctctgcttacacaggtaatttgcaagtttccatttgagtgggatttttcaacattcgacgcgcgattttcatgggtaaaaaacaagactgatcaattacctgagccattgactgatgatgattacaatgaattcagggaacatataaagtcgttatgcttctttgataaattacctgctgaggtccaaaaggaactcagcggtcagatctggcattttgaaccccgaatattcatcatgcagatacaaaaggcagaacgtcgtttaatttttaaaagtatcaaaaaaattaatgacttcactgttgatgatatgcgacatggagatatgaccaaagagcagatactcgctcaggggaaaatgaataaaattgatatttggggacgggagttaaagattaattttttcaattttgacaatacggttgatgagcattttggtaatatggctagcatggcaaagtggactgcctggaagggggaatatcccccacttattcaaattatgatcgagagattcaaaaataatgagggtggggttttaaagcataaccttttgaataaagcattttctgaacatgtaaccacagtggaatgtgttaataaaattaaagaatttattcggttattgcttgctgataatggttacaagagtttttcaattaatgatttaaatgtgttgaatgaaaaaataagaaataacgtcaagcttccaaaattcgataattatgactggtttaacggtttggggatagctattcatgatacttattccacgcagatttatctcgattatatagacgttagcgacagtaagtttaaagccgaaatttctttccaaatacaggatcattttggtttggatgttgctgatgttaatggaaaaggatttgaaaacttgccatggttttgctcatggtttattcttcagcgttatacggagtatggatatatgccattcattaacgaagctaatttcacaatggttattgaaggatga

SEQ ID NO: 380238 - DNA, 474 bp, Salmonella enterica
atgaaatttaaatatatttttttgactgtgtttgtcagtattttaataatcacaatttattttttcttaaagactgaaaaaatatctgggatatatcaaaatgtactctatgaggaacgctggggtagtgaatgtaaatcaacaatcgtcttggtagataatcctcctgtcatgaaatcaaatcttgtaaaattatgggaaagagagaaggaaagaattttgagccagtggatgcctcttaataagaaatgtgattatatcctttttgtaaataacaaaccagaaccgcctcatgatagtgaggaaataaaatactggatgggggattatcaattatgtcttaaaggtgaaatcgataattgtatttctaaagatgaaagattgttttatataggccttgataagcagatatatggcgatagattggctggggagttaggtaataaaacaatttatctaagttttgtcgactga

SEQ ID NO: 380239 - DNA, 501 bp, Salmonella enterica
atggccctgaatgacagtaaaatccgctctgcaaaaactctcgataaatcttacaagctcatcgactcgcaaggtctgtacctggcggtatccaccagcggcgcaaagctgtggtatttccgctatcgcttcgatggcaaagaaaaccgtcttgcctttggcgcttacccgctggtgacgctggcggaagcccgtgaaaagcgcgatgcggcgcgtaaactactggcatccggtatctgcccctctcagcttcgcaaaacggataacgacgccgttgatggatcccgcacgtttaagtttatcgccaccgcatggcacaccagttgccttaagctctggtcggaaggtcacgccgataaaatcctcacctgccttaagcgctatgtctttcccgatatcggcgcgatggacattgcgaagatcgaaacccgccatctggcgcagcttgttaaggctattgacgataagggcgtgcatgacgttgccgggcgggagcgttag

SEQ ID NO: 380240 - DNA, 627 bp, Salmonella enterica
atgcgtcacgcggtgcagcagggcgtgactaaatataatcccgcttacgatctggatggtgtcgtaaccccaacggtgacccaacaccaccccgccctgcccctgaaacgcctgccggagctgctggagaagatgaatggctacaagggtcgagaactgacccggctggcgctggaattaaatctgcatgtctttttacgctccagcgagttacgcctcgcccgctgggatgagttcaacctgaaagcccgtatctggacggtgccagctaaacgggaagcggtgaagaacgtgcgcttttccgagcgtggcgcaaagatgaaggatgagcatctggtgccactatcagcgcaggcggtcaccctgctggagcagattaaggacatcaccggagagtcggtatttgtctttgcgggggcgcactcgatgaacaaaccgatgatcgaaaacaccatcaacaaggcgctgcgggtgattggctatgacaccaggaccgaagtctgtgggcatggcttccgcacgatggcctgtagcgccctgaacgagtccggactgtggtcaaaggacgccatcgagcgccagatgagccacaaggagcgcaacggcgtgcgggcggcgtgtacataa

SEQ ID NO: 380241 - DNA, 819 bp, Salmonella enterica
atgctccccgctggtcagcgccatcccttccggggcggacatcagcagcgcctcactgagcggcttcagcctctgctcaaacatccgtatctggctgtccacatccgccttcagcgcctgcgcctgctctgccgcgatttccagctgctgcagttgctggttgagcctgtcgatttcctccagcgcggcgctcatgtccagcacctcaccctgtgccttcgcctgcgcgtcggcactgacaaacagcccctttccggcgcgtatcgtgccccactcatcggtgcgcagttcagcgcccgtgccacgacgctgcccctgcgcgtccaccaggtgcccgctgttgagctgcgtcttgccgtactccgtggcgagtttgatgtgctcttccccgcgcctgtcttccatcctcagcttgttgttcgccggggtgcgcagcacgttacgggtgtggttgtcgcgggtgacgtggtccgggtgctccgagtcgtgcagcgcatacgcgatgtacggcaggtcaatatcaccgttgctgtacgcaatcgccacttcggtcccgtcggtgagcggcgtatgccagcccagcgtgtcaccggcataaggcttcgccatccgcagccacaggtaaccgtaaccggattccgtcccctcccggtcgaagtccagtttcacccgatagcgcccctgctcgtccaggtgggcgtaggtatcatttttttcgcgactttcgatccgggccggaagcgtacccgggatgaccgggcgagggatctctaccggacggaagcagtaacgttcggtgtaaggctggccccagactga

SEQ ID NO: 380242 - DNA, 885 bp, Salmonella enterica
atgaacatcccggaatatgcgcggcggctgatagtgaagcatgacagcgactggcacagtacccgcgaagatacacgctggtcatcggtatttacggtcagggatgaaagtcctgttgtgaagatggccaacgggggatttctggatgtgacgcgctggatggataaggtgccgccgttcgccagtcagcggtcagtatggcattttcatccgcttgagtttttatatgtaatgtcaggtaatgatgatatggatatcaaatggttaactgtacctaaaggtcagttaacatttgatgctgaggggaatgataataacgacagtccttatttcagtcgtcatattcattggcctggaggtgtttcagggataactattggacgaggatatgatctaggacagcaaaatgatccatcatcagattttgactttattgaattgagtcaaccgttaaataattggcttgtagagtcaaagggtatgtctggtttggatgctaaaaatcgttataaatcagcggatagcagcatcagtgattatgagataacaagaaaacagcaatacgatctttttgttattacttataacaggttagaagctgatgtaaaaagcatatgtcaaaagcctaatactattagggtgtatcatccgaatccaaataccactccagaacaagcatggaatgatattccagaaaaaataaaagaggtgcttgtagatcttagataccgtggggattatacaccccatgctcgttctttaattcagcggcatgcatattctggtgatttgtcttcattcggtcaggtattgtcaaatagaactcaatggtcaaatgttccacaagatagatttttaaggagagttaggttttatgaaaattaa

SEQ ID NO: 380243 - DNA, 429 bp, Salmonella enterica
atgcgttacttgcaccaccacccggctcgcatcgacatcaatattaccgaggataaagcctggctttttcgcgttggtgagattatcgccagtaataccactgtcatccttatggtccagtgcaatggtcggcgttgtcagcgtggtatcaatggtaaattccagcatccgcgtgatggtgttgcctgccttgtcggtcgcctccacctgcagggtgtatttcccatccttcacgtcatctggccaggtataatcccagatccctgccgcgccctgcgttgccttaacccatgtcgcgccaccgtcgatgctcaggcgtaccgaattcacatcttccggcaccgttacacggaactgcgggtggatgtcattggtcatattatcgccaacgacgccgctgtcattaatcagctcaaccttaccaattga

SEQ ID NO: 380244 - DNA, 1194 bp, Salmonella enterica
atgcctgctcgccaggtatgtcagaattttttccgcgatgcgttagcaccgcttcacaaataccgacaaaatgctttgctggctgccaccatcgtactcatcaatggcgcatctctgacgctgacaagtatcgggcgttatttacccggtacggctcaggtcaaaaataaaatcaaacgcgttgaccgactgcgcggtaatgaatctcttcaccgcaatatcccactgattttcagaaatattattgccatgctgacgagccagttatctctttgtgtcattgctgttgactggaatggatatccatctcaggagcatcacgtgctccgcgccagcctgatttgcgacggacgttcgatacccttgctgaggtggatagttccttcggagaaacagcaaaatgcaaaggtacagcaggcctttcttaatactcttgccgaagcggtaaacccagaagcaagagtgatcatcgtcactgatgcagggttccagaatgcctggttccggcacatagaatcactcggatgggattttatcgggcgcataaggggaaatatccagatgcggcttaaggccaaaggcgaatactggttcagacgtcaggaattgcaggccagtagcaaaccggaatatctggggcctgggacgcttgcccgctcagaatatgcgcggtgcgatggtcatttttatttgcataaaaaagagccgaaaggccggaaaaataaatgctcccgttgcggtatagccagaccatcacagccaaaagatgccatcccggcggcaaaagaaccgtggttaatattcagtagcactgatgactttaagccgcgagtgatcatgaagttatacagccgccgaatgcagattgagcagcacttcagggatgaaaaaagtgagcgctttgggttcggtctgcgggccagttacagccgttcggcaggaagagtgctggcgctgagactgctggcaacgctgagcacaatagtcctgtggcttgtaggttatcacgctgaaaataaaggattacatttaaggtatcaggccaacagcgtcaggacacggcgggttatcacgtatctgacgttagcggagaatgtcttacgacagtccccgctaattttaaaacgaacggtgctgcgcaccgttctgaatcacctcgccagaacctaccagaatatggtgttggtttattag

SEQ ID NO: 380245 - DNA, 1026 bp, Salmonella enterica
atgcatatttcccctcctgttttgttgccacgtcccatgaatggaagcttcagcgactgggttattcagtgcatgccggtcgatgttgcacgcagttaccccgtaaatcccgtgggggcatggcacgggggcatacatattcttcatacagatcattccagttctcaggcaaatcccatccgggcgattgctgaaggaactattgtttatgccaggtcaccgtccgaaaaaaaagataaaaaaccgctggcttataatggggcaaccgacgatgggtgcgtactgattcgacatcagatattaattggtgatgaacctgtcgagtttgttttctattcactgactatgcatatgaaacaggtgcgttctgatattctgtccagtattgggaagagtataaaacgcgagcaaattataggaacgtcaggtgtcgtggatggaaaaaatgcgttccacttccagatctgttgtgagcagaagatgctgaatgcgctgtgtggtagaattcatggtggagtaaatatttcttctccaggaaggcttaagcctgtatacggtgatgaatactactattttccagctggtactcctgtttatgatgatattcctaaaggctttgtgcgcaccccaatgacctttacagcggaaggtttatatattatcaacagtggcgtagacacaaaaacgtttcgaaaaaaaaatgatggcccctacgactacatctgcagcgttattatagcggttaattatatcagcgaagccgcaggggccgatcctctgaaaaaatccaaggagtacagccattgggtgaaggttgccactcccgctggaagtggctgggttgatgtctgtgctgataatataatgaagtacagtgatgccgaactgcctgactgggctggatggtctttgattgatgacgatacatccagcgacagccaatgtaattcgggagtaatcaaaaaattacaggaggcaaaaccaaacgatgatgcaaaagtccctctgcttacacaggcaatttga

SEQ ID NO: 380246 - DNA, 783 bp, Salmonella enterica
atgctgactgagctgctccacatcgtcctggtgcatccacgtatgtgggcggatttgaaagtatgttacgccgtttttatccgtaaacgggtatgtggcatcacgcggaataatttttccagcatcggcacgggtaatggcgctcatctgcttaaaggtactttcctcgtcctccccgtttcgcaggtacagcggccgtttcagcttcagcttaatgaactgtttgcccgttttgatgcccttcacgttggccaccacatccggcacatgctcgtcgaggctcagcagctcgatatgggctttatagtccgtggtaataatctgcggataattatcttcgtcggccagatcctgagcgccgaggaacccgaccggatcccctgctttcaccgtcactttcagcggggcggacggcactaccacatcatcaaacacgccgtgattcagtgcgtggtgcatccactcaggcaggcacacgtaacattccccgtccggctccagatattccgggcgcatcgagacccagaacagatcgcctgcggggttaccgtcctgaagacgctgcaccagggcgaacggctccggccgttgttccagcagaaacgatttttgttgcagcacggtcagcatttccccctgcatcagcgttctggcgtggccgtgtttatttgccagcacgtccggcacgatttcacggctgtcatcgtggcgggagtgtttgcgcatccgcaccccgtgacctttctgcgtgacccggtaaagcgggcgtttcgggaattctga

SEQ ID NO: 380247 - DNA, 873 bp, Salmonella enterica
atgcagatgaatgttcaattgcatcatgccgtatcggatattactggcgttaccggtctttcaatcgtcagagctattgtcagtggtgagcgcgatccttcagtattgatccagtatcgtgatgtcagatgtaaaaagacgccagaggttcttcaacaggcactgacagggaactggcagcctgaacatctttttgcacctgaacagtcggtggcatttttcgatttttaccaggaaaaaatccgtgagtgtgatgatcaaatcgaaacttcattattgcagctcagcaccggaactgaagagcctgaaggagtattgccctccgccagacatcgtacaaaacagcccaatcagctttcctttgatgtcagaccattactctggaaaattaccggagcagacctgacacagatacatgggtttggtccttatctggcactaaaattcgttgccgaatgcggtactgacatgaatcgctggccggatgcgagccattttacctcgtggctgtgtttgtccccggggaataagatctccggtggaaaagtactgtccccgaaaacacggcgttcatccagtcgaattgctgctgcactaagactggcagccacaacaattggccggagtgataccgcgctgggtgctttttatcgtcgattatcatcccgtatcgggaaagcaaaagcagtcacggcaacggcaagaaaactggcaatactgttctacaatgcccttaaatatggtcagaaatatgtcgatcctggcgcggattattatgaagagcgctaccgtaatcgcgtactcgacgggcttaaacgaagggcaaaatcactgggttactctctccagcaagatcctgagttatgcgtgtga

SEQ ID NO: 380248 - DNA, 276 bp, Salmonella enterica
gtggatgtcattggtcatattatcgccaacgacgccactgtcattaaccagttcgatcttattgatcgtgatgtcggtatcgactgtgaccgacagtggcgcagaatagcgaatattacccgcctcatcttccactttcactgtcagtgtatagcgaccatcaccccagacgttgtccggtgtgaaatgccagcggccatccgtgcctcgggttgccgtcaatacctccttgatgctgccatgctggatttctaccgtgacgaagcgcgcatctga

SEQ ID NO: 380249 - DNA, 384 bp, Salmonella enterica
gtgggtaagatcacatctcgtacctttgtgtgttgtgacaacaattctaaggtacaggcatattactcgctggcgtccagcgcagtgatggcaaacactgcccccggtcgctttcgtcgcaatatgcccgatccgatcccggttgtggtattgggacgtctggcagtggatcagtctctacatgggcagggggtaggccgggcgctgatgcgagatgccgggctgcgggtgattcaggtggcggagaccatcggcattcgcgggatgctggttcacgccctgtcggatgaagcgcgggagttttatctgaaagtggggtttgagccatcgccgatggatccgatgatgctgatggtgacgttgggggatttgattcatgcctga

SEQ ID NO: 380250 - DNA, 357 bp, Salmonella enterica
gtgggcaaaaaagcacagcaatactggctctggtatgcctgggacacaaaacatggcggtgtactggcttacacgtttggtccgcgaacggatgagacttgtcgcgaattactgacgcttcttgcccccttcagtatcggcatgatagctagcgatgactggggcagttatgtccgcgaggtaccaaaaggtaagcatctgaccgggaaaatatttactcaaagaattgagcgaaacaatctgacgttacggaccagaattaagcgacttgcccgcaaaacaatttgtttttcgcgctcagttgaactccatgaaaaggtcatcggcagctttattgagaaattcatgttctactaa

SEQ ID NO: 380251 - DNA, 273 bp, Salmonella enterica
atggctaccattgacgtttgttgcccgcgctgtcagtccaccctggtctaccgacacggccaaaattccagaggaactgaccgttttcgttgccgcgactgccatcgcgtctttcaactttcttacacctatgaagcccgcaaacccggcgttaaagagctgattgttgagatggcttttaacggtgctggtgtccgcgatacctcccggacactgaaaatcggcctcaacaccgtcattcgtacattaaaaaactctcgccacgaaaagtaa

SEQ ID NO: 380252 - DNA, 276 bp, Salmonella enterica; identical to SEQ ID NO: 380248

SEQ ID NO: 380253 - DNA, 147 bp, Salmonella enterica
atgttcttgaccgttgggagatggagtataaaaaagactatcccaattggacctctggtatttgggatggtgggtctgatgaagatagcgcaggggtggattgctatccgtcatattctagtactcaccgtaggaaaaatcctttaa

SEQ ID NO: 380254 - DNA, 276 bp, Salmonella enterica
atgggcctgcgctcgcaggaggcggtacggtgtccacagtcgttcagtaaatggaaacaggcgctggataacgcgatcggcattgcaggacagcgcaacggcaggctgattgaccgggccacgctgaaagaggcgatgcagttctggcgcagacaggcggaacgactcggcttaacgggacagaactcaccgcattcgctgcgttacgcctgggcgcagatactattcgctattatctggcgcagggattcagtgaacaggaggcgctggcgatga

SEQ ID NO: 380255 - DNA, 462 bp, Salmonella enterica
atggatggaaggcggttcagattgtttaacgtagccgatgattttaatcgggaagcgcaggcagtcgaagtggacttaaatatcccggcgcatcgcgtagtgcgcgttttggagcggctcagcgccgaaagaggctatccggcgtttatccgaagtgataatggaccggaacttaccgccgccgtcctgtcggagtgggccgagcagcatggagtcatactggattttattcaaccgggaaagccaatgcagaacggatttaacgaacagttcaataagacattacgaacagaaatactcgatatgtatctgttccgaacgcggtctgaagtccgagagttaacagaaaaccggcgaacggaatataacgaggaacgcccgcatagctcacctggcggcataccgtcggttacctatgcaaggcaaaaactggccggagactctaactggcagtggtactaa

SEQ ID NO: 380256 - DNA, 309 bp, Salmonella enterica
atgaaggtcgccagtgaaacgttgaaaagttctgaccggcgcggcgtcagcatccggtggaacggcgacaacgtggaattcagcgccaatatcaacgccagcagcatgaggatggataacagacattcgggaggattttttcatggaaatctccttgctcatttttcgatgaacgaaggaggggacgacggagaaatcaccttcctgaacgggaacaaagtcaccactgtcggatccgccacagtccctgaaccatgtttttttacggggtcataccaccaaaaggccgacggctgcttccttcgctaa

SEQ ID NO: 380257 - DNA, 468 bp, Salmonella enterica
gtgtcagataatctgtttaacgggcggcgttttcgggcgctgactgtagtggataattttagtcgggaatgcctggcgatccatgccggaaaatcgttaaaaggcgaggatgtggtcagaataatggaggcactgcgggtgctggataagcggctgccggtacgtatccagacggataacggcagcgagtttatctcaaaaagtctggataaatgggcgtatgaacacggcgtcacaatggacttctcgcgccccggaaagccgacagataacccgtttattgaatcatttaacggcagtctgcgggatgaatgcctgaacattcactggttcctgtcactggaagatgcgcaggaaaaactcgacaactggcgcagggaatacaatcatgagagaacgcattcatcattaaatgacatgactccggctgaatttatccgaagtctccggaaagacgaagatctctga

SEQ ID NO: 380258 - DNA, 123 bp, Salmonella enterica; identical to SEQ ID NO: 374846

SEQ ID NO: 380259 - DNA, 213 bp, Salmonella enterica
atgctcatccgtacgcagttcaaaaccggcgccgcgtttttcacgctggctgttgaccaggtgccccatgttcagctgcgttttgccgtattccgtcgcgagcttgatatgctcttcctggcgcttatcctccatccgcagcttattgttcgccggcgtgcgccacacgttacgcgtatggttgtcactggtgacgtggtccggatgctctga

SEQ ID NO: 380260 - DNA, 405 bp, Salmonella enterica
gtgcatcataatactctttctgatacgaataatggcttaaaaaaagtattattggggactgtatatactgatgcattaaaaaataaagaggatgaggttattttccttcattgtcttcaatcatttattaataaagaaaaaattgatttatatatcccacaccctcgatatgactcacatcagtttaatgatgtgttgaatattaaatctgaaatgatagctgaggacattattttagaatacctggaacaaggggtggcattagagctatatggatttaatagcacagtccagtataatttaaacaacatctcagccattaaaaattataaaataacaagtcccttactagaagatagttttaattatgggctaggcttcgattttagccgggtctcagtataa

SEQ ID NO: 380261 - DNA, 252 bp, Salmonella enterica; identical to SEQ ID NO: 375233

SEQ ID NO: 380262 - DNA, 636 bp, Salmonella enterica
atgacagtccatacattgaagcaatgccgcccggaccaggaagaaactgagtatttctggaagctgtttcatgcggcacaacgtaatgatgctcgcaggcacggtagtgaaatcagcattatcgccgatgagctatcccggacggatttagatcgtaaccaaaaactgttccttctccgctcctggcaagtgctggtagacgacaaaggtggattcggtcgctttatgggggcctttgatacttacgtctacaacatgcaagacccggatgatgactgcgtagcgtggaaacctgaactggcccaaatactgaacgacggcaattgtttcgacgtactgcttgatgcgtaccaggaagcccagcagcgcatagcaggactggaacgcgccaacgccgcacaggacgatcacatcaatcagcagcaggacagaatagacgtgctggagaggcgcaacgcggagttggggaaatacgcaggggaactggagtcccgcaccgtcaccgtgaaaatgtacgacgattttcagttgtgccactacggaactaccgaggactacgcgaaaggctacatcgacagccagaacaatttcaccaaatggctgtccgccgctggcatcaaggttaagggggaatga

SEQ ID NO: 380263 - DNA, 555 bp, Salmonella enterica
atgaccactattaccagagaacagttaatcgaaaaacttcagaacaggattgcggtaactgccaattatcccggcgtcgaagaagcgcaacttgatgcagctattttcaaaatcgcgctggcatcactggaagcaaaaccaataggtgcattccacatcgcagatcagcaggtagatgggacaacggattatatcaagaatggggagtggcccatcgataatggtgttattgatgtctacgccgccccgccagcgccggtagacaacgaatttatccctaaaaatctggacaaggcgttaggggttgttggcgtagcgttacctgaatcaaaggaagagtttaatttccagacggagcgctggatacagcgtctcattgaccgggttattcgttatgccgacgaattcaaagagcagccagtgccggtagtaccggaagaaaaaccaatgcctaactctcttagcatgtatgcggttgatgctgttgcagctattgcagaggtgagaggctggaacgcctgccgctccgccatgctcaacggaggtaaatcgtga

SEQ ID NO: 380264 - DNA, 525 bp, Salmonella enterica
atgctttttagaagcgttaaaagcaaaatatcattaagaaatattgtccagaacatttatggatttaaagccagcattgagaatgatatacgttattacgttacccggcgctgttttaaattaaaaggccttaggctggtgaaataccatttgaaggcctgtacgtatttagcggtgattccagataccagatttttcttggttaatgcgagctggcaatggctgatgactttctttgcttgcgctgtggcgatacgcaaggtatccagtatatcctttcagcaggagcgtgactttaaacagttcttcagtgacgtcgacgctcctggcataccatgcagagggtttcattcgcccattttcatcgaattcctgccaggcttttgcctccgaggactggttggggatggtgaacgtacgtatccactgacccagaatatgatgagtctggtttctttgaatgggctgcactacacgtttcccggtggggtaacgggcgtgggtcattattattcacatggatag

SEQ ID NO: 380265 - DNA, 372 bp, Salmonella enterica
atgaaacagacgatgcagcagagcagactgacgctgagaagtaaaaaaccggagcttgtggagcaggagctgtggggcgtgttactggcttataatctgatgagatatcagatgattaaaatggcaggacatctgaaagggtactggccgaaccatctgagcttctcagaatcatgcggaatggttatgagaatgctgatgacccttcagggcgcttcaccggggcggatcccggagctgatgcgtgctcttgaaagtatggggcagctagtaaaattaccgacaagaagggaaagggccttcccgagagtggcgaaggagaggccttggagataccccacagccccgaaaaagggccagtcagttgcttaa

SEQ ID NO: 380266 - DNA, 237 bp, Salmonella enterica
atggtcttcaaaaatgatttcaatggcgctgtaatcaacaataacggtatttttgcatcatcgactggcgatgtagctcaagaaaatactatgtctgtcgggtcgtttgactcgctcagagatgagctgacgaagattggtgtgagtgatgttgaagttgatgaattgcgcgaggcgattgaaaacagcgaacagccacttacagaaacaggatttagcccaagagtttccgaatag

SEQ ID NO: 380267 - DNA, 231 bp, Salmonella enterica
ttgtgcaccgccttaactcctgcagtcagctaccttgagcaccaacaggatcgcgaagataccacgcaattgattgaccgactggataaatggttgcaggaggaagggaatcttgacgcgctttacttctggtttcagcaatatgatctggctggctttaacccgaaccgctgcgaacatacagcgacgttaacaagcattcgtcgttctggatctgcctacttctcatga

SEQ ID NO: 380268 - DNA, 198 bp, Salmonella enterica
atgcccgtaacattagaacatgtatcttccagacctgtacagcagaagttaaatacaaaaggtatcaaaacttgggacaccatacagtatctttcagctttagatagagcgcataaggatactgtttttcatgagcaaatatctaatctacccgaagagtatattcatctggatgagatggccagagatgaaaaataa

SEQ ID NO: 380269 - DNA, 144 bp, Salmonella enterica
atgggaatactggagcgggaaatgaagcggttggcgcagcaggcgggcggcgcacataaaacggtcagtgaccgcatggcgcagggcatggataaacgcaccctgcaaaatgaaatggcgatgataagggttgttctgcggtag

SEQ ID NO: 380270 - DNA, 444 bp, Salmonella enterica
gtgaaactggctgacagcgaccggatcagcaaccgggcagtgggtatcagcggcgcatcgcgcaacggtacgcgccgggcaattacggacgggaagtatcaggcggtacaggaaagcgcccgcctgaaagatccggggctggcggcagcgctggagctggcaaggctgatgggcctgcgctcgcaggaggcggtacggtgtccacagtcgttcagtaaatggaaacaggcgctggataacgcgatcggcattgcaggacagcgcaacggcaggctgattgaccgggccacgctgaaagaggcgatgcagttctggcgcagacaggcggaacgactcggcttaacgggacagaactcaccgcattcgctgcgttacgcctgggcgcagatgctattcgctattatctggcgcagggattcagtgaacaggaggcgctggcgatga

SEQ ID NO: 380271 - DNA, 411 bp, Salmonella enterica
atgaaaaaatcctcccgaatgtctgttatccatcctcatgctgctggcgttgatattggcgctgaattccacgttgtcgccgttccaccggatgctgacgccgcgccggtcagaacttttcaacgtttcactggcgaccttcaccggatgtccgattggctcaaaacctgtcacattacgaccattgccatggagtccacaggcgtttactggttgcctgcttttgagatccctgaagctgcgggtttcaatgtgatccttgttaatgccagagacgcaaaaaatgttcccggtcgcaagactgatgtcaatgacgcacagtggctgcagaagctgcattcatttggccttctccgggccagtttcagacctgaacacgacatttccgtactcaggtcttatttgagataa

SEQ ID NO: 380272 - DNA, 300 bp, Salmonella enterica
atgaggggttgctataaaacaacaccgcctgatgacattgcgtttaccagacttacgctggcaaacgttgcgccaggccggatgagacgtttatgccctcatccggcgcgtcacttcgactatggcaaacctttagtcatttttttgcaggaacatgaccgccttatccgggaagtcagtgaacagcccgtcgacgcccgccttgttatacaggatgtcgtacaactgattgatgtctgtggcatagtccggcaattgatcggcacgcacagtgtaaggatgcactaccatctattctga

SEQ ID NO: 380273 - DNA, 183 bp, Salmonella enterica
atgaaaaccacactgaaaaaccttagcgtggcgttgatgttggcaggaatggccatcggaagctgtgccgtggcggctgaaaaagtcgttatcgcccaccgtggcgccagcggttatctgccggagcatacgctaccggcgaaagcgatggcgtatgcgcaaggggcagattatctggaatag

SEQ ID NO: 380274 - DNA, 1098 bp, Salmonella enterica
atgtcggactttttgccgttctcccgcccggcgatgggcacggaagagctcgcagccgttaagaccgaactggacccaggttggataagaacctgccctgaaaatcagggactggcagcggaattttgtcggctaacaggcaaccaatatgccgttgccgtaagttctgccacctccggtatgcatatcgctttgatggcgctgaacattggcgaaggcgacgaaatcattacgccgcgagcaaaagcaatcatccccttacattacgctgacgcgcctgccgatctggacgctattcacgctcttggcgattatggcattactgtgattgaagacgcggcgcacacgacaggaaccgggtacaaaggacaccacattggcgcccggggcaccgcgattttctccttccacgccattagaaacattacctgcgcagaagacggcatcgttgtcacggttaacccacaatttgcggataaactgcacagtatcaagtttcacggacttggcgttgatgcctgggatcatcatgtgtggcagactcattgcggccaccggagcattcgccagcttgaagaagatatcgcgcgcggcataacggcgcttcaggctattatcggaaaacctgtcacctgctcagccgcagccaggtggcgaggggatgggcgcattgttcgtgcgaaagaaccgttcaacttgcggtataacagcgattgtcgtagaaccgccttattccgtccgggattgattccgggtcaggcagggacgccgcaaatccccgtaaccttaccaacgtggaataagattatcggccccgccgttcaggcgcaggcgttcaatgcctggattatctcccacatgttgcaggacaaaggcacgccggtatacaccatccatgcggaagtcgaagacattgtccatcagccgctgtttgaaaatttgctcgttcgcgcacgcgacacggggatcaccttttgtcctctgggcgaactgctgccgatatcgccaggaattctgccgttggggcaaattgtacgtagacacatcccaggtcgtgacggttggctggagggccagcagacagtgagcgcctcatga

SEQ ID NO: 380275 - DNA, 219 bp, Salmonella enterica
atgaaaaaattcgattacaatggttttctttatgatgtgcagtttgggaattttttgaaagtatctcgcggagtttattgttatgataatgttttaataaaaagttatgatttattaaccagcaatactgggcaacttaagtatttttatgaaaatattagtatcttttatttgtacttttacaaggctgttattgaacggaaaaatgctaaaatgtag

SEQ ID NO: 380276 - DNA, 528 bp, Salmonella enterica
ttggcctggattgcgcagtcgccgattatcatcattagcggcgaacagctcagcagctatgaatatggtctgctacaggtgcccgtttttggcgcgctcattgccggtaatctggtgttggcgcgtttaacctcccgacgtacggttcgctcgctgatcgtgatgggcggctggcctatcgtcgcggggcttgtcatcgcggcggcggcgacggtggtttcatcccatgcttatttatggatgacggcgggattaagcgtatatgcttttggcattgggctggcgaatgccggactggtgcgtctgacgctcttttccagcgatatgagtaaaggaacggtctcggcggcgatgggaatgctacaaatgctgatttttaccgttggcattgaagtaagtaaacacgcctggttaagcggcggcaatggcctatttagcctgtttaatctggcaaacggtattctttggctactgctgatgctggtcttcttaaaagataagcggacggggaatttgcaaacagtctga

SEQ ID NO: 380277 - DNA, 147 bp, Salmonella enterica
atgtgtcataccaatgggattaaaataataaggaatgacacatatttcaattttcgatttgataaatcactatattcgagtcagacgttaattggaaagtatgtactggaggtgaaattaagtggcacactgaatttggccacctga

SEQ ID NO: 380278 - DNA, 333 bp, Salmonella enterica
atgaaaaagaccggctataccaaagaaccgatagcgtttgtactgaaacaggccgaaacttggccccctcgtcggggaagtctgcagacgaagcagcataatctgcgcgggaataagtgtgccagaggcaactgctatgatatctcctgcgcagaaaggtgctttcactcgctgagggtagaaggcctccacggagagcactttgccagccgcgaaataatgcgggtcacggtattcaacaattatatcggatgtaattacaatcgctggcgatgccagagtgcctgtggtgatcttagtccggaacagtttgaaaaccagaaccccgcttag

SEQ ID NO: 380279 - DNA, 447 bp, Salmonella enterica
atgctggcgatgacgctgcacagtatgcaggggacgccttatatctatcagggcgaagaaatcagcatgaccaacccgtgctttacccacatcaccgattatcgcgacgtggaaagccataacatgtttgccgcgctacgcgccgccgggcgcgatccctatgacctgctggccattctggccagtaaatcccgcgacaacagccgcaagccgatgcagtgggataacggtaaaaacgctggtttcacccagggcgaaccgtggataaacctgtgcaataattatgcgaatgttaatgtcgcggcggcattgagcgatgaaaactcggtgctctacacctatcaaaaactgatcgcgctgcgtaaaacacagcctgtactgatctggggcgattatcaggctctcctcccggatagcccatcgctatggtgttatcgccaccagtga

SEQ ID NO: 380280 - DNA, 129 bp, Salmonella enterica
atgagcagtcatttgaaaatggcgacggatttcaggcagaaatcgagcgagcaggcgaacgctaccgggcaactgctgaagcaagagttcgacaggctcgggacgtgtgtcagcgggtgcagagcttaa

SEQ ID NO: 380281 - DNA, 1158 bp, Salmonella enterica
atggtaatgaccggcgataacacgtgtgtcaccagcctcaggccgacgtttaaggccgtcgcatgcggaaagcagaagccctactggctggaactgcagtttgtggacgagaacaaccagccggtatccgggctgaaggtgcagctggaataccatccgctggcgaccgcggcggagctggcgctgtgggccaggggcggccatacccggtttgaccccacgcctcccccgaatccgccagccggcgtcactgacatccaggggctggtgcggttcgacgacctgtactggatagcggtagacgtgaaaacggacgggcagcagctggccgacatcatggagcagcgtccgctgggcctgcggcgcaacccgaacagccagccggtgagcggaaacgcctttcgccgggagacacggtacaaaacctggcgctcagacgtgcaggagaaagcggaggctgtcggctatcaccatcactatgtgaccatcggggaactgtgcgaccgtctgccggatatgccgggctgggacgcgccggagccgccggcgttccattttccgccggggaaggcgctgaaagggacggaaatcatgcgggatgcgctggagcagcgtcatgtgatagaaatctgtccgttccgggcgtgggtaatgccgctgcatgacacgaaagagtatgacctggcgaacgcactgaacctgggcattatggccgatctggcgtatgcagaggagtttttacccgacaaggacacccaccttatctcgtatttttttgagcagaaatgtcaggatctgtcctgtctcccgcagtttgcggagtttccgaattattttcatacgctggcggtggacgtgccgttccgggagcggtacctgaaaccgacgtatctgaacacggcccatccggggagggatgaaaatccggagggggactcgcggctgttcacggtggaatgcggagcgcatgtcctggtggcgtggtgcgggacggccagcgggctgaatgttgggacagatttttcttttgcgccgaagcgttgtcaggcagagctgagcgggatgggagacgtgcacggtggttttctggaggcttatcagctggctaaacggaagttcggggataagttaagtggtgtccaggaatcgttggcttaa

SEQ ID NO: 380282 - DNA, 453 bp, Salmonella enterica
ttgaattggttgcacaaatcattagatcacaaaactctatacctgtcttttttacccgcccattactggggatccctcagcgccatggcgggcttcagaaggcgcagaagaaagatggatgactacagcgccagtgatatgcgctgcagcgaccgttctgaaagccagctaaaagcacagtttcatctgacagacgtttccaccagggcgaacccttacactctgacaaaagtcacctcgttcaaccagccacaaccaatatttcacggctcccgtggagagggagaaatcatccggcagcagtgcgccgctattctctttgacgagctccgggcgttatccggcctctttgcgatgtccggcccttacaagccgctaataaagcagatgattccccatatacagaaagcaacggcgcaccgttcagatatatattgctggacagggcgttga

SEQ ID NO: 380283 - DNA, 312 bp, Salmonella enterica
atgcctggatgtataagtgcctgttcgtgcatttccagcccgactcctcccgagcctaaggaaccccctacgcctaagtggatagagttaaaaggttattgtgttacatgtactagtcaggaggatattcgtccacctaaagagggtgaaccaaataaaagaatgacacccagggatttattgctgttacgaggtctttttaaagagctggggataacacaaaatccctggcaagacacggcagtaaaatccactaactgtgggttgccatttttcccggtagattctggagaacgagaaaccgatgtttga

SEQ ID NO: 380284 - DNA, 564 bp, Salmonella enterica
atggtgaaacctgtcgagaaagtgcagaagatcttctatacgcctgactttcctgccagaagagaggtatttgaacacctgaaaacagcgttctcctgtactatggatacaagcaaaagttgtaatagctgtaacaaccaaagttgtattgaaaatgaggaattaatcccttattttctgctgttcctgcttaccgctttcctccgactcccggagagttatgagatcatcctaagctcggctcagataacgttaaaggagcgcgtttacaacattatatcctcctcaccaggtaggcagtggaaacttccggatattgccgataatatatttatgagtacatcaacgctcaaacgaaaacttgcagaagaaggtaccagctttagtgacatctacttatctgcgagaatgaatcaagcagcaaaacttttacgtataggcaaccataatgtcaattctgtagcattaaaatgtggttatgacagcacgtcctactttattcaatgtttcaaaaaatattttaaaactacgccatcaacgtttattaaaatggcgaatcactaa

SEQ ID NO: 380285 - DNA, 1476 bp, Salmonella enterica
atgctacattttaattctgttcctgtatctaataaaaaattcgtctttgatgatttcatactcaacatggacggttccctgctacgagcagataagaaagtaaatattccgccaaaagaatatgctgttctggtcatcctgctcgaagctgctggcgagattgttagtaaaaacaccttactggaccaggtatggggtgacgcggaagttaacgaagaatctcttacccgctgtatttatgccttacgacgtatcctgtcggaagataaagaacatcgttacattgaaacattgtatggacagggctatcggtttaatcgcccggtcgtggtggtctctccgccagcgccacagcctactactcatacattggcgattcttccttttcaaatgcaagatcagatccaatctgagagtctgcattactctatcgtgaagggattatctcagtacgcgccctttggcctgagcgtcctgccggtaaccattactaagaactgccgcagtgttaaggacattctggagctcatggatcaactgcgtcccgattattatatctccgggcagatgctccccgatggcaacgataatgttgtgcaaatcgagatcgttcgggttaaaggttataacctgctgcatcaggaaagcattaagttggtggaaaaccaacccgcttctctcttgcaaaacaaaattgcgaatcttttgctcagatgtatccccggactccgctgggacacaaaacaggttagcgaactaaattcgattgacagtaccatggtctatttacgaggtaagcatgagttaaatcaatatactccttacagcttacagcaagcgcttaaattgctgactcaatgcgttaatatgtctccaaacagcattgcgccttattgtgcgctggcggaatgctatcttagcatggcgcaaatgggaatttttgacaaacaaaacgccatgatcaaagctaaagaatatgcgattaaggcaacagaactggatcatagtaatccgcaagctttaggttttttgggattaattaatactattcattcagaatacatcgtcggaagtttactattcaaacaagctaatttactttctcccgtttctgcagatattaaatactattatggctggaatctcttcatggctggccaactggaggaggccttgcaaacaattaacgagtgtttaaaattggaaccaactcgtgcagcagcaggcatcactaaactgtggattacctattatcatgccggtattgatgatgctatacgtttaggagatgaattacgttcacaacatctgcaggataatccaatactattaagtatgcaggttatgtttctttcgcttaaaggtaaacatgaactggcacgaaaattagctaaagaaatatccaagcatgaaataacagggcttattgctgttaatcttctttatgctgaatacctgtctcttatacacatctga

SEQ ID NO: 380286 - DNA, 696 bp, Salmonella enterica
atgaaaatagggattatgcagccatatttttttccatatattggttattttcaactcgcaaatgccgttgataaatttgtaatttatgatgatattcagtattcaaagaatggatggattcagcggaatagattgctagttaatggccagtcatctacattcagtatttctttaaaaaaagattctgattatttagatatagtagaacgagagatttctgataattttgatagggcaaaactatgtcgtcaaataaaaggaggatataataaatcagcgcacttcaaagaaatatatcccattattgaaagaatagtaatgcatgacgataataacttatttcagtacataaaaaactcaattgatgagttgttcagtataatggatattaatgccaatattattgtgtcatcagaattaaatatatcaagagaatataaatcgcaggatcgtgtcatacagacatgtttagcattgaatggaaatgagtatattaatccaccgggtggagtagctttgtatgaaaatatagagtttgaacgcgcggggttgaaattaaaatttcttgaaccttcaatagaggcatataaacaatcaacagaatcatttgtatcacatctatcaattatcgatgtcttaatgtggaatggaattgataaaacacaaaaaatggtgcagaaatatggcttcatataa

SEQ ID NO: 380287 - DNA, 1074 bp, Salmonella enterica
atgattaaattaaattgtccaattgtaccgaatgtaaaaaaatacatatcactaattgaaaaaatcaatgagaatggttggtatacaaacttcggaccaatgcatgaagaattaacagatagattatcctcttatttaggcgtacagaatctattgctcgtctcaaatggtacattagcacttcagatagcatacgaaacattgggggtaaagagggcaattacaacgccatatagttttgttgcaacagcatccacattagcttggcaaaataaagaaatattatattccgatattgatgaaaataatggaaatatttcttttgagaaaactctttgtttattgaacgaaaatgaaaattatgacagtgttgttgcaactcatgtttttgggaacccatgtgaagttaataaatttaacctcattaataaaaaaataaatattatatatgatgcggctcatgcgtttggagttaaaattgatggtgaaagtgtattaaactatggggatgcaagtacaataagttttcatgcaaccaaagtatttcatactatagagggcgggggaattgtattcaagaaaaaagaacactttgacgaagctaaaagaatgataaattttggaattgaacttgataaaggaattaagtcgattggtattaatgcaaagttgaacgaatatcaggcagctgcagggcttgtcttcttggatgatattgatgaaattcttgaaagaagagtagaattatttgagctatatcgtagatgcctctacaatatcattgatatgcctaaatggttagatcaagcaagcttgaatggtgcatatatgccaattttttgtaagaatgaaaacgaattaatatctatgatgaataatctagaaaacaaagggatacaaacaagaagatatttttatccttcattgaataatgtgattaaggctaatcaagacagtaatactatggtttctgacgcgttagctaaacgttcattatgcctaccattacactattatatgactaaagaagaagtattagttgtagttgatgcagttaaaagtagtctatcttaa

SEQ ID NO: 380288 - DNA, 276 bp, Salmonella enterica
atgaagaattcaaaaatgaaaacgacctttaaactgtcgttcatgttattcgtggcgtggtttatctggggtgcatggttcgtccccctgtggctatggctaaataaaagcggattttccgccagtgaaataggctggttttatgcctgtaccttcattgcggcgatcctgtcgccgattcgggtcggctccgttaccgatcgttttttctcggcgcaaaaagtgctggcgctgccttttttactcaacgctttggtattaaaaagatgttattag

SEQ ID NO: 380289 - DNA, 528 bp, Salmonella enterica
atgaaacgttcaattattactgcttctgtattgtctgctgtatttatgagcgcaggggcttttgctgctgattatgattcaggcgttctgaatattaacggaaaagttgttggtactacctgccagtttgtggatacgaatacagctgaaattaggttgaatgaaattggcgcggataaattatcggctgtatctccgggcactatttatgatgcagtgactaaccaaactcaggtaccgttgaaaataaaatgtcagccgaatgtaacgccgcgtattaccttcgtttcaacgcaatttgatagcaataattttacattaaataatgggactgccaaaggtgtcggttttgcggtttactacggaaatacggatagtcagattgatccacagacaggggtgacattagagccaaataaagatggtgtctatgacctgacatttttagcacgttatgcgcgtttagcaggtgacgttgaaaaaggcgaggttagttcaaccctaaccttaacggtcgtcactgattaa

SEQ ID NO: 380290 - DNA, 600 bp, Salmonella enterica
atggatacgcgcatagaacgcgccggtttcggtttccggctcagggctggcgtcatcacccgcttcacgataaggggcggcgtagcggtagtgcgcgccggtcgtcacggcatcgcttcgcacgctgaccgtcgcatccatcggcgtggtggctgtccggtagttgtaattccgcgtggcgacggtgccggtggcaatgttgtgccaggttcgcacatcccagaccgattctgccgcgccgtcgaacagacccgatggctcgctgtacggcaggcgcacatcaaactggtagttaagctggctgtcggcaaaaatgtacgtatccagatcgcgcacatcgtctatcatcgtgcgccagtaaattcccacctcagacagaatgcgctgaatgaactgcaaatccgtttcccgccactgggtgataagttcacgtgccgggtaggtgcgctccagtctgaattcaaaatcaggaccttccaggccgtgtttacgcagcacctgctcaaccacctccggaacggactggttctgatataccgcacactgtcgggtgtatcccatgagcgccaggcgggaactgagcgtgagctggtagtgtga

SEQ ID NO: 380291 - DNA, 1200 bp, Salmonella enterica
atgcaatcttccgccagcgcattacttacttccgcagagcccttcctgacgatcggcgcgacgttaaatatggtgccgaacgtcttcggtttcgccaccggcggggctgtctggggcgcagcgctcaccgccagcggtatggtattgcagttcagcgctaacagcattcaggccacagcgcagcgcatccaggtatcggaagagtatcgccgccgcagcgaagaatggaaacagcaataccaacaggcgaacgccgagatgaccagcatcgacaggcaactggatgcgcttgcggtacgccagcaggcggcccagacctcgctacaacaggcacagaccgaacaggcaaatctgcaggccacgatgcagtacatttccagccgattcacgcaatcgtcgctatatagctggcttatcggtcaactggcggcgctttactaccaggcatacgacgcggtgttgtcgctgtgcctgagcgccgaagcgtgttggcagtatgaaatgggtgatttaaccagccgtttcatccaaaccaacgcctggaacgacagttaccacggtctgctggcgggcgaaacgctggagctaaacctgcagcagatggaatccgcctggctgtcacgcaaccaacgccggctggaactcaccaaaaccgtgtcgctgaaaaccctgcttggcgattctgacttcgcaaatctgatcgcgaccgggtcggttaacttcagacttgatgagagactgtttgacaatgattatcctggtcattatctgcgccagattaagtttgtcacgctctccctgccgacgttgcttggcccatggcaggacgttcgcgccacgctcacgcaaaccagcagcagtacgcttctgaaagcggatattgatggtgtgaattatctcaacgacaacaccaccggcaatgcggcgaacgtggtcacgaacctacgcgccagccagcagattgccatctcctctggcatgaacgacagcggactgttcgagctcagttttggcgacgaacgctacctgccattcgaaggcaccggcgcggtatctagttggcagttgagcttcccacgaccaaaaagcagtgagcagaaggccattctcgataacctgagcgacgtgattgtgcaggtgcattacaccgccgtctctggtggcagcgacttcgcaaacaccgttgaaaaaacactgtaa

SEQ ID NO: 380292 - DNA, 531 bp, Salmonella enterica
atgttttttggaaagcatcaggaaaaaggtcttgaattaatcagaaaaacgtccaaagaaaatatcagcaatctttgtaaagaactgcggctacttgataacgaagaaaaagcattcttagtttcaattttgacaatcaaacttcgtgccccgcatacttcggatgctaatctgataaatagaaatggcacttttgatatatactccaaaaaattattaattaacaataaaattccatttccggaaaggagtttaattgatgatatttatttttatctaatgacgattttttctctgccctggaagcaggagaagtgtataagaaggcctcgattcggttccagggttcacgctgttgatattcatcaacctgtatttgaacaggtttcctgtataaatctctacgatcagcatttcccagcatcaccagacgctggaaaacatatcgacggacttagtcaagaagcggttgaaatcttaaaaaagcaagacacatctaaatatgattttatttttttggaaaagatataa

SEQ ID NO: 380293 - DNA, 204 bp, Salmonella enterica
atgcggctatttaccgcgttatctggcgcagcgattttggaaagcggcgcgcttatagagaagaacgtggtggcgcaaatcgcctatgaaccggtatgtattgtctggaatggacaggccgccgggctggccagcggctggtggtgggatgaaattttagcaaatcatgctattgctgggggggatgcaaaatcgccgatttaa

SEQ ID NO: 380294 - DNA, 2868 bp, Salmonella enterica
atgagtctgacagatacgcttaagaacactctgtctgcgctaactgaaggcggactgaaccgctaccgcctggatattccgtcctgcacagcctcactggatgtggaagaatttaacggtagggagttcatgagtgagctctactactacgaagttatctttaccagcagcgatcaaaatatcagttcagcgcaactgctgactaagcctgccacgctgaccatgggaaccgggccactgatggggctgactgggcagaaagtggtgcatggtgtggtgacgcattttaagcgtatcagtggctcacgtgaccaagcgacgtaccagattattattgagccattcctgtctttgctgcgcaagcaattccgtactcaccgctttttcgttaataagtcagtaccggaagttgtcactgaagtattgcaggagcatggcctgaaaggttgggagtatgagttcatcctcaaagctgactatccgaagcgtgaacagattaaccagtacaaggaaaacgatctcgcgttcattgagcgtctgctggctgaagtggggattttctacttctttaccctgcaacccgacacccagactgaggtggtgcattttgcagacaagcagagtgcatggacgttcggtaagtcgctgccactgagcagtccatcgggcatgagtgacaatgcagcggactcggtatggggggttcacgtccgacagaacgtagttgagcgctctgtcaccgccagtgattacaatcaccgtgaagcccagaatatcctgacttctgtaccggcagacatgacgaggggggatggtgaaggtgtgacctacggtgatgtgtatcactacctgccgcgtcatcttgaacgcggcgacaaaatcgcaccgtcagcggaaactggcaacttctgggcacgccttgaacatgagcgttttctgtctgtacagacgaccatcagcgggtgcagcaatgatgccctgctttctccggcccaggtgctgaccatcagtgaacgtgtggtaccgccgacactgccatcagaaacggacaacggcattatcattacccgcacgggctatatcgccagtcgtaaagatgcactgatcgtgatgtgggaggggatgccgtattacgagaaccgatgctggcgtcctgctgctaaaaagcgcccggtggtcagcggtaccctgatggcccgcgtcaccagcgccaaggagaacgatatttacgcctggcaggatgcatccggcatgtaccgggtgaagtttgatgccgaccgtgacgataaacgtcagggcatggaaagtatgccggtgcgcttcgccaagccttacgggggagacaagtacggcttccacttcccgctgatacagggtactgaagttgccattgcattccatgaaggtgacccggaccggccgtatatcgcccatgccatgcacgactcccgccatgttgaccatgtcacggagctgaacagcacgcgtaatgttatccgcacagcgggtctgaacaagctgcggatggaagacaaacgcggcgaagagcacgttaaactcagtacggagtacgggggtaagacgcagcttaatttagggcacaatgtcaatgcttccagggcccttcgtggcgagggggcggagttgcgcactaatgactgggtaagcgttcgcggtgggaagggggtgttacttaccgcagatgcgcaacctgatgtcggcagtaaaatgcttgaaatggacagcgctattgaacaactcgaacaggctttcacactggcaagaagcttgcaggctgcgactaaaggggcgaaggcaacggtatccgatatcgacagccagaagacacttaaccgttcactgaaatatctgaaaatgccaggaatgctggccagtgcgccagccggaatcggcattctcagccctgaaactgttcgtcttgcttctggtggggcaagtattggcctcatgtcaggtaaaaatacggatatcagcgccgggcaatcattcactgtagcggcaagcgaggctgtaagtttgtttgcacaggctgcaggaatgaaaatgtatgccggggcagggaaggttgatattcaggcgcaggcggatgccatgaatgtctcggcgctacaggacatcaccatcaccagtggtcagggaagtgtaaaggtgaatgccagccaggaactggttttaagttgtgggggcgcttatataaagcttagcggcggaaatattgaactgggatgcccggggaatattttgctgaaagcggcaaatgttaatcagaccggacctgccagtttagatacaccgcctgttacttttcctaaagggtattcgggctccttcaccatcaaagatacggagactggcgaagttaagcctttcacgaagtataaagttacctcgccagagggagatatttttgaaggaatatcggattcatcaggaaaaaccgccccgctttattcatcaactcccggtaagatgaaaattgaactcccggatgagcaaaaagaggaaggcccgggacattgggtgacagtagatcatgattatcatggattaaaaaatacggcgattatggcaattaatcgcttaacatcgatgggagatgaggggcgtatttggggttctgaagggaaagactacatgaacacgaagcgagataaggttcaggaatggcagcctttaccttctgatgcttctgaaggtgtgatcaaaaaatcggcagtatatcgttatggtgagcagcggaaagtcacccaaactttcctggagggagatgatgagtgggctgtgacaggccaatcctggcactggcaaccaactaccgctgatgatgtctatgagggtaataaatga

SEQ ID NO: 380295 - DNA, 432 bp, Salmonella enterica
atgaaaaatttcgtaaaacggaattgtgtattgtatttttgggccatgtttgatttcttctatattgtcagatttgtctggctgaatatctcacagggacgcatccctttagttgatgatgtactttcttttggtgagatttatccactacagggggcatattcgctggctgttttttctttttcgttgcttcttaatatatcgattattttttctggtgtactctttctgactaaatggagatatgcgcattggttagtctatgttcaaacgccactcaggctattcttgatgattccttcgatatcgatattgtcatggatattcaaagttatctcaattaaggtctggatgatatttttttctgccgtattgatttcagagctaattaagctcgggacattttatctgacaagaaatgagaaacaataa

SEQ ID NO: 380296 - DNA, 483 bp, Salmonella enterica
atgataggcaaaataataactgggtcaggttcggtgatagctctattatatacgctgttgattatttttgctatgggtggatttgaccggacaggaacgattaatagcaatatagatttctttggttttgaaagtggtaatatttacgctgtccttttattcctttgctacgtgactgtattagtgctttgctatattgtaatctcaaagggtaagaacaataccataggggtagtgttaattatttcatttattattggtgctgtcttgttgatattggttgttaaaattactttagtacaaaaatacctttttgatttctacatatcctggttttaccatggggtgtattatgaaggggaagataaggtgccacaggtcttttcattcatttcacgcctcgtagttctttgcttctgctgtggcagcattatttcactctgtatcgtaaaatctattaatcgaagcctgattaatatgtga

SEQ ID NO: 380297 - DNA, 2028 bp, Salmonella enterica
atggctaataattcactggtcacttccataacccatagtaacgctgatgtcatgactgggaagcagaaaccgtattgggtcgaatttcaacttgtagatgaacagaatgaacctgtcgcgaatatgccatggactgtggaaagtactcatcctgtttccggaccggtggagggattcacttattctggtcagagcgatgctgacgggctaatcagagtcgatatgccgcatgggctggagctgaggctgacgttagatggcaatcagctggctacggaaatggaaaaacgtgctttacgcgttagccgcgatgcggaaaatgattctgttgtgcgtcctgaggctgaagagaaagggtatatctggcattatgccgttatcggtgaactttgtcagagttcaccaaacatggaattaagacctggggaaatgttacctgcataccactttcctgcaaaaacagcatttaggggatttaaattccgaacgaatgaacttgaaaagcgtcatgtaatagaaatatgccctttcagagcatgggagcttgttctacatcatcaaaaggactattcaattgcgaatggaattaaccttggggcggcagcgacgcttgcttatgccgatgacagtaatctggacactgtatcaattacgcgcttttttattaaccagtgtcaggatctttcccgcttaccccagctttataaagatggctctgcatggaatacgctggtacaggatgttccttttagtgaacgatatctcccaccagtatttatggacacctcaagggatatttcgcctaaggtagataagaagaattcacaggtaattgcacagacaggggtcgatactgctgcaacaaaggcagacggtgatacgcagcttttttatgtctataacgcgaataaggtgataatttcctggcgtggaacggccagcttgtttgatataggaacggatcttgcgttcaggccggtaaattctgaagtttgtgatattgataaaacgcaatgtgcgacgttacttcctgctggaaaagtacataccggattctggcgtggatatagacgggttgggcgattattctccagggaagtaaaaatactcaatgatttagctgagcgattggacgtatttatttgcggtcatagccttggcggagctttggcattgattcattcagcagctttaaagatctataatcctcttttatacacttatggaatgccacgaacttttacccgcgatgccgtaatgcaattgtcggaaattactcatttccgtcatatcaatgataacgacccgataccagctgtacctgcggaagccaacctggataatgaactatataaactctggggatggctggggggaacactgggctttttctggtcggtgggcgaacttcttgcttaccagatggttacctggggagactgcttctggcaccacggtaatacggtggcctttctcaccgccacccagagccgggaatggaatgagtgtaagagagacctgcccacgccagcagggtgtattaccatcagaaaatcacttccccttaaagctaaactttacctggtgcctgcgctggcggaacaggagatgcagcaggctggtcagaagcagaaagagtttaaagcgtcattaacgcaggcagacctgactgactttttccccaaaggcagcaatccggacagaggcgctaatttaaatctttttgaacattttatgacctcctatatgctctatatgtataacaagatgttagagttgattgataatgccggggtagtggaaaagcgtacctttactgagcatctgtataatgttgattcattcagggagcagatggaagaaaataaaaatggcataccagagaaagagttagcaagaaataatatctttctgaatatagaagggctgcttggcgtatcgctttcccctacgttgtctatgccgtctggcaacgatacgcttttgcggtttgctcaatatggagaagaggtgatggaaaatgtctaa

SEQ ID NO: 380298 - DNA, 774 bp, Salmonella enterica
atgtctaatcaatcaaaaattattctactttccctggtgttgttttcctcggtgggttgcagcataagtcgggccgtaaataaaacgttatctccaccggccgatacaaaatgggtcaatattgaagtaaaaaatccgtctcagtatacgaaaccgtttccgcttgaggtcagatacatctcgtatgaatgcatgaaaaaaagaatcagcgggtttgatggctcagttatcacggagcccagctataacgttattgggatccccatgcagcaagagagcggggatatctggaaatcaaaggttgctatgaccggtggtggctcatgtaaatggacgttgagtgcagtgaatttaggtatcgagtatatcgatgcgacacatcttggcaaagatcttgtacctggtacggcggtaggtgtgacgcttgcttttgataatgatgcttctcgtaatgggcaatataaggctgtacatggagatttgaagttatcgccgaaatactatccttatataataaggtggaggttaattcgtaatagaaatgatttaactcttttaggtgctcaggactttttcttatatcatgttgttgatgtgagtaatatttcatttgaaccattgatcgatgaaggcaagatcactcagtatattgagccagaaaagaaaataaaaggtgttcactctaaaataatatatccagatggcagtattgtttccgatgggactgtatttcctgactttgataaaatcgataagatgaatgtaggtaaatga

SEQ ID NO: 380299 - DNA, 771 bp, Salmonella enterica
atgtatagccgatcaaaacttattctactttccgtggtgttgtttactgtggcggggtgcagcataagcagggctgtaaacaaaacattatctccaccggccgatacaaaatgggtcaatattgaagtaaaaaatccgtctcagtatacgaaaccgtttccgcttgaggtcaggtacatctcgtatgaatgcatgaaaaaaagaatcagcgggtttgatggctcagttatcactgagcccagctataacgttattggaatccccatgcagcaagagggcggggatatctggaaagcaaaagttgctatgacgggtggtggctcgtgtaaatggaccctgagtgcggtcaatttaggtatcgagtatatcgatgcgacacatcttggcaaagatcttgtacctggcactgccgtaggggtgtcactcgcttttgataatgatgcctcgcgtaatggacaatttacctttgtcactggaaatatagatttatcacctaaatattatccttacataagagagaaaaaaatgggggggagagagaatagcttatctttatttggtaaaaaagacttcctgtcattgcgtgtcggagagattagtttggtaaggttttctcctgaagtagatgaggggaaaataacaagatttgtcgggttagaaaaaaaaataaaaggtaaatatccccagattatttatcctgatggaactgttgcccctgaaagaacgctttttcctgactttgataaagttgacaagatgaaaataaattga

SEQ ID NO: 380300 - DNA, 267 bp, Salmonella enterica
atgacaaaaggtctggttttacttggtaacaatacgtctcatggtgggaaagtaatttccgcctcttccgctattacagtcgacgggaaaaaagcagcattagtcggtgacatggtgagttgcccgattgaaggtcatggcacaaatccaattgttgaaggatcaccgaatcgcactttcaatggtcgtgctgttgttgtcgatggttgtaagtgccagtgtggctgtacggtaatttcaagtgcgatgaacagcactgtaggatga

SEQ ID NO: 380301 - DNA, 1161 bp, Salmonella enterica
atgggctgggaaaggtcgaaggcaacaacaacggaattgccacctgagccgtcgttttttgggtggctgatggcagctggtgttgctgctgttgtgggtattttgctgtttatcttgcatgcgtcaggcatggttaaggcactggctacattcaatatttggtggctggcaatcagccccatgattggctggctattcctgttttgtctgcgcggctggctctggggaaaaacggttgatgaacatcgttttttgctaaaggaagctgaatacgggcagcagcaatgggaatcctgggcagggcgttatctggcggtgcttggcagcagtattctgttgccttcgggtgtgacgtctgatgctatcgcgaaatcagaggcatcaggcgcgccgcagcttctttcactgaccagccatttttgcgctcaatccgtaactttcggctctctgttagaattgggtctggctggtgtgcagaacgcaatcgcgacactacccgttaccgtaccgcttaatattaccgttgtaagcgacaacaattccgcagaatctgcttctcaatttcgcaaagtctggggaaatctatatcccgatcgcgctatctctggttcagtttctttttgtgaaaccctgtcttttgcctgggttgaagagcgccttaaaaacccggttctggatatcgatttgatcctggtaatacagcagcatggcgccgggcgatattccgatgcactcgcagcgatggtacttaccagcgatgatattgctgaaaaataccagctttcacactccacccgcgtattgcgaccgatgccgctggacatgacaaatttcagggctgatatgggtttgttcctcgaaacacaaacgatcgcctgtcagacgtcaaaagtgttttgtgattatgggcactggaatgactggtttgctgatctaatgacggcgtctcaatcacatctgacaccgtgggtgccccaggagattgatgtactcgaaaaatataacggtattccgggggctggcagtgcgtggcttttagctgcattgctttccgatatcacattggttggcaaggcacctgttttaggcctgtttacttccggaactgaccgttttgtcagtaccgttacttcagggagcaataataatgacgccggttag

SEQ ID NO: 380302 - DNA, 3402 bp, Salmonella enterica
atgacgccggttagttcatggagcagaggagggcttgccggcatagtagccctgatctcactcgttatactgggcttgatcctgcattttggtcctcaatatggacttgatacacgcctgaaacaggcgatggcatttgtggttatttggcttattctgctgattattcgctacacgccgttcatgtttcggttcatgcgggaaaagtaccatcgctggcgagaacagaagaacaatgcgttgccttctgatgaatcaagagttgcccggactccgccacgcaacgtcaccgttgacaccatccgcctcgccatgcgcaacctctacggtcgtcgctgggggcgtaaaacgcgcattctgctgataaccggcactgcctctgaggtggaacagctgacccccggcctgacgggccagctctggcaggaagaccgcggcacactgttgctgtggggcggggacctcaacacgccagcagactgtgcctggctgaccgcgctgcgcaaactgcgccgccgtccggtggatggtcttgtgtgggtgacctcggcgttcgaccagttgtcagcaccagggctggaacagccgctgccggtgccatctgaaagcaccatggattccctgtctcacgccatcagcgcgcgtatggaaacgcttggctggagactcccgctttatgtctggtcgctgcacccgcgtgccggtcagccgaatggtcgcattgtacaggccacaggctgtctgctgcctgccggttgcggtcccgaagggctggcagagcaactctccgccctgacgccagatctgacctcactgggcctgcagcagacctgcggtgaagtgaaacataacttcttactgacgcttgccgaccagctcatccgtgagccacagagcgtgaccgcgccattgtcggtgatgctcaatccgtatcgtccgctgccgctggccggattggtgttcagccagccttctgccggtgctgtacgtggcgtgcagcatcactggggtatggataagcgctgggatgtactgcctgaatctgtcgggatgcttcctgccgcgctgcgccccgtgaaaccgggcattccgtggcgcaaggtgctggcgtctgctgctgcgcttacgatggtgagttgggctgtgtggatgagcatcgcgtatgtcaccaaccgcagccagattgctggcgcaaatacacaggcatctcttgccgcccgacagaatcagcccctggagcagcgtctgcatgcactgtctgaactccagaaaaccctggctcgtttgcaataccgttcagagcatggcgtgccgtggtacgaacgggccgggctgagtcagaataacgccctgctagccgcactctggccacgctatcaggacagcgcactgccgctgttgcgggatgcttctgcaaaccatctgcaaagacagattaatgcctttaatgcactgccaccggacagcccgctgcgtgaacagatggcaaaaactacctatgaccagcttaagctctacctgatgctggcgcgtccggaacacatggacgcagcctggttcagttctgcgctgctacatgactggccaaaacgtgatggcgtgaaagacggcgtctggcagggcgtggccccgtcgctactgtcgttttatggcgcacagttggtgacgcatcctgagtggaagctccgtgccgatgaaaacatggtcaaccaggcgcgctccctgctggttcgcctgatgggcgtacgtaacagtgaatcgaccctgtaccagaaaatgctttcacaggtggctcgtttgtatgtagatatgcgtctcgaagacatgaccggcgatactgatgcatcccgtctgttcagcaccacggaaatcgtaccgggcatgttcacccgccaggcctgggagcaggccgtgcagccagctatagaaaaggtggtgaaggcacgccgggacgagcttgactgggtgttgaccgacagcaagcgtcaggtgaataaacaggacgagacctcgccggaagcactgaaaaatcgcctgacggagcgttactttgcagactttggcggggcatggctggcgtttctcaacagcctgcgctggaaccaggccgccacgctatctgactctattgaccaactgaccctgatggccgatgtgcgtcagtcaccgctggtggcgctgatgaacaccctgaacgcgcagggacgtaccggacagaccggcgaggcgatttcggattcactggtgaaatcagcgaaaaatctgctgggtggtgacaacaaggatgccattgaccagagcgtcggtgttcatggtccgctggatgcggcctttggcccggtgctggcgctggtggacaaaaaccgcacaggggcacaggaactgagtctgcagtcctatctgacccgtgtgacacaggtgcgtctgcgcctgcagcaggtgaccaatgccgctgacccgcaggcgatgacccagaccatcgctcagaccgtattccagggtaaagccgttgacctgaccgaaacccgcgactacggcagtttgattgcagcaggcctgggtcaggaatggagcggttttggtcgtacgatgtttgtgaacccgatggagcaggcctggcagcaggttctgaccccggccgccgacagcctcaacgcccagtggcagcaggcagtggtgagtgaatggaactccgcctttggcggacgctatccgttcagcaactccagcagcgatgtgtccctgccactgctggccaaatacctcaatgcggattccggacgtatcgctcagttcctgcagaaccgcctcaagggcgtgctgcataaagagggcaaccactgggtaccggacagtatcaattcgcaggggctggcgtttagcccggcattccttaacgccatcaacaccctgagctatatctcggatgtggccttcaccgaaggcaatgctggcgtaaacttcgagctgcgtccgggtaccgccgacggcgtgatgcagaccgacataattatcgacagccagaaactgacctatgtgaaccagcttccggcgtggaagcgcttcacctggcctgcggatactgaagcgccgggcgcgaacctgagctggattagcacgcaggcaggcacccgccagtacgcggatattccgggcagttggggcctcatacgcctgcttgataaagcgagggtgaaggcgtatccgggcgtcggcagcagttacagcctgagctggaaagcccaggatggtcgcacactcaattacaccctgcgaaccgaagcgggagagggacctctggtattgctgaaactgcggaatttccgcctgcctgagaccatcttcagcactaccggcgtcgcagtcgtcagtgcagccagtgatgcagaggaggtctactga

SEQ ID NO: 380303 - DNA, 597 bp, Salmonella enterica
atgctgttttatcacggtgttgatagcccgtatcctttttcgctgtgctggctggatgagtttgcgaacccggaagtggcaagaagactctatgccgccgcctttccgctggtcgatattacggtggtatcggatgatgacattatgcagcaccgccgcattgcgctgctggagctcatccaaaaacatatccgccagcgcgacctgcagggactggttgaacggattgcttcgctgttagttactggttgcgctaatgacaggcagcttaaagcgctgtttaattatcttatgattcagcacggacacacgcctcgtttcaccacgtttattcgtgatgtggtagggcatgtcccgcacactaaggagagactgatgacgctgatagagaggatccgcgcagcggatcgcagaaaaggggaacggcaaggaagacaggtcggtctggaggaaggattagaaaaagggctggaaaaaggtcagcacgttgccgcattgcgtatcgccagacagatgctggtggacggacttgaccgcgagactgtccagcggttcaccggccttacggctgaagagcttcaggatgttagccattaa

SEQ ID NO: 380304 - DNA, 132 bp, Salmonella enterica
atggtttgctcttttgctaaaaatattaacattggccctattatcgtaatatgttctccggacgatgtcgtaattgtaattttacccgtagtgagcttgatgagcactgactgcactaaatttaatccctga

SEQ ID NO: 380305 - DNA, 162 bp, Salmonella enterica
atgcctttgcaaataaaagacattatagatctgcaaacccttgtcgagtcggaacaggtagagttcaagctggcaggggggggaaagacggcaaaggcgagttaccgaaagacttctggcccacctattccgcaatggcgaatggtcggggcggttgggtag

SEQ ID NO: 380306 - DNA, 1260 bp, Salmonella enterica
atgccactcaccgataccgccatccgcaacgcgaagccgctcgataagccttacaaactcagcgacgcgcagggcctgtacctgctgattaaacctaacggttctaaactctggcacctcaagtaccgctttggcggtaaagagaaaaagctggcgtttggcgcttacccgaccgtgacgctggcgaatgcgcgtaagctgcgcgaggaagccagagccgtactcagcgcaggcgacgatccaggggtgaagaagcagcaggagaagcaggcgaagaaaagcggtaatacgtttgaggaagtcgcccgtaggtggctggcagggaatatccgctggacggagcatcacgcggcgaagatcctgcgctcgctggagctgcacgtattcccgctgatcggcaacatccccgtcgccgacctgaaaaccgccgacctactgatcccgctgcgggtggcggagaagaaaggcaatctggagaccgccgctcggagccagcagcgcaccacggcgatcatgcgctacgcggtgcaggagagcctgatcgccagcaacccggccaacgatctgacgggtgccatcgcgccgccgccgaaaaaccactaccccgccctgccgctggagcagataccgcagttgctggaacggctggagggctactccggcaggctgttaacccggctggcggtgcagcttaacctgctgatctttatccgctccagcgaactgcgttttgcccgctggacggagatcgatctggatggcgcaatgtggacgatcccgacgcagcgtgagtccattccgggcgtgcgctattcagagcgtggcgcgaagatgaaaacgccgcatctggtgccgctgtcaaaacaggcggtgacggtgctgaaacagctaaagctgctgtccggcaacagtgagctgttatttccgggcgaccacgatcctcgtaagcctatgagcgaaaacaccatcaataaggcgctgcgggtgatgggctatgacacgaaggtggatgtgtgcggtcatggcttccgcacaatggcctgtagcgcgctgatcgaatccgggcgctggtcgaaagatgcggttgagcggcagatgagccatcaggaacgtaacaacgttcgcgccgcgtatatccacaaggcagagcacctcgacgagcgcacgcagatgatgcagtggtggtcggactatctcgacgcctgtcggcaaaagtttgttgcgccataccggtatgacagacaggttcaggtggcctga

SEQ ID NO: 380307 - DNA, 192 bp, Salmonella enterica
atgtgtctgattttccgagtattgatcaagctgcgtgaagcagcccggcagttggttcagacaatgatcacaacaaagagaaaccccaacaaaattaaacgacaagcagatgtttctgaactcactatgagtgaagtgtttgctcaatatcgtcaacatcttgaccctggcccaaattcagtacagtgctaa

SEQ ID NO: 380308 - DNA, 1692 bp, Salmonella enterica
atgaagacgcatattcttttggccagagtgctggcatgtgccgcgcttgttctggtagcacctggttattcaagtgaaaaaatacctgtaacgggaagtgggtttgttgcgaaagacgatagcctgcggacatttttcgatgccatggcgctacagttaaaggagcctgtcattgttagcaaaatggcggcacgtaaaaaaattactggcaactttgagtttaacgatcctaacgcattgctggagaagctttccctacaactgggactgatttggtatttcgatggacaggctatctatatttatgacgccagtgaaatgcgcaatgccgtcgtctctctacggaacgtctcactcaatgagttcaacaactttttaaaacgctcaggcttatataataagaattacccgctacgtggcgataaccgtaaaggaacattctatgtttcagggccgcccgtatatgttgatctggtggtcaacgccgccaccatgatggacaagcaaaatgatggcattgaactgggacgtcaaaaaataggagtgatgcgcctgaacaataccttcgtgggcgatcgtacctacaatctacgcgatcagaaaatggttatccccggtattgccacggccattgaaagattattgcagggagaagagcaacccttaggaaatattaccagtagcgaacctgtcccggcgatgccagcgttttcagcgaatggagaaaaaagtaaaacagcaaattatgccggtggtatgagtctccaggaagctttgaagcaaaatgccgcggcgggcgatattaaaatcgtggcctatccggatacgaatagtttgttggtaaaaggaacggctgagcaggtacattttatcgaaatgctggttaaggccctggatgtcgctaaacgtcacgtagaattatccctgtggattgtcgatcttaataaaagcgatctggaacgcttgggcgcatcatggagcggcagcattactatcggagataaacttggcgtgtcattaaaccaatcttcaattagtaccctggatggcagccggttcatcgccgcggtaaatgcgttagaagagaagaagcaggcgacggtggtttcgcgcccggtattactgactcaagaaaatgttcccgctatttttgataataacaggacattttataccaagctgattggggagcgtaatgttgcgcttgaacatgttacttacggaacaatgatcagagtgctgccccgtttttccgcagatggccagatagaaatgtcgctggatattgaagatggtaacgacacgacgccgcaaaccgagatcactgcctccgtagatgcgttacccgaagttggacgaacattaattagcactattgcgagagttccgcatggaaaaagtctgctggtcggtggttatacacgggatgctaataccgataccgtccagagtatcccgttcttagggaaaataccgtttattggtggcctgttccgttattccagcaagaataaaagtaatgttgttcgtgtattcctgattgaaccaaaagaaattgtcgacccgttaacgccggatgccagcgaatcggtaaacaatattctgaaacaaagcggtacctggagtggggacgataaattacaaaaatgggttcgtgtttatctggatagaggtcaggaggcgattaaatga

SEQ ID NO: 380309 - DNA, 1302 bp, Salmonella enterica
atgcttttactgcacttatctgatatacacttcaaaaagtcggactacaacagtccaatggatgtcaaccagcaactgagacagcaactagtatcagatgcctcagcaatgtgtcgaaagcttgggaaaaaaccggacgtaataataatatctggcgatattgcatatgcagcagatcctgcggaatatgattttgcaaaaagttggttaaaccaactatgttcagcctgtggtgtccctttatcattattgttcataatcccagggaatcacgatgtcaatagagatataactagcagtccaattgttcaggctctccataaagatattaaaaacacacctctttctgagatagacataaagataaaaggacttttagaagatcaaaattgtgctaccgttttatattcaggcctaagtgcatataataactttgccggtgatttctcatgtaaattagtcccacctaacaataccacaacaaaaagggatgtggtattaagcgataatagaacagtgacactttgggggctaaattcagcatttatttctagtaaacatgacaagaaaaacgaaatttttgttgatccatcatataatcaaataatatccaactcaagcgcgataaatattgtagtatgtcatcatccatatagttggattaaaaatagtgaaaatctaagacgtcatttaaatgatacagctatcattcacatttttggacatgaacatactaacaggattttcttgggtactgattatgttgaaattagtgcgagtgctgtaatgcccgataaacaggaaggagattatgaaccaggatataatctcattgaattagatgtttctagtgatgagaatggggaaaagttatttgcacaattccacattagagaatggcaaaaaaatccagggcgatttagagcaaaacaggatcgacaaggaaacgatacttttaaacattcctttgatctaccttgtcaagaaaaccttacctggatagccccctacagcactgtagctacttcatcgccgcaccaaagaaacttaattaccgagactatactagatacgtgtgacaatgagaagcaagaaacaaattacgctatcaaggatttttttgagttaccaacatctcaaagacacagaattgcaggacttctatcactcgttgaagagaatgacaatcatatatctgatttagaacgagcaaatcttattattaatagggttgcaagtaataacttattaaatgaatttaacgttttagtttctaaatttaaattagagaatggtgaataa

SEQ ID NO: 380310 - DNA, 495 bp, Salmonella enterica
atgactatcaatcaagtaatgcattctcagagtgataattcatcaaatgggatgtttgcaactggcagattccaggtaatacctgacacactaaaagcagccatcaagaaattgaatcttgatggtaatgctttatttgatgagaatactcaagatagaatatttgaagagtatctaattaaagttaagcgcccggctataatagaatttcttgagggagatggtggtgttgaagatgccatttatgattgggcaaaagagttcgcttcggctggagttagaaaaggaaaggaaataagcagatccaggacggagtttgaaaaggatgaaaatggtaaatttaaaagggataagaggaatagaaaaattggtatccgtcgctgggcgcaaaatgagggtgtatcctattattcaggcgatggaatcaataaagcacatattagtccagatgaaatgattagagtacttgaggagtcaaagaatgaaaataagtag

SEQ ID NO: 380311 - DNA, 333 bp, Salmonella enterica
atgcggaatgaagatattgttgccgatgatgatcagcaaaaagaacttacgtattcggatttttcatggaagataaatggacaagatgtcaatcttcctggaaatgcaactccagagttaaatacatgggtcaaagaatcaggggcgagactctctgagcctgataaccacggttttaataatgggttagaatcctggacgttaaccatccagaatgaaatagtaactatatctcaagcaaatgacatcattgagaaaatattaggttttaacgatgcatatgtgtcaggaattacattcttatacctaataaacttcaaaatgcaagtgtga

SEQ ID NO: 380312 - DNA, 618 bp, Salmonella enterica
atgattaaatttaaagcactttctcttgttttattgacttattctatctcagcattttctagtgttactgatgatgattttgatagatgctcacaatttctggataaaatagtggcttccagtaatgcaagtttgataaaagagttgaaagtggataggagtttcattaaagcagatgttgacagagtcagtggcaatgatatatatgctaaagttcaattcaatgaaaggcaatcgactgacactccaggcgaaggcttccttttgtggatgaagtatgattacctcaaatttaatttggaggatgttactattgatctggataatccagaaaaattaaagtttgataatagatatgcgccagtatacctcgactgtttgaacaaaaaaataatttacaaagttaatggagattccagattacagttttataaagatgataaattattaatcccagaagccggtgtatttatcctgccaggagaatatgtggaagttgaaaaaaactccgagggcgcatcgaatgttaaatatcaagcaaaagacgggacggtatactcctcatgggtggactctagtcgcttacaggaattttcacctaacaccgttaaatactaa

SEQ ID NO: 380313 - DNA, 333 bp, Salmonella enterica
atgaaggggcgactaacactgaattgtattttcttggtttcaacttgtttaccctcaagtaatgcactagcgaacgacgattgcgaaaattatggaagaaaatctgaagtgtcgcaaacttacattaatccggataacaactcttttgaagtggtatccacaaagcggcttcatttctttagttccccgaataaagattgcaaaataaaagatcttttcttggtgccaggagatattataaccgggcatacagaatacaacggctatgtttctgcttcttatgcaaaaatgagtcatggtcagtcactggatggcttgacaaatcacaactaa

SEQ ID NO: 380314 - DNA, 666 bp, Salmonella enterica
atgctctataatgcgcctgaccgaaactgcccaaaagaaaacacctttattattaaaggtgacaatgtatatgccctcaaaaaatatgcagatttcattttggcacagtatgtgacaacttcgggaaaagatgttttcggctggatcccccaatcagaactaaaagaattcaacccagccactctacttcataataacactcaaattaagattatcgactttatcgtcataaaaaataaaaaatggattgggattggttctttctatagcaataaactttctggcatagatgaagacgaaacaggctcttcttatataggagatttccctaatgctgtcggtggattatataaatacacaatgcatagttataaagatataagtttagtttcctcaaatgctaattatgataagagacaatatacaattgatgatgactacataatctcagcaattaatttagaaaccccagcgtattctacgttacgcggaacaaaagttggcgaccatgctgataaagtgtttaaagcctatcctgcgaatcaggcacatataacacctgaaaaaatcagttacacgctaggtgatatgtatctggatttcacactaaaagctaacaaagtggcatcaattaacatggggatacctatccctggagaggaataa

SEQ ID NO: 380315 - DNA, 414 bp, Salmonella enterica
atgaacaggggcattcatcctgcgctggcctttgctaaacaggtagagggctggtctccgggcgtattcagtcaggttgataagtggcgggagaccgattcacttgccccatggcggtttatgacgtttcgccagtgtaaacgcaggcttgcggactggctgaagcgtaacccggcgccagaagaagggttcctttgtcctcaaattatgaagcgtttcccgccgcatattgtttatatgacgcttgcggcctggcgaaccggtaaaaccctgcttcattgcgatgaatctctcttccggatgctgggtgaaactcgtcagaccgatgctctgtcaggcgaaatgcttcgccgcctgccattctggggattctggctcgattttccggctgacatggtttttgctgaaggctag

SEQ ID NO: 380316 - DNA, 723 bp, Salmonella enterica
ttgcagggccgtaatgacgtcgccctgcggctccagcacctgcccgggagtgaggtgtgcagcattgctgaacaggtgaatgcgggccgacctgttgagctcccgctcgtggtgaagtcgggcgtagaacgcgccagattcggtttccggctccgggctggcgtcatcgcccgcttcacgataaggtgccgcgtagcggtaatgctctccggtggtgaccgcatcattacgtacgctgaccgccgcatccatcggcgtggtggcggtccggtagttgtaatcccgcgtgacgacagtgccggtggctatgttgtgccaggttcgcacatcccagaccgactctgccgcgccgtcgaacaggcccgacggctcgcggtacggcaggcgcacatcaaaccggtaattaagctggctgtcggccaggatgtacgtatccagaccgcgcacgtcgtccatcaccgtgcgccagtaaattcccacctcagccagaatgcgctgaataaattcgaggtccgtttcccgccactgggtgataagttcacgcggcgggtaggtgcgctccagtctgaattcaaaatcaggtccctccagcccgtgtttacgcagcacctgctcaaccacctcaggaacggactggttctgatataccgcgcactgtcgggtgtatcccaggagcgccaggcgcgaactgagcgtaagacggtagtgagactggtcctttga

SEQ ID NO: 380317 - DNA, 234 bp, Salmonella enterica
atggaaattattaatccaccaccgatgcatgaagatcttattcaggctgctgaaaataagcggcagcgcctgctgtctcgtgctgactggcgtacagatttaatgcttggtgaaaccagcgacgccaacaggaataaactgtcggcgtggcttgcgaacaagaatgaggttaagttggttaatataataaccattcctgataatattatctggcctgctcctccagaaggatga

SEQ ID NO: 380318 - DNA, 237 bp, Salmonella enterica
gtgaaggttgaagcagcggaaaatgcggcccggcttcgcgaggctgaagagaccaacagccgccttttgcaaatggcatcaagaaaaattgcgccgcttcaggatacggttgatcttggaattgcaacagaggatgagagagtacagctcgacgaatggataaaatatcgggttctggtaaaccgtgtggatacaacaaacccagactggccgaaaaaaactgacagtcatctataa

SEQ ID NO: 380319 - DNA, 345 bp, Salmonella enterica
atggtttttaaaatgagcgaacaggcgcagacagttaagatttttaacctgcgttcagatataaatgagtttattggggccggagaggcgtatattcctccgcaaaccggattaccagcaaattgtactgatatagccccttctgacattccggccagtcatattgctgtatttgacgctgaaacccagacgtggaatccgaaagaagaccatcgcggcgagacggtttacgacataacaaccggtaatcaggtttatatctccgaacccggtccgttacctgaaaatgtcacatcagtttcacccgaggtgaataccagaaataggatggtaaggcgtgggtga

SEQ ID NO: 380320 - DNA, 189 bp, Salmonella enterica; identical to SEQ ID NO: 380171

SEQ ID NO: 380321 - DNA, 504 bp, Salmonella enterica; identical to SEQ ID NO: 380205

SEQ ID NO: 380322 - DNA, 741 bp, Salmonella enterica
atgaataagcgcaaacggccacagccgccccactctgtcgaagcggaacaatcggtactcggcggactgatgctggataacgatcgctgggatgacgtcgccacgcagatttccgcacaggatttctttatctccgcgcaccgcactatctatagccatatgcagaccctggtcgaacagggaaaccccatcgacctgatcaccctgagcgaatcgctggaacagcaggagcagctcgaacaggtgggcggcttcgcctatctggcggagctttctaaaaacacgcccagcgccgccaatatcattccctacgcgcaatatattgccagctacggcgagctgcgccagttgatgttactgggcaatgaactgagcgatatggcaggccagccgcgcaactatgtggccgatgtgctggccttcgccgaacaaaagctgtttgccattgcgcagtcgtatcaggatggcggcctgaccgacatcagcgcctgctttgacaacgtgctggcaggcatcgcccaacgctacgaggcagaacgcggtagcctcagcggcacgccttccggcctggaacagctcgacgccctgacctgtggcttccagcctgccgatctgattatcgccgccgctcgtccctcggtcggcaaaaccgccttcgccctgacgctgtgtgtcaacgcgctaatgctgcgccccacccagccagtacaaatctacagcatggaaatgtcgtcggagtaa

SEQ ID NO: 380323 - DNA, 444 bp, Salmonella enterica
gtgcgtggcgtagccgaaggctggaacgccctgtcaaaagagacgcagcaggtcctgaattcagcggccagctggcttaacgacagcggcgagtgggtttaccggaagggaagtgaggcctgggtctgggccagcaaaaccggtaagtcggtgaaatcctggaccaacgcccagattaaggcggcatggacagaaatacagcatgccaccgatatgacgctcgatatgctcaaacaggtggactgggtacaggtgttaactaatgtcgcgaaaacggtcggcgttattctggttgccgtgggtatcggcgttctggtggtaacgctgggaatcctggaagccattattggcgcatttttactgattgttcgtctggcgataagcgcctggggaacactggcggctattctcggtacgggtacggcggcactggcagtccaataa

SEQ ID NO: 380324 - DNA, 432 bp, Salmonella enterica
atggtcgcttctcaccagccggcgcagcaactccccgccgcggcggttatcttccgggtcggacgagcgcgtcagcgcctccgcatagcccagcgccgcatcgcggtttttcggatccagccggtaggcgttcgcataggccccggtggcggtaccggcattacccagtaccataccaatgcgccccagcatgatccagccttcagcgttgccggggtcgctttgcaggcgggtacgcagccccagcgccagccgcgccatctcctcttcattcagcggctgcgccttcggatccagcgcgcgctccagcagtaccggcgtaagagcggtcgcctgccgccagattttcacctgcccgtagctgccggtctgataatagcttatcgccgcaacaatgagagcaatcacgatccccggtacgtaagcacctga

SEQ ID NO: 380325 - DNA, 705 bp, Salmonella enterica
gtggtcagatttggggtcaggttggttcgattctggagtgctccccaaaggtctttaaatgatccaaaaatccgcaatttaaaaccctcttttaaacccgtaaaactgtctgattcgcacggtctctacctgctggccaatccctgcggttcgcgtatctggtatctcaagtatcgcttcaacggcaaagagtcccgcgtcagtctgggcgcgtatccgctggtttcgcttgctggagcaaggcaacagcgcgacggcgtccgtaaactactggcgcagaatatcaaccccgcccaacagcgcatggctgataaagccgcagcttcaccggaaaagtgttttaaagcagtggctctggcatggcacaaaaccaacaaaaaatggtcgtctgactctgccacgcgtattcttgccagcatgaaaaatcatatcttcccggcgattgctcatctgcccgtcaccacgctgaaaacgcagtatttcacagcgttactgagagttatcgagagtaaaggctttctggaagtcgcgtcccgaacccggcagcagctttgcaacattatgtgttacgccgttcagcagggacttaccgaaaacaacccggcgttgcatctggaaggcgtcaccgcgccgccggttaaaaatcactatcccgccctgcctctggagcggttacctgaactgcttgaacgtattggcgattaa

SEQ ID NO: 380326 - DNA, 768 bp, Salmonella enterica
gtgaacagcaagggagagactcgcggcagaggcgcagagctgcgcaccgacgagtggggaacactgcgagccggaaaggggctgtttgtcagcgccgacgcgcaggcgaaggcacagggcgaggtgctggatatgagcgccgcgctggaggaaatcgacaggctcaaccagcagttgcagcagctggaaatcgcggcagagcaggcgcaggcgctgaaggcggatgtggacagccagatacggatgtttgagcagaggctgaagccgctcagtgaggcgctgctgatgtccgccccggaagggatggcgctgaccagcggggagcatctgcagatgacggccacgaaaaacgttgccatgaatgccggaggcaatttcagtgctggcgtgatgggcaatctgaccgcgctggccggggagaaactggggctgtttgcgcggacggggcaactgagtctcaaagtcagcgaaggtccggtggaggtgcaggcgcagaatgccagtatgcggttgtttgcggagaagaagctgacgctgagttcggcaagtgacatctcgtttgccgggaagaaacgcatcacgctggtcggtggcgggagttatctgcggctggaggcgggaaaggtggagtacggtacgatggcgacgtatatgcggaaggtgaaaagaacgatggcggcgggagcaaattcaattgatgttgatattccgtctattgcaggtgaggtatcaattttatctttcacaaaaaaaattctgttctcataa

SEQ ID NO: 380327 - DNA, 1146 bp, Salmonella enterica
atggatataatattaatcaccaatactttatcttcaatttttttatttaggatgaggctgatttctaaacttattgagagaggtgatcatatatcagtgctaattcctcattatgaatcatctaataatagtgctgatatattaaaaaacatgggagtatcagtttacttttatcgttcatctagaactggcattaatccatttgtagaggtacttactgttatttcaatttttaatgtgttacaaaaaacaaaacccgacgttgttttttcttttttccctaaaccaattgtgtttggaactattggtgctaagctagcgagagtaaagcggatagtctcaatgttcgaaggactaggatattgttttacaattcgcaaaaatagtaggagtataaaaaaaagtatactcaagttcacacagttaattctctacaagttattcttacgtttctctgatattgttttattcctcaataaagatgatgcaaatgagttattagtgaaacatcgtattaaagtcaaatattttgatgtagttggaggtattggggttaatttagaacagtactcgtataactccttagtttctcataatgaaccattagttttcacaatggtttcacgtttgcttatagataaaggcattcgtgaatatgtagctgcagctaaaattgtcaaggagaagtatccagccacggtgattcaagttgttggtggtattgatgacaatcttgggggaataacaccccaagaattagaaaaatggaagttagataaatcagtaaattttactggtccagtgcctgatatttctaaagaattaataaaaacaagtgtttttgttttaccatcttatcgcgaaggggtccctcgtagcacacaggaagctcttgctattggtctgccagtaataactacggatgttccggggtgtagagaaactgtaattaataatcttaatggctttcttatccctccttgggattcaaatgagttagctaaaaaaatgatctttttcatcgaaaatccacatataatttgtcaaatgggcaagcaaagccgtttgctagctgaagaaaaatttaatgaggaagttttttgtaataagttaattaacatattatctatttcagatatgaattaa

SEQ ID NO: 380328 - DNA, 1041 bp, Salmonella enterica
atgactaaaacaatattagtaaccggtggaacaggttatattggatctcatacggtaatagcattaatagagcataattataatgtcgtaattcttgataatttaagcaactctagctcaatagtattagagcgcataaaaaaaataacaggtagatccgttgattttttattaggtgatgttagagattctaatcttttaaaagaaatttttaattgctataacatttttgcagttatccatttcgcaggtttaaagtctgtaagtgaatcaattagtaatccactagcctattaccagaataatctctcaggcacattgtcgttattagagcaaatgcaaagagctaatgtcaataatttaatttttagttcatccgctactgtgtatggtaaccctgaacgtatccccttagatgaaagttgtcatgttggaggtacaacgaatccttatggcacttcaaaatatttttcagagcttattctaaaagatgcgtcagctgcgaacgaaaaattaaaagttgtaatattaagatattttaatcctgcaggagctcatccatcaggagcattaggtgaatgcccggatgggattcctaataaccttataccttatttattaaaagtggcaaatggaagcctggaatatctttccgtctatgggagtgattatccaactaaggatggtacaggtgttcgagattatattcatgttatggatttagctaatggtcatcttgcagcattaaactcattaatagaaaaaaaagaatacgcgcgttatagggtatataatttaggcacaggccatgcttattctgtgctagatgttataaaatcattcgaaaaacaaaataaaataaatattaagtataaattttcttctcgacgtcatggagatgtcgcagaatgttggtcggatccatctttagctgaaaaagaattgtcttggcatgcagatttttcgttggatgatatgatggttgatggctggcgttggcaaacactcaatcctaaaggatttgattctaatggggaataa

SEQ ID NO: 380329 - DNA, 1572 bp, Salmonella enterica
atgaatatctgtgccggaaaacgtataatatctggcatggatattaccgaacttctctccactaacgatcccgacacgctacgtcagctggcgttatccctcctggaagagaaccgtaaaaaagacgcttccctgagtgaaaaagaccatcagatacacctgatgagagaagccctgatgctcgcacgacagcagcgctttggccgccaggctgaatccttcagcggcctgcaatgctccctgttcgaagaggatgccgacgccgatatcgcttctgccgaaacgcagcttgcgcgcctgctgccggagccggaagaaaagaaagcgcgtccggtccgcaaaatcctgccggaacaccttgtgcgcgaagaaaccgttatcggacctgactcctgcgcctgcccggactgcggtcagccgctgcgccatatccgcgatgaaatcagcgagcggctggactacatcccggcgcagttcgtggtgaagcgttacgttcgcccgcagtacggctgcgagggttgccagcgcgtggtctcaggccgtctgcccgcgcagattatcccgaagggcatccctgagccgggactggtggcgcaggtgctggtcagcaagttctgcgaccgccagccgttgtatcatcagcagcaggtgttcgcccgcgccggagtggaactgccggtcagcacgctggccggatgggtgggcacggcctgcgtctggctgatgccgctggcggagctgctgcgcacggaactgttaagccgcccggtgcttcatgcggatgaaacgccgctgcaaatcctgaacacgaaaaaggacgggaaggcgcagaacggttacctgtgggcgtatgtcagcggagaaaccacgggcgacagcgtggtctgcttcgactgtcagcccggacgggcggcgcgttatcccgaagcgtggctggcgggctggagcggaaccctggtcacggacggttatgctgtgtatcactcgctgaaaaacggcggcagtatcattaatgcaggctgttgggcacatgcgcggcgtggcttcgcggcgttatataaggcgaaccgcgatccgcatgccggaacggcgctgaagatgatccacgggctgtacagtcttgagaaaaagatccgccacaggtcgccggagaagatccgacaatggcgacagcggtatgcgaaaccgcaactggatgcgctatgggcgtggctgacgtcgcaggcgcagaaatgcgcgccgggttcagcgctgcataaggcgataaaatatgtgctgtctcacaaaatggaactgagccggttcgtggatgatggcgcattaccgctggataataaccggtgtgagcgcgcgatccgccaggtggtaatgggccggaatacgtggctgttcgccggatcgttgcaggcagggcatcgagcggcagcggtgatgggcctgctggagacggcgcggctgaacggcgtggagccgtatggctggctgaaattggttctggagcggctaccttcattaccggaagagcggctgcacgagctgttacccttcgcgaaagatcctctgaataactga

SEQ ID NO: 380330 - DNA, 189 bp, Salmonella enterica
atgcctgctcgccaggtatgtcagaattttttccgcgatgcgttagcaccgcttcacaaataccgacaaaatgctttgctggatgccaccattgctctcatcaatggcgcatcactgacgctgacaagtatcgggcgttatttacccggtacggctcaggtcaaaaataaaatcaaacgcgttgactga

SEQ ID NO: 380331 - DNA, 873 bp, Salmonella enterica
gtgctccgcgccagcctgatttgcgacggacgttcgatacccttgctgaggtggatagttccttcggagaaacagcaaaatgcaaaggtacagcaggcctttcttaatactcttgccgaagcggtaaacccagaagcaagagtgatcatcgtcactgatgcagggttccagaatgcctggttccggcacatagaatcactcggatgggattttatcgggcgcataaggggaaagatccagatgcggcttgaggccaaaggcgaatactggttcagacgtcaggaattgcaggccagtagcaaaccggaatatctggggccagggacacttgcccgctcagaatatgcgcggtgcgatggtcatttttatttgcataaaaaagagccgaaaggccggaaaaataaacgctcccgttgcggtatagccagaccatcacagataaaagatgccagcccggcggcaaaagaaccgtggttaatattcagtagcactgatgactttaagccgcgagtgatcatgaagttatacagccgccgaatacagattgagcagcgcttcagggatgaaaaaagtgagcgcttagggttcggtctgcgggccagttacagccgttcggcaggaagagtactggcgctgagcctgctggcaacgctgagcacaatagtcctgtggcttgtaggttatcacgctgaaaataaaggattacatttaaggtatcaggccaacagcgtcaggatatggcgggttatcacgtatctgacgttagcggagaatgtcttacgacagtccccgctaattttaaaacgaacggtgctgcgcaccgttctgaatcacctcgccagaacctaccagaatatggtgttggtttattag

SEQ ID NO: 380332 - DNA, 729 bp, Salmonella enterica
atgttttcggccgctgctacgattgcaggtggaatattaattttaagtacaccaatatcgcaagcgattttaccacgcatgagttccttacatagcaagggtgatttcgagggtttatataaagtatatgcgctctcaacaaaaacagtagtaagtttattagcgcctatagcgtttgttatggcttctaatgcgaaatcccttttatttatgtggaccgctaacgaacatttggctaattattcagctcaaattttagtattatattcattagggaatcttttttttgccatagcggcatttccttattatttacagtatgcatttgggaagttgaaattacatatactgggtaattttttatttgtgattataataattccaagtttaatattctccatccgtacatatggtgtcattggagctggttatgtatggcttatccaaaatgttttttttatgtttttctggtgctggtttatccatggacgttttatacggactaaaagaatatcgtggttgtttaatgaggtggtattaaccttactaccgtcaattgtagttatatctgtattcaagtggataagttttccagcaacatctgaacgtattactttattttatattcttgcgtcacaatgtattttggcttttttattgacagtaatcatagataagagagtccgaagtcatgtaacggaaatggtgaagaaaataatatggaattga

SEQ ID NO: 380333 - DNA, 513 bp, Salmonella enterica
atgatgaggatcttctggatatttccgatgattcaccactactggaggacatgctgccttctctgtcagaagaattatatcctacatcagaagaaaatgtgcaaagtatataaaaaactccagagtggtgatactgcagcaggcgagactgaagttgtattatgcagggggacaactggtccgcaggctgaaaatattgttaagcttaaaacagcaggaggtgtggagggcgccgatccgaatgtattgcctgtctctgaagaaacagccaggctgcaggttcggaatggaagagtggtacctgaatatacaacagatcttagtgttgcagacaggtttagcagggagcattatcttattatcgttaaggtaaaagccaaatatattacacgaggtagtgtaagtgaaagcggctgggttatgccacatactgccccagtggaacctgttggcataattgaccggacgtatggtcatgcagaaaatatcggacaggcaaacgcttctaagtaa

SEQ ID NO: 380334 - DNA, 894 bp, Salmonella enterica
atgcttaccgaaaaatatgattttcgcattaccgatcagatgactatcccactcagacctcattggatagccaatgattcatacagggaaaagtgtaaaatgcttgtcctcaaccggagtaaaggggaaattcataaggtagactttagtaaagtaacagattatatcaaagaaggtgatgtaatctgttttaacgacagtactataataaactatatgtttatctgtaaaacaagacgaaatagattaattaaaattgttttagagggatttttaccaaataatagagtaattatttccggacttttaaaagaaaggcttaacgcgaatgatgttttctatttggttgataatcctgaaatttccattaaggtagagcaaaagtttagcgaagagagccagtaccgagccgtcgtagaaaatcatgatgccttaatttgctatttagccagtcatggtgagcgtcttgatgagtatgtggattccagcttattttataaatatccagatgcttaccgctccgttttttctaaaaagtatggttctttggatgtagataaagggaatttctcgatcacaacatactatccgccagaaccaccgctaaagcatttgcttaatccgtttcgcaaaaacgatattcctcaggcgccggagttcacgataggtatgctcattgcgtctgccagggctggtcgctggttgtatgaactgattcacgcttgggggctgctttccgttctccatcatcatggtgcgcataatgtatattatgttaaatgcaccagaacaattaaaagacatgttaaggcggctggattcgtgcatgtcaaaaaacttctggcccataagtttgatcccttccctgccgtgacgctgcgcgaattctgttga

SEQ ID NO: 380335 - DNA, 399 bp, Salmonella enterica; identical to SEQ ID NO: 372537

SEQ ID NO: 380336 - DNA, 165 bp, Salmonella enterica
atgaaccgtctggtcactactgttgcgataggtatgcgccgtatcgccggcaaaacgcaaacctttaccagcgtctattgtttgccataccccaccagtacacatgtccagccgaccctgaatcaccaccacatgttcgataacgccggctttatgcggcgttga

SEQ ID NO: 380337 - DNA, 1833 bp, Salmonella enterica
atgcgtataacagtaagtgatatatcaaccagagaatcacagcagacggtacagatacaagctatcagaagttgggataccataccgtgcctttcaatgttggatggactttatcaggacgatatctttcatgagcaaatatctaatttaccagaagaatatattaagctggatgagatggccaaagatgaagaaaagaacagcttaaatatttatgaattcttctttgagccaacacatgaaattatatgtgaagaaatccaatcaacattggatttttattattcaaatagcgtaaccttccgtaggctggttaattataaagtagagctcagtatcaatgacgatgtagataccaataaatgcgaggtaaagatatctctaaattacagttacgaaaatattgatggggggcgaggatgtttatcgcttccatttgatcaaaacggctatccaattccccctgactttcacaactgtgtaaatggaatcacatcaaaaaaattgttgttagatctatttctaaaacatattttgcacgatcatttaaatgcaagcggtgaagttgcaaacgtttacgccaatgttatttataaagagattgatcccgctgcaattgcacatacatcgtcgtgtttttctcaggtaacgatgagtggtgaacatgagctatttaatgtagatagcgtaactgttccacctaaaagcactgagcaaattatatttgagggaaaggaaattcaaaagcaaattttcttatcttctcatagccgcaatcatcttcagccagtaaccattcataaaatggacaggagtattaaaaacattgcagtaactggtttgttattatcatcaagattagcagtaacatctggtgattataggataaaaaatggtaattcagagggtgagaatgattttttacctgttaaagaattacagagatatgaaagggctctcccggaggatcatcctgccccaactacggagcctaacctggcaggtaaggtgttagatggcctatttgaacacgttacatctatggcagggggacgctacagaaaacaagcctcatatccaccgctgtcatcggaagcgcctaatacgataaaatatggcgacagagagctcgttttaactaaagaacccggttcagaaacgtatcaggcaacctattcggatagcggaaaaaattcagccataacattttaccgatcttctgatggaagattttatcaggcgtcagggctgaaaggtggggggcttattcgccatattgataagccttattcagagttaagagaaggagacacgggttatgatgaagagcttctggatattacggatgattcccccttactggaagatatactggcctctctgtcagaagatttataccctacatcagaagaaaatgtacaaagtatttataagaaataccagagtggggatgctgcagcaggggagactgaagttgtattatgccgaggtacaataggtccgcaggctgaaaatattgttagttttaaaacagcaggcggtattgaggggggcgatgtagaggtattgcctgtctctgctgaaatagccaaagagcaggttcgaagtggaagaatcgtacctgaatataccaccgatcttagtgttgccgacaggttcagcagggaacattatcttattatcgttagggtaaaagtcaaatatcttacacgaggtagtgtcagtgaaagtggctgggttatgccaaaaaacacaccagtggaccctgttggtataattgacaggacatatggtaaagcagaaaatacggggcaggcaaacgcttctaagtaa

SEQ ID NO: 380338 - DNA, 828 bp, Salmonella enterica
ttgatagacttcctgaccacgcccgccacgcccgccacggcgtctggtgatgagagcggcgctattgatcagacagatacatcacaaccagcggcaatagaggcgtttattaactcgccggagtttcagaaaaatattcgcatgcgtgatattgaaaaaaataaaataggtagcggaagttatgggacagtctatcggttacatgatgactttgttgttaagattccaattaatgagcggggaataaaagtggatgttaactctccggagcatcgtaattgtcatcctgatcgtgtcagtaagtatttgaatatggccaatgacgacaagaatttttctcgttcggcctccatgaatattaatggtaaagacgttacagttttagtttcaaaatatattcaaggtcaggagttcgatattgaagatgaagataactatcgaatggcggaggcgcttcttgaatcccggggggtttatatgcatgatatagataacgtaggtaatattctgattaaagagggggtacttttctttgtcgatggcgatcaaatcgtgctatcacaagaatcccggcaacagcgaagcgtttctcttgcaacaaggcaactggaagagcaaattaaggcccgttacctggtaaaattaaagcagtccgagaccgaaggaaatactgaagatattgaatattataagtcacttattacagaacttgatgagttaatcggagaggaagaacaggcacctgcgccaggaagacgttttaaactagccgcgccggaggaagggactcttgtggctaaggtattaaaggatgaattaaaaaaatag

SEQ ID NO: 380339 - DNA, 237 bp, Salmonella enterica
gtgccggggttggccctgccggatggcgcggcgctgcaagttgacggcgtaccggcggtagccacaacggaaatccgaaaagttccggcgctgggtgactgtgacaccatgagttttgtcagcgccatcgttcagtattcccagcttgggctggaacccggcggcgcgctcggtcatgcctatctgctgccgttcggaaacaaaaacgaaaagtcaggcaaaaaaacgttcagttaa

SEQ ID NO: 380340 - DNA, 201 bp, Salmonella enterica
atgatcgaccttgcccgctgttccggacagattgccagcctttccgcgcgcgttgtccgtgaaggtgacgatttcagcttcgagtttggtctggaagagaagctggtacaccgtccgggtgagaacgaagatgcacaggttactcatgtctatgccgttgcccgccttaatcgatcgctgccgactggtaagccgaactga

SEQ ID NO: 380341 - DNA, 465 bp, Salmonella enterica
atgggggaaatgatattggcagaggtgaccacgcggcatattgctgagtttctggagtcatggatcgcggaaggtaaaaacacgatggcgggggcgatgaggtctgtactacctgacatttttcgtgaggcaattgtggaaggaagaataacaacgaatccggttgagtcaacccgagcacctgaaattaaggttgccagggaacgcctgcaactggaaacatataacgccacgcggacggcggcagaacatctgcctgtgtggtttcctcctgcgatggatctcgcgctggttactggtcaacgccgtgaggatatagctaacatgaagtatagtgatatcgttgatggtcgcctacacgtaacccagataaagacaggaataaagatagcattccccctctccctgacacttcaggcgccagggttacgtccgggacggttatcgatcgctgccggctggtaa

SEQ ID NO: 380342 - DNA, 123 bp, Salmonella enterica
atggcggttgaagttaaatacgtagtcattcgcgagggtgaggagaagatgtcatttaccagtaaaaaggaagccgacgcctgggacaaaatgctcgatactgccgatcttcttgatacctga

SEQ ID NO: 380343 - DNA, 1812 bp, Salmonella enterica
atgaatcctaatttgttacgcgtaacacagcgcattgtcgaacgctcgcagcagacccgaaaagcctatcttgcccgcattgagcaggcgaaaaccgccacggtccaccgatctcaactggcctgcggcaacctggcgcatggcttcgccgcctgtcagccagaggacaaagcctcgctgaaaagtatgttgcgcaataatatcgccatcattacctcctacaatgacatgctctctgcgcatcaaccgtatgaacattatccgcagattattcgtcaggccctgcattccgtgaatgcggtaggtcaggtcgcaggcggcgtaccggcaatgtgcgatggcgttacgcaagggcaggatggcatggagttgtcattactcagccgcgaagtgatagcgatgtcggcagcagtaggcctttctcacaatatgtttgacggcgcgttattcctcggcgtatgcgacaaaattgttccggggctggcgatggccgcgctctcttttggtcatttacccgcgatttttgttccgtcaggcccgatggcgagcggcctgccgaataaagaaaaagtccgtattcgtcagctatatgcggaaggaaaagtagacagaatggcgctgctggagtcggaagccgcctcttaccatgcgccgggcacctgtacattttacggcaccgccaacactaaccagatggtggtggagtttatgggaatgcagttgccgggttcctcgtttgtgcatccggatgcgccgctgcgcgaggcattgactgccgctgccgcacgtcaggtaacacgtcttaccggcaacggcaatacgtggatgccgctcggtaaaatgatcgacgaaaaagtcgtggtgaacggcattgtcgcgctgctggctaccggcggttccaccaaccacaccatgcatctggttgcaatggcgcgcgcggcgggcattctgatcaactgggatgacttctcggatttgtcggaagtggttccgttgatggcgcgtctgtacccgaacggtccggcggacattaaccacttccaggcggcgggcggcgtaccggtattgatgcgtgagctgctcaatgccggattgctgcacgaagacgttaatactgtcgcaggcttcggcctgaaacgctatacgctggagccctggctcaacaacggcgagctggactggcgtgaaggcgcggaaaggtcactggataacgatgtcattgcctcttttgataagccgttctctcctcacggcggtactaaggtgctaagcggtaatctggggcgcgcagtaatgaagacgtctgcggtaccggttgaaaaccagatcattgaagcgcctgccatggtatttgaaagtcagcatgatgtgctgcctgcgtttgacgcgggcctgcttgaccgggattgtgtcgttgtcgtgcgtcatcagggaccaaaagcgaatggaatgccagaattacataaactcatgccgccacttggtgtattattggaccgccgtttcaaaatagcgttagttactgatggacgactttcaggcgcttcgggtaaagtgccttcagctatccacgtaacgccggaagcctacgatggcggcttactggcaaaagtgcgcgatggcgacatcattcgcgtgaatgggcagacaggtgagttaactctgctggtcgacgaggcggaatttgccgctcgtcagcctcatattccggacctgagcgcgtcgcgcgtcggaacggggcgtgagttgtttggcgcgctgcgcgaaaagctgtcgggtgcggagcagggcgcaacctgtatcactttttaa

SEQ ID NO: 380344 - DNA, 1068 bp, Salmonella enterica
atgacagaatggatttttaatctgaaaacaaaactgaccgtgctggtgatgatgttgtgctctttatgtgtgactaaagtgtatgcggttgagccaagcctgaatgaatgtatcattacctctggtcagaatattaattttaaaaacataaatataacaaacgataattacaccccgggtccggggacagttgtcagcacaataactcagaagttcacttattcgtgtaatatatcatctttgatttcaggtaaaccacctttactgttattaaatcagccttatttcagagattttaccaaaaagttagacagtatgggcctgggttttcaggtgtccgttaccgacgctcctgtcttaacctgggacgatattaaagggatatcgcagggaggaaatgagcctaaagtggaatttggacagcctttacctccagggctcacgacacgaacagcaactgtaaaaatggaattcttatatctgacagcctacaaagagagcagtgctgtgtacactttttccggtataaataatgtgatgaatgttgttccggtaaattatgctcaaagaaacaacggatttgttttatctggttttaatgtgagaattctcagaaacggattgggtaaagttgacattgttccattacaggtcaactttgggcatatttatacgacttatgaaccttcacagaccagacaggcaaattttacagtgatcgccaggcaggttttacgaccggctatgggacaggaattcacgatcccgctggccatcaccttcgggaaaggtgcgctgacacaggataccgggcaaactctgaatcttgtcagtctggatggccccaacaaaggtcagcctaatggactccggctttcaataaaagatgataaaggaaaagagattacttttgataaacaagaagtattgggggatattactattacagaaactgtcaccggtaatgtgtcgaaggtatatactgcagtaataaccccgaccccggggggaagtgtaaagacaggaaagttttctgctgcaatacccgttactgttacctataactaa

SEQ ID NO: 380345 - DNA, 474 bp, Salmonella enterica
atggataaggccaaggtccgctgctggtatcagcaccgaattccgctcattagcgtttcgcacgaagagcaatttctcgctgcgcttaacattgtgctggtgctggctagtgagtcgctgtcgctgttacggaacgcgttaaagagcgctaaattcgattgtccgaaagaagccaaaatggattttagtatggtggatatcgccttctggcaggaaaccgaacccgcttttcggacgttgcaagaggcgctggctgtcgatccgcttcggcaggatacacagactcgtcacgcagtaagtcagtgggaggcggaattagcacactatctatttcacgtttttgaccgtgatgccctgaccaaccccgactgcccggacgatatcctgcagcgccagctgacggcccgacaggatttagccagcagctatcgtaaacataaagcgcgcaaggatgtgttggcgctggtcgaataa

SEQ ID NO: 380346 - DNA, 201 bp, Salmonella enterica
atgttgggctacggtatccatagatttgcgaagattcagcagaccttctttgcgaagcttaatgatcaattcttttctgtcaactgctttaagcgtcctggccgtagtggcacgagcagcggcgaaactatctatgcgctgtcgaatggtctctgttcctccaagagcaatattttctcacggaattttttattaccgtag

SEQ ID NO: 380347 - DNA, 1014 bp, Salmonella enterica
atgaaccttacaattaatcactgcatcgttttatttaacattttatttgtggttgtttacatgagttatttattcaagataaaagcattcaagatgaatgctgaacctcttacgcatcaaccattattcaaagccgcactaacaattccaataattagtttttttctgctcggatttgttgcatggaatggtcacgattttcaaatcgatacagaaggatttaataatttcctaaatattagtaagcttcctttagctgttttatccttatcgattccactgggagtagttgtcaataatattcaccgaacaatacaaacagacaaacaaatcaaagaagcagaaaagaaaaacaaagtggactttttctatgcccatagaaaaaacactatagaagcattgcaacaccttgaatctttagatattcctttaataaaaaagaacacaaaattagaatttgaaaattgttattctacatatcgtaaatgctatccttatgcttcaactactaataataattttgatgcttcaaaggactacatacaaaatgcagaactaatttggcgccaactagttgaactatttaaaaaagaagaaattaatgactatatagagttatatacccatatatatagaattgaaaaactattagaaatattgcacaaccattatggactaaagcgtttagagatcgaaaaactctatcagtgctccacctccggtgaagatgaacatattttattcttaaaaacaaagttttcggatgaattggatataaaaaaatatctacaatcatactggcactttcatttaaaaatggttgagatgcttgaatataatttcaccactgaatttgtgttacttatgaaggatataataacttattcagtcaataatcgtgatagaaaataccccttatttcaatatcactctacaattgacgcaagcgttcctcagttcattaagttaaaaatcagcaaaaaagatccacaaaatgtccatgtagagtgttaa

SEQ ID NO: 380348 - DNA, 1014 bp, Salmonella enterica
atggctgtacgaaaaacaggctcaggagagtggctatgcgaccttcgacctactggtgtgaaaggtaagcgcatacgtagaaaatttgccactaaaggggaagcgctggcgtatgagaaatacatcaccagtgaaatggaagaaaagccttggctaggtgaaaagcaagataatcgacgattatcagaactgattgagctgtggcatgatttgtatggccggacgttagcagattcggaccgcatgatgtcaaaattgaaaggtatttgcgctggtatggggaacccaattgcagctcaaatcacagctgcagatttcagtaaatacagagaaggccgcctgaagggtgaaatcccagatgttaacggacgctgcatgccaatacagccgcaaacagttaaccatgagcaacgtaatctatccgcagtattcggtacgttaaaaaaattaggacactggtcacttcccaacccactttcaggaatacctacgttcaaagtagatgaaaaaatggtttcctttttgtatccggaggagataaaaacactacttcaatatttatctgaatcaaacagccccagtgtgctaattattgcgaaaatctgcctcgcgactggcgcacgatggagtgaagcggaaaatctggaaggctctcaagttacgccataccgtatcacttacaaaaatacgaaaagtagaaaggtacgttctatacctatctcaaaagaactttataacgagatgccaaaaaaacgaggccagttgtttaccccgtgccgtaaaacttttgagcgtactgtagctaaagcggggattgaactgccagaaggccagtgtacacatgtattacgacatacatttgccagccactttatgatgaatggcggaaatatacttgttcttaaagagattttaggccattcagatataaaaatgactatgatctatgctcactttgcaccaacgcaccttgaagatgtaataacaaaaaaccctttagcattaataagttag

SEQ ID NO: 380349 - DNA, 573 bp, Salmonella enterica
atgaaaatagatctagagacaggcgcacgggaaggaattgagcgtatttgtgaggcttatgggtttacttcgcgtaaccagcttgcccgccatcttggaattacaaatagctctcttggcagccggattctaagaaataactttccttccgacatagcattgagatgctccctcgaaacgggtgcttcattactctggcttgtaactggcgatggggctatgttcgatcatgcttccagtgatattgtcaggatcccttcattcaaatttgataattcgaagttggttaaaatatcatccttgatgtttgacaaagtgatgattcctgaccacacaggtgatcttgaaatcattgtcgaagggaacgcaaaatacttagttgataaggcaaattatgccgcagccgagggcaaatatctgattgaatactcaggaacacagagcataaaagaattatcccttcttcccggtaataagttgcgaattgactggggaaaatatccgttagattgtgaaattgatgatgtgaccatccttggcaaagtcatcatgacgatggtagttagtgcttaa

SEQ ID NO: 380350 - DNA, 144 bp, Salmonella enterica
atgacgctggcaataaacgaagattgctacgccgttgatgcctggcggcgtgaaaccttcgcgccaggtacaccggcagacgtgacaatcacggagcgccgcctgtgggctgtaaacccgcaggatcataaatggcgtgcttaa

SEQ ID NO: 380351 - DNA, 213 bp, Salmonella enterica
gtgcaggatttgtttttggaaaccatcgcattgcagcggattgctttgtttacccggttgattgcaaacagtaagtgcactggctgtgaaaaagatatagcactggcctggctgagcgaattgactgcggatctggaaagtaaacttgatgaatatgaaggcaaaagcccccaaaaagggggattgtcatgcggcgggagtcgctttcagtaa

SEQ ID NO: 380352 - DNA, 1023 bp, Salmonella enterica
atgcaccttaataaccgtgcgcgggaattactggacggatattcggcgggcatggcgcagcagtttggggcgcgtgatgccagccgttatttttccctgaataacccgcaggaaaatgcgctgcgtcttgcgctgctggaatccgtcgaattcctggacatgcttacctgtctggatgttgatcagctgagtggccaggtgatttccgttggttcttccgtattacacacaggacgtagtgaaagtggccgttttattcgccaggttggtgtggacggaaacgactattcactggttgaaacagacagctgcgccgcgttgcgctgggatctgctttcggtctgggcaaacgccggtaaggatgaaaacgagttttataaccttgtccaggcatttaccacacaggcttttgcactggatatgttgcgtatcggctttaacggtaagagccgcgcaaaaaccactgatcccgaagctaacccgaacggtgaagatgtgaatatcggctggcatgagcgcatgaaaacgctgctgggcggcaatcagattatgaccgatccggtggtgctggatgcagccggggattacaaatcactggatgcaatggcgtcagacttgattaacgccaaaattccggcgcagttccgcaatgacccgcgtctggtggttctggtgggggctgatctggttgctgctgaacagtatcgcctgtatcaggccgcagaccgtccgactgaaaaaatcgcagcgcagttgctggggaataccattgctggccgtccggccattatcccgccttttatgccgggaaaacgcatggtggtgacgccgctgaaaaatctgcacatctatacccagcgcaatacccgtatgcgtaaggcggagtttgtggaagaccgtaagcagttcgaaaacaaatacctgcgcaatgaaggatatgcggtggaagtgccggaactgtatgcggccattgatgaatccgccgtaactatcggcaaggtttccgaaccagcggagggctga

SEQ ID NO: 380353 - DNA, 2028 bp, Salmonella enterica
atgtcgcagacaacaattacactggcatttgaacagtggaaagcgcagcagggaaccacgggtgagcctgttctgctggatgaatttgtattcgctaacgtaccgggacttgacccggatcagccggttgatcgcaatgaaaccctgccaccggctgaacagattgttcaccggcaggccgtcagccgtaagggtgtggtgaatgacaacgccgtggtccattccgtcgtactgggggcggacgtgggggatttttcctttaactggattggtctgattaataaggccagcggtacgctggcaatgattgttcatgcgccattacagcaaaaacttaaaacagctgaagggcaacaggggaacgtgcttacgcgctcgtttctgatggaatataacggcgcacaggctgaaaccggaattaatacgcctgctgagacctggcagattgactttaccgcgcgtatggccggaatggacgagcgccagcgcctggaaaatatcgacatcttcggggcggcggcgttttttggggacggctatctggtcgggaaaagcgggaatcagttttatgtgaccaaaggtaccggctatgtggctgggctgcgtacaacgcttgcagcaaacctgaatattaccgtgacaaccaggccggtcaaagtctggctggatgtatgctggacaggaacgcttaccagcgtgtggggtgtgcagtcccgtattacggttgctgacaacctggcggattatgtgcagaacggcgtacagcattatgtgtttgcggtggcgggtattgatgaaaacggcaatattacggatttacgcccgaaagggacgctgaatgagcaacaggccagcgatgcgctgagaaaacacgaacaatcccgtaaccatccggacgccacaacccgcgaaaaagggtttgtacggttaagcagtgatacgaacagtgagtcggaatcactggccgcaacgccgaaagcggttaaagcggctatggataatgcgaacgggcgtgtcccgtcagaccgtaaggtcaatgggcatccattatccggggatatcaccctgtgggcgtcagatgtgaaggctatttccgccgatgccattggacagattaccgataacggcacgatggcatcagctaatactccaggatggtggcgggtggcggtgtcgaattctgatacggtcgctgattttccgacctatccggatggcagcaagctgtacagctacggatatatgtttgttgagaaaatcggggaagtctggtttcagcactattacgcgcatatgggcgcgaacgcaaagcgccaggactggggaacggtaccgaataccagccgcccgtgggttattgactacaacaccgcaaataaaccttcagccggtgatgtgggtgcattgccgattaccggggggcggattaacgggtctttaggtattggtactgataatgcgctgggtggaagctcaattgtattcggcgataacgataccgggtttaagtggcacagtgacggcgttctgggtatttatgccaataatgcccaggtcggttatatcgacaattccgggtttcacatgctggcagatattcgcgctactggtatcgtgcgtgccggcaacggaaaaacactgacgttatcgagtggtaacaattctgcactgaatgccggtttcagtctgtggggaggtggagaacgtccaacagtcattgagcttagcgacgatcagggatggcatttatacagccagcgaaggccagacggtggaattgagctgagtgtaaacggcaatatttaccctggtaattacagtaattttgacgcccgctacgtccagaatatccagcgcggtgctccagtatggcctggtaaagtagatgaatatggtcccaatgaagcgcctgccggctgttttttaacacaggcaagacacgatcctaccaccgcctatggtgtcacattcgcgtacaggccattgcagatgtttatcaacggtgcgtggcgaaccattaacggctaa

SEQ ID NO: 380354 - DNA, 528 bp, Salmonella enterica
atggagctaaaaaacgtagttatttattcacctgaaaaaaagccagtcggtgatgcttttctgtatttttgcagcgaagacggaaaagacttttatgattcgctggataagttcacgaaaaaatacaagctgtgcattgacccggatacaggtattgtccgttctgtagccgaagatgtgtcgcgcctttatccggcaggttttacggtagttgagaccgatgtactgccagacggatttgatatttatgggggatggcgtttcattaacgggaaggtaaaacccgtaccggttgattatcaggcgaaagcagaagaaacgcggaaaaaattacttaatgatgcagataacagaatcagggactggcgtacagaattaacgctgggaactatcagtgatgaaaataaagcggttttgattctgtggatgaattatatcaatacgcttaaatcactggatatcagcaatgtaacaactgaggcgaaatataaggccattaaatggccggaggtaccggatgtggcgtga

SEQ ID NO: 380355 - DNA, 1119 bp, Salmonella enterica
atgactgaaaaattcaccgcgatcttgctagatacgagtatctacgatcagtacggattaaagcttgagaaaggactgctgggtaagctttcccagttcagcagaacttcgacgacgtttttgataccggatgtaatatacaatgaagttaaaaatcatctagaaagaaaaatcaagacttcacgtggctcacttgagaaagctttcgaagaagctggcgaccaccttttttttgatggaagtgaactaaatgatgcaaaaaaaacattgattgaaagcagagaagttgaaggattaggaaagagcagattagacagatttgttgctgtcacagatgcggaggttctaaccactggggattatgtttcggtacctgagctccttgagcgatatttctcttcagaagctccttttgcggatacaggtaagaaaaaaaatgagtttcccgatgccatagcattaatggctgtccaagcttgggctgaagagaatggtgaaaatgttcttgctgtagcaagagatgatgattggcagagattttgtgttgatgctgagaatctgcactatgaaccagacttatcaagcgctttagcacacttcaatgaagaaaccgcaccttatgagctaattgataacttacaaaaagcacttgatgaaggacaagccggtaaattcttgcatgatgttgctgtacaccttgagtcaacttttgaagggtttgcaccagaacaagaggcagattcatatttatattgggaggctgatggatgctcaggtgggtttgaagattttgagttttcagataatcaattcactgttattgataaggatgaaaactgggttgttttagaagcattcgctgaaatttcactttacgcagaaggggatttctccctatcggtttacgattcatgtgacaaagaccacgtgtacatggggtcaattactaagcgagctgaggaaacgtatacatccagaatacttatcacaatctccggagacttatcgggttctatagatgatttgaccgttgacgatgtggaagtgatcgagcgcccaacgtcgatggatttcggagagcttgaattagaatataggcctgacgaggaagacttgtaa

SEQ ID NO: 380356 - DNA, 708 bp, Salmonella enterica
atgtttgctcattatcgggataagcgtttaaccggagaaatttacttcagcgaaaaatggaaaaacggtgccagtcctgtaaccgttaatttggagcaaaactatttaagcggtgcttttagtgagctgatacgtttgggggaatggttgcaacctaaccctcttgagaacatgcgtaagttcaccatagccgaaaaagaaatggcgtggctaacccacgagcagatcgcagaattgctttatgattgccaacaccagaacgaattgttaacgctggtagtcaagatttgtttaagcaccggcgcccgatggcgagaagctgtaaacctaaccagatcgcaggtgactaagtaccgcattactttcaccaggactaagggtaaaaaaaatagaagtatccctatcagcaaagaactgtatgaagagatcacagcgctaaaaggattcaaattctttgacgattactactttcagtttgcttcggtgatggataaaacatccatcattctgcctcgtggacagctaacacatgtcctgcgccatactttcgccgctcactttatgatgtccggtggcaacatactggcgcttcaaaaaatactgtggcaccatgatataaagatgacaatgcgttacgcccacctagccccagatcaccttgaaaccgcgctgaggttcaacacgctggcaacaatgcaagcggcataa

SEQ ID NO: 380357 - DNA, 243 bp, Salmonella enterica
atggccacaaaatatcaaacagaactggcactgaaggctttactcattgagttgaaccactctggtcaagacttatataagctcattgacgatgctattttgcgtatgcaacaggaaaaaatctttgtgaaagaggattcatacagggagcgaggtggagcggaagatgtactctttattaacgtagaggcaatcgcggggaagcggcctgatatagctccaggaaacattgagaatttctaa

SEQ ID NO: 380358 - DNA, 606 bp, Salmonella enterica
atgtacgatgattacgttattgaatgggatctggcgtttgctgaatatttaaaaaagctggccagcattttcttaaaggaaacgccagatttatggcccaatatcgtctcccgcctcgccagcgatcctgccagttttgaagacgacgaggacgatgactacgggatggtggaggtgcttgattgcagcggcggtgatttagacaatcgtgcgttgttacaggcattcatgcaggttctacgtgctgaaggcgttattgaagaaattgattacaagggtgagggtgaagaaggtctgctcgccacttttgcggccaatcgttattatgacctgacaaaagattttgccagtacagatgaactaaaaacgcgactactggcactcaccagatatgatgaaataggcaaagtctgcaaaaaaggcgatcgttacgtcgatgagatatttgagcgcattcaaagccagctcaacgaacgtggctttcagatagccagtctcaatgaaagcactgatgcctataatatatttgttttatctatggatgagtacgaacaaatagctgacttcgacactccatggctcgaagtacaagattttttaagttag

SEQ ID NO: 380359 - DNA, 126 bp, Salmonella enterica
atgaaaataggattttcgcaatactattcagtaagttatgaagtgttttttttgagagataaattgcaaaatgtgatctaccgcacactttgccactcaggtatcgaagcgaatgtctacgcttaa

SEQ ID NO: 380360 - DNA, 546 bp, Salmonella enterica
atggataaaatatatgcaatgaaattgtttgtacgcgtggcggaacgggaaagtttttcccgtgcagcagaagatatcggccttcccaaaggcagcgtctcacggcaaatacaagcgttagaacatcaactgggcatccgcctgctccaccgcaccacccggcgggtacagcttactcaggacgggatggtttactacgaacgggcaaaagatctgttgagtaacctggatgaactggagggtcttttccagcctgatcccgccagtatcagcggcaaaatacgggtagatatcccgccaggtctcgcaaacagcctcatcatgccgcgcctgcccacttttttgcatcagtatcccggcattgcgctggaactttgtagtagcgatcgacaggtcgatttactacgggaagatttcgactgcgtggtgcgcacagagccgctacatgcgccagggatactgacgcgcccgcttggcgggcttgaggatggtgaactgcgccagcccacaatacctggcgcgctttgggtatccagaaaaccttga

SEQ ID NO: 380361 - DNA, 138 bp, Salmonella enterica
atgactaaagcaggcaaaataaccgccgccatcacagggactttcttgttgttgatcgccatagtgattttgttgatcgcaacatttgactggaaccgcctcaaaccgaccatcaacagaaagtctctaccgaattga

SEQ ID NO: 380362 - DNA, 2280 bp, Salmonella enterica
atgtgtgcggcggtaataggattaagcgcgtttcctgctttcatgacggcggcggcgcctgcgatgccgccattgatcaatgctgaacccaccgagcctgcgcagtcgctcgtaactgaggcgcccgtcgtggcgcagaccgcgccttcgcgcgaggtcaagctgacctttgcgcaaatcgcgccgccgccgggcagtatggcgctgcgtggcgttaaccctaacggcggcattgaatttggtatgcgcagcgatgaagtggcgtcgaaagcggtgttgaatctggaatatacgccctcgccgtcgctcctgccggttcagtcgcagctcaaggtttatctcaatgatgaactgatgggcgtactgccggtgacaaaagagcagttggggaaaaagacgctggcgcaggtacctatcaatccgctatttatcaccgactttaaccgggtgcggctggagtttgtcggccactatcgcgacgtgtgtgaaaacccggccagcagtactctgtggttagacatcgggcgaaatagcgccctggatctgacctataacatgctggcggtgaataacgatctgtcccacttcccggtgccgtttttcgatccgcgggataaccgtccggtgacgttgccgatagtgtttgctgacatgccggatctggcgcagcagcaggcggcttctattgtcgcgtcctggtttggctcgcgggcggactggcgcggtcagcgcttcccggtgttgtataatcacctgccggatcgcaatgcgatcgtgttcgccaccaacgatcgacgcccagatttcctgcgcgatcatcctgcggttaacgcgccggttatcgagatgatgaaccatccggataatccgtatgtgaagttgctggtcgtgtttggtcgagatgataaagacctgttgcaggcggcaaaaggtatcgcgcaagggaatattctcttccgtggttccagcgtggtggtcaacgatgtaaaaccgctgctggcgcgcaaaccgtatgatgcgccgaactgggtgcgtaccgatcgcccggtcacttttggcgagctgaaaacctatgaagagcagctccagtcgagtgggctggagccggcacccatcaacgtttctttgaatctgccgccggacctctatttgctgcgtagcaacggtattgatatggatctcaactaccgttatacctcgccgccgaccaaagacagttcgcggctggatatcagtctgaataaccagttcctgcaagcctttagccttaacagcacgcaggaaactaatcgactcctgttgcgcctgccggtacttcagggactgctggatggtaaaacggatgtgtctattccggcgctcaaactgggggcgatgaaccaactacgttttgacttccgctacatgaatccgatgccgggcgggtcggtggacaactgtattaccttccagccggtaccgaatcatgtggtgataggggatgactccactatcgatttttcgaaatattaccactttatcgcgatgccggatttacgcgcgttcgccaatgcgggtttcccgttcagccggatggccgacctgtctgacacgctggcggtgatgccgaagaccccaaccgaagcgcaaatggaaacgctgctgaatacggtcggcgccattggcgggcagaccggtttcccggcaattaatctgacaatcaccgatgatagcgctcagatagccgacaaagacgccgatctgctgattattggcgctattccgggcaagctaaaagacgataagcgtatcgatctgttggtgcaggcgacacaaagctgggtaaaaaccccgatgcggcagaccgctttcccgtcgattatgccggatgaggccgatcgcgcggcggatgcgcagtccaccgtcaccgccagcggcccgatggcggcggcggtgggcttccagtcgccgtttaatgatcagcgcagcgtgattgctctgctggctgacagcccgcgcggctaccagctactgaacgacgccgtgaacgacagcggtaaacgtgccgcgatgtttggttccgtggcggtgatccgcgagtccggcgttcacagtctgcgcgttggcgatatctattacgtcggacatctgccgtggtttgagcggctgtggtatgcgctggcgaatcacccggtgctgctggcggtactggcggccctcagtgtggtattactggcgtgggtattgtggcgtctgctacgtattctcagtcgccgtcgtctcgaccctgaccatgagtaa

SEQ ID NO: 380363 - DNA, 651 bp, Salmonella enterica
atgaaaaataataccggttatattatcggtgcgtacccttgtgcaccctcatttcaccagaagagtgaagaggaagagacggaattctggcggcaactctctgatactccggatatccgggggctggagcagccttgtcttgaacatcttcacccgctcggcgacgagtggttattgcgccatacaccgggaaactggcaaatcgtggtcaccgcgataatggaaaccatgcgtcgccgtagcgaaaacggcggttttggattagcgtccagtgacgaggaacagcgtaaagcctgcgtggaatactaccgtcatctttatcagaagataaataaactcaatgcgaaaacccccggcaaagttatagcccttgagcttcatgccgccccgctggcgggcaatccgaacgtggcgcaagcaaccgacgcctttgcgcgctcattaaaaaagattgccaactgggactggtcctgcgacctggtgcttgaacactgcgacgcgatgaccggccccgcaccgcgcaaaggattcttaccgttggtaaacgtactggaaactattgccgactatgacataagcgtctgcattaactgggcgcgctcggctattgaagggcgggatacctctctaccgctgatccacacgcagtag

SEQ ID NO: 380364 - DNA, 684 bp, Salmonella enterica
atgtacaaaaatggaaaatttatccccctgcttgctttgggattcacattttttttgtctggttgtgattacttcgcagataagcaccttgttgaagaactgaaaaaacaacaaaaagaacaagaagcaaagataaacctgttagaaaaacaacaaaaagaacaagaagtaaagataaatttgctagaaaaacaacaaactacggttatcaacacgactcaaaagatcgccgaagtcgttggccgcgttgaacgcaaacaacggctattcgactatacagaactggacccatcacaaacgcactattttattattaacaacggcaatatcggattagccgggcgtattctatctattgagccaatagataatggaagtgttattcatcttgatttagttaacttactcagcattcccgtatcaaaccttgcgtttaatatgacatggggtacgaaaaaaccttccgaggcaaaagatctgcctcgctggcgacaactcctgctcaacacgaaaatggactcgacaatcgaactcttaccgggagcatggacaaacgtcacgctaacattaaaaggcgtatcgcccaataatcttaagtatctaaaaataggtattaacatggagaatgtcatattcgacagcatacaacctattaatgatacgaaaaagaagccaaaaaaataa

SEQ ID NO: 380365 - DNA, 138 bp, Salmonella enterica
atgaaaattagcgacggaaactggctgatccagcctggccttaatttgattcacccggttcaggtgttcgacgttgaacagcacgggaatgagatggtgatctatgccgcgccgcgtgatgtccgcgaacgaacctag

SEQ ID NO: 380366 - DNA, 399 bp, Salmonella enterica
gtggcgctggcgttaatcatcgccaccctcggcgtctaccagcacgccagcaaccagtatgtctatctggcctcgctgttcgcgctcggtttcctggtgtttgggccgcagctgttaattggcgtggcggcagtcggttttgtaccgaaaaaagccatcggcgctgcggacggtatcaagggcaccttcgcttatcttatcggcgatagctttgctaagctgggtctgggcatgattgccgacggcacccccgtttttggtctgaccggttgggcgggtaccttcgccgcgctggacgccgccgcgatcggctgtatctgcctgatggcgatggtcgccgtgatggaagagcgcaaaatccgccgtgagaaaaaaattcagcaagtcaatatcgcttaa

SEQ ID NO: 380367 - DNA, 603 bp, Salmonella enterica
atgacgttgaactggcgcatcgcatgtttgacggttggtaatgaacaccttttttcccgtttaatcaccgttgttgcctgcttttttattttctccgccgcgtggttctgcctgtggagcatcagcctgcatctggtagagcgcccggagctggcggcgctgctctttcccttcggcctgcgcctgggacttatgctgcaatgtccgcgcggttactggccagtattgctgggcgcggagtggctgctggtgtactggttggcgcaggaagttgcgctggcccatctgccgcttttgatgatcggtagtgtgttgacgctactgcccgtggcgctgacttcgcgttaccgccatcagcgcgactggcgcacgttattgcttcagggcgcggccctcaccgccgcggcgctactgcaatccctgccctggctggggcagggggaagcggcatggaacgcgctactgctgaccctcacgggtggtctgacgctggcccccatctgcctggttttctggcactatctcaccagcactacctggctgccgctgggaccatcgctggtatcgcagccggtaaactggcgcgggcggcatctgatctga

SEQ ID NO: 380368 - DNA, 459 bp, Salmonella enterica
atgatctcgaccgtcagcctgacgcagggaacgacgtgggcgaaagcgccctggcgttttgaggcgggaacgccgaatactggcggcatcattggtctgggcgcggcaattgactatgtgacgtcgctgggactggataagattggcgattatgagcagatgctgatgcgctatgcgctggagcaactggcgcaggtgcctgatatcacgctgtatggtccggcgcagcggttgggcgtcatcgcgtttaatctgggtaaacaccatgcttacgacgtcggcagctttcttgataattacggcatcgcggtacgaacggggcaccactgcgcgatgccgctcatggcctggtatggcgtgccggcaatgtgccgggcttcgctggcgatgtataacacccatgaagaagtggaccgactggtggcaggattaacgcgtatccaccgcttattgggataa

SEQ ID NO: 380369 - DNA, 240 bp, Salmonella enterica
atgaaccgtactaacaaactgatcttaggtgcagtagttctgggctccgcgttactggcaggttgttccagcaacgctaaaatcgatcagttatcatccgatgtgcagacgctaagcgctaaagttgatcaactgagtaatgacgtaaatgcaatgcgttccgacattcaggctgctaaagacgatgctgctcgagctaaccagcgtctggacaacaaagtatcccgcgtccgtaaataa

SEQ ID NO: 380370 - DNA, 405 bp, Salmonella enterica
atgattgatattacgcttcctttgactgacatccaccgccaccttgatggcaacattcgcgcccaaacaattctggatcttggtcggcagttcaacatcgcccttctcgcccaaacgctggaaacgctgattccgcatgcccaggtcacctcaaccgaacctgatttagtaagctttctcactaaactcgattggggggtaaaagtcctggcatcgcttgacgcctgccgccgtgtggcctttgaaaatattgaagatgcggcacgtaacggcctgcattacgtcgagcttcgcttttcgcccggctatatggcgatggcgcatcagttaccgatcgcaggcgtggttgaagccgttatcgacggtgtacgcgacggctgtaacacgtttggcgtcgaggcatga

SEQ ID NO: 380371 - DNA, 1221 bp, Salmonella enterica
atgtttaaatcttttttcccaaagccagggccgtttttcatgtcggcgtttgtttgggcgctgatcgccgtcattttctggcaggcgggaggaggagattgggtggcgcgactggtgggggcatccgatgaagtgcctatcagcgcagcgcgcttctggtcgctggactatctgattttttatgcttattacctgatttgcgtgggattatttgcaacgttctggttcatctatagcccgcaccgctggcagtactggtcgatagttggcacctcgctcattatttttgtcacctggtttttggtggaggttggcgtcgcggttaacgcctggtacgcgccattctatgatttgattcaaacggcgctcagctcgccgcacaaggtcactcttggtcaattttatcatgaagtgggggtgtttctcggtattgcgcttatcgccgtggtgatcggcgtgctgaacaacttctttgccagccactatgtatttcgctggcgtaccgcaatgaatgagcactatatggcgcactggcagtacctgcgccatatcgaaggggccgcccagcgtgtgcaggaagacaccatgcgttttgcctctacactggagaacatgggcgtgagttttatcaatgccatcatgacgctgatcgcctttctgccggtgttagtcaccctgtcagcgcatgtgccgaatttacccatcgtaggacatatcccttacggcctggtcattgccgccatagtctggtcattaatggggacgggcctgctggcggtcgtcgggatcaaattgccggggctggaatttaaaaatcagcgagtggaagcagcttatcgtaaagagctggtctacggtgaagatgacgccagccgcgccacgccgcccaccgtccgtgaactgtttagcgcggtgcgccataactacttccgtctctactttcactatatgtatttcaacatcgcgcgcattctctatttgcaggtcgataacgttttcggtttgttcctactgtttccttccattgttgccggtacgattacgctggggctgatgacgcaaatcaccaacgtgtttggtcaggtgcgcggttcgttccagtatttgattaactcctggacgactctggtggagctgatgtctatttataaacgtttacgtagctttgaacgccagttggatggtcagccagttcaggaagtgacccactcttttagctaa

SEQ ID NO: 380372 - DNA, 1050 bp, Salmonella enterica
atgaaaatcagtcgggaaacactccatcagcttatcgaaaataagctttataaagccggactaaaacgtgagcacgccgccatcgtcgccgacgtactggtttatgcagatgccagaggtattcactcacatggcgccgtacgcgttgaatattatgccgaacgaatttcaaaaggcggcaccaaccgggagccgacgttccgcattgagaataccggtccctgtacggcgatactgcatgccgataatgctgccggacaggtcgcagccaaaatgggaatggagcatgctattgaaatagccaaaaaaaatggcgtcgcggttgtcggcattagcagaatgggccatagcggcgccatctcttatttcgtccgccaggctgctcgcgaaggcctgattggtctgtctatctgtcagtccgatcctatggtcgtgccgtttggcggggcggatatttactatggcactaatccgctggcctttgccgcgccgggcgaaggcgatgacatcattaccttcgatatggccaccaccgtgcaggcctggggaaaagtcctcgatgcacggtctcgcaatgagtccattccggagagttgggccgtcgataaaaacggcgcgccgacacatgatccttttgccgtcaatgcgttattacccgccgcaggcccgaaaggttacggcctgatgatgatgatcgatattctgtccggtattctgctggggctgccgtttggccgccaggtcagttcgatgtatgaagatttacacgccggacgcaatttaggacaacttcatctggtcattaatccggcgttcttttcttcctgtgaattattccgcaaacatattagtcagactatgcaggaactcaattccgtgaagcccgctcccggttttaaacaggtttattatcctggacaggatcaggatattaaacagaaaaatgccgatatgaatggtatcgatattgttgatgatatttatcaatatctgatttccgatgccctctatctcaagtcatacgaaacaaaaaatccctttgcccaataa

SEQ ID NO: 380373 - DNA, 336 bp, Salmonella enterica
atgatccacgcctttattaaaaaagggtgttttcaggactctgtcagcttaatgattatttctcgaaagctgagtgagtccgaaaatgttgatgatgtatcggtaatgatgggaacgcctgcgaataagtcgctgctggaaactaccggtttctggcatgacgattttcatggcgctacgcctaatgacatttgcgtggcgattcgtaccgaagcggtagatgacggcattacgcaggtgattgtgcaacagctcgaagaagcattgcagcagttggcgcagggaagcagcggcagccagtcgttaatccaggtcaggcgctggatcgttcgttga

SEQ ID NO: 380374 - DNA, 1815 bp, Salmonella enterica
atgcagggcaacttctataatgatgcggtgatagacccttatatgctggaacgcgcggaagtgatgcgtggtccggtttccgttctgtacgggaaaagtagccctggcggtttgctgaatatggttagcaagcgcccgacgacggagccgctgaaagaaattcagttcaagatgggtactgacagcctgttccagactggttttgacttcagcgacgcgctggatgaagagggcgtatattcttatcgtttgaccggtctggcgcgttccgccaatgcgcagcaggatcgagcggaagagcagcgctatgcgattgcgccagcgttcacctggcgtccggatgacaagacgaactttacgtttctctcttatttccagaatgaaccagagacgggttactacggctggctgccgaaagagggaacggttgagccgctgccaaacggtaaacgtctgccaacagatttcaacgaaggggcgaaaaacaatacctattctcgaaatgagaagatggtagggtacagtttcgatcatgaattcaacgacatctttaccgtgcgccagaatttgcgttatgccgagaataaagtctcgcaaaatagcgtctatggttatggcgtttgttccgatccggcaaacggttacagcaagcagtgcgcggcgttagcgccagcggacaaaggtcattatctggcgcgtaaatatgttgttgacgacgagaaactgcaaaacttctccgttgatactcagttgcaaagtaaatttgccaccggtgaggtggatcacacgctgctgaccggcgtcgactttatgcgtatgcgtaacgatatcaatgcctggtttggctacgacgactccgtacctctgcttgacctctataacccggtgtacactgatttcgactttgcttcacgagatccggcaacatccggcccgtaccagattttgaataagcaaaagcaaacgggtctgtacgtccaggaccaggcacagtgggataaagtcctggtaacattgggggggcgttacgactgggccgatcaagagtctcttaaccgcactactggcatcacatctaaacgtgatgataagcagtttacctggcgtggtggcgttaactacctgtttgataatggaataacgccttacttcagttatagtgaatcgtttgagccagcttcacagacgggagagaacagtaaaatattcgcaccttcgaaaggtaagcagtatgaagcgggggttaaatatgtaccgaatgatcggccgatagtcattaccggtgcggtctatcagttgaccaaaaccaacaacctgatggctgatcctgcggggtctttcttctcggttgaaggcggtgaaattcgcgcccgcggcgtggaattagaagcgaaagcggcgctttctgcaagcattaacgtcgtgggttcttacacctatactgacgccgaatacacgacggatacgacctataaaggtaatactcctgcacaggtgccaaagcatatggcgtcgttgtggggcgattacactttctttgatggcccattgtccggtttaacgctggggaccggcgggcgtttcacggggtcaagctatggcgatccggcaaactcctttaaagtaggaagttatacggttgtcgatgcattggtacgttatgaccttgcgcgcgtaggcatggcaggctccaacgttgctctccatgtcaataatctgtttgatcgcgaatacgtcgccagctgcttccagacgtacggctgtttctggggcgcagaacgtcaggtcgttgcaacggcaaccttccgtttctaa

SEQ ID NO: 380375 - DNA, 660 bp, Salmonella enterica
atggatcgtatcattacatcatcgcgtgatcgtagctcgctactgagtacgcacaaagtactgcgcaacacctattttctgttgagcctgacgctggctttctccgcaattaccgcgacagccagtacggtactgatgctgccctcccccggcctgattctgacgctggtcggtatgtatgggctgatgttcctgacctataaaaccgccaataagccggtcggtatcctgtctgcttttgcgtttaccggcttcctcggctatatcctgggcccaattcttaacgcctatctgtcagcaggcatgggcgatgtcattggcctggcgctgggtgggaccgcgttagtatttttctgctgctccgcttacgttctgaccacccgtaaggatatgtctttcctgggcggtatgttaatggccgggatcgtcgtcgtgctgattggtatggtggcgaatattttcctgcaactgcctgcattgcacctggcgattagcgcggtgtttatcctgatttcctcgggcgctatcctgtatgaaaccagtaacatcattcacggcggtgaaaccaactatattcgtgcgaccgtcagtctgtacgtttcgctgtacaacatctttgtcagcctgctcagcattctgggcttcgccagccgcgactaa

SEQ ID NO: 380376 - DNA, 1233 bp, Salmonella enterica
atgcgctatacggcgattcatgactttgatactaacgataacgccatgggtgaagccggtttcaattcggcgggcgtcggaatgagcgcaacggaaaccatttacaacggcagagcggcgctggctgccgatccttacgtgacaaaaacgggaatcacggaagacgccattgagtccgtgatcctgccagtggtgcaatcggcgcgtcagggcgccaaattactgggcgacattattgaacaaaaaggcgctggcgaaggtttcggcgtcgcgtttattgatagcaaagagatatggtatctggagacgggaagcggacatcaatggctggcagtacgacttccggcagatagctatttcgtttccgccaatcagggacgtttacggcattacgatccgaatgataacgcgaattatatggcgtcatcaacgttagtaagctttgcgaaaaagcagggattatatgatccggcccgcggcgaattcgactttcatcaagcctattcgcaggataacaaaaacgataccacctataattatccgcgcgtctggacgctacaacaccagtttaatccgcatctggatacggccgttagcgaaggggaaacatttcctgtttttttaacgccaataacgaagatcagcgtggcggcagtaaaaaacgcgttacgcaatcactatcagggaacgtcgcacgacccttatgccagtcataatccacaagaaccatggcgacctatatccgtttttcgtacccaggagtcacatattttacaggtcagaccgaaattaccgcaggctatcggcaacgtagaatacatcgcctatggaatgccatctcttagcgtctatctcccctattaccaggggatgcgtcattatcaacccggagatgataaaggaaccgatcgggcgagcaacgactctacctactggacattccgcacgctgcaaacactggttatgcaagactacaatacgtttgcgccagatgtgcaacatgcctggaaaacatttgaacagcaaacagctaagcaacagtataagatggagcagagctatctgagattatatgcgtcgcatccgaaagaagcacaacgcttactgcaaaattttgaagataaaacgatgcaaaatgcgcagacgctcgcccgtcgcctgaccaataatattattacgacaatgacttaccgcacagatatgaaatatcacttttcaagtacgcagccataa

SEQ ID NO: 380377 - DNA, 1389 bp, Salmonella enterica
atgagtggggggaaattgccggaggggtgggtgacaacccatctttcagaaatatgcagtaagcctcaatatggctacacaactaagtcaagctctatgggggatgtaaaatttttaagaacaaccgatattacaaaaggagcggttgactggtccagtgtaccttattgcatggatgccccggaagatgtttcaaaataccaattacaggacagagatattgtgatatctcgagccggttcggttgggtttagttttttggtacaaaaccctccaagccaagttgtttttgcttcataccttattcgatttaaaccagttaattatttttcagaatattacttaaaacgttttttagagtcgagtgactattggaatcagctgtctttaatgtcagcagggaatgctgtacaaaatgttaatgctcaaaagttatcaacacttacagtaccaataccacctatagccgaacaaaaaatcatcgccgaaaaactcgatacgctgctggcacaggtagacagcaccaaagcacgtcttgagcaaatcccacaaatcctgaaacgttttcgtcaggcggtgctagctgctgcggtaagcgggttgttaattggttcaaataaaagaaaccaccacccattatgtagtgaatggcaatggccagacctaccatcaacttggagtgttcataaatactctgaacttgttgatagcagactaggtaaaatgcttgataaagctaaaaattttggctctgcaacaaaatatcttggaaatataaatgttcgctggtttagttttgatttagaaaaccttcaagatatactaatttcagatatagagcgcagagaattatcactcaagcttggcgatgttttaatatgtgaaggtggtgaacctggtcgatgtgctatatggagtgaacctcaggacatacctgttattttccaaaaagcattacatcgagcacgggtaaaagacaaaatcatccccgaatggttagtttataatttgaaaaatgattcaaataacattagcttatctcagctctttacaggaactacaattaaacaccttacaggaaaagcactagcaaattatcccatcagagttcctccattagaagaacaacacgaaatcgtccgccgcgtcgaacaactcttcgcctgggccgacaccattgaaaagcaggttaacaacgccctgaaccgcgtcaacagcctcacccagtcaatcctggcaaaggccttccgcggcgagcttaccgcccagtggcgtgcggaaaacccaagtcttatcagcggtgaaaacagcgccgccgccctgctggaaaaaatcaaggccgaacgcgccgccagcggtggtaaaaaaacctcgcgtaaaaaagcctga

SEQ ID NO: 380378 - DNA, 564 bp, Salmonella enterica
atgaaatttgagttgcatcaagattggtcaaatttaattgcactttggcctcaggttgaagaacatcaacggttggctaataagcacggaatcaatgatatattccaagataatggaggaaaacttctacaagttcttttacttctcagtcttaaggttcttcctgggcgagaaggtaatgatgcagtagatgtcactggtaccgagtttgaattaaaatcagttaatgttgagctaaccaagagtttttcaactcaccatcatatgaacccaacaataattgcgaaatatagacaagttccatgggtgttcgcaatttatagtaacatcactattcgttcagtttatttactcatgcctgatgatttggaagtcttctatgataaatgggagagacaatggtatgaaagggatggtaaagacataaacaatcctaaaataccggttaagtatgttatcgagtatggtaaattgctttggtcaaatgctactccagaagaattactttggactcctgaaatcgaagaacaaatcgatcttgggggatttgaagcggaaaattaa

SEQ ID NO: 380379 - DNA, 996 bp, Salmonella enterica
atgatgttcgacgataaaaaacctgcgtacaaaacagatttgggtgcaatgtacattgctgactcgcttgaaatgcttgaatcgatgcccgacaacagcctaaatttagtgatgacaagcccacctttcgctttacagcgtaagaaagaatatggaaatcacgatcaagaacagtacatcgattggtttttaaaatttggcgagttggtttttaagaagctaaaagatgatggtagctttgtcgtcgattttggtggcgcttacatgaaaggcgtacctgttagaagtgtttacaacttccgagttttgataaggatgattgatgaggttggattccatctggccgaggatttctattggtttaacccttcaaaactaccaagtcctattgagtgggttaacaaaagaaagttgcgtgttaaagattctgttaacacaatttggtggtttagcaaaactgaatggccaaagtctgatataactaaagttcttgttccgtatagtgacaggatgaaaaaacttattgaagaccctaataaattttattcccccaaaatgcgtccatcagggcatgatataagcagcagctttggcaaagataatggcggtgctatacctccaaatctattgcaaattcccaactccgaatctaacggaggatatttatccggttgtaaaaaaattggtgttaaaggtcatccagcacgattcccatctaaattaccggagtttttcattaatatgttaactgagccgggtgatcttgttgttgatatttttggaggttcaaacacaacaggaagtgctgctgaacaattaaaacgcaagtggctttcatttgagctctcacctgaatatgtagcggcttctgtatttagatttacagataaaaacacaagccaagatatactccaagagatgtatgacactatattaaatggaaatacactcgatttacgctccagagaaaataaagatcaaatcgtagttagctga

SEQ ID NO: 380380 - DNA, 1260 bp, Salmonella enterica
atgaagctgaacgccagacaggtcgagaccgcaaagccaaaagacaaaacctacaaaatggccgatggtggcggtttgtatctcgaggtttcggccaagggttctaaatattggcgcatgaaatacagacgcccctctgacaaaaaagaggatcgcctcgcttttggtgtttggcctacagtgacgcttgcacaggcaagagcaaagcgagatgaagctaaaaagctgttagtgcagggcattgacccaaaagccgaacagaaagaagctcaggccgagaattcgggggcatatactttcgaaaccattgctcgtgaatggcatgaaagtaacaagcgatggagtgaagaccatcgatcgcgcgttctgcgctatcttgagctttatattttccctcatatcggttcgtccgacattcgccagctcaaaaccagccacctgttagccccgattaaaaaagttgatactagtggtaaacatgacgttgcacagcgtcttcagcagcgtgtcacggctattatgcgttatgccgtacagaacgattatatcgactctaatccagccagtgacatggccggtgcgttatcgacaaccaaagcacgacactatccagctttaccctctagccggttccctgagttccttgcacgtcttgctgcatatcgtggccgtgtaatgacgcggatcgcggtcgaactttccttactaacttttgtgcgttcaagtgagttacgtttcgcgcgttgggatgaattcgactttgataaatctctttggcgcattccggcaaaaagagaagagattaaaggcgtgcgttactcctaccgtgggatgaagatgaaagaggagcatattgttccgcttagtcggcaggcgatgattttattagagcagcttaagcagattagtggtgataaagagttactttttccaggagatcacgacgcaacaaaggtcatgagtgaaaatacggtgaatagtgctttacgggcaatgggatatgacactaaaactgaagtttgcgggcatggatttagaacgatggcgcgtggcgcattgggtgagtcggggttatggagcgaagatgcaatcgaacgtcaattaagtcattcagagcgtaatagcgtccgggcggcttatattcatacttctgaacatttggatgaaaggcgattaatggtccaatggtgggctgattatcttgatgcaaacaagattaaacctattagttcatttgactacgcaaaacttcactcttaa

SEQ ID NO: 380381 - DNA, 639 bp, Salmonella enterica
atgctaaaaaccattacccgccagctttttgcccggcttaatcgtcatttgccttatcgtctggttcaccgcgatccgctgcccggcgcgcagaccgcggtaaatgcgactatcccgccttcgctgagcgagcgctgtctgaaagtcgcggcaatggagcaggagactctctggcgcgtttttgatacgcacccggagggattaaacgccgccgaagtgacgcgcgcgcgtgaaaagcatggcgaaaaccgccttccggcacagaaaccctcgccgtggtgggtgcatctgtgggtatgttatcgcaatcctttcaacatcttactcacgattcttggcggcatttcttatgccacggaggatctgtttgccgcaggcgttatcgccctgatggtcggtatctcaacactgctgaattttgtgcaggaagcgcgctcgacgaaagcggcggacgcgctaaaagcgatggtgagcaataccgctaccgtactgagggttattaatgaaaatggcgaaaacgcctggctggaattacccatcgatcaactggtgcccggcgatattattaaactggcggcgggggatatgatcccggcggatttacggattatccaggcgcgcgatctgtttgtcgcctag

SEQ ID NO: 380382 - DNA, 447 bp, Salmonella enterica
atgggctggcgaaaaaagcactggttgtggggtaaaaaatgcccggtggcgctgcgcttaccgggcctacaatacgtacattcccgtaggccggatgcggcgctgcgcggtaaagtgggcggcaccgcgcgcattatcgcggtactggagccgcgttctaacacgatgaagatggggttatgcaaggatgacctggcgccgtcgttagggcgtgcggatgaagtgttcctgctgcagccgccgcatattccgtggcaggtttcagaagtggcggacgcctgcgtacagcctgctcactggagtggagatgtcgatacgctggcggatatggtggtgaaaaccgcacagcctggcgatcacatcctggtgatgagcaacggcggtttcggcggcatccatcagaaattgctggatgggctggcgaaaaaagcactggttgtggggtaa

SEQ ID NO: 380383 - DNA, 192 bp, Salmonella enterica
ttgttgtctatggaaaacccccagctaggctgggggttccggaaagctttcagctttaagccagttattaaaaccccttttgatttgttaaaacatcttgcggtctggcaactgcaaaagttcaacaagaaatcaaaagggggtcccaatgggggacgaaaagagcttagcgcacacccgatggaactgtaa

SEQ ID NO: 380384 - DNA, 138 bp, Salmonella enterica
atgggtaatattgcgggcgcgattaaaggcctgaacgaagagcaaggcaacgtggtttcccgttttggtctgaaactggtttacggttctacgctggtgagcgtactgtccgcctctatcgcggcgctggtactgtaa

SEQ ID NO: 380385 - DNA, 156 bp, Salmonella enterica
atgactacccgcgaaatcatcgccaccttcaaagagatgtacgatgctgatgtgtcgcccatgctgatacttaagatcaccgccgcagtaaaagagttggtcaaaggggcgtcaaaaaatggagtatgccgatccaggactggtcgctggcaatga

SEQ ID NO: 380386 - DNA, 336 bp, Salmonella enterica
atgttaacggcgctaacgaccatcacctattttattccttacctggtgatgttcccggcgttctggcgtttacgtaagacccagccggatacgccaagaagttttaaaattccgggcaaggttttaccggctattttacccgcgctgggctttctttctatcgcctttgccgttgcgctgttatttattccgccttctcaaattgatatgggcggatatttccagtacgccgggaaaattattggcggagccgtgctggcggttgtcgtcgcggagtacatttaccatcgggcgcagaaacgtaatgcccgtttaagcatggcgggaggaaaataa

SEQ ID NO: 380387 - DNA, 1632 bp, Salmonella enterica
gtgcgcctgattatcgcttttctgatggcctggtgcctcagcacgggggcgttcgccgcaacggcccccgacgccaaacaaatcacgcaggaactggagcaggcaaaaacggcgaaacccgctcagccggaagccgttgaggcgctccagactgcgttaaacgcgcttgaagagcgaaaaggctcgcttgagcgcgcgaaacaatatcaacacgttattgataatttccctaagctatccgccaccttgcgcgcccagttgaataatctgcgcgatgaacctcgcagcgtaccgccagagatgtccaccgaagcgttaaatcaggagatcttgcaggttagcagccagctactggataaaacccgcgaggcgcaacaggagcaggagcgcgtcagggagatcgccgactcgctcagccagcttccccaacagcaaaacgacgcccgccgccagcttaatgagattgagcgacgactcggcgccgcaggcggaagtgccgcgcttagccaggcgcaaagtctcagtatgcaggcggagtccgccaaactaaaagcgttagtcgacgaactggagttggcgcaactgtccgccaacaaccggcaggaactggctcgtctgcgttccgagctggcggaaaaacagagtcagcaattggatgcgtatcttcaggcgctgcgcaatcagctcaacagcctgcgtcaacgtgaagcggaacgcgcgctggaaagcactgagctgctggcggaaaacagcgccggtttgccggaaggcatcgtcgaacaatttaaagtcaaccgcgagctgtcacaggcgctcaatcaacaagcgcagcggatggatctggtcgcctcgcagcagcgacaggccaccagccaaacgttacaggtgcgtcaggcgctcaatacgctgcgggagcagtcgcaatggcttggcgtgtccaacatgcttggcgaagcgctgcgcgcgcaggtcgcccgtctgccagagatgcctaagccgcagcagcttgatacggaaatggcgcagctacgcgttcaccgtatgcgctatgaagaattactcaataagcaaccgcagctacggcaaatacgtcaggccaatggacaaccactgaccgccgagcaaaaccagattcttgacgcccagcttcgcactcagcgcgagctgctcaactctttgttacagggcggcgacacgctgatcctggagttgaccaaactgaaagtctccaacagccaactggaggatgcgcttaaagaggttaatgaagcgacccaccgttatctgttctggaccgctgacgttagcccgctatcgctctcctggcctgttgatttggttcaggatttacgtcggcttatctcattagatacgtttaatcagttaggtaaagccagcatcatgatgctgaccagcaaagagacgctactgccgttattcggcgcgctggcgctggtcgggtttagcctctattcacgccaacacttcaaccggttccttgagcgctcggcctcgcgcgtcgggaaagtcacccaggatcacttctcgctgacgctgcgaacggtgttctggtcgattctggtcgcctcgccgctgcccgtcttgtgggcgacgctcggctatggtctatag

SEQ ID NO: 380388 - DNA, 204 bp, Salmonella enterica
atgcctgcaattaaaaagttagctgatgccagagacgttattttgcatgaactgattttgcataaactgatcggacacctttcccgtgcagtggtcaacgtaaagtcaatgcaggcaaataacgtaaaccatttttgtactaaaacagaaaaagcgcatctataccctatgctggaagaaatgtttgcagtggcaggtaaatga

SEQ ID NO: 380389 - DNA, 159 bp, Salmonella enterica
atggtacccctcaatattcagaatttaaataaagcatttcctgaatatgaaactaattcactaaaaaataaaggtgaaatcacctcggcaacatgcattaaagaaaatacaaaaggtcatttgacttattatagcgtcagtgatcccgtctttgactaa

SEQ ID NO: 380390 - DNA, 396 bp, Salmonella enterica
atgaaaggtgatttatcggagtattccgttatccagacgaaagaacctctggataatgaaggcaaagtcagccggattgtggagtttatcgaaaaaccggatcagccgcagacgctggattccgatttgatggcggtaggccgttatgtactttcagccgacatctgggcggaactggaaagaaccgaaccgggcgcctggggccgcatccagcttaccgatgcgattgctgaactggcgaaaaaacagtcggttgacgcgatgctaatgacgggcgacagctatgactgcggtaaaaaaatgggctacatgcaggcatttgtgaagtacgggctgcgcaacctgaaagaaggagcgaagttccgtaagagcatagagcagcttctgcatgaataa

SEQ ID NO: 380391 - DNA, 264 bp, Salmonella enterica
atgcaaaaaaagcccgtactttcgtacgagctctttcttgaatatggcggtgagggggggattgactcgctgcgctcgccccttcggggcagcccgttcgctgtgcgcccggtctgtccaactggctgcgccgctactcagcccatccctgggcctcgccccttcggggccagagcaagctctgttcaaaaacgctcccggcgtttttgtgtcgaaccccggtcgggtgttctcatccccccttggtttgggggatgcatataa

SEQ ID NO: 380392 - DNA, 507 bp, Salmonella enterica
atggacgaaaagaaactcaaagcactggccgctgaaccggctaaagaccttaaaaccgaagccgacctcaatcagttttcccgcatgctgacgaaattaaccgtcgaaacggcgctcaatgcggagctgactgaccaccccgggcatgagaaaaatgcgcccaaaacaggctcaaacacccgcaatggctactcgtcaaaaacggtgttatgcgatgacggtgagattgaactgaacacgccgcgtgaccgtgaaaacacctccgaaccacagctgcttaagaagcaccagacgcgcattacgcagatggacagccagattttatccctctgcgccaaaggcatgactacccgcgaaatcgtcgccatcttcaaagagatgtacgacgtcgatgtgtcaccctcgctgatatctaaagtcaccgacgccgtaaaagagcaggtcactgagtggcaaaaccggcaactggatgcgctgtatcccattgtttatatggattgtatgtag

SEQ ID NO: 380393 - DNA, 789 bp, Salmonella enterica
gtggcaaaaccggcaactggatgcgctgtatcccattgtttatatggattgtatgtagtcaaagttcatcagaatggcagcgtaatcaacaaagccgtcttcctggcactgggtatcaacaccgaaggccagaaagagttactgggtatgtggctggccgaaaatgaaggcacaaagttctggctaagcgtgctgacggagctgaaaaagcggggccttcaggacatcctgattgcctgtgtggacggtctgaagggtttcccggatacgataaacagcgtcttcccgcaaatccatatccagctatgcattatccatatggtgcgtaacagcctgaaatacgtgtcctggaaagactacaaagccgccaccagcggcctgaagacggtctatcaggccccgaccgaagatgcggcactgatggcgatggatgcgtttcccccagggatccctatttatgctgttgctgatggagtgctggtgcataacccttatcccttttactctggtacttctgctgtagaaatcagacatggtgaattaatccttcgttatggcgaaattgctaatggatcacacataggtgggtcgtctgtgaaaaaaggtcagattattgctaaggtggggaggctgaacagtggttcatctatgttgcatctggaaatttataccaatggagcatcctcggccagtcttacaacacgtgtaggtgaattaagaaggcgttccgatgtaacagatcctgcaccatatctgaatgtatggaaaaataatcttccaaaagtttga

SEQ ID NO: 380394 - DNA, 480 bp, Salmonella enterica
gtgcttaaatatataggttttattttagttctgatgttatctggcattgttggttgtgctgcaaccgaacctggcaacataccattagatggcctaaacactaatagcttcgacattggggagattactgatggagagattactgatgatttgaggcactccacttgcactctgcgcctggccgataataagaaggaggattcctataactatattgaaggggcgatttgtcctgcggatggtgaagaatgtacttactctgccatcatgaaactgaatgggaatataacaatattgaaacagatatcatcaggtgaaaatgactcagtatataaaaataaggatttttctatcttcataaaacagattccagtggcagagcaaaatgatgatgaaggaagcgacattaaagccactattgtcgtcaaaacaaaaagcgatgaaaaaacacttaatatgacgggatactgtggggtttaa

SEQ ID NO: 380395 - DNA, 204 bp, Salmonella enterica
atgataaaatcaaaaggcagatatcaccgcacaatctggacgctcgaagaactggaattcgtgaaaacctactctcgccactggcatgagcgggaatatcagcttctggtacagtattatcctgtggaaggtatggctgtagcagaccgcttacccggcagaacaagagcatccatgagacaagcgcatactcaatgggcctaa

SEQ ID NO: 380396 - DNA, 471 bp, Salmonella enterica
atgtcatcgttgcaaatttcgcaaggcacgtttcgtctgagcgatacaaaaacacttcatctggattcgctgacgctcaatgcgggcgatagctgggcattcgttggggctaacgggagcgggaagtcggcgctcgcccgcgcgctggcgggtgaactgccgttattaacaggcgagcgccagtgtcggtttacccgcattactcgtctgtcctttgaacaattgcaaaagctggtcagcgatgagtggcaacgtaataacaccgatatgctcagtcctggcgaagacgataccgggcgcactaccgcggaaattattcaggatgaagttcaccatcctgcccgctgtgcgatgctggcgcagcagttcggcatttccgctttactcgacaggcgttttaaatacctttctaccggcgagacgcgaaaagcgctgctgtgtcaggcgctgatgtctgagccggagttatag

SEQ ID NO: 380397 - DNA, 849 bp, Salmonella enterica
atgaactgtttgatacgtattcgccagcgttatccggatctcgcgcaaagcgacaggaaactggcggattatctgctcgcgcaaccggatacggcgcggcatctgagctcgcagcaactggcggccgaagcgggcgtcagccaatccagcgtagtcaagttcgcgcaaaaactggggtttaaagggtttccggcattgaaactggctatcagcgaagcgttggccagcaatcctaatccgcattccgttcccgttcataaccagattcgcggcgacgatccgatgcgcctggtcggggaaaaattaattaaagagaatgtggcggcgatgcacgccacgctggacgttaacagtgaagaaaagctgttagaaagcgtcacgatgatgcgccacgcccgccgtattgtgatcaccgggattggcgcctctgggctggtggcgcaaaattttgcctggaagctactgaagattggcattaacgcggtggttgagcgcgatatgcacgccctgctggcgacggtgcaggcgctggcgccggaggatctgctgctggcgatctcttattccggggagcggcgcgagctgaacctggcggcggacgaaacattacgcgcaggcgcgaaaatcctggccattaccggtttttctcccaacgccttgcagcagcgcgccactcactgtctgtatacgattgctgaagagcaggcgacgcgcagcgccgctatctcctcgacacatgcgcaaatgatgttgaccgacttactgtttatggcgctggtacaacaggatttagagcgggcgccggagcgtattcgccatagcgaggcgctggtaaaaaaactggtatga

SEQ ID NO: 380398 - DNA, 402 bp, Salmonella enterica
gtgctggtagatgtattacggcaatcacaacagccgtttgataaagaacaagtggctgcgctgaacgaagagttaaaaaaaatagatcaaattccgggcgttgagaaaacgtctgtttattataaaatcaagaccgttgatcttttgggcaaaggtgatatcgatgcagcgtatgaggaaatcaataaaagcatcgagcttgaaatgtcgtggtttaactatgtcctgttggggaaagtttacgaaatgaaaggtgagaatcgtctggccgctgatgcctatctgaccgcctttaatttacgtccaggtgaaaatacgctgtactggatcgagaacggcgtatttcagacatccgttcagaaaattgtcccttatctgaatagttttctggcagaagattaa

SEQ ID NO: 380399 - DNA, 1140 bp, Salmonella enterica
atggcattgcattccacgcgctggctggcgctcagttatttcacctacttctttagttacggtatttttctgcccttctggagcgtctggctcaaaggtcttgggctaacgccggaaaccatcggtcttctgctgggcgtgggtctggtcgcgcgttttctcggtagtctgctcattgcgcctcgcgtaagcgatccttcgcggttgatctccgcgctgcgcgtactggcattgctgacgctggtatttgcgctggcattttgggcaggaacgcatgtcgcgtggctaatggtggtgatggttgggtttaacctcttcttttcaccactggtgccgctgaccgatgcgctggccaatacctggcaaaagcaaattaccctggactatggtcgggtgcggctgtggggggccatcgccttcgtgatagggtcggcgctgaccggtaagctggtgagtttatacgattaccaggcgattctggcgctactgacgctcggcgtcgcctcgatgttgctgggtatgttgttacgtcccagcgtgccgccgcaaggggaaagccgtcagcaggagagcgcaggctggcccgcctggcgtacgctggtggcacaaagttggcgttttctcgcctgcgtctgtttgctgcaaggggcgcacgccgcctactacggttttagcgccatctactggcagggggctggctattcagcatcggcggtcggctatttatggtcgttgggcgtggtggcggaagtgatcatttttgccctgagtaaaaagctattccgccggtttagcgcccgcgacttgctgttgctttccgctgtgtgcggcgtggtacgctggggactgatgggctggagtacggcgttgccgtggctgattgtgatacaaatcctgcactgtggcacgtttaccgtttgccatctggccgccatgcgctatatcgctgcgcgtcagggaagcgaggtgattcgcttgcaggccgtctattccgctgtggcgatgggcggcagcatcgcgattatgacagtatttgccggttttctgtatcaacatctgggcggcggcgtattctggattatggcgctggtggcattgcccgctatcttccttcggcccaaagtggttgccgcgtcatga

SEQ ID NO: 380400 - DNA, 1851 bp, Salmonella enterica
atggccttattacaaattagtgagcctggtctgagcgccgcgccgcatcagcgtcgtctggcggcgggcatcgacttaggcactaccaactctctggttgcgacggttcgcagcggccaggcggaaacactgcctgaccacgaagggcgccacctgttgccttcagtggttcactatcagcagcagggccatacggtcggttacgctgcgcgtgacaatgccgcgcaggatacggccaacactatcagctctgtgaaacgcatgatgggacgctcgctggcggatatccaggcgcgctatccgcatctgccttaccggtttaaggcaagcgttaatgggctaccgatgattgacacggcggctggattgctcaatccggtacgcgtatctgctgatattctcaaagcgctggccgcgcgggctagcgaatcgctctccggcgagctggatggcgtggtgattaccgttcccgcctatttcgatgatgcccaacgtcaggggacgaaagacgccgcgcggctggcaggcctgcatgtcctgcgcctgctcaacgaaccgacggcggcggcgattgcctacggtctggactcaggcaaagaaggcgttatcgctgtttacgatctcggcggcggtaccttcgatatctctatcttacgcctgagccgcggggtgtttgaagtgctggcgacgggcggtgattctgcgctcggtggcgacgactttgaccatctgctggcggactatattcgtgagcaggcgggaattgccgatcgtagcgacaatcgcgttcagcgcgaactgctggatgccgcgattaccgcgaaaatcgccttaagcgatgctgataccgttcgcgttaatgttgcaggctggcagggggagatcacccgcgagcagtttaacgatctcatttccgcgctggttaagcgcacgctattggcctgccgtcgcgcattgaaagatgccggcgttgagccccaggacgttctggaagtggtcatggtcggcggttcgacccgtgtaccgctggtgcgtgagcgggtgggcgaattttttggccgcacgccgttaaccgctattgacccggataaagtggtcgctattggcgcagcgattcaggccgatattctggtcggcaacaagccggacagcgaaatgctgctgctggacgtgattccactctctcttgggctggaaacgatgggcggcctggtggaaaaagtcattccgcgcaacaccactatcccggtggcgcgcgcgcaggatttcaccaccttcaaagacggccagaccgcgatgtctatccatgtgatgcagggcgaacgcgaactggtgcaggactgccgctcgctggcgcgctttgcgctgcgcgggatcccgccgctgccggcgggcggggcgcatattcgcgtgaccttccaggtagacgccgatggcctgttgagcgtcaccgcaatggaaaaatccactggcgtcgaggcctccattcaggtcaaaccttcctatggcctgaccgatagcgaaatcgcctcgatgatcaaggattccatgagttttgccgagcaggacgtgaaagcgcgtatgctggcggagcaaaaagtcgaagccgcgcgcgtgctggaaagtttgaccggcgcgctaactgccgacgccgcgctgttaagcgccgcagaacgtcaatgcattgatgatgccgccgcacatttaagcgcggtcgcacaaggcgatgatgttgacgccatagaacaagccattaaaaacgtagataaacaaacccaggaatttgccgctcgccgcatggaccagtcggttcgtcgcgcgttgaaaggccattccgtagacgaggtttaa

SEQ ID NO: 380401 - DNA, 333 bp, Salmonella enterica
atgtccggtttccaccacctcgcccataaattcatggccgaaaatatcaccatgttttacctgtgggatcttgccgcgatagagatgcaaatcagatccgcaaatcgcggtggcggtaacacgcaaaatgatatcgtcaggctgctcaatgccgggatcgggtacgttttcaacctttacgtgatgtggaccgtgatacgtcaatgctttcatgcagcctccggggtaacggtgaatgttgcgttcgactataaaagggtagctatcccggagagactgccggaaaaacaggcggctttaggatttttcctggaaaatacacgacttttttaa

SEQ ID NO: 380402 - DNA, 597 bp, Salmonella enterica
gtgattaccaccaccacgcataaaacgttgcgcgggccgcgtggcggcatgattctggccaacgacgcccggctggcgaaaaaaatcgacagcgccatctttcccggcttgcagggcgggccgttgatgcacgttatcgcggctaaagcggtggcgcttggcgaagcgctacagcctgaatttaaacgttacgccgggcaggtaatcgaaaatgcgcaagcgatgtgtcagcaactggcgcagcgcggcctgacgctgttaacgggcggtaccgactgccatctgggcattatcgacctgcgcccgcaggggttaaccggcgctcaggtggaatactttctcgaactggcggggatcacggtcaataaaaacacgctgccaggcgatccgcagccgccgtcgattacctccgggattcgcattggcagcgcagcctgcgccacccgcggaatgaatgccgatgattttacgctgatcgcggactggatcagtgaaattatttttgccatcaagacgccgaatattacagatatttgcgccgatattcggcaaaaagtgactaaattaaccaccaactatccgttgccttaccaatga

SEQ ID NO: 380403 - DNA, 768 bp, Salmonella enterica
atgcgccggccagcggtggtatcagccccggcgatgttcggcaggctgccggaccagcgcgactatgtgcgctggcgagtgggcgctgaagagggacgaatatggcaggactggctgaaccgccagacgtgggtgggcagcgggcggcatatcgtgttgccgggaggccagacgaccgatgaagagcgtgacggctggatgcacctgtcgccgcgtggcgaacatgatatgcccgcgccggaacaccatccgctgccgtggagctttgtgatgtcgccgggatttttgccgatgggtgggacgactgactggctgaccggagtgctgatggcgtcacgggatagcgtgggacgcccgtggccgctggtgatttaccagcgttgcggtcgggagtggctggacgagagtttgcaggagacgcagggctggctgtactggctggcgaggctggcggcgcagcatatcacgccggacacgatgcggcgcgggcggctaacggagcaggtggaccagctatgggcgatgtggcagccggggccgtggtgggcgcagtggctgcgcgggttacgacgaacatcgcagcgcagccgggaactgaccgggctgccggatgaagcaccggtagtagaactgccgggcgtgcgttatctgccgtggccgggctggccgggtaagacgctggggcaggcaacaccggggcaaggctggttctggcagcaaaacagtgaagggcggtatgtggatgcgctgcgactggcggagaaataa

SEQ ID NO: 380404 - DNA, 702 bp, Salmonella enterica
atgagtaaacgtgaagaaattaaaggtaatcagaagcttgatgaactcaaatttggcattgtatataccgaagtgttgggttggcttgatatgggacatgccggtggtgacgatatttccctgctaaaacagcaatttgatgcgggtgaaagctccggtaataaatattactcagtgatatataaacagaatatgcgaatcagaagtaaaacactgaggcaggaaatggggacaggaaaattcactcgctgggaaatccaaagaggacgtactcaggatgaaattaatagcatcatgctggcgatgatgatgaatacagcattgaagtttgaggcgtatcaaagcttgaaagcattttcatggcatacagatagtggatttagtggtgaagatttggtttcagatctttttggtttttatcgttttatgatcccggggaaatacagtagtttggttcgtcccgtcagttataatgatgcggttagtcgctgggatttttacggacctgttggcagttttaaaaatgatgggtttcgacccattctgtttcctgatccgaaggatccctgtgtcaaacataaaccttataaggtaaatttgccacattttatgacatggatccaaccgtggagtgattttacatcgggtaagataagaatcataactaatgatggaacatcattttcttttttacccatatag

SEQ ID NO: 380405 - DNA, 450 bp, Salmonella enterica
atgcaagggatgagaattttcagacgtctttttttatggtttatccttgccgtattttctatgctttttatcgcttgtatttttatatatatgatttcatcaggaatgaatgatggtggagtttatacggaaaatgactttttaaaataccacatgcttactgatcctgacatattaaatagtcctaaagtatctgagaaatattattttgaataccatccaggtgatggttatccactttcaaactccatagtatttagtgaggggacagatgtggagcctttgaaaagatatctctcagagctggggtataaattacataagcgcattctcaataagaatgaaattgtatgggagagtcgttgttcgataaatcagtcatcatcgttttatctttcagttaactatacagaaaatagtgttcagcttgaaaaagaaatttgttattag

SEQ ID NO: 380406 - DNA, 312 bp, Salmonella enterica
atgagaataattaaagggtttgatagtttattatctgaagttaagacattgccggatgttggctggctatatgtggataaggaatttaatttaaaatctaaaatggatattttaaataaagattattatctcgctgaaaatcgtgatgagtcttttgatatggcagaaaatgataagattagaacatttttagaatctccaacattttgtgacattattgataatagacttaatcatcatcccaattccaatagagatgaacttttagaagcagtgatttattatctggaagaagatgactttatggattaa

SEQ ID NO: 380407 - DNA, 378 bp, Salmonella enterica
atgaaaaaaaataaaccacaacttattttatacgatatgtcttcaacaatgttcgatccacttagtgagtgggagcctgcttctcttgaagatacatatgtggctgttgatttatgccttgggatgaatgatggtgaaaaaggaagcaactatttctatgtgaaagttgccactccagaagccttgagaaagcgatcaaagaattttctcatatctgataacagagttattgtaattgattattttgattattatttacttaggaaagtaatcgaaaatattctaaaaaaatgtacaagagaaaattgggacgaatcttgtcttgtattacaacgctatttttcatgggaatatgaagattatcattacgaaaaatag

SEQ ID NO: 380408 - DNA, 351 bp, Salmonella enterica
atggaatcacacagtctcacactcgatgaggcctgtgcatttctcaaaatatccagacctaccgccaccaactggattcgcacaggccgactacaggcaacacgtaaagaccccaccaaaccgaaatccccttacctcaccacacgacaagcctgcattgcggcgcttcagtctccgctgcatactgtccaggtgagcgcgggtgatgacataacagaggaactgaaatgtcactattccgcagaggtgaaacctggtactccagtttcacattgccgaacggcaaaagatttaagcagtctcttgggacaaaggacaaaaggcaggccacagagcttcatgacaagctga

SEQ ID NO: 380409 - DNA, 285 bp, Salmonella enterica
gtggctaacctgcaacttgccgttaaaggtgaatacttcgatgccatgattcgcggggagaaaacggaagagtatcgcctggtaaatgattattggtggacgcgccttgttggtcgtgaattcgaccgtttgattataacgaagggttaccctaaacgggacgataagagcaggagaatagagtgtaagtaccgtgggtatgagattaaacaaatcacgcacccgcatttcggcagtgaacccgtggaagttttcgcaataaaggtgaatatcggcaatgaataa

SEQ ID NO: 380410 - DNA, 501 bp, Salmonella enterica
atgaacatcgacaaacggacgctacgtgaagtggcggagaaggcgacaccaggcccctggaaggtattttctgatatcgatactaaaactttttccatccacaccccgcgagataagcgctgtgaaaacgttattaagtggggtgggtttgattgtcagccgaatgctgaggccaacgctgaatttattgctgcatttaacccgaaagtcgcgctggcgctgctggatgaactggagcattacaaatcacgcgaagagcgagttacaaagctggttctggacaactcggcaagctgggatgctctctacaagaagctggaagccgcagagaagcacatagcagaactggaggcgcggaaggtcaacctgtcaaaactcagcgttggagaagtcatgcacatgagcggattcagccgggattatgccgagggttggtgtgctggtaatgacaatgcgatacacgaaatacgcaccgctggcatcaaggttaaggagtcgtga

SEQ ID NO: 380411 - DNA, 294 bp, Salmonella enterica
atgggatacacgccgggcccatggaaatggtggacaagtaacagctttctgcgattaagcagtcaagctacaggtaaagatggtggcgtcatcgactcttatgtcatgaaggatggtcactcatcactaatcgttagcaaagaagatatgaatctgatagcagcagctcccgaattgctcgaggctctgttaaacattgtcgatatggaatatgacgtcagcgagtgggacgctgtgtacgcgaaggctcgcgcagccatcagcaaggctcttggggaggagagatggaaataa

SEQ ID NO: 380412 - DNA, 588 bp, Salmonella enterica
atgaacaactcatggtggcaggaactaaagcattttttcctgcaaggaatgacacttaaacaattgattcatatgctcatcatcctgattttactgattgtcgttatgccggtaagtgtgaaagaatgggtaaacctgcataatccagaaatccttcctcattactggatgtattacatcctgctgttctgtgttagctatgtgctgaacggtgtttttaattccgtttatcacgctgttactgaaagaattgaggcattaactgctcagcggcgtaaggccagagaagaaaaagtcgtccgggatttgtttgattcgttaactcctggcgaaagagcgtatttggctttcgccgtagccgccaataatcagctaaagacggaaaaaggaagccctgaatcaatttctttgctcgaaaaaggacttatcactcgcttgccttctgttattggatatcctgatattgaccgttttgttatcccggaaaagtattttaatgagtgctacatgagatttgccgggaagtcagacattcttatgaatgaacttattgcacaggacgaacagctcaaaaaaataacgacttaa

SEQ ID NO: 380413 - DNA, 900 bp, Salmonella enterica
atgagtaacatatccaatctagccgaagccagagaggccagaaggctccagaagccgcgtacaaatggcggtaaggggtttgccttgattcaccgccaattcatggatagcaagctatacaaggattctcaggctgtgcatcttttcctgcacctgatactgaaagccaatcactctccggcagtcgtaaataccgacattggtgagatgttggttgagcgaggacagctaattaccggacggccaaaactggtaagtgaaacattcatcccggataacaaagtaaaaagtttgcttcgttcttttgaagggaatggaatgattcgtatcgagtcgaaagggagaaaattcagcctgataacagtgttgaaatatgatgattttcaggctccaaattgtccaacggatgtccaacgattgtccaacgcaaacaacagtaatgacgcggctcacagcgaatgttgtccaacgggtgtccaacgattgtccataaacaataatataaataatatctctaatactaacgtattagagagtaccgcagcagacgaaaatcctgacaagaaaaaatcagctctcagttgtcaggatgttgtcgatgcttaccacgaattacttcctgaagcttccagggttcgcgcactgaatgacaaacgtaaaaaccagatccgaactttctggcgaaaagccggagtgataacacgccaacttgacgggcatgggttcacgatgcaggactggagaaattatctgagctacgtaggcgaaaattgccgatggatgttcgaagagcgccaaaaccatcaacgcggaaccgtctggcacaaaaagggatttgatttcctgcttaacgataatacctacctgaaagttcgtgagggtgaacacgatgaccgataa

SEQ ID NO: 380414 - DNA, 1437 bp, Salmonella enterica
atgaccgataatttttacgcgccgccacatagcatcgaggcggagcaggcggtgattggtggattgcttctggatgatgacagcagtgagcgcgtccagaaagttctggcgatgctgaagcctgattcattttacagccgaccacacaaaatccttttcgaagaaataaccagaatgcaccgggagcaaaagccagtagatggtctgacgcttttcgatgaactggagcgtaaatcgttaacggtgtcagttggcggttttgcttatatcgctgatatcgcaaagaacacgccaagcgcagcaaacatcgttgcctatgcaatgcaggttcgcgaaaccgcaatggaacgctacgccatcaaccgcatgactgaagcgacggaattgctctattcccgcaacggaatgactgcaacgcagaagtacgaagctattcaggcgattttcacgcaactgacagaccatgcaaaaaccggatcgcgtcgcggccttcgctcatttggtgaggtcatggaggactgggttggtaaccttgagaagcgatttgacccgtcaggcgaacaacgaggaatgagcacagggatcccatcgttggacaggatgctgtcacctaaaggtctggtaaaaggctctctgttcgtcattggcgctcgccctaagatggggaaaacgacgctatacagccagatggcaatcaactgcgcagtgcatgagaaaaaacctgccctgatgttcagccttgaaatgccaggcgaccagatactggaaaaactggtagggcaaaagtcaggtgttaacccgaatattttttaccttccggcgacaaatgacgctgatgacggctatcagggtgattacgatggtgacttcaacagggcgatcgaaacagccaatcgcttgagtgaaattgacatgctttacatcgacgacacgccgggattatctctggctcaaatcgtcagcgaaagccgtcgaatcaagcgagaaaaaggatgtgttggcatgattctggtcgattacctgacactaatgaccgctgaaaaggccgatcgcaacgaccttgcctacggcatgatcaccaaaggactgaagaaccttgccaaagagcttgattgcgttgttgtgcttctgacgcagcttaaccgcgcactggaaaaccgaaccaataaacgcccattaccaagtgactcacgagatacagggcagattgaacaggattgcgattattgggttgggatccatcgtgaaggtgcttttgatgacagtgttccacctggtgaaaccgaactaatccttcgtctcaatcgtcatggcaataccggcacggtgtattgcattcaggcaaatggcgctatttatgacacagaccaacagtctgctgaaatgcgccgccgtgaacgcgaggaaccgcactccaagaagaaaggaggattctga

SEQ ID NO: 380415 - DNA, 153 bp, Salmonella enterica
atgaaaatatccgagattaactattcagtgatttttgacgcgcttaaagcgtattacgaagtggaagaagatgactcagtatgggaaatatttaatcaggcagatgaccagattgaagaaatcgctaatgcactgaaagtgttaggcgagtga

SEQ ID NO: 380416 - DNA, 321 bp, Salmonella enterica
atggacgaatcaagaaagcagtttcagtcgtggtttgctgatgaaattgttggcgcagatgtagagtttcctgaatttgaagatggagaatatgttgccggggaaatctatgatgagcagttgtatgtaatgcttcaggctatgtacatggcttggatcgcatctcgcgcagctatcgagattgagttgccagcaaaaaatgatatttccggcgatgaccaccccattcctgacctggttgattgggatgatggaagaaacgctggtattcaggaatgcgcagaagccatccgcgccgccggaatcaaagtgaaggagtga

SEQ ID NO: 380417 - DNA, 297 bp, Salmonella enterica
atgagcaaagtatcacgaggaatgaaaatatcgcttattttcatccttaatccgcatcgtatctttttggcttcagcagtatggctgtcagattttgtttattggttagcagataaattggatgattttgcgagatggcttgagaattttgcgaatgcgaggtttgagtcatggccgcttatcggagagaggatgtctgacgaattaaaccggtattacgcggataagcgcaaggagaagagcaggagggaaagtgaagcaattattcctgcttcgcaacgaagcaatcagaaataa

SEQ ID NO: 380418 - DNA, 213 bp, Salmonella enterica
atgagtgattacctgaaatggtatctctgccaccgctggttaattaagtatgctgtaaaagactggatgacagcggatgccaacaagcttaagcaaagaaaagactattactacgccagaatgaaggaaaactactgctcaattcgcactcgcatatttattaaaaaagaccttcagtcaattcttcaattgcgagggaaggtaaatggctaa

SEQ ID NO: 380419 - DNA, 363 bp, Salmonella enterica
atgaacaaatatcagtttgtgcttccatacccgccgtcggtgaatacctactggcgaagacgaggaagccaatactacatcagcgataaaggccagaaataccgaaaagacgttcagcaaatcatccaccaactcaagttagatattttcaccaaatcacgactccgcatcaaagttatcgcagacgttccagactcccgccgccgcgacctcgacaacatcctgaaaggtttactcgactcccttatccacgccggatttgcggaagatgacgagcaattcgatgacattcgcgtaattcgtggcgtgaaagtaccaggcggaaggcttggaataaaaatcaccgaactggagaacgcatga

SEQ ID NO: 380420 - DNA, 189 bp, Salmonella enterica
atgaacgccacaattcaaacgataccagagcttcttatccagacacgaggcaatcagaccgaagtggcgaggatgctttcctgcgcaagaggaacagtgctcaagtacaaccgagacagcaaaggcgagcgtcacgtaatagttaacggcgtcctgatggtcaaacagggcaaaaggggaaggccatga

SEQ ID NO: 380421 - DNA, 624 bp, Salmonella enterica
atgagactcgaaagcgtagctaaatttcattcgccaaaaagcccgatgatgagcgactcaccacgggctacggcttctgactctctttccggtactgatgtgatggctgctatggggatggcgcaatcacaagccggattcggtatggctgcattctgcggcaagcacgaactcagccagaatgacaaacaaaaggctatcaactatctgatgcaatttgcacacaaggtatcggggaaatattgtggtgtggcaaagctcgaaggaaatactaaggcaaaggtactgcaagtgctcgcaacattcgcttatgcggattattgccgtagtgccgcgactccgggcgcaagatgcagagattgccacggtacaggccgtgcggttgatatagccaaaacagagcagtgggggagagttgttgagaaagagtgcggaagatgcaaaggtgtcggctattcaagaatgccagcaagcgccgcatatcgcgctgtaacgatgctaatcccaaaccttacccaacccacctggtcacgcactgttaagccgctgtatgacgctttggtggtgcaatgccacaaggaagagtcaatcgcagacaatattttgaatgcggtcacgcgttaa

SEQ ID NO: 380422 - DNA, 471 bp, Salmonella enterica
atgatgttcaactggaaaacgatgtttgttggcctgttgctcgtctcgctaattgtttccggtcggctggcaaatcattaccgtgataacgccatctcctacaaagagcagcgcgataacaaggccagtgaactggagaaggcgaacgccaccattactgacatgcagcagcgccagcttgatgctgatgcactcgatgctaaatacacgaaggagttagctgatgagaaagctgaaaatgatgctcttcggcgcaagcttgataatggtggtcgggtgctcgtcaaaggcaaatgtcctgtgccatcctcagccgaaacctccagcgcctccggcatgggcaatgatgccaccgtcgaactctctccagttgctggacgaaacgttctcggtatccgggatggaatcatcagcgaccaaacagcactgagaacgcttcaggagtacatcaggacgcaatgcctgaagtaa

SEQ ID NO: 380423 - DNA, 522 bp, Salmonella enterica
atgaatatcgttccactaaattacaaaggcgaacctatccgcttcaatactgatggctggattaatgccactgatattgcaaaacgtttcgggaagcgtctggatcactggttgtccaacactgaaactctcgaatacgttagagctctggatgaggtttattcaggtgagccatcgaaaattctacatacccgtgattccgggtatgtaaaaacaagcaaggcacgaaaggacaggggcggcggaacatggctgcatccaaagttatcagttgcctttgcaagatggtgcgatccgaaattctccgtatggtgcgacctgcacattgatagtctgcttcgcggtgaactgactgagcagcagaaatatgagcaagcatgtcgcattcgcgatgaccggaaatcaaaagccagcaatggggcaagagagatggctcgctggcgatgggataagccggttattgaagcaaatgttgagtactggcgcgagcaactgcagttgactctcgatatcgcgtgctga

SEQ ID NO: 380424 - DNA, 2187 bp, Salmonella enterica
atgtccagtcgtatcgatagagacgtgattaatgcgctaattgcaggacattttgcggaccctttttccgtactcggaatgcaccagacccaagccggactagaagtccgcgccctattacctgacgccaccgacgtatgggtgattgaacccaaaaccggacgtaaagtcggcaaactggaatgtctcgacgctcgcggttttttctgcggcgttttaccccgacgtaaaaatttctttcgctatcagctcgccgtgacctggcacggacagcagaacctcatcgacgatccttaccgttttggtccattaatgcaggaaatggatgcctggctattgtcggaaggcacccacttgcgtccttatgaaacgctgggcgcgcacgccgatacgatggatggcgtcaccggcacccgtttctccgtctgggcgcctaatgcccgtcgcgtttcggttgtcgggcaattcaactattgggatgggcgtcgccacccgatgcgtctgcgcaaagagagcggtatttgggagctgtttatccccggcgcgcataatggacaactgtataaattcgagctgcttgatgcgaacggtaatctgcgcattaaagccgatccctatgcttttgaggcgcagatgcgtccggaaacggcgtcgatgatttgcggactgccggagaaagtgacgccaagcgaagaacgacaaaaagccaatcagtttgatgcgccgatctcgatttatgaggtgcatttaggttcatggcgccgccatacggataacaatttctggctgagctatcgtgagctggcggatcagcttgtgccttacgccaaatggatgggctttacgcaccttgaactcttgccggttaacgaacatccgtttgacggcagttggggctaccagccgaccggcctctacgcgccgacccgccgctttggtacgctggacgacttccgctatttcatcaatgcggcccatgcggcgggccttaacgtcattctcgactgggtgccgggccatttcccgtccgatgaatttagcctcgcggagtttgacggcacccacctctatgagcacagcgacccgcgcgagggctatcaccaggactggaatacgctgatctacaactatggtcgtcgtgaagtcagtaattatctggtgggtaacgccctgtactggatggagcgttttgggattgatgcgctgcgtgtcgatgcggtggcctctatgatctaccgcgactacagccgcaaagagggcgagtggataccgaacgagttcggcggtcgtgaaaacctggaagccattgagtttctgcgtaataccaaccgcattattggcgagcaggtgcccggcgcggtcagcatggcggaagagtcgacagacttctctggcgtgacgcgcccaccggaaacgggcgggctggggttctggtacaagtggaatctgggctggatgcacgacacgctggactacatgaagctggacccggtgtaccgccagtatcatcacgacaagctgacctttggtatgttgtacaaccataccgaaaactttgttctgccgctgtcgcacgatgaggtggttcacggcaagaaatccattctcgatcgtatgccgggcgatgcgtggcaaaaattcgccaacctgcgcgcttattatggctggatgtgggccttccccggcaagaaactgctgtttatggggaatgagtttgcccagggacgcgagtggaaccatgacgccagcctcgactggcacctgctggaggggggcgataactggcaccacggggttcagcgtctggtgcgcgatctcaaccacacctatcgccaccataaagcgttgcatgagctggatttcgatgcttacggctttgagtggctggtggtcgatgacaatgaacgctcggtactgatttttgtacgccgtgataaagccggtaacgagatcatcgtcgccagcaactttacgcccgttcctcgccacgactaccgctttggcatcaaccagccgggacgctggcgtgaaattctcaatactgattcgatgcattatcacggtagcaacaccggcaatggcggtgtggtgcacagcgatgagatcgaaagccatggccgtcagcactctcttaacctgacgttaccgccgttggcgacgatctggctgatgcgggagggggaatga

SEQ ID NO: 380425 - DNA, 378 bp, Salmonella enterica
atggcttttaaaacctggcaaataggattgcatattcagcagcatgaagcgctggccatcgccgttattcgcggcgcatcgggctggtccctgcaacgttggtggcgactgccgctaatgaacgcctccacggcagagggtacgattcctgacccgcaatcgctggctcacgtactgcgaccctggagccgcgagctgccgctacgtcaccgtatttatctctcttttcccgcaaatcggacattgcaacgcgcttttccacatccgccgatgcgtctgcgggaacgtgagcaagtcgcatggctttcacaaacgatggcgcgtgagctggatatggatccggacttattggtttcgactttcaggacgatgcgctga

SEQ ID NO: 380426 - DNA, 234 bp, Salmonella enterica
atgcgtgatagccagcaaggtcagggtattcatgtctttagcatcaatgggacgctaaaagtcaccaagcgttttgcgtatgacaaccgctatgtttatacgtggattggcagccagctttaccgaacagcatccccctgcccggataagacgcatactctgaataggaacgtcatgtacaccaataataaagatatcatcatcataacgcaggcgcaggaatgccaaaaatga

SEQ ID NO: 380427 - DNA, 1188 bp, Salmonella enterica
atgcaagctgaactacagacggcgctgtttcaggcattcgacaccctgaatctgcaacgggtgaaaacgttcagcgtaccgccggtcacgctgtgcggacttggggcgctcggcgcctgcggccaggaagcgcaagcgcgaggcgtaagtcatctgtttgtgatggtcgacagcttcctgcatcaggcgggaatgaccgcgccgctggcacgcagcctggcgatgaaaggcgtggcgatgacagtctggccgtgtccgccaggcgagccgtgcatcaccgatgtttgcgcggcggtggcgcaactgcgtgaggcggcgtgcgacggcgtagtggcctttggcggcggttcggtgctggacgcggcgaaagcggtcgccctgctggtgactaaccctgaccagacgctgagcgccatgaccgagcgcagtacattacgcccgcgtctgccgctgattgcggtgccgaccaccgccggaaccggttctgaaaccaccaacgtgacggtgattatcgacgcggtcagcgggcgcaagcaggtgctggcacacgcgtcactaatgccggacgtggcgattcttgatgctgccgtgaccgaaggcgttccgccaaacgtgacggcgatgactggtatcgatgcgttgacgcatgcgattgaggcctacagcgcgctcaacgccacgccgtttaccgacagcctggcgattggcgcgatagcgatgattggcaaatcgctgccgaaagccgtgggttacggccacgatctggcggcgcgtgaaaatatgttgttggcctcctgtatggcgggaatggccttttccagcgccggtctggggctgtgtcatgcgatggcgcaccagccaggggcggcgctgcatattccgcacggccaggccaacgccatgctgctgccgacagtcatgggatttaaccggatggtatgccgcgaacgcttcagtcaaatcggtcgggcgttaaccaataagaagtcggacgatcgcgatgcgattgcggcggtgagcgagctgattgccgaagtggggcagagcaaacggctggctgacgctggcaccaaacccgaacactacagcgcgtgggcgcaagccgcgctggaggatatttgtctgcgcagtaacccacgcaccgccacacaggcacagattatcgacctgtacgcggctgccgggtaa

SEQ ID NO: 380428 - DNA, 1224 bp, Salmonella enterica
gtgaacactcgccagctactgagcgtcggtatcgatatcggcaccaccaccacgcaggtgatcttctcgcgcctggagttggttaaccgtgcggcggtgtcgcaggtgccgcgctacgaattcatcaaacgcgatattagctggcaaagcccggtcttctttacgcccgtggataagcagggcggtctgaaagaggccgaacttaaagcgctgattctggcccagtatcaggccgcaggcatcgcgcctgaatcggtggactccggggctatcattatcaccggcgaaagcgccaaaacccgcaacgcccgtccggcggttatgacgctctcgcagtcgctgggcgactttgtggtcgccagcgccgggccgcatctggaatcagtcattgccggtcacggcgccggagcgcaaagcttgtctgagcagcggatgtgtcgggtgctgaatattgatatcggcggcggcacgtctaactacgcgctgtttgacgcgggaaaagtcagcggcaccgcctgtcttaacgtcggtggtcgcctgctggaaaccgacgctcaggggcgcgtggtttatgcccaccagccggggcagatgattatcgatgaggtgttcggttcgggtactgatgctcgcgccttagctgccgcacagttggggcaggtggcgcggcggatggcggatctcatcgtcgaggttatcaccggcgcgctttcgccgctggcgcaatcgctgatgcaaaccgggctgctgcccgccgatattacgccggaggtgatcactctttccggcggggtgggcgagtgctatcgccatcagcctgccgatccgttctgcttttctgacattggaccgctgctggcgaccgcgctgcatgagcacccgcgtctgcgcgagatgaacgtgcagtttccggcgcaaaccgacgcttacgtgctggcgcttcccgccacgctcccggtgcgttacgccgcattactcacggtcatcaacgcgctgacggcttttgtcgcgcgttatcccaatccacatcccctgctggtggtggccgagcaggattttggtaaagcgctgggcatgttattgcgcccacagttaccgcaacttccgctggcggtcatcgatgaggtggtcgtgcgggcgggagactatatcgacattggtacgcctctttttggcgggtcggttgtgccggtgacggtgaaatcactcgcatttccttcctga

SEQ ID NO: 380429 - DNA, 168 bp, Salmonella enterica
atgggcatttttatgctgttctgcctgatgacgctgcgcttatcagtcctaccaatcgtaggtcagataaagcggttgcgctgccatccgacagggttttaccttatagcgctaacaggcggtccagcgacggggcaaagtaatagccaccggttaccggtttggtga

SEQ ID NO: 380430 - DNA, 900 bp, Salmonella enterica
atgagcaaaagtgaacagatatcccatatgaccgacgttatggccaagtttgtgggatataccggcaaagttttgcctgatgatgtcactgcaaaactggaagatttgcataagaaagagaccagtaaactggccgacgtcatctttactaccatgattgagaaccagcgtctggcgaaagagctggatcgaccttcctgccaggacaccggtgtcattcaatttctggtggagtgcgggacgaactttccgctgattggcgagctggaagcgttgttgcgtgaggcggtgatcaaagcaactgtagattctccgctgcgccacaacagcgtagaaacttttgatgaatacaacaccggtaaaaacgtgggtaaaggtacgccgacggtcttctgggagatcgttcccaattccgatcagtgcagcatttatacctatatggcgggcggtggttgttctctgccggggaaagcgatggtgctgatgccgggtgcaggctatgaaggtgtgacccgctttgtactggatgtgatgaccagctacggcctcaatgcttgtccgccgctgctggttggcgtgggcgtagcgacctctgttgaaacggcggcactgctatcgaaaaaagcgctgatgcgtccgatcggttcgcataacgagaatgagcgtgcagcctcgctggaaaaaatgctggaagacggcattaacaaaattggcctggggccgcaggagatgtccggtaatacctccgttatgggcgtgaacattgaaaacaccgcgcgtcatccttctaccatcggcgtggcggtaaacgtcggctgctggtcgcaccgtaaagggcacatcgttttcgataaagatttgaattacaccattacgtctcacagcggagtgaatttctga

SEQ ID NO: 380431 - DNA, 585 bp, Salmonella enterica
gtggtgttgatcgcaacgatcctcggcatgatctttgagaagaagatcggtgtcagcctggccgtgaccggttgtattggcgctcttgtgctggtagtaagcggcgtactcacggaaaaacaggcctataaagccattgactcccagaccatttttatctttggcggcaccctggcactggcaaaagcgctggaaatgaccggggcaggcaagctggttgcggactatgtgatcggcatgctggggcaaaactcctcgccgttcatgttgctggttgccgttttcgccttgtccgttgtgatgaccaactttatgtccaataccgcaacgacagcgctgttggtaccggtgagtttgtccattgccgcaggcatgggcgccgacccgcgtgcggttctgatggcgacggtcattggcggttcctgcgcctacgcaactcctatcggtatgcctgccaacatgatggtgctctccgcgggtggctataaatttgtcgactacgctaaggccggtatccccctgattatcgtttcaaccattgtcagcctgatcctgctgccaatccttttcccttttcatccgtaa

SEQ ID NO: 380432 - DNA, 327 bp, Salmonella enterica
atgtattttttacttcaaaaagtaattttaccaaacattgatctatgcacggaagagcagctttatttcagaactcagggcgggaagtataactatacctcacgtaacttatttgttccgcgtcataaggttgcatattttgatactttttttaatgcattctcaattaagaaatggaaaaaatatacaaccttaacatcactttttttgcgggttaatataattggtcgcggaactataactgtaaggcataaagagaatggtgtcattagagtattaactgtctcttatacacatctgacgctgccgacgagcgatctagtgtag

SEQ ID NO: 380433 - DNA, 363 bp, Salmonella enterica
atgttgaagttattcgctaagtacacatcgatcggtgttcttaacacgcttattcattggggcgtatttgctttttgtgtgtatgggatgcatacgcatcaggcgctggcgaacttttccggttttgttatcgccgtatcgttcagcttctatgccaatgcgcgcttcacctttaacgccagcactaccacgcttcgctacatgatgtacgtgggatttatgggaacactgagcgccgttgttggctggatggctgacaaatgttccctgccgccactccttactcttgtcaccttttcagctatcagcctgatatgcggattcatttattcaaagttcattgtctttagggatgcgaaatga

SEQ ID NO: 380434 - DNA, 531 bp, Salmonella enterica
ttgaccccggatgtcagcttccgccgcatttatgagtatgcgggcggcgactggcaggaagataacagcgtctggcaccagaacgtctttgcctactatctctccatctcctgtaaccactgcgaagacccggcctgtaccaaagtctgcccgagcggcgcgatgcacaagcgcgatgacggttttgtggtggtgaacgaagaggtctgtatcggctgtcgctactgccacatggcctgcccgtacggcgcgccgcagtacaacgcggccaaaggtcatatgaccaagtgcgacggctgttatgaccgggtggcggaaggcaagaaaccgatttgcgtggaatcctgcccgctgcgggcgctggatttcggcccgatagacgaactgcgcaaaaaacacggtgagctggctgccgtcgcgccgttgccgcgcgcgcatttcacgaagccgaatattgtgattaaacccaacgccaacagccgcccgaccggggacaccaccggttatctggccaatccgaaggaggtataa

SEQ ID NO: 380435 - DNA, 513 bp, Salmonella enterica
gtgagggcctggcagcaggcaacggcgcagacgcccgggctgctggcgcgggcgctggacccgcaggcgcagccgctgaatgaggaggagatggcgcggctggcgctggggctgcgcacccgcctgcagaatgatgccggcaatgttgagggctggctcatgctggggcgcaccggtatggtactgggtaatgccggtaccgccaccggggcgtatgcgaacgcctaccgtctggacccgaaaaaccgcgatgcggcgctgggctacgcggaggcgctgacgcgctcgtccgacccggaggataaccgccgcggcggggagctgctgcgtcagctggtgagccgcgaccacacggatatccgggtgttaagcctgtatgcgttcagcgcctttgagcagcagcgctttggcgaggcggtggcggcctgggagatgatgctgaagctgctgccggcgggtgacgcccggcgggcggtgatagagcgtagtatccggctggcgcaggagaaataa

SEQ ID NO: 380436 - DNA, 246 bp, Salmonella enterica
atgagtgtgtcgagtttcatgggatatctgaagggtaaaagtagtctgatgctttacgagcagtttggggatctaaaattcaaatacaggaacagggagttctggtgcagagggtactatgtcgatacggtgggtaagaatacggcgaagatacaggactacataaagcaccagcttgaagaggataaaatgggtgagcaattatcgatcccttatccgggcagcccgtttacgggccgtaagtaa

SEQ ID NO: 380437 - DNA, 327 bp, Salmonella enterica
gtgtatgatagtgtttataataaacgcgttgtcgattatccaacgtggacctttaaagaatctatcggtccgcataataccattctgtacatctggtttagtgcaggcatattgggtctggcgagcctggcctatttatatggcgctatcatcagggaaacagccagctctaccttcaggaaagtagagataagcccctacaatgctcatctcttgctatttttatctttcgtcggtttttatatcgttcgtggcaattttgaacaggtcgatattgctcaaattggtatcattaccggttttctgctggcgctaagaaatagataa

SEQ ID NO: 380438 - DNA, 675 bp, Salmonella enterica
atgaaaatgaacgtaacggaaacggtaaaacaagcctgcggccactggtcgcgtattctcccggcgctgggtgtgaaggtgattaaaaaccgccatcaggcctgtccggtgtgcggcggctctgaccgtttccgctttgacgataaagagggacgcgggacgtggttctgcaaccagtgcggcgcgggtgacgggcttaagctggttgagaaggtatttggcgtgtcggcctccgaggccgccggaaaggtggatgccgtgaccggcaacctgccgccggttgccctggaagtgattgcggccgcagaagcagaaacggaggctgaccgcaaagcggcggccgcgctggccgtaaagctcatggagaaaacccgaccggccagcggcaacgcctacctcacccgcaagggattccccggtcatgagtgtgtcatgctgacggccacacacaaaaccggcggcgtgacgttccgcgccggtgatatggttgtcccgctgtatgacaatgccggggcgctggttaacgttcagcttattaattctgacggtctcaaacgcaccctgaaaggcggggcggtaaaaggagcgtgtcacaccatcgaagggaaaaacaggcgggaaaacgcctgtgggttgcggagggctatgcgaccgcgctcaccgtacatcacctga

SEQ ID NO: 380439 - DNA, 225 bp, Salmonella enterica; identical to SEQ ID NO: 376952

SEQ ID NO: 380440 - DNA, 282 bp, Salmonella enterica
gtgacgggtgatgggctgagtcaggaggcaaaagaaaaaattctggttgccgtggggaatatcgccgggattagcagcgttgacgatcaggttaaaaccacgacgccagcggctgaaagtcagttttataccgtaaaatcaggcgacaccctgagcgctatttcaaagcaagtgtatggtaacgccaatctgtataataaaatcttcgaggcaaataaaccgatgctgaaaagcccggaaaaaatatatccgggacaagtgttgcgtattcctgaagaataa

SEQ ID NO: 380441 - DNA, 1284 bp, Salmonella enterica
atgaataccaataacactttaatgcagcgctgtcataacgccgttcctcgcggcgtgggccagattcacccgattttcgccgagcgggcggaaaattgtcgggtctgggatgtcgaaggccgtgagtatctcgatttcgcgggcggcattgccgtcctgaacaccggtcatttacatccgggcattgtttcagcggtcgaagcgcagttgaagaaattgtcgcatacctgttttcaggtgctggcctatgaaccgtacctggcgctgtgcgaacgcatgaaccagaaggtaccgggcgatttcgccaaaaaaacgttgctggtcacgaccggttcagaagcagttgaaaacgcggtgaaaatcgcccgcgcggcgacaaaacgcagcggcgctatcgcgtttagcggcgcttaccacggtcgtacccactacacgctctctctgaccgggaaagtacacccgtactctgcgggtatgggattgatgccaggccatgtctaccgcgcgctttatccttgcccgctacacaacatcagcgacgacgacgcgatcgccagcattgaacgcatctttaaaaatgatgccgcgccggaagatatcgccgccattattattgagccggtacagggcgaaggcggattttacgccgcctctcccgcgtttatgcagcgactgcgcgcgctatgcgaccaacacggcattatgttgattgccgacgaagtgcaaagcggcgcgggccggaccggtacgctgttcgccatggaacagatgggcgttgcggcagatattaccacgtttgcgaaatcgatcgccggcggctttccgctggcaggcgttaccggccgggcagacgtgatggacgctatcgcgccgggcggtctgggcggcacctatgccggaaacccgattgcctgcgtcgccgcgctggcggtactggacattttcgagcaggaaaatctactgcaaaaggcgaatacgcttggcaaaacgctgcgcgatggcctgatggagatagcggaaacgcaccgtgagattggcgacgtgcgcggactgggcgccatgatcgccattgagttgttcgaaaatggcgaccccggcaaaccgaacgcgactctgaccgccgacattgtggcccgcgcccgcgagaaagggttaattctgctctcctgcggtccttactacaacatcttgcgcatcctcgttccactcactattgaggcctcgcagattcggcaaggcctggagattatcgcccagtgctttgatgaggcgaaacaagcgtaa

SEQ ID NO: 380442 - DNA, 414 bp, Salmonella enterica; identical to SEQ ID NO: 376887

SEQ ID NO: 380443 - DNA, 273 bp, Salmonella enterica
atgagtgaaaaactgataaaagaatctcaaaaagtatttatgcatatggcaggtttgttttatgaaatcaaaatgaatacgcttaaggaagtccgacccgatgaagcagagatgttaatggaggatgatgcattcatggatagtatttataaggattgtatcaaaaatgcaagcgcatcttttaaaaaggtagtcagatgggagtactttgaacaagggcattcagtaaaaatggttgataaggcgaaaaaaaagaaaacaaatatcatttaa

SEQ ID NO: 380444 - DNA, 294 bp, Salmonella enterica; identical to SEQ ID NO: 193826

SEQ ID NO: 380445 - DNA, 396 bp, Salmonella enterica; identical to SEQ ID NO: 193825

SEQ ID NO: 380446 - DNA, 183 bp, Salmonella enterica; identical to SEQ ID NO: 375745

SEQ ID NO: 380447 - DNA, 264 bp, Salmonella enterica; identical to SEQ ID NO: 377210

SEQ ID NO: 380448 - DNA, 552 bp, Salmonella enterica
atgcaattaactgcgaatgaatgtttaattaatgagactaaaagacaggagtttcttgataaaaggaagtcatttgaatttcaattttataatttaattaacgcgcaaaaaagtgcttttgatgatttctctttgatttttccatctccaagtggtgattttgaagttaaaaaggttaatgctgtaaataaacttgagcaactgattaaaaccagtattcaaagaggtattgctgaagatgctttgattaaaataattgaatcattagatgataaatctgatgataagatgttttcatttgcaagaaggttttatcttgcagttaaacttgttgataatgaagttataactgaaaatggtttcgatgagcaagataaacatatgtatattgaaactctcattaatctgtctgattttgcaatggttcgactaatatgtattattattgcttatctgtcatggcctaatgttgtttatttgaaaaaatcaccagaagtgatgggagttataaaatcaacaggattaaatacgtatattaattcattgaaataa

SEQ ID NO: 380449 - DNA, 822 bp, Salmonella enterica; identical to SEQ ID NO: 18498

SEQ ID NO: 380450 - DNA, 573 bp, Salmonella enterica
atggaaagcacagccttacagcaggcctttgacacctgtcagaataacaaagcagcatggctgcaacgcaaaaatgagctggctgcggccgaacaggaatatctgcggcttctgtcaggagaaggcagaaacgtcagtcgcctggacgaattacgcaatattatcgaagtcagaaaatggcaggtgaatcaggccgccggtcgttatattcgttcgcatgaagccgttcagcacatcagcatccgcgaccggctgaatgattttatgcagcagcacggcacagcactggcggcggcactggcaccggagctgatgggatacagtgagctgacggccattgcccgaaactgtgccatacagcgtgccacagatgccctgcgtgaagcccttctgtcctggcttgcgaagggggaaaaaattaattattccgcacaggatagtgacattttaacgaccatcggattcaggcctgacgcggcttcggtggatgacagccgtgaaaaattcactcctgcgcagaacatgattttttcgcgtaaaagtgcgcaactggcatcacgtcagtctgtgtaa

SEQ ID NO: 380451 - DNA, 501 bp, Salmonella enterica
atgatttactgcccgtcgtgtggacatgttgctcacacccgtcgcgcacatttcatggacgatggcaccaagataatgattgcacagtgccggaatatttattgctctgcgacatttgaagcgagtgaaagctttttctctgactgtaaagattcaggaatggaatacatttcaggcaaacagagataccgcgattcactgacgtcagcctccggcagtatgaaacgcccgaaaagaatgcttgttaccggatattgttgtcggagatgtaaaggccttgcactgtcaagaacatcgcgacgtctgtctcaggaagtcaccgagcgtttttatgtgtgcacggatccgggctgtggtctggtgtttaaaacgcttcagaccatcacccgcttcattgtccgcccggtcacgccggacgaactggcagaaagcctgcatgaaaaacaggaactgccgccagtacggttaaaaacacaatcatattcgctgcgtctggaatga

SEQ ID NO: 380452 - DNA, 735 bp, Salmonella enterica
atgtctgacaacaccatccctgaatatctgcaacccgcactggcacaactggaaaaggccagagtcgctcatcttgagaacgcccgcctgatggatgagaccgtcacggccattgaacgggcagagcaggaaaaaaatgcgctgacgcaggccgacggaaacgatgctgacgactggcgcacggcctttcgtgcagccggtggtgtcctgagcgacgagctgaaacagcgccacattgagcgcgtggcacgccgggagctggtacaggaatatgacaatctggccgtggtgctgaattttgaacgtgaacgcctgaaaggggcgtgtgacagcacggccaccacctaccggaaggcacatcatcatcttctgagtctgtatgcagagcatgagctggaacacgccctgaatgaaacctgtgaggcgcttgtccgggcaatgcatctgagcatcctggtacaggaaaatccgctcgccaacaccaccggccatcagggctatgtcgcaccggaaaaggctgtcatgcagcaggtgaaatcatcgctggaacagaaaattaaacagatgcaaatcagcctcaccggcgagccggttctccggctgaccggactgtcagcggcaacactcccgcacatggattatgaggtggcaggcacaccggcacagcgcaaggtgtggcaggacaaaatagaccagcagggagcagtgcttaaggccagaggactgctgtcatga

SEQ ID NO: 380453 - DNA, 267 bp, Salmonella enterica
atgcaagctgttttttcttccccgtctcccgcccctgtgacaccactgatgccgctgccggacatcacgcaggagcgttttttacgtctgccggaagtgatgcacctgtgcggcctgtcacgctcgaccatctacgaactcatccgtaagggggaatttccgccgcaggtgagtcttggcggtaaaaatgtggcctggctgcactctgaaatcaccgcatggatggccggacgcattgccggacgcaaacgggggtacgacgcatga

SEQ ID NO: 380454 - DNA, 591 bp, Salmonella enterica
atgatgatgcccgctctgcaaaaactccctttttctggcttgcctttttccggcatttgcggatatagtttttccgctgccgcaaaatcggcagccgggcgtgagaacccgagtatgttatcggcgacatatgacgcgccatgcgtctttttttgtgtcgcaatcaacgccacagagcgccagattatggtgtggcgtgtggtttgccgtgcaggtatgatcctgttcgcaatcgcatgttatgccactgagtcaatggtagctcaggcggggcagcctccgggctggccggtttccgataacgccggtattctcacccccgtctgggctatcgccatcgagcgtgagaactccggcgatagcgtcatttacgctgttatcggaggttgccttatggctacgacccttaccccctcacatcctgaatttgtctttgtgtttgcggctgtccgtcgcgcagaccgtcatccccgtatctgcatgcttcgcaccgtcgccggtgatgaacgcagcgcccgccgttcccttgtccgtgactatgtgctctcccttgctgcccgtctgccggtggtggaggtgtcccgtgcgtaa

SEQ ID NO: 380455 - DNA, 288 bp, Salmonella enterica; identical to SEQ ID NO: 6501

SEQ ID NO: 380456 - DNA, 456 bp, Salmonella enterica
atgtttgattttccccagcccggtgagatttaccgttctgccggttttcccgatgtggccgtggtcggcattctggaagacggtattccgtgggaaatgccgtaccgctgcccggacattgtctggaacccgtaccgccgtaaattcagtatccttgtgcgtatcctcgctgacgggcgcaccacagacatcccgctggggcgttttctgcgggaatttacctgtgaccgtcctgacctgtttaaacgcagccccgtaaaccggcatgcggtactgaaagaaatggccggagacccggaattacagaaatggcgggagaaatatctggatatttacccgcaggacactgttccggtcagccgggcagcaccggtggcgcgggaatggcgggaaattccccgcacggagcctgacccggaaaccaccccggataacagttaccgcaattatctgtaa

SEQ ID NO: 380457 - DNA, 321 bp, Salmonella enterica
atgaaaacacccttaccgcccgtcttacgcgctgccctttaccgtcgcgctgtcgcctgtgcctggctgaccgtgtgcgaacgtcagcaccgctacccgcatctcacccttgagtcactggaggcggccatcgccgctgagctggaaggcttttatctgcgccagcacggtgaggaaaaagggcgtcagatagcctgtgccctgctggaagatttaatggaatccggccccctgaaggccgcgccgtcgctgtcctttctcgggctggttgtgatggatgaactctgtgcccgtcacataaaagcgccggtactgcactga

SEQ ID NO: 380458 - DNA, 2334 bp, Salmonella enterica
atgaaaatgaacgtaaccgccaccgtcagccatgcgctcggccactggccgcgtattctcccggcgctggggattcaggtgctgaagaaccgtcatcagccctgtccggtctgtggcgggagtgaccgtttccgttttgatgacagggaggggcgcggcacctggtactgcaatcagtgtggtgccggtgacggcctgaaactggttgaaaaggtgtttggtgtttccccgtccgacgcggccgcaaaggtggctgccgtgaccggcagtctgcccccggctgacccggcagtgacggccgccgccgttgctgaaacagaagccgcccggaagaacgccgccgcactggcacaaaccctgatggcgaaaacccgtcccggaaccggtaacgcctacctgacccgcaagggctttcccggccgggaatgccggatgctgaccggcacacacagagccggtggcgtgagctggcgcgccggtgaccttgtggtgccactgtatgacgacagcggcgaactggttaaccttcagttaatcagtgctgacggccgtaagcgcaccctgaaaggcggacaggtcaggggcacctgtcacatccttgaaggacagaatcaggccggaaaacgtctgtggatagcggagggatacgcgaccgcacttaccgtacatcacctgaccggtgaaacggtgatggtggcgctttcttccgtgaacctcctttctctggccagccttgcccggcagaagcaccccgcctgtcagattgtccttgccgcagaccgtgacctcagcggtgacggccagaaaaaagccgctgcagccgcagatgcgtgtgagggcgttgttgccctgccgccggtcttcggtgactggaatgatgccttcacgcagtacggcggggaggccacccgtaaggccatttacgatgccatccggccaccggctgaaagcccgttcgacaccatgagcgaagcagagttttccgccatgagtaccagcgaaaaggccatgcgtatctatgagcattacggcgaggcgctcgcggtcgatgccaacggccagcttctgtcccgttatgaaaatggtgtctggaaggtgctgccgccacaggactttgcccgggatgtggccgggctgtttcagcgtctgcgcgcgccgttctcctccgggaaggtggcctccgtggtggacaccctgaagctgattattccgcagcaggaagccccctcccgccgcctgattggctttcgtaacggcgtgctcgacacgcagaacggcacgttccacccgcacagtccgtcacactggatgcgcaccctgtgtgatgtggatttcaccccgccggtggaaggggaaacgctggaaacccacgcccccgcgttctggcgctggcttgaccgtgccgccggtggccgtgcggaaaaacgcgacgtgattctggccgcactgtttatggtgctggcaaaccgctacgactggcagctctttctggaggtgaccggtcccggcggcagcggcaaaagtatcatggccgaaatagccaccctgctggccggggaggataacgccacgtcggccaccattgagacgctggaatccccgcgtgaacgtgccgcgttaactggcttctcactgatacgcctgccggaccaggaaaaatggagcggcgacggtgccggactcaaggccatcaccggcggcgatgcggtgtccgtggacccgaaataccgggatgcgtactccacgcatatcccggcggtgattctggccgtgaacaataacccgatgcgcttcaccgaccgcagcggcggcgtgtcacgccggcgggtgattattcacttcccggaacagatagccccgcaggagcgcgacccgcagcttaaggacaaaatcacccgcgagctggcggtcatcgtgcgtcacctgatgcagaagttcagcgacccgatgctcgcccggtcactgcttcagtcccagcagaactcagacgaggcactgaacatcaaacgggatgccgacccgacgtttgattttatcggctatctggaaaccctgccgcagaccagcggcatgtatatggggaacgccagtatcatcccgcgtaattaccgtaaatacctctatcacgcctatctggcctacatggaggcaaacggctaccggaatgtactcagtctgaaaatgttcgggctggggctgccggtgatgctgaaggaatacggactgaattacgagaagcgccataccaaacaggggatacagaccaacctgacgctgaaagaggaaagctacggcgactggctgccaaaatgtgacgaccctgcaacaacctga

SEQ ID NO: 380459 - DNA, 417 bp, Salmonella enterica
atgcccaaacatcctatttatacccacttcttatctgaagaggcacaggccgtgattggcgaagtccacccgcaaacggcgccagcccgcgtggtgctggaaaaggaaggctttcgctatcgccactatatcgacatcttcgacggtgggccgacgctggagtgtgatattgaccgcgtgcgggctattcgtaaaagccgactggtggaagtcgcggaagggcaacccgcgcttggcgactatcctgcatgtctggtcgccaatgaaaactatcaccactttcgggccgcgctggtgcgtgccgatccgcagacttcacgacttgtacttaccgccgcgcagttggatgcgctgaaatgtcgcgcgggcgaccacgttcggctggtacgcctttgcgctgaggagaaaaccgtatga

SEQ ID NO: 380460 - DNA, 879 bp, Salmonella enterica
atgagtggcagtcacccggtaaaatttctgctaccatcccaacacgattcaccttgcaaagtggcagtgactatgaaatttgtctcttttaatatcaacggcctgcgcgcccgtccccatcaacttgaagcgattgtcgaaaaacaccagcccgatgtgatcggtctacaggagacaaaagtccacgacgaaatgttcccgctcgaagaggtcgcgaagctgggctataacgttttctatcatggacaaaaaggccattacggcgtcgcgctgctaacaaaagccacgcccatttccgtcagacgcggttttccggatgatggcgaagaggcgcaacgccgcattatcatggcggaaatcccctcgccgctgggtaatatcaccgtcattaacggctatttcccgcagggggaaagccgggatcatccgttgaagttccccgcgaaagcgcagttttatcagaacttgcaaaactatcttgaaacggaactcaagtgcgataatccggtattaattatgggcgacatgaatatcagcccgaccgacctggatattggcatcggcgaagagaaccgcaaacgctggctgcgtaccggtaaatgctccttcctgccggaggagcgtgaatggatgtcgcggttactgaagtggggattagtggacacgttccgtcaggcaaatccgcaaacgatggataaattttcgtggtttgattaccgttcaaaaggtttcgtggataatcgcggactgcgcattgacctcttgctggcaagcgctccgctggcggaacgttgcgcagaaaccggtatagactacgacattcgcagtatggaaaaaccctccgaccatgcgccggtctgggcgacgtttcgtgtttga

SEQ ID NO: 380461 - DNA, 1710 bp, Salmonella enterica
gtgcttagaatatttccagcattatccatagttcttgtatcatgtcttattgttggttggatttatttattccaggatgattacaaattacttggtaagcatgtttttagtggctcattctttatatcaaactttactctttggagtgagtctggctattttgattcaaaatcataccttaaacctttactacatttgtggtcgctgggaattgaagagcaattttatataatatggccagtagttatattgctatgctttagaagcaaaaaccataacagaaacatagtattatcatgcgcaactatatttataattagctatgcgattagcatttttacaatggcatctgatggcggagctaattactactctcccgcatcaagattttgggagttaatggctggagcgattatatccacattgagatttataggaataaacacttcgttatcaaaattaatgtccctgttaggaattatactaatcgcattatcaataaccatgatagatgaaaagatgtcatttcctggatatatagcaataatcccaatacttggcgcctctcttataatagcatctaatggtaatgatttagttgtgtcgaaattgcttagtgttaggcctgttgttttctttggtcttattagctatcctctttatttgtggcattggcctatttattcattctatcgttcaatatttgctggctcaccagactaccatgaattaactcttcttttattattatcgttctttttggcgatattaacttattatttaattgaaaaaccactgagaaattccagaagtaaatatatcacagcaatattattagcattatctgtatttgggacgggtttaattggcgcatttatttttcatataaatggagttaaagacagggaaatcaataaatcagcaagtgaatatgcttctgttactgacgtgtacaattattataaatatggagaactactccgtggagggatatgtcactcagtacaacttactgctgccatatccaatggatgtataaaaaatggcaagcataatatatttatcattggtgattcttatgcggcggctcttttcaatgggctttctcattatatagataataaaggttctgattatataataagccaaatgacagatggtaatgctcctcctctatttgttgacggtaaagatgatttacagagaagtgtcatcactctaaacaataatagaattaatgaaattaaacgtgttcagcctgaggtggttctgctgacatggtcagttcgaggaacaaatggagtacatgataaaaagttagcaattgatgcgttatcattaaccattaaaaaaattaaagaggcatcccctgactcaaggattgttttcattggaccagtcccggaatggaatgcaaatttagttaaaataatatctaactacctgagtgagtttaaaaaaactccaccattgtatatgacatatggattaaatagtgaaataagcgagtgggactcttactttagtaacaatgttccaaaaatgggaattgaatatatatcagcatacaaagcattatgtaacgaaagtggatgtcttacaagagttggtaatggtcctgattttatcactgccgttgattggggacatttaacaaagcctggttctgatttcctttttaataaaattggaaataaaataatcaaatag

SEQ ID NO: 380462 - DNA, 522 bp, Salmonella enterica
atgtctttaaaaatatcagaaatcacaaaagagcgcctacgccgtgcaggtaaaaaggttcgtgaagataatcctgactggaatggtgatgttggttttcgtgttttcaaactcgatacatctaatatccgtccgtgggaagccacagcagaaaccctttcagaacagattgatgcctatgtaagcccaatccttgaaggccgtaatgaagaagatctgctcacagagttgatgctcaaacgtggcattgacctgagtgtaaacattgaaacccgtcagtttgatggattaaccgtttcttgtgttgacggtggcaaattgtttacctgctttgctaaacaaatccctgcatcttcagtagaagaactgaccaaggggatcatcgactggtataagagtttaaaagctggcaaagatacggtctgctatttccttgatgacgcatttgaaaataacgttgctaaaacaaatctttgcgccattctggaacaacatggcctgactaacctgcacagcctgtaa

SEQ ID NO: 380463 - DNA, 459 bp, Salmonella enterica; identical to SEQ ID NO: 380368

SEQ ID NO: 380464 - DNA, 453 bp, Salmonella enterica
atgagccgtgcggttgtcgagaacatcaaacaaatgccagaacgcaacttgtttatgaagggtgtgctcagttgggttggcggaaaaacggatgttgttaaatatgcccgtgccgaacgcgtggccggtgattcgaaattcaacggctggaaattatggaacctggcgctggagggaataacttctttctcaacatttccgctccgcatatggacttacattggattgtttattgcaggtatgtcattcctttacggtgcatggatgattattgataaattaatatttggaaataatgttcctggctacccgtctcttcttgtttctgtacttttcctgggtggcgttcaattgataggaataggtattcttggggaatatattggcaggatttacatagaaactaaaaaaaggcctaaatacataattaagaatgggaagaaaaatggttaa

SEQ ID NO: 380465 - DNA, 1371 bp, Salmonella enterica
gtggctacatttcaactcgccgggttgccatcaatgcaggtagcgaaccagaacgcgcccggacaaccatcattatccagttacgacttcagccagcgcccaaacgttggagttcaacttgctcaggggcttggcgcagttggccaggcaatacagcagaatgaggctgctcagaggctttctgactttcaaaaagctttcggtcaggcttatgcggcaggtgatcgcgacgccttgcgtcaacttgcagccaccaatccagaccagattgaaacaattcgtcagggcatggggtttgttgatgctgacagaaatcaggcgatgggcgatatgtctgcacgattgaatattgccgccgctcaggggccagaagcggtgatgcgagagcttgccactcaccagaatacgctgcagcaaattggcgtatctcctgaacaggcgtggcagacatatcaacaaagccctgaaggcttcacgcagttaacagaccttattggaatgcacgcggtaggaccagaaaagtattttgatattcaggacaagttgacaggtcgcgagattgaccgaggtcgacttgctgaaacaatccgcagcaataaagcaggggaaggacttcaggctcgcgggcaaaatattactatgcgcggacaagacatgtcagcctctacagcccgccgcggtcaggatttggcaatgcaaagggcaaacgccagaacgatatcaggagtcgacgggaatcgggtcgttcagcttgcagatggtagaacagtcaacattgacggaaaacttcacggcgcaggggctaatgcattttacgaaggcattgacgataacggcaatatggttcgcgtaccggcaagtgctattgcagcacctccaacgtctgcggcaagcgcacagaactacgcgatgaagaaagacattgacgcaatcgcaaatgcagatgcttctgctctcgattttatgactggcatgactggcggagcaggaaatccggcaattggtgcagatgttcgcagccgactcacaggcaaagagcaacgccagttatataactccgcacaacgtattcagggaagaatgcagaatcagggcgtggcagcagcaagagatatgggcgctagcggtatcaacaccattgcagaagtgaagatgtattttcaggggatgccgcaggttgactactcaagcccggaggctatgcagcagtctattcgtgagattcaggaatacaccaacaattataaccagcagtacaacgttaatgttgataatggtgggcagaaatcatcaaggcagcagccagcgactcagcaatcagtcggagtaagctacacgtctaaatctggaattcaattcacggtggaataa

SEQ ID NO: 380466 - DNA, 192 bp, Salmonella enterica
atggcgttgtacgactaccagtgggagtttaccggacagagtacaaacggacataccggcgcgctggccaacaccataaatgaagatcttgttctgccagtaaccaataaagaggcggcgcagaagtttgccgccaatgtggaagatggcgttcagggttacggcatacgcgttacgtatagtcagaaatag

SEQ ID NO: 380467 - DNA, 978 bp, Salmonella enterica
atgtcgcggcataatcctttccagaccgtcacctgtcgttcggacctggtaaaaaccgttgagcaactggatctggtggtcagttgcgatgtctatttgagcgagagcgcggcgtatgccgactatctgctgccggaatgcacttatctcgaacgggacgaagaggtatcggatatgtcgggactgcacccggcttacgctctgcgccaacaggtcgtagagccgattggcgaggcgcgtccgagttggcaaatctggaaagagcttggcgagcagttgggattagggcagtactatccgtggcaggatatgcagacgcgccaactctatcagttgaacggcgaccatgccttagcgaaggaactgcgacagaaagggtatctcgaatggggcgttccgctgctattacgcgaaccagaatccgttcgccagtttacggcgcgttaccccggcgctatcgcgacggacagcgacaacacctatggcgaacagcttcgcttcaaatcgccctccggcaaaatcgaactttattccgcaaccctggaggaattgctcccaggctacggcgttccgcgcgttcgtgactttgcgcttaaaaaagagaatgagctttacttcattcagggcaaggtggccgtgcataccaatggcgcgacgcagtacgtacctttactcagcgagctaatgtgggataacgcggtctgggtccatccgcaaacggcgcaagaaaaaggcattaagaccggagatgagatctggctggaaaatgctacgggtaaagagaaaggtaaggcgctggtgacgcccggtatccgtccggacacgctttttgtctatatgggatttggcgctaaagctggggccaaaacggcggcgacgacacacggtatccactgcggaaatttactgccgcacgtgacgagtccggtatccggtacggtagtgcataccgcaggcgtgacgctgagccgggcatga

SEQ ID NO: 380468 - DNA, 159 bp, Salmonella enterica
atgaagatatcatcaggcgcaattaatttttctactattcctaaccaggttaaaaaattaattaacaccatccgtgaacatacgaaaaacgggctcgcctcaaaaataaccagtgttaaaaatacgcatgcatctttaaatgaaaaatttaaaccatga

SEQ ID NO: 380469 - DNA, 585 bp, Salmonella enterica; identical to SEQ ID NO: 380431

SEQ ID NO: 380470 - DNA, 438 bp, Salmonella enterica
atgtatggtgggagacagtttgctacttatgatcaaggctgggtaggttggttttgtcaaaaagcggttgaaattaaaaatggtattaataaacccttcactatttctggtaatggtaagcaagttagggatgttttgcatgctgaagatatgatttcgttatatttcactgccttggcaaatgtatcaaaaattagggggaacgcttttaatattggtggtaccattgtcaacagcctatcattacttgaattattcaaattgcttgaagattattgcaacatagatatgaggttcactaatttacctgtaagggaaagtgatcagcgtgtttttgttgcagatattaaaaaaatcactaatgcaattgactggagcccgaaagtctcggcaaaagatggtgtccagaaaatgtatgattggactagttctatatga

SEQ ID NO: 380471 - DNA, 1443 bp, Salmonella enterica
atgaccctgtcttttactgcccgttggcgcgatgaactgccagcaacgtataccgcgcttttacccacaccgttaaaaaatgcgcgactgatttggtataacgacgaactggcgcagcagttagccattcccgcgtcgttatttgacgctaccaatggcgctggcgtttggggcggcgaaaccttattacccggtatgtcgcctgtcgcgcaggtatatagcgggcatcagttcggcgtctgggcgggacaactcggcgacggacgcggtattttgctgggcgaacagctcctggcggatggctcgacgctcgactggcatctgaaaggcgccggattaacaccctattcgcgaatgggggatggacgcgccgtcctgcgttcaaccatacgagaaagccttgccagcgaagccatgcattatctgggtattcccactacgcgcgcgttatctatcgtaaccagcgatacgccggttcagcgagagacgcaggaaacgggcgcgatgttaatgcgtctggcacaaagtcatatgcgttttggtcatttcgaacatttctactaccgccgtgagccggaaaaagttcagcaactggatgatttcgctattcgtcattactggccgcaatggcaggatgtcccggaaaaatatgctttgtggtttgaagaggtggcggcgcgtaccggaagactcatcgccgagtggcaaaccgtcggtttttcgcacggcgttatgaatacggataacatgtcgattctggggctgaccatcgactatggcccctttggttttctcgacgactacgatcccggcttcattggtaaccattccgatcatcagggacgttaccgcttcgataatcaaccgtcggtggcgctgtggaatttacaacgtctggcgcagacgttaactccttttattgagatcgacgcgttaaacagagcgctggatcgctaccaggacgcgttgttaacgcactatgggcagcgaatgcgccagaagttgggcttctttaccgagcaaaaagacgataacgctttactgaatgaattgtttagtctgatggcgcgcgaagggagtgattatacccgtacatttcggatgttaagccatacggagcaacagagcgcttcttcgccgttgcgggatacgtttatcgatcgcgcggcgttcgatgcctggttcgaccgctaccgggcgcgattgcgcacagaggcggtggatgacgcgctgcgccagcagcagatgcaacgcgtgaatcctgcggttgtgttgcgcaactggctggcgcaacgcgcgatagacgcggctgaacagggagacatggcggaactgcatcggttgcatgaagttttacgtcaaccttttaccgatcgagatgatgactatgccagccgaccaccggagtggggaaagcggctggaggtcagttgttcaagttag

SEQ ID NO: 380472 - DNA, 192 bp, Salmonella enterica
atggaacgtcattggcattttttattcaacgaagagttaaccactcttaataataatgggttttatagcgaaatagacttttttatcgagcatttaatatttgcgtccgttattatttttctggaatgtaaattctctctcaacacaggtgatatttatgttggtattgtggtgttgattctattcttataa

SEQ ID NO: 380473 - DNA, 288 bp, Salmonella enterica
atgtccttcaacctctggaccatgaacgagataaacggtaccgttgttaatcacttccttaccctttacaagaataataatcagcgattgatgaacagtacaaactcgatattttttgcattgcaacctaaccttttgcactttcgcctcctgttccccctggcgcttaatataacgcagagtcagccaaatatttgcgccaaccactcttgccagatcacacctcacatgcctattaaaaacaaaaacaataagcatgaagagaaacacaaccagacaataacatag

SEQ ID NO: 380474 - DNA, 258 bp, Salmonella enterica
atgagtgatgcactactaaacgcgggccgtcagaccttaatgctggagctacaggaagccagccgtctgccggagcgtctgggcgatgattttgtccgcgccgccaatatcattattcactgtgaaggcaaagtgatcgtttccggtattggtaaatcaggtcatattggtaaaaaaatcgccgcgacgcttgccagtaccggtactcccgcttttttgttcatccggcggaagcactgcatggcgatctggggatga

SEQ ID NO: 380475 - DNA, 1266 bp, Salmonella enterica
atgattaaagttatgtgtgctaaagcagaactgattccagcgcagattcctgctgatgagcgagtattctcctattttaaaggcgctaagcgtgcaggtgttggtacaattgcgaatcgatggcatggtgcattaaaacggggtgggtttcgaccttcaacagagatttgggatttcgtacagttttgcctcgcggtatgtagcgcggatctatcaagccctagaagaacaagtgcagatggctggacccggaatattcagcttacggttgggttgtgcgatccagataaatggctaccgctgaaatctgatcttgaagatatgctaaaagttctgactggtgattattggttattaaatttcaataatgcaggcatggaatctcctcaaggagacggcgcttttctcagcaatgactgcgtgtctttattatcggggggattagatagtctaataggtgggattgatttagtaactaaaggccaaaaacctctatttgtttctcagctcgcacataaagattcagagcgacagagagcatacgcggctatgctgatgggaaatggctcacattatcaatggagtcatggtatcagcttcaaaggatcgcgcgaaccttctacacgtggtcgttcattagctttttatgcatttgcactacttgcttcaacaaaaatcaaccaaccgaagccaacaatatttatcccggaaaatggggtgatctccattaatcctcctttggttccagggcgtgtatctagtttgagtactcgaacaacgcatcctatgtttatcgatatgttgcaaagagttctggatactttgggtattaatgtgcagtttcaattgccttaccgttttaaaactaaaggcgaaatgatgcgggaatgtcttgaccaagacctcttgcaaaaatgggctgctgattctacaagttgtggccgttttcgaacttataatcgtcagcactgtggacgctgtgttccatgcttgatccgtcgggctgcattccttgcatggatacctgagggggatacaacatcttaccgctttgagtctgttgttggcagtgataaatcaagtgcacccgatgatcctatggctgttgcacttgccatccttgatgtaaggaagagagggcttgatagatttcttggtggctcgttggcttttgcaccgattaacgagcgccctatgtaccgtagagttttgcaagaaggtataaaagagctagaaactgtactcactcaggataaattgctttga

SEQ ID NO: 380476 - DNA, 759 bp, Salmonella enterica
ttgattgattttcactgtcacgttgatttgtatcccaaggctagaaatgtttatgccggtgcgattaagcgtaatgttttcacttggttagttactacgagcccaaaggcttttcaggctacaagtcatgttttagaaaaacatgaatcggtaatgatcagtcctggacttcatcctgaaattgtcgctgatcgtttccaggaattggaaatgcttctcgagttgattcaaaacgtagctgctgtaggtgagattggattggatggttcaaaacgatattccaccagttacgcgatgcaacgtcgagtgttttccgaggcggtcaggaagtgccacgatgttgggggacgagcaatgagcattcactcaagacaggccgttccggatgtgctagctaccttaaaagcgttcccctctcacggaattcctattttacattggttcactggaagtgttacggaattgagggatgcttcagcacagggatgctggttcagtattggtccggctgctttcaactctgccgcagggaaagctcttgctactaagctccctaaagacaaggttgtgccagagagcgacgggccatttgctcaatttgacaatcgaactgtgatgccatgggatttcaatattacagttcgattgctgggtcaggcgtggtcaatgcctgaaaatgatgtaaagctacaattgttaagcaatacgaaaacgttgcttggacagatcggggtcaatcgaattgctctcaactcttaa

SEQ ID NO: 380477 - DNA, 915 bp, Salmonella enterica
atggagtctgcacgtgataaacatacccgtgagattgtagaggcagaggatctgtggttgcttgatagtgttgatacggaaggctatgtgtgctgggggtgtggtataaccatgcatcctgctgcatgggaaaaagataaaaaagtcagagcctattttaaaaagaaacgacatattcaacatcatcatgaatgtgatgctgatgctgaaagcacagtaattcgccaaggccagaaggcgagtgtccgcaacatactggacagtgctccgggtttaatgccctcgggattaaagttgatcgaaaaacgcccggttgttgaacccggtttctctggtgatgaaagtaaatccagttcgacacgttcagcatcctcacaatctggtgaaggtaattcatccgaacgacaatcccggcgtcaagtgaatgctattcgcaatatttgccgtgccttcatccggttcccgcatgaccggggaatgtcgcttaacgttcctggtatcagtggtcaaatctacatgacggcgtttaaaaagctccggaatgagattcaaccttacccggagccgaagatcttttatgcaccactactctggaacaaatttactgaaaatgatgaaaaactcatcattccactgtctggtgaatggggggaagatgagtcaggtaaacctaaacccactcgaagctaccagatctacatcgattgggctggctggtcaaaagccaagcgtaccgtggttcgcaaagagctggaggccgctcggacagaggcgatagaagccaaagggaaagggctgaaagataaagcttgggttttctttatcggcgagcaaagtgcggataatccggagatcttctacgttagcgattatcgactcatctgcgcgattgtagggcatatcacttatccctga

SEQ ID NO: 380478 - DNA, 471 bp, Salmonella enterica
atgtctatcgaggaaaaattttttagtgatatcgatttaaatgatccgttttttaacagcttaagagctgattatgaaggatttgatgtttggtttctctcaaaaggtaaaaataaggcgtttgtatcacgtaatgaattaggtgaaatcgatggctttctctatttgaaaatagaagatgaagagttgagtgatatgactccaacgtttccaaaaatgaagcgagtaaaacttggcacatttaaaatcgatgctcatggaaccaaacttggagagcgttttattaggattatgtttcaatttgctatgagaaacaaactaaaagaagtatatgttactatatttgataagcattcaggattaattcgcttattaactaaatatggttttgttttaaaggcgaggaaaaatctttctacgattaatgggcaagaaggtgtatactttaaaaacttggtatggaaggagtaa

SEQ ID NO: 380479 - DNA, 582 bp, Salmonella enterica
atgagctatgctaattatcccttagtcaaattgcagggaaggaattatttattaagtatttatcctgcatggcatacgcgtcttttccctgagtcaaaactccacaatgagagtgcaggtatcatcgctgatatatcacataccaacagtattgaaaaagtatacttaacaaaaatgcatggggtagccagcctaaagcctggagataatttgcttatttatcgtacttcagatggacaaggtcctgctcggtttagatctgttgcaacttcagtgtgtgtggttcaagaaattaaagatattcacgatttctcaacttatgaggaatttaagaattactgtggaccttatagcgtttttgatgaagatgagttacagcttctatatatgaaaaaaaattatccaataattatacggtttacttataatttccctttagaaaaaagggtcattcgtgatgaaatcatgaatattacaggttataccaatagtgattattggggttttttaccactaactgattcagcatttaagcagatcgttttacagggaggtgttgatgaaagttttattatcgattaa

SEQ ID NO: 380480 - DNA, 372 bp, Salmonella enterica
atgaaagttttattatcgattaagccagagtatgcagagagtatactttcgggtaaaaaaaaatatgagtttcggaaaagtatttttagaaataaaaatgttgatacgatagttatttacgcaacgatgccggttggcaaagtaataggtgagtttaaagtaggagatattcttgctctatccccttcagaattgtgggataaaacaaaagctcatgcaggaataacacattctttttttaaagattatttccatcaaagagaaaaggcttttgcgatttccatcaaaaaccctaaaagatataaattccctgtcgacttaaatgagttgattcccggcggcgtcgccccacagtcttatcgttatttataa

SEQ ID NO: 380481 - DNA, 192 bp, Salmonella enterica
atgaaacgagatgggcgtgatattacttatgatttgaataagctaatggaagctgaaagagaaaacgcaaaatatgtcacaaataaaatcaatgtaccattaattatcttagaatccccaacaacagacgatctatctattgccctagaaaagctgggcatggttaagaaacatgcccagacaacattataa

SEQ ID NO: 380482 - DNA, 378 bp, Salmonella enterica
atgaagtttcaagctatatcgattttgactccagcggtagaaaatattataaatggttctaaatctatcgaaatacggtcgtggtatcctgaaacgatgcccttaaaaaacgtcattcttgttcagaatgataaataccttaaaaatcaaagcgatattgatcatgggatggctatggctattgtcgattttgtttcagttagaaattggtcatatgaggattacttaaaacaaaaccaagaaactactcttaataagccttggtctccaggttattatgtgtgggaaattaaaaatgttagaattttaaaaaaatctgttccttgtgtggcgaggaaaggtatttatacaatagatttaaatatggattatgtataa

SEQ ID NO: 380483 - DNA, 792 bp, Salmonella enterica
atgtgtgatgccattcttcgaaatattaagcgttatgccattatttattcactgttgtttttagctgttattttaatgctgatagtgtttgttagctatgtttgtaaatttggaatgtattcatggagtgattctgtagagaaatggggacagtttggcgattatatcggtggtgtactgaatcctgcactggcctttatctctatcatgcttgtttgttttacactatattctacatctaggcagtcatctattcagtcattcgagtctgtgttatttgagttactaaggtttcataaagataacttatcagaaattaaaacaacttattcagacggaaaagtgtatgtaggacgggaggctctttcattatacattaccgaagtgaagtttaacctacttaatattgtggatgattcacttcctttggatgaaaggttagagctttcagttaatatggtttatctggaaggtgacaattttgcgaatgtgggacattattttaggaatatttaccatatttttaaacatattaacgactctaactatttgactgagaaagaaaaaactaagtatgcgaaattagttagagcacaaatatcttctatagaatctggcgcgatgctattaaatggtttttcatcggtaggaaagcctgccaagaaatttattgaaaaatattctctccttcaggggtttagtttaagtaagggattcaagcagcaattacatgatttaggtgccttaaaattatacgatgacgttgcttatgaggataaaaaagggcattaa

SEQ ID NO: 380484 - DNA, 852 bp, Salmonella enterica
atgtttactattggtatttatggttttaccttaacgaaagtaactcatttttcgttcgggacaatgtaccccgtagaaacaagcttatttaaattaaaaaaacatcgccaagataaagataaactgtatcttactgctttccttgagcttgacgttccagatagaaatgaagtaactgaccttatattccatttggaaaaaatcctaagttttatagaacaaagacccgtgctcattaaatatcaactgcatgataaagaaaataaaaataacctttctgacaattaccctaggaatataattcctaacattaatttatcaagttcaggtgaagttctccttgaggatagtttttctaaaaactccagacgctactttatcgaacttgccattaataaaatagtcattgctgaagatcgtccatttacaactatgcttcataagaacgtattagttttttccaatccagtgaattatcttgatgtatcatactacttacttttctctggtcttgagtcattagtccgcgagcgtgaaaatgacttcaaatctaatattgcaccgatcatgtaccgttatctcacaaagcatgggtttaatgtcaagcaacaaaataacaaacatcatgagatttcacttgatatttactgcagtttaaggaacgcattatttcataatggtcaattccaaaccatgccaatgaaaagaggctctcaattaatcagttttgcactcaaagatttttattcacaatttaaaagattaaactgtctggtcattttaaaagaagctggattcaatgacacctcaatcaattgggactttagtgattacagacatccatttcattaa

SEQ ID NO: 380485 - DNA, 1275 bp, Salmonella enterica
atgttcgccctggctgacgtcaacagcttctacgcgagctgtgaaaaagtatttcgtcccgatttacgtaatacacctgttgtggtgctcagtaacaacgatggatgtgttatcgcgcgttcaaaagaagcgaagcaactgggcattaaaatgggggttccgtggtttcaactgaaaacaaccgaatttcctgtacctgtcgttgcgttctcgagtaactacgaactctacgcgtcgatgtcgaaccgtgttatggcgcatctcgaagaactggcacctcgcgttgagcagtattctatcgacgaaatgtttcttgatgtgcgcaatattgacagttgtatcgattttgaagacttcggccggcagttgcgcgagcatgtacattcaggaaccggactgaccatcggagttgggatgggaccgaccaagacactggcaaaaagcgcacaatgggcgtctaaggaatggcggcagtttgagggcgtgcttgctctgacttcaggcaatccaaagcgaacggagaaactattgtcactgcagccagtagacgaaatctggggggttggtcgccggatctcgaagaaactgcacacaatggggataacaactgcactgcagctggcgcgcgcgaacccaacatttatcaggaaaaatttcagtgttgttctcgagagaactgtccgtgaactgaacggggaaagctgtatttcactggaggaggctccgccacccaagcagcagattgtctgcagccgatcctttggggagcgcgtcacaacatatgaagccatgcgccaggcagtctgtcagtatgctgagcgtgcagctgaaaagctgcgcggcgagcggcaattctgcagacatgttgctgtatttgtgaagacgtcaccgttcgctgtgaacgaaccgtattacgggaatgtggccagtgagaaactgacgactcccacgcaggataccagggacatcatagccgcagtggtgaaagcactggatcggatctgggtgaaagggcatagatatgcaaaagcgggttgcatgctcaatgatttcacaccaaccgggatttctcagttaaatctttttgatgaagtgcagccgcacgaacgaagtgagcagttgatgaaagttctcgacagtatcaaccattcaggtatgggaaaagtgtggtttgccggaagagggatagcccctgagtggcagatgaaaagagagctactctctccagcttataccactcgctgggctgaattacctgttgcaagattgcgctga

SEQ ID NO: 380486 - DNA, 372 bp, Salmonella enterica
atgaacgcacaagcacgcggtgcccggaccgcaaggctttataaaagggctaagtcaaagctgattgcactcgaccatttctgtgttcaaaaagccaaagagcataagctgcccgcctggactggtcatctcccggtaactgtcctaacaggaattcttattgctgcagtgatttttggctcactgctattcgtgggcttaagtctacttatattcgcgctttttttgctatcttcggcctattcaaaacaactgagttctcctgtgatgtttactgaagaggagaatgatgatgaagaggatgggattcggaacggttatcagggaactggatactatatgggaggttacagagttgatagggacgattaa

SEQ ID NO: 380487 - DNA, 138 bp, Salmonella enterica
atgtttcttgaagtcaaaataattgcccgttattgtcttcttgaactaaaaacgggcatttttaagaggataatatgcccgtttagtcttaatagatttaaacagggcaagaaagggggatgtttctttctacaataa

SEQ ID NO: 380488 - DNA, 1425 bp, Salmonella enterica
gtgaaaagcaacgcttatgtttactttattgccgccatcgcatcactaggtggtttattattcggttacgatacggcggtcatttcgggtgccgtcaattactttgaaaaatatttttcgttaaccccggtggagctaggttggggggtctcgtctgcccttgttggatgcattatcggttccgtggtgtcaggaccattcagcgacaaatacggacgtaaaaaaagcctcattctttgcgccgttttattcttcgtcggtgcgttgggcacagcattcccaagcactttcagccagttcgttactttccgtatagtcggcggaataggaatgggaatcgcctcatttgttgtgcctgtctatttggcagaaatagcacctcgcgataagcgtggcgcgttgggaacattttatcaattcgccattgcttttggcattttgttgacttacctgatcaactacatggtgcaaagctccggggaacatacctggttggttcattcgggatggcgctggatgtttggccttggtgccatacctgcagcaattctgctgttgataagtcagattgtcccggaaagtccacgctggctcacacagaaaggccatgatgaaatctgcctcactttactggaaagaatcaacggcgataagtcacatgcacgtgacgtacaacaagagatcaaacgcgacttgagcggttcatcgcattcaaaaggaatattcgccgcagggctggggggcgtgttaatactggcgatagtgctgcaggtactgagccagtccaccggcattaatgtggttatctactacgctaccaaactattgaatagtataggcaccggtgataattcatctgtctggggaaatgtgttcttccaaaacgtattaatcggactggctgtcgcactctccgtctttgtagcgttgtactatattgatcgtgctgggcgtaaacctttgatggtatggggttgtatctgcgtcgccgcttcgttactagtgatcggtattgctgtgtatctgcaaatgactggcgtctggttgctggctgttattattttctttatctttgctttcggcggtaccatagggccattgacttggatcgtcgtctccgaaatatctcccaattcacaccgcgccaccattgtatctattgccaccgtgttcttctggctgaccaatgtagtcgtcgctcagactttcccaatgattaacgataatccaatattaattaaaacttttcacggtgccttcccgttctttatttacggtggccttacattgattttcctatgggtttgcctgcgtttcttgccggaaaccaagggccgctcgctggaagagattagtcaaaatataaagcagaaaaccaaaagcgctgacgccaagattacaaactcgttacgggagcaaaggtaa

SEQ ID NO: 380489 - DNA, 969 bp, Salmonella enterica
atgcaaaccttatccttaataagtccgaataacatcttgcaggctgatgtttcctgtgcaggcggtatactcacctcactacgaaaaatgctagatcccgacggtgctatggagttgctataccaggcaccctggataaacgaaaacagcatggatggcgatattccaccgttaatgcaacagcttgcgggggaatgggttggtgtccctttcggttgtgtagcacaagacgattcactctttttccgcaatgctccacatggactaccggtgaatggtgaatggtacttcactgcatcaacgtcccacgacgctgcgatacgctatgactacccgatagcataccccttaagccatcttgaacgacacatagcgcttacagacgacagtgtaaacttttcgctcacaatcaccgcacgcagaaattgtcgtttcccactgggacttcacccaatcttccctattggcggagacgcgggggcggtagacattcttgttagtggcgatggaatggtatacccacaagctacggaacccggagtcagtcgactgatacctagcgctcatttcacgagtcttcgagatgtacctttattgggcggagctatgcaagacattagccatcttccattgccctataacactgaagagattgtccaacttctcgcacctcaagggctcgtcacattgcgttatccgcagcggcgtttgcaactcacgctgaaatgggacagtgagctcttaccccattgcctgctatggatcagcaacggcggacgttctctccctccttggaacggtcggaattattgtctcggtgttgagccgatatgttccgcctgggatctgggtccggaaagtttggcctccccccctattacacgtcattgtgcgccaacgtccgtaaacctgatgtccaatgaagtgttaacactgagttaccaacttcattgttcagaaattaattga

SEQ ID NO: 380490 - DNA, 684 bp, Salmonella enterica
atgaaacgttctttattaaataaaaaaattgatgaggctcacgaatttgctaaacgttttaacatcgccctaccggaattcgcctacttcacacgtgatgattggaagcaaaaagatctctcccgctggcaagaggttatcgatctacaactaggctgggatctgactgattttggtggcggtaactttactgcattgggactggttctattcaccttacgcaacggttcactgaccgacaagcgataccccaaacgttacgcagagaaaatgttactcgtcgacgtacagcaagagacgccgttccattttcatttttccaagatggaagacattctcaaccgtggtggtggcgatctgtgcatacagttttaccatgcaacttctgatgagcaactcgaccttcaacgtccggtcgaaattgccgttgatggttgcctccattcgttaactccaggggataaattggtactcaagccgggccaaggcgtctgtattccgccttatacctaccaccgcttttgggcggaaaaggcaccggttctaggctgggaggtatctatggttaacgatgatcacaccgacaaccgtttcttggttccgctttcccgctttgctgaaattgaagaagacgagccaatgaaatgggtactttgtaatgaatataaattaattaaggggtaa

SEQ ID NO: 380491 - DNA, 879 bp, Salmonella enterica
atgagtttaattaatttagcagagatgctgcaaaaagctaaaaaagaacaattcgctgtaggagctttcaacgccatcgataatcattttgtcgatgcaatttttgccgcagctaatcagaataattcccctatcattataaattttgctgaagtgcatagtcgcctggtcagtctggaggaaatggctgattacgtatgcttcaaagcccagcgtgtaaatatacctgtgacattaaacctagatcatggactgacgttaagcaccgtaaatcgtgctatcagcagcggttttacgtccattatgttcgacggttcacaccttgattacgaagacaacgttcgactaacaacggaagtggtcaacatgtgtcaggagctaaatatttcggttgaaggtgagttgggtgcagtcggcggtgatgaaggaggtgctcttgatggctcggctgatatcgcactctataccgatgttgatctggcacacgattttgtgtcccgaaccggaattaacgcgttggccgtcgccattggcaacagccatgggcgttacaaaggtgatccaaaactggattttgcgaggcttgacgcactggcgagatgcgtcgatgtgccactagtgttacatggtggctccgggctttctacacatgattttcaacaggctattgaacttggtattgcgaagattaacttctataccggcatgtctcaggttgcattacatacgcttgaaacccggttgcatgacacagcattaagcaataaatacgaccactatttattactgatgaaagaggtagagagtgcagtcagcaccacggtgacagagcagatgaccatttttggcagtcgggggaaggctgatggatatgcttaa

SEQ ID NO: 380492 - DNA, 1002 bp, Salmonella enterica
atggatatgcttaaacgtcgagggataattgcgattggcaatttgcttgtcgatcagtcgctatgctgtacggaatatccgcaggaatcgatgctgacgcaaattacccacgtaaacaaaagctgcgggggtggttgtactaacgttctattcgatctcgcccgtctcgatcctgcgttaccactggcactcagcggcgtaattggtcacgatgagtatggtgattttattctacaggaggctgctcggcacaatataaacacagcgagagtacatgtttccgatcaggatgcgacttcattcacccatgtcgtggtaaatagccaaaatggccaacgtacattctttcatcacttaggtgcgaatcatcgtctaagtgcggagcactttaggaatctagacaatctagcacggattgctcatgtcgcctacatgttgcttttacctgcgttggaacaggaagataacgagtggcaaaccagcggtgttcgagctttggtagctctacaacagcagggattcgaagtctcgcttgacctagtttctgcgcccgaaatcgagcgttatcaactttgggtaaagcctgttttaccttatgtagattacctaatcatcaatgatgaagaggccagccgcctgtgccaatgtcctgtgggtaaagattatttcgagcaggcacgcagtctgctgaaaatgggtgttcggaaactggtctgtattcactatccaaaaggcgcggttgcagtagatgttcaagggaacgcctacaaggtcgatgcctatcatgttccttcaagtgaaatcgtgagcaccttaggagccggagacgctttttgcgctggtatgttgtatggcattcatgagaactggccactggttgaagccctgcgtttaggatgtgccagtgcacacttcaatctattcagcctctcagcgacggaaggcgcacgtattctcagcgaccttaacgaattcatacagcataaggaaggtaaggtatga

SEQ ID NO: 380493 - DNA, 1107 bp, Salmonella enterica
atgacgttatcacgagtagcggtactgactgcaccacgtactattgcgatacagcactttaccataccggaaatcggcgatgatgaaatcctcgtcaaagttgaaggatgcggtatctgtggaacagatgttcatgagtacaagaacgatccatttggactggctcccgtgattctgggccatgaaggaactggagaaatagtcaaacttggcgcgaatattcgcatcgattcggcaggaaaatcggttcagtgcggcgatcgcatcgtttccagcattttgacctgcggcgaatgtccggcatgccgacagcaaccggagaaaggtaatctgtgcgagaacctgggcctttatgggttattgcccgatgacgattattaccgactcaatggctggtttgctgagtatgtcgtattacgcccacgcagtacattcttcgtggtgaacgatctcagcctcgatcagcgtttgttaatcgagcctgcggcagtagtaattcattcactggaacgcgctaaatccaccggtttactgacatttaacagtcaggtattggtgcaaggctgcggtcctattggacttttacaaattgcagtgttacgcaccatgggtatcgaaaatattattgcgcttgatactaatcctaaacgactggcatttgcttcaaatatgggggctaaccagactctgaatgtgaacgattaccccacggaggagacacttcgtaagaagctgctgactttgactgctggtatcggagtggatttcgctttccagtgtaccggagcccctcaggccgcagctgcgatttggaaatttattcgccgtggtggagggctatgtgaagtaggattctttgtgaacaacggagaatacagtatcaacccgcatcttgatctgtgcaataaagaggttaacgcagtaggttcttgggcttactctctgcaagattacccaataacgcttaactttattcggagcgctaaacgaattggattaccactagaatcattggtgacccaccgcttctctctggatagactggctgaagcgatggaggttaacattcgacaggaaggtattaagatagtctatattgctcaataa

SEQ ID NO: 380494 - DNA, 753 bp, Salmonella enterica
gtgagtaatcatattcgtcgtatgcagatcgtgaatgaagtcaatcaggctcgttcagttacagtagatcagctggccagccaatttcatatatccgttgaaactgttcgtcgtgatctggcttggctggaaaaaatggggcgactgatgcgtgttcacggtggcgctcgaacactacagcaagaagatttgggggaactgttcaaaaaaaggcgcaatgaacatactgatgctaaaaatgttatggcacgtaaagcattggcgatgattgaacgttatatgaccatcggactggatgccagtagcagcgactggtttcttgcgcgtcttctccccgatatgcccctgacggttgtgactaacagtatggagatcgtgagagagctaagtactcgtcctagtattcaggtgatttgtaccggcggcgactactgcaatcgccacggcgatttcattggcgatatggctcaacgtaatttccgcagtcagcatattcacatcagttttgtatcatgttttggcgtaaaccttttaactggcctttgggaaaatagtgagctgaacgcgatgactaagcgaactatgatcgatgtatcacaaaaaacagttcttctggccgatagcagtaagtatggacgacgcagtccttataatatggccgactggtcgcaagtcaagtatgtcgcgaacgatggtttaatgcatgcagatacccttactcgatttgcagatctgggggtgacagtaatttaa

SEQ ID NO: 380495 - DNA, 198 bp, Salmonella enterica
atgaaggtacttttaaatatatgctcaaaaaaaatcattggcgctctcgcgtcaattattggtgggctacttgtttttttatgtgtctattggttatttcgtctggatacctggacagaacgagggatttatataggcgcctctatatttttggctcttattctcataaaaatactatcatttttcaatgatgaatag

SEQ ID NO: 380496 - DNA, 990 bp, Salmonella enterica
gtgagagcgttactgacccctgaaattgctccccgtatgggcgttgtattgttcaggccgggatcggaactgatgcccctgtttatgcaggggcgtgttctgcttgaaccagagccggaacaatattcatctttcgcctgcggcgcggtcccggcggtatcacagccgctggcggatgatcctgctgttcgtgatgtgttccgtaatgagtcggttatctatcgtgctggtggtctggctagtctggaaagctggctactccgggggaatggctgtcagtggccgcattcagactggcacagcgaacagatgacaaccatgcgccacgccccgggggcaatccgactgtgctggcactgcgataacctgctgcgcgaacagtttacggaacggctgaaatcaatagctgtggagaacacgacaaaatgggttttatcggttgtttgtcgtgatctgggttttgacgatatgcacgcagttactctcccggaactgtgctggtggatggtacgcaatgacctggcagaagtcttaccggagagcgctgcgagaaaagcattaaggatgccgaaggcaattgtccagtcagctacccgtgaaagtgaaattgttccctcggtgccggccaccagcattgtacaggataaggcgaaaaaggtactggcgctcagggttgatccggaatcgccggaaagcttcatgttacgtccgaaacgccgtcgatgggtcaatgagagatatacccgctgggttaaatcccagccgtgcgcctgctgcgggaagcaggcggatgatccgcaccacctgataggccatggtcagggagggatgggaacaaaggcgcatgacctctttgtgctgccattgtgcagaacgcatcacaatgagttgcatgcggacaccgtggcattcgaagagaaatacggatctcaactggagttgatatttcgttttatcgatcgcgtgctggcaactggtgtgctggcgtaa

SEQ ID NO: 380497 - DNA, 837 bp, Salmonella enterica
atgaaactggaggcatcactaaaacactttagccctcagggaatgcacatcagcgacgacgtgaaaggaacctctccggatcgtatcaccggcaccgatgttatggcggctattggtaccaccagcagccgcgcgcggtttggtctgtcagcatttttcggtaaggccgggatcagcaaaacggatgagcaactggcggtacaggcgctggcgcgacatgcgatggagacggctccgaagaacgtcaggaaggccgccggatgtgagttcggatggtgtatgcaggtactggcgcagtttgcctttgctgaatattcccgttcggcggccaccactgtggcatgtcacacctgtaaaggcagcggacgaattaccaggacgcagacaacacgcaaagtatcttatccgtggggaaaagcgccatactgggccagccgttcccgtgccgttcgtccgtcagactgggagcagtggactgaggtaacggagatagtgccgacagtctgtgacgcctgcgaaggtaagggaacgataagcgcccggtgccgttgcggtggtaagggtgaggtgctcgaccgcaaagccacaagcgagtgtggtgcgccggtgtttaaagcctgtgagcgttgcggcgggaagggattttctgcggtaccgtctactgcagcctataaagcgatactaaaacgtgttccagatctgcatgtcagaacgtggacccgcaactggaaaccttttctggagtcgctggtggagatttgttacagagaagaatccagggcagacagtgcatttcagaatgccacgcgttttaatgatgatggcggaaaaatttag

SEQ ID NO: 380498 - DNA, 246 bp, Salmonella enterica
ttggttaatgtaaaccagcgccagacgctgcgcttaaaatcaaaggctttgaatatgaaaaaacaaaatattattccttacatggaaaaaattatgcacgaaagagggaaaagagctttccagccttcatggttccctaaagacgatgatcaagaagaaacattcgattctctttgtgatttatacgctgaaggaaaaattacaatgaaagggggttattacttcgacctaatttttatcctgtaa

SEQ ID NO: 380499 - DNA, 225 bp, Salmonella enterica
atgatgaacaaaaaacatacaaaacatcatcttttaaaaataaatgacattaaaacagtgtgttacaacatgatgatgatgcatgaaaaatcaaaaatgcgccaaatcccgcgccgctgccgccccgtggggggcctatcgtccaggagtacctttttacaaatgaaaatgattactattaacttgatttacgtgccagtggtacaggggattattttttcgtaa

SEQ ID NO: 380500 - DNA, 492 bp, Salmonella enterica
atggacggcgaactgaagaacctcaaatgcaatatcagtcagcttgccgctattacagggttacatcgacagacggttgtcagtcgtctctcgggcgttcccctggcaccgggaagcaatgaaaaaaataagctgtatctcctgacggatgtgatacgcgtactgatggaaacgcccgtttcccaggctgctgaacatcaggacccgaataaaatgactccaaaagagcgtaaggactggtttgactccgaaaaggggcgtctttggctggaaaaagagatgaagcaggttgtcccgctgccggaagtccgtcaacaaatggcggcgatagtcaaggccattacgcaggtacttgaagtctggccggataaactggaaagggataagggatggtctgcggagcagctaaacgaggcccaggatgtggtggatgaggtcaggatactgttaattaaggcaatgcaggagaccgcagacgatgacgtggaataa

SEQ ID NO: 380501 - DNA, 2109 bp, Salmonella enterica
atgacgtggaataaatatggctctgcagcggcagtacgccgggaggttgctgaatatctcaggcctccacgcagaatgccggtagcggaaggaataaaacaatttatgtttgttccccgcggtgccaatacggcggttccctgggatgacacgttaacgccttacatgaatgaagcgataaatacgctgtcaaaacgggagtatgacgcagtgatctttgccgggcccgcgcgaacaggtaaaaccctcgggctgattgacgggtggattgtttacggcattgtctgcgatccggcggatatgctggtggtccagatgaccgaaaccaaagcccgcgagcactccaaaacccgtctggcgcgtacttttcaccacagcccggaagtcagaaagcgtctcagtccttcccgaaatgacaacaacgtccacgataaaatgtttcgtgatggttcattcctgaaaattggctggccgtccataacagttttttcttcgtcggattacaagcgggtggcgctgaccgactatgaccgtttccctgaagatatcgatggcgagggagatggtttttccctggcatccaaacgtaccaccacctttatgtctgcggggatgacactggcagagagttcgcctggtcgggaaatcaccgatatgaaatggcggcgttcttcgccgcacgaggccccgcccacgacaggcattctttctctttataaccggggcgatcgccgtcggtggtactggccctgtccacactgcggcgactggttccagcccgcgatggaaaacatggtggggtatcgggataacccggacctgatggccgccagcgaggccgcgcgtattcagtgcccacattgtctggcattaattcagccggaacagaaacgcgggttgaataaccgcggcgtctggctgaaagaggggcagttcatcaataaagatggcgagatcagcggggaggcacggcgctcacgtatcgcaagtttctggatggagggaccggctgcggcgtatcagacgtggcagcaactggtctataaactgctgaccgcggaagaagaatatgagcgcaccggcagtgaagaaacgctgaaggccgttattaatacagactggggactgccttacctcccgcgcatatccctcgatcagcgtaaagccgaaacactgatagcccgcgcagaaaaacttcccccgcggcgggtgcccgacggtgtccgtttccttgtcgctactgttgacgttcagggcggtaaaaagcgccgtttcgtcgtgcaggtggtcggttatggcagtcatggtgagcgctggattgtggaccgtttcaatatcacccggtcactacgctgtgatgagagcggcgaggccctgcagataaaccccggcgcgtatcccgaagactggcatttactgattacggatgtcctcgaaagggcctggcctctggtggggcatcctgagcaggaaatgagtgtgttatgcatgggggtggactccggcggggaggatggcgtcacggataacgcgtatgcgttctggcgccactgccggcgggaagggcttgccggtcgggtgtatctctttaagggggacagtaccgcgcggtcaaaaatattctccaaaagctatcccaacaataccgggcgcagtgaccgacaggcccgcgcctgtggcgaagttccgctctatctcctgcagaccaatgcgcttaaagaccggatcgcctcagccctcgaccgtaaagagccgggggcaaactacattcatattcctgactggctgggcgactggttttttgaagaactgacctacgaagagcgcggcatggatggcaagtggacgaagcctggcaaaggcgcaaacgaggcgctggatttactctgctatgcccatgccctggtaatgatccgcggctatgagcgtatcaactgggataatccgccgccctgggcgcgcctgcctgagtctgcacaatccagccgcaacacatcagcagcagtcgaccctgaacctgtgacgaatgagagtgaaaatcacgaaatgacagaacaacataacccggtaatgccgtttggcggcgtgtccggcggaggctggttatga

SEQ ID NO: 380502 - DNA, 207 bp, Salmonella enterica
atgacccgggaacagttactgcaacttcagcaggcttattttgacgcggagcttgccgtgcttcaggggaaatccatcaccctgaacggacagtcaatgacgatggaaagcctcggggatattcgccgggggcgtaaggagattgaggatcgcctgcggcttatggactgcgatcgacaactccattcattggcgaggttcacatga

SEQ ID NO: 380503 - DNA, 1536 bp, Salmonella enterica
atgaattttctggataaagcgattggcgtgctggccccggggtggggtgcgtcccggctgcgttcccggatggctatccgggcgtatgaagccataacccccacccgcacccacagggtgaaacgtgaaaaccgcagcggggaccagcttatccagctggccgggaaatcgttgcgggagcaggcccggtggtttgacaacaaccacgacctggtgattggtgcgctggacaaaatggaagaacgcattatcggcgcgaaggggatcatcgttgaaccgcagcccctgacgggggccggtacgctgaactctgttctggcagaaaaaatccgccggtgctgggctgaatggtctgtttcgccggaggtgaccgggcagtacacccgtcccgttctggaaaggctgatactgcgcacctggctgcgtgacggggaggtgttcactcaggtgctgaccggaaaaatcagcgggctgtctcctgtggcgggggttcctttctggcttgaggcgctggagccggactatatcccgctggagaggaccgacagcagcagcaacctggtacaggggatttatttcaacgagtggcggcgtccggtgaaatatctggtctgccagtcctggccggtggcgggcgctgcgacagtcgccgttaaagaggtgactgcggaaaatatgctgcatctgcgctttacccgccgtcttaatcaggcgcgcggcgcttctcttcttgctcctgtcatcattcgtctgatggacctgaaagagtacgaggacagcgagcgcatcgcggcgcggatttccgcatctctcggcatgttcatcaaaaaacaggatgtcggcactgacggctatgtggcgccggagaaacgtaaagagacacaaatccagcccggtatgttgtttgacggcctgaatcctggggaggatatcgggatgatcaaatcagaccgcccgaacgcgggtctggaatctttccggatggggcagcttcgtgcggtggccgccggactgcgcggcagcttctcttccattgccagaaactatgacggaacctacagcgcccagcgtcaggagctggtggaggcgcaggaggggtacagcatcctccaggacagctttattgctgcctttacccgtcctctctatcggcgctggctggctgctgcggtggcttccggtgccattgaggtgcctgccggcacggatatgtcctcgctgtttaatgcggtgtattccgggcctgtcatgccgtggattgacccgctcaaggaggcaaacgcctggagggtgctgatacgtggcggggccgcaacagaaggtgactgggtgagggctagagggggcgcgcctgccgacgtgaaacgccgccgcaaggcggaaactgatgaaaaccgtaagctggggctggtgtttgacaccgatccggcgcatgaaaccggagagcaatccgatgttaaagaggaaaaaaaggaccctgaaaagtccacccagggcgatggcagccgcgcgcgggaagaacgaaagcggcgctga

SEQ ID NO: 380504 - DNA, 2070 bp, Salmonella enterica
atggcagccgcgcgcgggaagaacgaaagcggcgctgaatcctggtacaccatccgcgcggcggcggataacgcggccgatatcagtatttacgatgaaattggtggctggggaatttcggcgcactggtttgccgaagagctggtggccctggggagtatcacgcagatcaacctgcatattcattccccgggtggcagtattttcgacgggctggccatttacaatctgctgaaaaatcacccggcgagaaaagtggtgtatgtggacggtgtggcctgttcgatggcgtcggtcatcgcgatggtgggcgaccctgtcatcatgccggaaaacgcgatgatgatgatccaccgcccacgcggtattgccggcggtgagtcctctgatatccgtgactatgccgatctgctcgacaagatggaaagcgtcatcatcccgatttacgccgaaaaaacggggaaatcaccggacgatattgccgcgctgctcgccagtgagacttggatgagtggggccgagtgtgtccgggaaggctttgccgacaaagttattcagcccgtccgggcaatggctcagctgcattcaaaacgatttgaggaatttgaacatatgccacagaacatcaaaaacatgattattgccccccagggtaacgccaggacactgacgcagccggatccgcaggccatcgtgaccccaccgccggtggcggtcaccacgccggcgccccagcctgttaccccccctcagggggcggatgaaatcaccctgcgcgcccgttttcaggaagagcagcgacagcgtatcagcgggatccagaatgtgtttggtatgttcggtaaccgccacggcgagctgatggcgcagtgtgttgcggatgtggactgcaatgtggacgcggcaaaagacaaactgctggaggcgctgggccggggggtgacccccactaacacgctgggcgggacgcagaacacacaaaatccgatgctctcccatatctatgcggggaacggtaactttgccggggacggcatccgggcttccctgatggcgcgggcggggtttgaaagcagccaggcagataacccgtataacgctatgaccatgcgggaactggcgcgtatgtcactaaccgaacgtggcgtgggtgtctcgacactcaatccgatgcagatggtcgggatggcgttcacgcacagcacctcagattttggcaacattctgctggatgtggcgaacaaggcaattctgcagggctgggaagaagccccggaaacctacgaacagtggacgcgcaaaggtcagctttctgacttcaaaacggcacaccgtgtgggcatgggaggctttaatgccctgcgtcaggtgcgcgaaggggcggaatataagtacgtcaccaccggggacaaacaggccaccattgctctggcaacctacggggaactgttcagcatcacccgtcaggctatcattaacgacgatctcaacatgctgaccgatgtcccgatgaagctggggcgggcagcgaagtccaccattgccgatctggtttatgccatcctgaccgccaacccgaaaatgtccacggacaacgtgaacctgttcgataaggcaaaacacgcgaacgtgctggaaggggcgctgatggatgtggcatctctggataaagcccgccagctgatgcgtacccagaaagaaggtgagcgtcacctgaatattcgtccggcattcgtgctggtgccgacagcactggagtccatcactaatcaggttattcgttcctcgagcgtgaaaggcgcggatattaatgccggcattattaacccggtgaaagattttgcgactgtcatcgccgagccgcgcctcgatgataacagccagtccactttttatctggctgccgccaaaggtactgacaccattgaggtggcctatctcaacggcgtggatacgccgtatattgatcagcaggacggcttcagcgtcgacggcgtgaccaccaaagtacgtatcgatgccggggtggccccggtcgatcaccgcggtctggtgaagtgttccgcgtaa

SEQ ID NO: 380505 - DNA, 324 bp, Salmonella enterica
atggcaaagaattatgtacaggcgggcaccacgctcgccattacggccaccgctgcagtaaagagtggcagcctggtgcaggctggcgatgtgttcgtcgtcgctgtcaccgatattgcggcaggtgccaccggggacggcatcgcccacggcgttttcctggtccccaaactggccaccgatgtgatggcggcgggaaaaaaagtgtatctgaaagacggtaaggtgcagctggatgccaccggcggactgccgctggtgggcgtgacctgggcgccggcggcaaaaggggaggaatctgtgccggtacggctcaatggctaa

SEQ ID NO: 380506 - DNA, 243 bp, Salmonella enterica
atggacgaggtgacggctgcccgcttcgggcggtctgtcctgattgacggggcggagtatgtcgctgcggaggcctcgtttatggcggaactgggtgcgctttccggggaggggacacacctgattgtatttagcccacagtacaggcccgccagaaagcaggccgtgctctggcggggacaggattttactgtcacccgctggcagcgcgtcaacggaaagtaccagatttcactggagtaa

SEQ ID NO: 380507 - DNA, 585 bp, Salmonella enterica
atgtctctgaaggggctggagaatgccattcgtaacctgaacagtctggacaggcatatggtgccgcaggcctgcgcctgggcagtcaaccgcgtggcggcctcggcggtgtctgccgccacgcaccgtgtggcgaaagaggctgtggcgggagataaccagaaaaaagggatccctttccggctggtgaaacagcgcgtcagactctggaaagcgagcgcaacgggaaaaaactatgcccgtatccgtgttaaccgcggcaacctgcccgccatcaaactcggcagtgcgcaggtcaggctgtcccggcgcggcgggaaattcctgcgtcgtggcagcgtactgaaaatcgggccatatctgttccgggatgcctttattcagcaactggctaacggacgctggcatgttatgcgacgcgttaacgggaaaaaccgttatccaatcgatgtagtgaaaattcctctttccggaccattgactcaggcattcgaaagcgccacacaaagcttgattgacgaggaaattccgaagcaattggggtatgccctgaaacaacaactgaggctttatctttcacgatga

SEQ ID NO: 380508 - DNA, 267 bp, Salmonella enterica
atgattacaccacaagttgctattgatatcgcaaaagactatagcactcgaaaaaaacttggctgggatgagagtagcgttgttgttaaaaaacaaatgataaagggtgatccttgctttgtgatttatacaggtgatattgatttaaccaaactggactggttagatacggtcactactactgcttttcatgtatacgtcagcatggttaccggagaatgcctcggttatgaaatttgcaaccgaggtatatgctttgaacgttaa

SEQ ID NO: 380509 - DNA, 645 bp, Salmonella enterica
atgtttgctgattttggtatcgtgaatttctggacgtatctgcttggtgcgacactgatagtccttgctcctggccctgagaccatgttcgtgattaaaacaagcattacgagcggcatcaaacgaggctttgctgcaatattttccattctcatgagtgacgtacttctggttctgctggcatggtgtgggctggctgcggtcataagctcaacccctgccttgtttaacgccatcaaatacgcaggtgctgcctatcttttctatctcggtgtccagacgatacgcactatctttaagccagctatcgaaacgagtgaggaaaagaaatcttcagctaatgctaaggggatcatcggacgcggaatgctggttactctactgaatccaaagacgctactgttctatatctcttttttcgcccagttcatcaatgttcaggctgaacactcctggatggcgtttatcattcttgctgcggtaatgttcgcgattactctcgtttatttcggcttcctcgttttctgcggctcttatctgctaagccgtctgaaaggcaaccgtagattatcaaccattggaaacacgctggtaggtatgttcttcattggatttgcagcacgactcgcaagcgtcacttcctaa

SEQ ID NO: 380510 - DNA, 1044 bp, Salmonella enterica
atgatctggctatcccgactggagtcgacagccaataaacatcgtcttgccgctggtaaggccgcccgtacagtgaaagctaatgtggtgctggatgaggtgatacgcgtccacaaccaggaggccttggctcaggatgcacctgatttgctcagtcaggctgttacgcaactgcttctgaaggactggcgggctcagcctaagcgcaaagtgagttggcagcgctattggcggggtatgagcctgccaagtacttttgtttacgaaggtgccatcgttcctacgaagacaatatcagaagtagcctggcatccctggttagcgcaacgtattacaggacaactgacccagccaatcaaggcacgcttacaacagctgaatacatatctttttcgccaaaccgagggcgacaagtcactattcccaggcttgcttgggcatcgtgagcggtctctgcttatatttggtgacgaaaaagcgctggactccttgccgcctgatggctggaagcatgtcattctgactttggctgatatgggcgcgtttcgacgtgcaccgcctttaccgtatgagtcatcatattgccatgatcttccggctatcattgttgaaaactccgatgtgtattatcgactatgccaacttaatcgagttcagactcgctggtcactggtcatttacggcgcaggtaacaaagtatccggccaggcggagtgcgtgtcacaacttcttgaggtcgaaaaggtagaacagctactttattttggcgatctggatgttgcgggcttaaaaatcgcccatcagttgcattgtaagttgcttaacgattacggtatcagcttgcatttagatgaatggctttataatgaactgatatcaaatagtctgatgacagcagaagggaacgccaacaacgaacggtttgatttcgaattacagtgtggctggatgccacagtttgttttacgagaaatgaagactcttctggcgatccatcagcgtctacctcaagaaggcgtggcttctttaggtttagtcatatag

SEQ ID NO: 380511 - DNA, 4437 bp, Salmonella enterica
atgtggctgattaaacgggtttatatggatggcgcaggccatgaagaagctttctacaaggacctcacactggactatattggcctgtctcaagcggtcggtagccctgttgttgaaggcctgcgctcgcccgtcagaaatgcgaaggtggtgaccagtacttatcagcagcttgtaaatgggggcggtaagtcaacctacatcgcgctgctgttatcgatttttgagccgtccgttagtgacttcacccaatatctggcaaatcatcgccagagtgaataccactaccgcaattacttctataaagaactctctgttgttttggttgagatggtcaatgaatcaggacaaacgttattactgggacatgctcatcagcgtaatggagatgatgttgaccgcacactgtttatttgtgatgcgcccgactccctgatgggcgcgccgtttgatgaagtcccttcttattcccgcgcggaacgcaattctgagctgcgcccctatgccaatagcctgcgcagttttgatagctggcttaatctcaaggccggtagtgaaggcggtatgcattggcgtaaaaccaccagacagaacgagtggcgcgcatttttactggaacaacaaattaacgttgatcttatcaaaacaatggtgaccttcaactccgaagaaggtggcctgacccgttttattgaatacaaaactgaacatgatttccttggcgcgttcttcgcctgcaccatgtctaaagatgcggctgagcggctgcgggaactggtagcgcatgaagttgaacgtcagggagagttagaggggatccgtcgtaacgagtccttcctgaaggatgtgctggctaactggctggcatttcttgatccggctaaacagctggaaagcatccaggcgcagcagcaactgctggatgatggcttccgagaagcaatgcgcgatctcgcagcctttgtcggggatgctcaggttgaacagacgcagcttgaagataacatggatagtttgcaaacgcatattggccaggcgatgtctctgcgtgagcagttaggtaagcgcagagcactgcttgaatatgatctcgtgcagcatcagttcgacaaacaaaaagcgatagtcgatgcgcttcaagacgaagccgataccaatcagcgccagattgagattactcacgctgctatagactacaaagcctatgctaaggccctgaatgagtaccgccaggcagatgaagatctgaaggtattccaaagtgaaacggaaaggccgctacaggtgattttcgagcgtactgctggcgaagccttgggcacattagagtgggcaatcgacagacatcgacagcaggaggctacgcttgagaaagaattagggcagatggatagggaaagcaatacccttaaacaatcatacgacgatctacaaaagatgttggatggcctggaggcggatcgtgagaggtataaaagagacaaacggcagggtgaatcgcaacggaatgaattatgtgaagcagggttgatccaaaagggtgaaacaccggtagcagcccaataccgactggaattaaccttacgcgatgcacagcagagtgaagaattggctaatacaattcttcatcagaaagagcaggcgctggaagcacagctgaatgttgtgcgggaggcatcaattgagaaaagtgaggcccagcaaaaactcattctggctgaacaaaaacaccagtcagctgtggatagtgccttacttttagcaaaaacctatcaaaaactgccaacgtcaacgcaacatgatctagatattgaagacacgagttggcacagcgagctgtgtggattgcagctcgacaaagtattgaatgcgaacgctcaaacgctgaatggaatgaaagagcgtttactgcaagcccggcacgaactggacgagttaaggatgacgggacatgaactggtcgctaagctggtcaatcaggcacttgaagcgttttatgcggcgggcattgcacgggataagctctggatatttccacattatttggcctctgtttacaacgatgatgcacaaaagattgcagcggtgatcgatcaaaaccctggccgctacctgagcctagtcgcactcgacaatgtaacgtttgaacaggtccataaaattagtgagatcctgccctggaagaaggcacctattgctatttacttgctggatgaagcacaagatctccgccgagaaacgtctgaattagtacaggtcgtcctctcaaaccccgataagcacggatatagtcaggccgcttacgaagcccggctgcaagacctggagaatatcgtagcgttgcaggaagtcagtgtgaaggctgcggagagcgcccttaatgtactgaaatctttcaggaatgactggcgtctgcattacgaacagtatggtaagcattgggcgggactgcttgaccaacgggagctggctctcttaatactggaaaatgctgatgcagcacttaagcaagctgagcatgatgagcaaacactgcgtgacgagaagagagatgtccaggtgcggttaaacaacgcccgacagcagaaaattcaggcagaaaaagcgcatgataaactgagtctttttgtagaaacagaatgggcgaagcgtgaaacggcgataatgaaactggagcagttagctgcacagattcaacgaagcaagggcactctttgcacccagagagagaaactggaacgactgagcgagatcgagaagaacaagctctccgagaaaacccttttaaatatccagatgggcaactggagtaatctgtgtaacgagccgttctattcagagattatggcgactgaaggtatggaaggacgaagccccgaagatgcccatgagatggcagctcaggcgcacaaaaaattgctcgaagcagccaacggtgatcaagtgaccgctctcaagcaacaactgaaagatgctaaacaggcacaacgttacgcctctgagcgtttgaccgctcaacccacctacaatacatatccggacgaggtaaaagcggcggccatcaatgaactaacggtaattaataatcgcatcgtacgcctcaacaaacagcagaagcaattcacgcaaaatctaattaattctcaggtaactctgcaaaatttttcccaaagctgtgaggaggctagtaaagcaattgacgaggattttgtctgggaagagaagcccattgagatagagacaatccaaacgtctctggctgaaatcgtcaacagcctccatgaaattgaataccagctaaaacttcaactggagcaaaagaagctgcagttgcaaaagatggaaaatgtgaaagagcggctgcagaacgccaaaacagctcaagcgatgattcagcccattacgccgacctctgcggcgggtctacctggcaggatccagagcatcactgaatatactgacgatctggttacacaatgccaaaagtatgccggtctaaatgaaacgctaaaacagcaaaatatacgcgtctctacggtctggggaaaattccgcaaacggatcgaagaagagttggccaaggatccagatgcccgagccagtcaggaatacttacggcagttggactcaatcgcaacttatcatgaagtgctgggcgatttggacagggtcggtacagggatcacgcaggtattcgaagctgtgcaggacagcctggaacaattccagcgttcgattgatctgactgtcacccatctgactgctcatctggagggggcgattaaacttctcaagcgcgcgatgtcggtcaaaattcctgaggattgccccgtactgcctggtcggcccattatcaaaatgaccgatcggctgaatgatgttgccgctgatctcaggggttttgccagcagccgcctgcagcagtggatagccaagggacagataccccgagcgcccaatcgggacgccttgacagctgatttggttcagtcggtatttggcgaaggggagctggaggtgcgtttgctgaagacgaatgccagccgtccacaatggactcctgtcacccgacttgaaggttcgggtggacagcgccttacatctgcctttttactgtttgtgacggttggtaaagtacgagagtacgatacgggtatttcaagtgcaggattcttgttagccgataacccgctgggtaaatcgaatgccgatgatctaatgcgaattcaaacccaaatggccaaagcctataaaatccagctcatctacctgactggtatttcggatgaaaacgcccaatcaatgtttgataaccatctcttcctgaataaatttcaaaaactgaggcggcgcgatttggtaaccgttgataaagaacgccatgccctgtgggcggcttctctggctgctaagccacagttcgctcccgtcatttaa

SEQ ID NO: 380512 - DNA, 897 bp, Salmonella enterica
atgtacgacaacgcgcatcaacaagcgaaacgctacgccgagattgccacacaggcaattatgaattcactgggatataaaatgggggatgagctgattcaacgtgcgcttgatctgcaaggtgatgccctgttcgcagagattatccgtggcgtcgcgacaggtatgaaattgcggtatctcgggattcatgagacctacggggtattactggctgcagatggccgaggtccattttccccatctttgggttggctgaacaaacgcttgctacctgaaacaatggctgagcaacagggtaaggaacggaaagaacagcgcctgtttgcaggcttaactctgattgcgttgctggctgatttgtttccaactccagacaccgttcgtgtcgaattcggtcagagtaacgccattaatgccgcctcggtggtagccaggctcaataatgttgccgaccaggtgattgcccagcgcaaggccgagggtgacgataccgtagatggcctacttatggcggccaggtttgtgcaggaagaacgtattccccgtattcacgacgaaaaggtagggcgtgtctcgagtattcgctcgcaaacagaaatggcaacgcgctggatacaactgctgcaggaggaaggctttctggccgaagacagcagtctgtcgggagagtccgactggtatccgacccaaaaactcaaacattatctgcgccatactggcatcgaagagacggtgcgctttgtcatgagcatcagtccagccgtagaagaacggtcgtccgatttagctgaaagcgatcttgcagcattagcagataccctggagtttccttcgctcaatgaacgtccagttacaactggaaccacagaaacgcaacgcttgaaggagatttaa

SEQ ID NO: 380513 - DNA, 1467 bp, Salmonella enterica
atgtcactagggtttttggagcaggctcgtaatgaatctatggcacgccgcgagctgacgattcaatctcacgcgttgctggtagttcggacgctggattcaatatacagcgccctacagcgcaatccgtttgatggcttcgagcttgatgcactggcggcaattatgtatctctttgacgccatgctttattatgctgaccgcgagcgccagccaggtatgacgcgtaaagaagcggaactatgtctggttgggcacctcaatgaagcctatccgggacaagaagcgtccgactacgcgcaagttgccagcaagatttttgcggcgatcaaagaccctttccgtctcagttattacgacttctcgcaacgaacgcattccgaagagcagatagtccgtctggtacgctatgaccagctatccggctcagatgatattctctggtcgctgaccgatgaaggaatgctgttctataccctccgtttggatgaaacaccgatagaacgcgctgcgattctggcctggcgcacgcttaaaaccatccgtcgcggtgagatcgacaaggcagtacaccagatccaatcaacgcagcggcaactggagcaatatctgattgggatgcggatgaaagtgcgtgctgcccagtctggtgatttgagtgcatcttatgcacacgatatccgtcccgtactcaatgattcctttgataaaacccgagaggttttggaacatatccagaactcaatgtcggccattaccgaaatgttggttgaaggaagttcgaaattaaatcccgacaaattaaataagctacgtagggcacaggagatttttgctgaggtctgcgcttttacgcagcgctatcaagactgcttacttgatgttaacaaagattttgagcgagctcgtctgaaactcattattcccagagataataccctcttccgggaaacactggaaaaaggtgcactcaagcccttgctgtctcattcccccgacactgtcgaaaaggaaatcgatggtctcaccgcacgcctgttggctccccgaagacaggatgatgatcggcacattctgtttgaccttgaggcgctgctgaacctttatctcgatagatttgaacaggcgcttccacatgagatacaggaccccactgatcagcctgtagctattgaaaccaacctgcgaggtattcctgaatctgtcattaaaaaatgcagcgattgggttagtgaccgattgaagaattgggggcatgtgagctttagagatgtttttgacgcctatgagtgcgaagaattatccgaacaagaacaacagatttgtttacttcatattggcagcctggcagctaacagcgatcccgcaatagaagtggagatagacgacgctatcgaaacaacgctctggcgggctaacaatgtcaaactgttaacggtcgctcccttatacccctttgaggagtag

SEQ ID NO: 380514 - DNA, 894 bp, Salmonella enterica
atgtactactcaatgtttcttgagaaacacaaatcccccctcagccacgcacaatggttgcgcttgcgctatattgagcgccagctactgtgggaacgaaaagtcacttcgcgcatgattgctgaagagtttggcgtctcggcgcaacaagctcgtactgatgtaagaacctatatggaggtcgctccaggcaatgctattgagaagggggccggccgaaaagggtatttccccagtacgacgttttcgcctgttttgctgggagacaacgatctggtctggcgtgcgacggtagaatttcaaccgccgcaagcggcccacgcgcaggaaatcccgctcatccatcgcgcagtacatagccgcacgctgtcaatttttttgtcagcaatccaacaggagggacaagtacaagtgacttatgcgtcaatggaaaacccggaaggcacatcccgtacactaagccctacggtaattatcaccgttaacgggcgccagcatgtacgagcctatgactggggtagttcgacgtttaaggactttgttttggcgcgatttctggactcgccggaactgattgttcctgccccccctcctccgcgcaaagataccgcgtgggaggtcgtgatccccgtacgttttatcgccaatccaacactaaacaaagcgcaacaagaggtaattaagcgggactacatacttgaaccatctgaattcagcattcgtgcaccaatgattttttatttatgccctgaaaacaatctgcctaaaacagatgatgaatatgcacaagctactgacgccagcagccacggcccctttgtctatcctgttctagctgtgcacgcccaaacaggtgagcctattcataagtaccgccatgcaggtgagagatag

SEQ ID NO: 380515 - DNA, 1008 bp, Salmonella enterica
atggcagcatcacctgagcatcaatttattgcagaagcaatggacagtgttttatcaagatacgcaagtaccaagttgcttggagttcttgaagctggaaggaagaaattcgactacagctgtgtgttagaaagagactttcatcgagtcttatcgtcacaggttttatggtcgcatactgaggggattcataaagacctgatgaccttgctgcatgaagaagaatcgtatctgaaagtttattttgcaaaagatacaaccaaacaccgaatgcgaatcgatgaagttatctcagagtataaaaaaaactcacaaacccgtgcactgttaaaagggttacgaataatttaccttcctggtgaatttgacgctgacaaattatcagaacaaaagttaatgttagatcttatgtctcatctagtatgcaaagatttgctgtttggtactgtctttgggaggttatctagttttgatattagagtttttgcaaatcatggagggccatttggtcttaaatacgctgtacttgatgagattacagaaaatggattaatccacaacccaacatttaaagaaagactaggttactcaactacaggtacaataagagaagttacgacaatgttgtcagcattggggttagtcaaacgactagacaactcagttattttgctgccaacccttaaagggcgaatgctcctggatttagcaaggaaattggtggttgataacagctccgatgaaacagcgggcggtgagtttgaaatcattaaaagtctattgttcccaattggttcaaatggtcagtttaattacttaaaagagatcaaagagtcagcactttactcagccaacaattttggaaggaagctaactgtaagcgcccagtcggaaggcacaaagttttataaaactttcaattgggatgactggcgtgagcaacttcaaatgatgccagaattaaaagacaaattgttcactgaacctgacttcgactatgtgtattaa

SEQ ID NO: 380516 - DNA, 282 bp, Salmonella enterica
gtgccaaatatagctttcgaagatcgggcagttgcatttattgatgtcttagaatttaagtccgttgtagaaagctttgactcgggagatagagcatttcttgaagaattgggcgaaacattgggggcgggtgttccgagattagatggtaatgtcagtccatccatatgtcgagatctaattccgaaacatatttccatttccgacagtattattttaagtgcgccattaacctcggacaaaatgagtagctatctcaatagcgaaatcaagagaaactag

SEQ ID NO: 380517 - DNA, 1593 bp, Salmonella enterica
atgtctgaaatctccaccaaaaactttccagcgcgccacggagctccgtggagtaaagaagagtttcagcaactgatcttggcaatcgagcagggcctcaagttaagtgagcttgccggacgtcatcagcgtacgtctggaggcatactcggcgcgattaagcgtttgctcccctctgaattttgccagaacaacaacattagttcggttagtgatctggcgcgctatttcaaagacacacaaaatcaagagtgggcatgtcttatcaatgccctgtgcccgtctgctgccactgaaaagaaaacggagaaaaatcaggaaacaggggcgagtaagcaagctgcttcgtcatgtgccgcggtgtcgggagcgagcggtaaaacaccagatgaaaagcaaataacaggtttcgtccccagtacagaatttctggattatgtagccagtgagtccgatgtcatcatgctgataagtgccgctgtggagagtttatctaaggaacgcgatcgggatattcttctcatgcgtctcggcacggatgagcatccttatacactcgctgagatcgctgccaaatgcggcgtttcccgtgaaagagtgagacaaattcaggaacgagccttcaggcggctagcgggtaaatctcgctatgaggggacccccggtgctgcccttaaaaagctcattaacgcagtcagcaattcctcgtatgaaatagcaatatgggtgcatcgtatcgctcaccgtgattttatgacgtcgtccggactagccgcgaagtttattctctgcactgcgggtattcagaaggttaagagagaggaaattgtgggattcttctccgatatttcactgctacaaaaggcaaagttggcgaagttacgcgagctgaaccggagtcgagctgcgaaagagagagttgaatctgagatcagtggctggttaagctatacagactggcccaaagtcatcgctccgccaccgtcagcagtacatctctcttcgcagcgaatagtcaatgattcggatatcgccggtcatttttactcacagaagctcgcacgcaccgtccagtacgagtccggacttgaacttactatcatgacgcagttggagcgtagcgatcaggtttccttttatcaggaacaacccgttgctataccgtacagttttaaagacaaactccgaaagtactatccggacctgctcgttgcgactgttgatggccggtgcctccttgttgaagttaagcctacagacagcatggccttaagtgtcaaccgtgcaaaagccaatgcgggtcgggcatgggcacacacaagggggtggggatggctggttgtcagcgaccgacatacgttacggcaactggaagaacacgtcattcctgcggctaaacggatgttgatagaaaacgaactgaatacgtctggggggattacttggcgtgagatgatggggttacgcacgcgtcatgaacttacacggttggatctgactgcgtatattattcagtccggtgctgaggtagacagatcctaccgcattactgcgcgaactgttcttgacccagggctagttatattgaactga

SEQ ID NO: 380518 - DNA, 540 bp, Salmonella enterica
atgaaagaaaccacggcctgtcatgatgtactgctcaaccactatcaggcctgtctggatgattatactcgcccggctatccttcatggtcagtgccagcccgagattatccgctggcatacgctgacgatggtgatctgcacactgccctgtagtgagcttgccgagctgctgctccctgaaggcctccagcgcgttctcaatatcccgacaacagcaccaataacagtggcgcaggacatcaacaaaaacctgatgccgttactactgccgggtgtgctgctcagtgaatgcaagcgactggggatgcgtcgcctcagcaacaagctacagtcattgtttcaacaattcagggggccagggctcagagagcggttaacgctgttgtgctggtctgaattggcaacaggcatcgatcacaacgaatggaaggagttgcaccggttatccacggaatcgctgatatcgtggacagatcaaaagctacaggagttctgggtgttacagccacaaattgaagattacattgctttaatctga

SEQ ID NO: 380519 - DNA, 294 bp, Salmonella enterica
atgtccaattttaataccagaaaagatcgcgatcggaatggaaatccgctaccacattatcgaatcaactatctcagcagtgaagggattacttatatccattaccgtgaccgcaacacttcgagtctacctcgctgggatgcaacaaaatcgccaggctggtggaggcggctaatgactacacgcccacgtcgtgctgcaaaccgtattaacgtggttcgcgtgttgcgtggagctgaccctgatggcctgttatggcgcacagggaaccggccgcagatctatttttattga

SEQ ID NO: 380520 - DNA, 681 bp, Salmonella enterica
atgaacgtaatgcaggataaaattcacccaatgcttttgccgttctatgaagaagtccgaatggatgattctcttacggtggttattgtgagctttccacaagggatttctaaaccttatgttgtgcgccatcaggggagggaagaaatcttcattcgtgtggggtcaacgtccagattggcaactcgcgagcagcaaatgcatttgtttgaaattagcagtatgttacatactgaggtaatgcccgttccgagaaccgatattacctgtctggatgaagcccgtttattgaattatctgcgcaatattttgcatgatcccgatattccggagacaccggaacaatggcaacaacggctgttgggattgagttttctgacgcaaacgggtgaaaacatttgttgtacgattgctgggttagtgctttttggtaaacatccacgtcagtatttacgtcaatcgggtatccgagtctttgccttcgccagtgaatacaaagaatatcagccgttgttggatgatatgctggatggcccaatggtgggacgttttgatactgaagaggctgggagagcgttgatcgatggaggattgattgagcgtttgatgtcaaccatcatgccatttattacttctgaggcctctcaacccgatatgaacttgcgtcgggaaaccacctag

SEQ ID NO: 380521 - DNA, 195 bp, Salmonella enterica
atgcttaaaagcgagttactggagatcattgctaacgggaaaagctccggagtggagttcaagcgagatgatgtccgcccggaacaactggcgaaagacgttgttgcgatggctaacttttggggaggatgtgttctgctgggtgttgaggatgatggcaccattaccggaattcagcatcagaacctggaatag

SEQ ID NO: 380522 - DNA, 2850 bp, Salmonella enterica
atgtattcagatcatcaacgtagctatctggcgcactggttaacgttaagcggcaaagccgaggactcactgacgcaaaccatcgccagcgcgcgagttgatatgaatcctcatcaggtggaagctgcgatgtttgcgctagcatctcccttatcgaatggcgttatcctggccgatgaagttgggttagggaaaaccatagaggccagtctgattctggcgcaaaaatgggctgaacgacgccggaagttgttgctgatcgccccggcaacgctgcgtaagcagtggagccaggaactggaagagaaattctcactgccttcacaaattattgaagcgaagatcttcaatcagatggtgaaagagggatgtgataacccttttgatattgaaaatacgaccggggaagcggcgatctgtatttgttcctacgagttcgccgcccgtaaagaacatgaactggcgcgtatcccgtgggatctggttgtcatggatgaagcacataaactgcgtaatatctacaagagtgatggtgctaaaacggctaaaaaactcagtagcgcattatccggcaggaagaaaattctgctttccgctacgccgctacaaaacagcattcttgaactttacggcctggtttccgttattgatcctcatttcttcggtgatctggcctcgtttaaggcccgttattcccggcagaatattgatgatgcagaactggcgttattaagggttcgtctgaataagatctgcaaccgcacacttcgccgacaggttcagcaggaaggcgggatcagttttacccgccgccactcaataactgaagactttcgcccgacggaagatgaagaagcgctctataaacaggtttcttcttatttgcagcgggacgacttgctggcgatcaaaagtggtgcgcgtcatctggtaacattagtcatccgtaaaattctggcttcatcatccacggcaatccagggaacgctggaaacgatgatccaccgccttgaaaataaaatgccggtgctggatgcgctgacggattatgaaaattacgacgattacagcgatgaagaaggcattgatgacgaagataccatcgatcctcaggcgctacaggccgaaattgaccagttaaagagttataagattttagcggcatctataaccaaaaacgccaaggccgaagcactactacgcgtccttgatcgggcctttacctttacagttgaattgggcggattacgtaaggcggtcatttttaccgagtccgtacgtactcagacctggctggcgcaactgctgtcagatagtggctacgagggagaagtggtcctgctcaacggcagcaatagcgatgccgcatcgaagaagatttatagcgactggctggagaaacaccagaacactggccgagtttccggttctcgcacagcggatatgaaagcagcgctggttgaaaaattcagagatgaaggcactctgatgatttgtaccgaggctggggcagaaggtatcaacctccagttctgttcattgttaatcaattatgatttaccgtggaatccgcagcgtgtggagcaacgcatcgggcgcgttcaccgttacggacaaaaacacgatgtcgtggtggtcaacttcattaataaaggcaatcgggccgatcagcgtgtgtttgaattactgagccagaagttccagctttttgaaggcgtatttggcgcttccgatgacattctggggtcaattgaatcaggcgtcgacattgagcggcgtattcatgaaatataccaacactgccgttccgatgaacaaatagaacaggaatttaatcagcttcaggatgaactcaaagatcaactggaaaatcgggagaatgaaacccggcgttcgttattcgagcattttgacgttgatgtggttcgcaatctgaaaacccgacgtacaacgaccctcgcgcaattgaacgattaccaagaaaatctgttgctgttggcggaaatgtttctggatggatacgacgattttcagcgctctgaaacaggtttccgttctggcggaaagtgttttgatgttagctggcctattgcggatgaaaaggatgcagaattcttccggcccactcaagggtacggaaaacaattgattgatgttgccctgtatgagggcagaggccttcctacgtcgctaatttgccagaaactccatttcatctatcaaccaaaaacagggcaactggccgatgtgaaactgttctgtgggaaatcgggacagttgttgctggcaaaagtttgtattgggaaccaggagcagcaacgagagaaactactggccgccgccgtcacggataacggtgaggtactagcagaagaaacggtgtcccgcctgcttctcttacccttgtcagagataacctctatcgaagaacaacctttattgcccgctttaacggcacaacgtgaagctttgcagaattcttttatccaacaggtcgaacgcgataacgaactttattacaatgaagaagtagaaaaactcgaacgctggtcagaagatcggcgtatcgcactggacttacgcatcaagcagttagatgcggaaatcaaagacgcgcgtaaagctgcccgtcagcttccttccctgaaagagaaaatggaagccaaacgcgcgctaaaagtactggaacgcgagcgggacagtatcatgttgcagtaccatgatgaaaagaaaaaaatcgagcaggaagaagatcgtctgctggaagaggtcgaacaaaagctggcgacagagataacgtccagtcaattattcgcggtgagctggacgttgagttcgccttccgcatga

SEQ ID NO: 380523 - DNA, 981 bp, Salmonella enterica
atggctaacggtaaagtattaagacagctgataaaagcgggcgcaaccggcgataccgccactttccgtcgtgtttcggaagccattattgatgaagaacgtcagaaacagcaccaccttctggctaacgatctggaacatatcctttacggcgagcatattgttcaggcttcgcgttcgcctgtgcttcctccggcaccgatagataaagagagggggctgccgctgctggatctccgacagccgcagcgcagccttgatgaaatgatcctcccagcaaccagtgctacagtgattgatgaacttcttgaagaacatcgacgcagcgatgtactgcatagctacgggatgaaagcggccagtaagatcatgtttttcgggcctccgggctgcggtaaaacgctggcagcggaggtgattgcttttgaactggatatgccgctagcgattgttcgtattgacgttctcgtgtcctcttttctgggggaaaccgcagccaatctgcgtaaaattttcgattttatcggccaacaccagttggtcgtgttgttcgatgaatttgatgcaatcggaaaagagcgaggcgagagcggtgaacacggtgaattacgccgggtcgtcaatgctgttctgcaaatgatggatgcctatcagggcaaaagcttgattctggcggccactaaccacgaacatattctggacagtgccatctggcgtcgttttgatgaggtgattgaatttcctctgccagaccaggctcaattacgcgagttgctggcgttaaagctacgcggtattcgccgccagtttgagctagacgataacgaattactatcattgcttcacggaaaaagtggtgccgacattgaacgtattgtccgtcgggcaatcaagcatatgatcttgcgtcatcaggaattcctgacgctgaaagacttaaaaaacgcgacacagcgagaaaacgccagaacccaccgataa

SEQ ID NO: 380524 - DNA, 2388 bp, Salmonella enterica
atgacggcgaattatcagcatttaacgattaccaaagccccccttcagaatgatcgacgaacccgtagaatcaatatgcctcgtattcccagaggtgatttgcgccaacacgggcaaaggctactgactcaactccagaccctacgcccaacactgtcacaagtgcccggcagcgctaatgacgggcgctatatcctcaagctgaactacagcggtacgatgaatttttcggccttgatacatcacggagtggaatttattagccaagaaaacaaacaggtgtgtgtggtctttagcgatgagcaaggcttatccacatttgcagagcacctgtcgtctctcggtcttgatacagatctcacttacaaacagattctggaagcacttgacagtattgacggctggtcggcggaagatcgtaaaagctgggcgctccggcgctatggtttccctgtaacggagcgctttcaactggatgtggaactttggcctatcgaggttgcgcatcattccaaacgtatcgatctgcatacccgttttgagcactggttgcaggagcaggggatttcccgacgggataaagtcaatctggatagtttattgatataccggatagaggtctctcactcacaggcagagttattattagctcatagagatgtcagattagttgatttgccgccgtccagcggtattagctatcaacagattaaccgggatatcaatacacttccggctcgtctgatttcacccgcggaaaatgcggccaaaatctgcattctggacagcggcatcaataccaaccatccgctattaagttccgccattgctgaaagcgccagctttattcccggtcaggatgagtttgatcaagaggggcatggtaccgccgtagcgagtattgcgctgtatggcgatgttgaagcctgcaaccagagcaatttctggcagccgcagttatggctgtataacggaaaagtgctgaatgagcaggctgaattcaatgccaaaacgattgaaagcacactaacagccgccgtcgcgtattttaccgatctcggttgccgtatttttaacctatcactggggaatgctaatgccccctatgacggtaaacatgtgcgcggtatggcatatttgctagatacgctagcgcggcaatacaatgtgttgtttgttgtctctacggggaacttctctggcagtgatgaacccccagtgccacagaatagctggcgagatgaataccccgattatttgttgcatgaagccagcattattatcgatccggcccctgcactgaatatactgacggtgggtagtgtcgccaggcataatgcgacctctgatgcacaacgtaggcccaatgatattcagcatctcagtccggcaacggaaaaccaaccgtcgccttttacccggcatggcccgtcagtaaaaggggcgtttaaaccagacattgtggcacacggtgggaattttgcttcagacgtgcggcaagaaggacaatggcaaccacatatgcgtggtctgggagtacttagttgccatcatcagtttcagggcaataccctatttaaagagctcagcggcactagctttgcagcaccatatattacgcatctggccgggcgtttgttaaacgagtatcctgaaatgtccgccaatatgctgagggcaatgcttgtgaatcatgcatcagtcactcaggaaatgacccaagctttcccgcaggagatgagagaaagctttagaaacacacccgcgacaagaaaccgggaaattgagcgtgacgtggtgggctacggtattattgacgaagatacgctataccgttcttcagaatatgtcgtggttatgcggtgtgaagagcagatagaaaataatgctcatcagttttttgagctcccctttccggcttcttttttacgttcgcggcgagcaacgcgtgaagtccgcatcacgctggcttattcacctgcggtacgtaccactcggatggattacaccgccacgcggatcaatttcaggttggttaaaggtcgttcattagatgaagtgcaggccagttttaatcaccagactcagaatgaaacggaaacccgttccgatgatgcaacagctaaccgcaatatatcatcccaacagcgagatcatggtacggtacagtcgtcggtatggacttttcgccagcgtcacccagatgaaaaatggtttatcgttgttacccgtcaggacagagattggggcgaagcattcagtagcgagcaggagccttacgcactggtagtgaccgcgaccgatcgcgataatgaacaggcgcagctttatacacaaattcaggcgcagatccgtgaacaggaacgcgcgcgagcacgtattggataa

SEQ ID NO: 380525 - DNA, 1620 bp, Salmonella enterica
atgtcaacgaagcaaaaattagaacttaactggattggtaagcataagcgtcctcgtttggaaccgcgtattttgcttgaggataagacgttgtcttatggtgatgcggataatgaaaatctgctaattcatggtgataacctactggcgttgaaggcccttgagcagaagtatgcaggaaaggtaaagtgtatatttatcgaccctccttataatacaggaagcgcatttaagtattatgaagatggattagaacattcggtatggctctgtttgattagagataggctggaaatcttgcgcacattactatctgaagatggttcaatttggatcacaatagatgacaatgaagcgcattatctaaaaattgtatgcgacgaagtatttggaagaaataactttcaatgtgatattgcttgggaaaaacgttacgctccaccaccagatacaaaaggatttggttatgttcatgatcatttattgtgctacagaaagagtgaacaatttcaacgtaattacctacctatgactgaagatcaaactgggagatataaaaatcccgataatgatcctagagggccatggaaatctgaaaattatacttgtagatatactgcagatgagcggccaaacttatactacccaataatcaatcctcatacaggagaagagatatggcctagcaagacaagagtatgggctatgtctagaggtgtaacagaatctaatttgcgggaaaatcgaatttggtggggaaaaaatgggacaaattcgaaaccggccctaaaaaacttcctttcagaagtgaacaaaggaatgatgcccatgtcactttggaaacacactctcgcaggccacacacaagaagcgatgaaagaaatgttagctctttatggtgatgagccgttcacaacgcctaaaccagaaagactactacataccatacttacaatcgctactaataaaggggatcttgtcctcgactctttcgcagggtccgggactactggtgcagtcgctcacaaaatggatcgccgctggatcatggttgagctaggcgaacattgtaatacccatattgtacctcgccttaaaaaagtaattaatggagaagatctaggcggtatttctaaatctgttaactggcaaggtggtggtggattccgctacttccatttagcaccttcattactgaaaaaagataactggggtaactgggtaattaataaggaatataacgccgaaatgctggcagaagccatgtgtaagcatatgaattttacctatgcacccagccagactcagtactggaaccacggttacagcaccgaaactgactacatctacgtcaccaccggctctttggcttatgaacaacttaaagttctgagtgaagaggtgggaactgaacgcacattactgatctgctgcaaagcctttatgaccgaaggtgcagacttccctaacctgacgctggtaaaaattccgcgcgctattctaagcaaatgtgaatgggatcatgatgactatagctttacgctaaacgttctctctgattcggaacagcctgacgatattgactacgacgaaaacattgaagacgaagaatcattatga

SEQ ID NO: 380526 - DNA, 2862 bp, Salmonella enterica
atgagccagaataacgccataaaaattgccaatcggattagcgcccggctgtcactgcgtgatccgcaggatgaatcattgcgcatcttatgcgacgtgctggaacaactcgatctcagtaaagatcccgatcttaatcgctggctggcggtgctgcatcagcaatacccaacggtaaaagggtttgaacgcgcctttccttcactctgctttgcactggctactggcgtaggtaaaacgcgcttaatgggggcgatgattgcctggttatacctaaccggacgcagccgccattttttcgtattggctcctaacctgaccatctatgaaaaactcaagatggattttttacccggatcgccaaaatacgtttttcaggggattcctgaactggcgcaaacaccaccagtattaatcactggtgataactatcaggaaggacgaggcgtccgtctggactatgcagttgccgaaagcaaaacgggcgatctttttggtaatgaaactgctccacacattaatattttcaatatttctaaaattaacgcactggataatgctaaaggagccgctaaatctaaagtcgctaaaatccggcgtattcaggagtacgtgggcgagtcttatttcagctatctggcgaacctgccggatttagtcgttttgatggatgaagctcaccgttactatgccagtgctggtgcgcaggcgcttaacgatctgaatccagtgctgggtattgaattaaccgccacgccgaaaacggtaggggcaaccccgcgtgattttaaaaatattatttaccactatcctctttcgcgagccttgaaagacggatatgtcaaaatcccagcggttgctacgcgcaaagacttccgggcagcgaattactccgaagaacagctagaaaaaatcaagctggaggacggtatccaccaccatgaatatgtgaaaacggaactaactagctacgccaataatacaggcaacaagctggttaaaccttttatgttagtcgttgcacaggataccgatcacgccgacaggttaaaagcccgtattgaaagcgacgatttctttaacggcgcatacaaaggcaaagcgatcaccgttcattctaaccagacgggtgaagaatcggaagaaaccatgcagcgacttttggccgttgagcatgacaaggacactgaaatagtcattcatgttaataagttaaaagagggctgggacgttactaacctatatactattgttccattacgtgcttctgcctctgaaattcttacggagcagaccataggccgaggattgcgcctcccctacggcaaaagaagcggcgttgaggccgtcgatcgcctgacgatcatcgctcacgatcgttttcaggagattatcgatcgcgccaataatgatgattcgattatcaagaaagtgctttatattgggctggatgatgatgaaaacggtattccagaagtaaaaccacaacaaattgtcgtgccatcaatggctgaatttctattgggaaatcaagttattgataacagtggcttgcaggcttgtgagccacaagcaatatatcaaacgaactccgtatcgaaaccagtgcttactacggaaacagaacgtaaagtcgccgaactcacgtttaaagtggtgtcagaagaagctaaacggttaaccagcagtcagcaactgagtatgccagaggtgaaggctaacgtaactagacgggtacaacaagccttacgtgaatgggaagtagctcaacatcaaatttcatcatctccggatcaactcgatctggcagaaatgattgaagagcaagttgaacagccgaacttcccttccatggaagacgcaaaagttcaggagttggttgggactattaccgaaaagctggtggaatacaccatcgatattccccggatcgtggtgttgccggaacgagacgtcaattacggatttaatgatttcaatctctccggactggatcgcattgctctcaaacccggcagtaaagagcttttgctgacgcatctggagaataacgaacagcgcacaattagctggcaggaaggtggggaaacggaagaacggctagaaaactatctcattcgttatctgctcgaccacgatgaaattgactacgatgaacacgctgacacgctttataaactggccggacagatggtgagccatttgtgcagttaccagccgcaggaagatgcagaatccgtcctgaaaaatgcgggccgtcaactggcagaatttatgtgggcgcaaattaaacaaaatatgtggacaacgccaacgggctataccgggcgtgtgactcagggttttgacgtgatacacccagctacattcaattttgccggaaatgaaaagccaagagacttccgtgtcgcgattcccggaggggaaaaaaataaagttcgccaaatgattttcactggcttcacaaaatgctgttatccctatcagaaatttgattccgtagacggagagcttcgtctggcgcaaatactggagaatgatccttcagtaattcgttggatgaaacctcgccccggtcagttccgtatcgaatatgctaatggtaaaaactatgaacctgattttgttgtcgaaatggatactggttattgcctaatcgagcccaaaaaagcgacagaaatcgacactccagaagtacaggccaaaacacgagcggctatccgttggtgtgagttcgccaatcaaaatgcagatcagcttacagggaaaacgtggcgatacgcgcttatccctcatgatgaaattgagttaagccgttcaatttctgggctaatggctgattttatgctgtcaattaattga

SEQ ID NO: 380527 - DNA, 1344 bp, Salmonella enterica
atgaaaggcagactcatctcttccgatccgtatcgtcagcaattccttgttgagcgtgcggtctctttttcgcatcgtcagcgtgattgcagtgaattaatcagcgtcttaccgcgccacacgttacagcagattgacggattcggcggcagctttaccgaaggtgcgggcgtggtattcaacagcatgagcgaaaagacgaaggcgcaatttctttccctttatttttctgctcaggaacataattacactctggcgcggatgccaattcagagctgtgatttttccctgggcaattacgcgtatgtcgattccagcgctgacctgcagcagggacggctctccttttcccgcgatgaagcgcatttaataccgctgatttccggggcgttgcggttaaatccacacatgaagctgatggcttcgccgtggagtccgccggcgtttatgaaaactaataacgatatgaacggtggcggcaagctgcggcgcgaatgctacgccgactgggccgatatcattatcaactacctgctggaataccgccgccacggcattaatgtgcaggcgctctccgtgcagaatgagccggtggcggtaaaaacctgggactcctgtctgtatagcgtggaagaggagacagcctttgccgtgcagtatctgcgtccgcgcctcgcccggcagggtatggatgagatggagatctatatctgggatcacgataaagatggcctggtagactgggctgaactcgcctttgctgacgaagctaattataagggaattaacgggctggcattccactggtataccggcgatcatttttcgcaaatacagtatctggcccagtgcctgccggataaaaaactcctgttttccgaaggctgtgtgccaatggagagcgatgccggtagccagattcgccactggcatacctatctccatgacatgattggtaatttcaaatcgggttgtagcgggtttatcgactggaatctgctgttgaacagtgagggggggccgaatcatcagggtaatctgtgtgaagcgcccattcaatacgatgcgcaaaacgacgtgctgcggcgtaaccactcctggtatggtattggccacttctgccgctatgtgcgtccgggggcgagggtcatgctttcttcaagttacgataatcttctggaagaggtgggatttgtgaatcccgacggcgagcgtgtgctggtggtgtataaccgcgatgtacaggaaaggcgttgccgggtgctggatggcgataaagagatcgcgttaacgctgccgccgtcaggcgccagtacgttgctatggcggcaggagtcgatctga

SEQ ID NO: 380528 - DNA, 717 bp, Salmonella enterica
atggcagtgaaaggtaacaccgtgcgccgtgacgaatccttctttgacattaaaaccgtcaacggcgatgaactgcatactctgactacgcgcgctgattcggagtatttggtcattgatttagggagcatcagcgaacgtcatacagggtttgacgaaactcttaaagttgcgatgaatgctgcggtaaatgcggttatcgcctcaatggggattgtggtccctggcgtaagggcacggaaagcagcaggcgcaccgaaagtagtgaaatcggcgggtgaagccgtgactcaagccgataagcaggggcgagcagaacgtaatgcgcagcgtcgtgaagcgcttaatacccgcattcttgctgattctgagtggctgtcagcaaaagagctctcagagaaagcgcagttcaaaaacaccaaccccagcgccgggcctaatcgctggaagtctgccgggcggatatttgctatacagattaatggaaaagacaaatatccgggatatgctctggatgaaggctatcgtcctgtgcccgtcgttaaacagattatctccgtatttggcgagaaaaaaacgccctggggactggccatctggttcggttcggcaaatagctggctgggaggtaaaaagccaaaagatgtactgaaaacaatgccaggtcaggtgctgcaggcggcgcaggccgagctggatggaggggcgcatggatga

SEQ ID NO: 380529 - DNA, 681 bp, Salmonella enterica
atggatgatcctgatgataaggggctgattgaacgaaaagtaccggccccgaaggaaaaccttaccgctaattttgcgagctgggctgccggaaaaccgatttaccggatccattcatccagattcaccgcgacgcagtttaatccaggtctgggaagcgctcgtttcagcccaatgagcaatggcgtgccgacgctgtatggcggcgtcagcaccggcgtggtgattatggaaaccctttttcacgatctgcccgtagattctgctggcgttccttttgatttaggcaggctggaaggaaaggtgcattccgtcgttaagcctgttctggatctgaacttggtcgatttgaatcctaaaacgttacggaagatgggcgtgaagcgatcggagcttcttgattctccggcagagcagtatgtattcacgcaggaatattctgtcgctatctataacgcgcacccggatgcgcacgggttgcagtggtcatctcggcaacatggcggcacagctctgatgttatttggcgatcgggtaacgccggaacaactgacggttgaaacggagtctgagcctgttctggcgtcagagagtattctggcgttgattgaggaggaggcggatcaacttggcattgttttgatcgagccttatggtggtgatgaaccgggggaaatgtaa

SEQ ID NO: 380530 - DNA, 495 bp, Salmonella enterica
atgagtattgcaggcatacgttccaatcgtggagatggttaccagacactggtagcctttgattgggcgttgacagtactatccgaccaggattttcaatggattgaaatcgactcgataagttatctcgttgatgatgtagttattggcaaaatcgacggaaatataatcgcttgtcagtgcaaaaagaatcaaaccgatttcaaggcttggacgatagctgaccttggagatgaactagataaagcctcccttctactggctgagaacccaaaggtgaatgtccgattctattcccgaaataactttggcgaccttgcaaaacttaaagagcacagttcatctcaaccagacgaaggcagttaccaacaaagtttaggtaaggcgcagcggttgctggatgacgccttgtcaaaacaactggcaaaaattgcccccagcctttcaacttttgaattcctgagtcgaaccaatttcgtgccagcgacgatttag

SEQ ID NO: 380531 - DNA, 3690 bp, Salmonella enterica
atgcttgcattgcaggaggcattggaagaacgtgtaaaaacctgttcaaatattgtacctctctttattcaatcacgtgagtttgctgacctggctacgtcagaagagcgtcaggttcagggactatcgcaacagtgggttgagaaagctgcaaggctggctgaagacgctcatgtggtagtcgttattgattctttagatgtattgtccattgctcgtgaacatcgcgtactgcagtattttcttgcacagatcgatcgtctgctgttgatccccaatatcacagttgttaccgcctgtcgcgactttgacaaacattacgacagacggattgccgaacggcattgggattgtgaattaaagtgccagccactggactggaataatgaaattgtgccattgcttgatacgctagggattgcgacagccgctatcgatgctgatacgcgcgagctgattcgcaatccgcgtgaattggcactatttgttgaactggcccgaagagacggcagtttcaacgtagtgaccagtcaggcactggcgcaacgttatctggatactattgtgcttgctgatagcgacttaggggataatgcgatacaagcgattgaagctattgcgtcagaaatgctgaaaatgcgaagcctggtagtaccgcatcaacgctttactgcttctccagacattcagcgaaaactttgtagcctcaatgtattgcaggaaactcaggatgggaagctgacctttggtcatcaaacccttctggatgtgcttgtcataagtcgagccattcgtaatggtgtcacattgaacgaattcatacgcgatttaccacctgttccatttgttcgtcccagcatccgaagttttatcgctcagttggctctgggtgagcgccgcgagtacagaaaacaacttagaaccgtattgacgggtaatgcggccttccatatcagacgtctggtagcagaatcgtttgctgaacaaaaaccgcagaatgaagactggttattgatacgagaactgcgagaaaaaaaccgtgaagtttttcaggtagtttatgtcgcaggcggatcgattgagtggcatcgtttctggatcaataatttggttccctatttaaaagcgacccgggatgctgaaggcgtggcgatgcatgttcatcgtattgcccaatggagcaatattgatactgctggcgtggtatcattctggatagaagcgcttacgctgaactggtttgatagcaatggaattgcggatcagatagcaatgcatctctcagtcattaaggctgaaaatttatcagtagttgttccattgcttatgcgattacttgatacgccactatcggattacagccctcttggggaggtcattgctaattgcgtggctgctggtgtgataggagatacgttactttggcgttatattacggatggccttacaggtgaggatatactgcaaaatagattcgataataagctgcgttgccaaccccatgaatttgggagtaaaaatgaaaattttctccaacaacggatggtgcaatccagtgctttgctggatttagctgtagaagcaatagaatattggagttatacccaagaatcacaatatggcgcaacccgtataagttatcgttatggtttcctgggggaaacgtcatatgaaaatgttcatagtcagcgggatatacatcatgtggacagtatgaatattctttttgacgcagttgaagctggtattctttacaacgcaaaaatacactcaaactggtggcaaaaaaactgtgaacgcctttgtttccatcatgaaggcgcgttgctctattttggtatacttgcctgtacccaatcgccagaagccaatattgacctgataggccgcatgttgtgtgaccgcagtatgctggagtttgaactttcttttgaattaggtggtttgatacagtcaatattcacatttcttccttcccccaaacaagatgctgtgatggctagcattttaaatatgtggaaagatgttgccgatagtaatgatttaagggtgatgaaatcgcaagccgaagtgattgtgtcgattccttgccacctgcgttcactcgaagcgcaggcggtgttggatacctatgagaaaaaagcaggagtattgatccgtcagcctaaaattcattctcatggtggcattgttagagcgccattctcatttgagctatttcttggcatcaatgacgacggagtgttgaaattactggcgcattatgagggccattctggttgggattggaatgattttttggtcggcggtgagcgtgaggtgggctggcaattacgagaggcctcctctcgtcatccttcccgatttttgggcttattatctaatcactggacggacatacctgaaagttttcgtgatgatgtcatgagtggggtttccacatatctggcccatcgctatggcaacttgaaggctgacgaaacatggaatccgctcgaagaacctgatgcttccctcctggcaaaccggatccttgatgaactggaaagacacccaaggtactggaggcatcgacgctctacggctaaagcccttgaagcatgctcgcatgtcatacatgacccacgaaaagcagagcagcttttatttttagccatagatttcgttgggtttcaggaagaggatccaatcaagggtgactctgtcggtttacttggcttaggactcaatatggcaaaaggtgccgtagccgaagctttgatgattctcgcagataattttctagcgcaggacaacgaattccctgagctgctggcacctacattgcgccgtttcgcccgtgacaaacatccggcggttcgcgccatgatcttacgccgcttaccctatttgcaaagcaaatctttcgatttcggttgggatttattccacctcgtcatgcaggatgcagatggactttggaaaattgctgagcgatgcctttattatgcataccacagacattttgatgtcgtggagcctttattagcgcgccttcgctgtgaagggcgtggtaaagatttggaaacttggggacgcatttcggctttagcagccatgactcaacacgttgagtttaatgaatttctaaacgacttgaatgctctggacactacagaagcctggcatggcgcaaccaccgtctggacaaacgctgaaaacatgcgacagcaaagggaacagtgctttgcgggtattaaggcgggtttaaatgctgatggccgccatgccctgggagtagcgggtgagatggctcgcattttccactataaaggtgaagtcgtttttgttccgataggattgctcagtcgttgtttttcagtatttgaaaacgctggcgatggtgagaagaaacatcctcgtttcttcgggtttatcgaatggcttaatgtaatttcgctacaagacccagaatacgctttagctgcgacagaaatctacttagcctatgtagatcatagcaaacaacgcttatatgatcataatgataatctcacccaattgatgaccaggctttttgcggaagcagaagaacgtgaggagtctgatcgtggttcaatgctacaacgcgttgtggcgatacaagatacgctactttctttgggggttaaggagatagccgattggttaaaagcagcggaaaggccataa

SEQ ID NO: 380532 - DNA, 228 bp, Salmonella enterica
atgagtattggcccttaccccgctgtttctctcggttacgcccgcgagatccgcgataaagccaaaaaacgctggcgcgatccattaaccaaaaaatacctcaacctcaataaattagttgatctactcaatgcaaaagctgaacatcttatggccaaagacagctctctaagactgaaagtgataggtctcgatctgaccgcaccttatctttcaccagcacattaa

SEQ ID NO: 380533 - DNA, 162 bp, Salmonella enterica
atgcaaaaccctcggcccttaagcaatatagaaatcaaaaatgcccgcccttccgctaaaccacacgtactttatgatggtgatgggctggaactaaaaatcactccgcaaggctcaaagttgtggctgtttcgctactaccatccccactcgcacaaatga

SEQ ID NO: 380534 - DNA, 282 bp, Salmonella enterica
atgaagaaaagtttattcttgggatttataactctggcttatggaatgagtttacaggctttggcttctgatacggcaaccttaaccattaccgggagggttgttgaaccaacatgcagtactgatgttgtgaataatacggtgcagcagcgatgtggtcagactcttcatcatacagatattaacaatgttacccccactcctgcacaaggcattgttactgaaattgtcgctgttcctggggattccacacgacagatagtgttaaatcgctacgactaa

SEQ ID NO: 380535 - DNA, 216 bp, Salmonella enterica
atggttactgttgccattcattgccccgttgcctttcagatgaaatttatcgtcatggtcatagttctgcccggcatgagcgctttcgttgccggtcatgtagacgtgttttccagttgtcttatacctgtgaagcccgtacgctcggcgttaaataccatattgttgatatggccttcaatggtgctgacgtgcgcgatacagcaaaaacgctaa

SEQ ID NO: 380536 - DNA, 234 bp, Salmonella enterica; identical to SEQ ID NO: 373659

SEQ ID NO: 380537 - DNA, 462 bp, Salmonella enterica
atgatgtacaattataaaaaaacacaagcagttatactgtttagtctctatatctttttttgtcaggcatgtggaggaggaatgtataattctgataatgaaaaaaaagcaggtaaatatagtggagagtctactcattcgatttattgtttgagtgatgatgagaggtcgaaacttgaaactaaatctataaacggagacgctgaggcagcctttcggttgtataagtattattcattctctaattatgacgctgatgaacaaatgcgctacttagcaatagcagcatcccataataatattatggccgaatatgcttatggaatatttctatcatgtaaaaatggcccatattcaaaatattatgatttaaacaaggcaatttattggatgaaattggcagcagcgcatggtcatactgaggctaaaactgagttattaaggctggaagaactaaaataa

SEQ ID NO: 380538 - DNA, 1008 bp, Salmonella enterica
atgagatatttattgatgttgtttatgatttttatatcttcaaatttgcaagcgtattgttatattataaatccggaatctgctagtaatacaaaaatagaggatgtaattgaaattaaattagatagcaggaatgtttttgaaaaagaagtatcaatggtatttccagattctttctctggattccattgtatgggagggactgctgtagaaaaccgctttaagacaacgtattcaagtggtaatggggagactgtaagatataaaataaatgatggtagcggacataggttgtatgttgatgtgacattgtttgttgacggtagccaaacaggaaaacaaaaagccaatgagacttctcaagccagtaaactaaacaataacttaaaatacaaggtgttggctaaggtggtaaaagtggaggcagatgataatagtattgaagccaaatctgcaggtgaagcttttttgttaggaaattatatcaaagttaaaccattggattgtcatggtgcagttatttgtgctcatgataacaccaatcatgaatatagttttaaagtgccgataaaaatattttttactaagacaacatgttctttgtctaataatgagattacgttgcctcctatttcattaagtgatctgttggctggtaatgctcaggtcgaatactttcctgatgcactgaaatttacatgtgatggagggctgggaatgacgacaagtattgtaaattatcatttttctgccgtttcagcaaccaatggagattatttggcaaatgaattaacaagcgccgatagtgcaaaaaatgttgggtttaaaattttccttaatgataaccttattcatgtaaactctgatgagaaaaggcaactgttagggtataataaagaaatgactgaagcttcagaactgaagctgggtgtacaatactataaatatggtaacgtccaaccgggcaatgtaaaaagtagtgtttatattattacaagttatcagtaa

SEQ ID NO: 380539 - DNA, 240 bp, Salmonella enterica
atgaaaaacagtaatcagatagatgctatgaaaaatgaatatgtcgcgaaacgatttattcgtgttcctgatgttttaaatcgagtgggattcagtcgcactaccttatatgagcgtattaaggaaggcaactttccagacagggtaaaaataggtccacggtgcgtcgcttttgtcgaaagtgagatagatgaatggattgaagctactattcggaactcacgccagaacgctgcataa

SEQ ID NO: 380540 - DNA, 846 bp, Salmonella enterica
atgaaaagaagtgaaatcaggaaagcactggaagcatggtttgatgttgagcgctatgaggcgatagagaagctaagccttcaacagttttatgtggagattgagcggcgtatcttggcctacaggatgttgttgagccggaataccataccgaccctgaacagacttttgctggatgactaccgctataaaattttgcgaggcgaaatctttttcagtggtgatgccgctacccttggacatgagcttgccagaacctacgcggtaaaccctacgacacgaagccatgcgcaattttatgcgaaaacgctgacattaactgaagccactcctgagatttccgcgttaagcgaatccgaatttctgtccgagtatctaaaacaaacatcgctgaaaaacctttcacgtatcactgtcgatattcatctggaagaggcatcaaccgaagaaatcattgaacatctgaaagtgctgatcccgcaatggaagagacagctaaagatgaaagctcctgcggaacgggagtatcgttttggcaaaagcacgttcagaaaaattattgaataccgtcttattccaatgatggacctgattttctggggtgaggacaatggcgtcaaaatcccgctttcgctgatttcttcgctgcttcacgaagacagcgacaacgatcgtgatgaaggaatgctaaaggcaacggactacccgctggcaatggcttttctgactgatgaaaactatctaaaatcgcttgaagattacatcatgcaaaacaatcacttaaaagacttaccggttgataagcatgttgaggatgataagaagaagaaaaaagccgccaagtaa

SEQ ID NO: 380541 - DNA, 210 bp, Salmonella enterica
atggcattaaccgataccgctatccgcaagatcaaacccaccgagaaatccttcaagatcaccgacagttcaggacccaacctgctgctcaaacccaacggctcaaaactctggtacatgaagtaccgcgttgatggcaaagagaagaagctagccttcgttactatctggcgcaggggtttagcaggaaagaggcgctggcgatggtag

SEQ ID NO: 380542 - DNA, 342 bp, Salmonella enterica
atgatgactgagacatgctcacagactggtatcaacctagaggaaaccgattttggttatactctttccttaattagcgggaaatataaaatgatagttatgtactggttaaatgaaaataaaccagtcatgcgatacaacgagcttaaacgccgcatcggtacgatttctttcaaaactctgagtaatactctgaaagaactcgaacaagatggaataatcaatagggtggagtatcctcaaataccgcccaaagttgaatacagtctttcaaaacgaggggaatcattaatgccaattctggatttaatgtgtgattggggtgggaaaaaccgcaactaa

SEQ ID NO: 380543 - DNA, 558 bp, Salmonella enterica
atgaaaaaaacgcttatagttgtcgctcatccaaatattgaaaactcagttgttaatcagtgttggataaatgagttaaaaaagtatcctgatcagtttactgtccatgagctttataaagcatattctgacggcaggatcaatatcgagactgagcaaagactggttgagcaacatgagtcgctggttttgcagttcccagtttactggttcaactgccctcccatgttgaaacaatggctggatgaagtgtttctttatggatgggcatacggctctacaggcgataagctgaagaataaaaaaatagctttggctgtaactgccggtattgaacttgcagactatatggcgaatggccgttataaatttaccatgcaagaagtacttcgcccatttgaaatgacgattaaatatgttggtgctgaatatgttccacactttgccttttatggtgcagaatataacccttccaaagaagtgattaaagaaaacgcagtagactatgttaagtacttaactaaattaacttacagtgagttagtaaaaaataattaa

SEQ ID NO: 380544 - DNA, 1455 bp, Salmonella enterica
atggaaaataaaggcacaaacctgacgcccgagcaggcgctggatcgcctggaggagctgtacgagcagtcggttaacgcgctccgtgaagccatcgctgactatgttgataacggcacgctgcccgatccccatgccaggcttaacggactgtttgtttatccttcgctgtctgtaagctgggatggcgcgacaccgaacccgcctaaaacacgcgcttttggacgctttactcatcccggctgttataccactaccgttacgcggcctgcgctatttcgcgcttatcttctggaacagcttaacctcgtttaccatgattatggcgcgcatattgcggtagaggcctcgcaccatgagatcccgtatccttatgtgatcgatggctcggctctgacgctggatcgttctatgagcgccgggctaacgcgccattttcctaccacagaactggcgcagattggcgatgagacggcagacggtctgttccaccccggcgaattctatccgttatcgcacttcgacgcgcgtcgtgttgacttctcgttggcccggttacggcactataccggtacgccggttgaacattttcagcccttcgttttgtttaccaactacacccgctatgtcgatgagtttgtgcgctggggatgcagccaaattcttgatcctgacagtccctatatcgcgctttcctgtgccggcggaatttggatcacggcagaaacggaagcgccggaagaggctatttccgatctggcctggaagaagcatcagatgcctgcctggcacctggtaacggcagatgggcaggggattacgctggtaaatatcggtgtcggcccttcaaatgctaaaacgatttgcgaccatttggccgtgctgcggcctgacgtctggcttatgattgggcactgtggagggttacgagaaagtcaggcgattggtgattatgtgctggcccatgcctacttacgcgatgatcatgtgctggatgctgttctgccgcctgatattccgattccaagcattgcggaagtacagcgtgcgctgtacgacgctaccaaagcggttagcggaatgcccggcgaagaggtgaaacagcgactgcgcacgggaacggtcgtcaccacggatgaccgtaactgggagcttcgttattccgcatctgcgctgcgattcaaccttagccgtgcggtcgcgattgatatggagagcgcgacgattgcagcccagggctatcgctttcgtgtgccttacggcacgttgctttgtgtttctgacaaacctttacacggtgaaattaaactgcccgggcaggcaaatcggttttatgagggggctatttcagaacatttgcaaattggcattcgtgctattgatttactacgcgcagaaggtgatcgtttgcactcacgtaaattacgcacgtttaacgagccgccgtttcgctaa

SEQ ID NO: 380545 - DNA, 708 bp, Salmonella enterica
atggcacaaagacctgtttacattcccactggtgaaaagcaactctatgttaaaactgagtcagttgactttacttggttcgcagggatgtcagtgaaacagaagcaaagatccgtagactccttacacgaagcagctaagagcatattgccaaatcctggcaagattctcgaaatttcaagtaaatcacatgatgatcttggcattgcattaagtgcttttaatctttcgttcaccactttaaaacatcagagaacgttgactattgaatgtgcattccaaggaagtaaagtcttccagagaggcgggccttatactgacatatttgagatgacatcgcgcgaggccaagaaggacaaacgcctcttaacctcgggaagactcactgggttcaaattttttggcatagaatgggaattggaaccactaacagctttttacgactggctttacattagcgctctcagaaaacgaactgaactggcagagcagattgttgaatacaatgcttttacagatatcgaatttaatcctgaacgttcaataaattgccaagcttactctgctgcgctgtatgtatcattgttcaggttaggtattctcgacgaagctatatcctcaaaggaaagtttcttggaaacgattaatcgcgcatctgtatgtaataccagacaaaatgaagccactcaatctggttttaaattctga

SEQ ID NO: 380546 - DNA, 630 bp, Salmonella enterica
atgcatcgtgaacaaatacgtctaaaagcagaaacactacaaattccttttttggtccattttactcgagttgttaatttacccagtattatggaacatggcattgtacctgttactggtgcaggtgatcgaaacatagctccagagattaatgatgaattaagacttgatgggcatagggacagcacctctctttcgattgcatttcctaattatcgaatgttctatcgatatagaatggacaatcctggtgttgagtgggttgttttgggcattcatccatctatcctttggcgcaatgattgtgcttattgttgtcataatgcagcagacgcacggatcagtgtccaatcattagctcaactaaaaactcttgaagcatttgaaggcatgtttgcggaaattgacggtttggagtctcggcaggaacagagattgagtaattttgaccctacagatgggcaagcagaagtgctatcctttggtattatagaaccacagttcatttttgctgttatttttaacaatgaattaacaaaaaattcatatcaacacgttctcggcaatagacaaatattagttaatcgttctggctcaggatacttcgcatcccgctcatatgtaaggtag

SEQ ID NO: 380547 - DNA, 882 bp, Salmonella enterica
atgggtaagttaggtgatgaaatgaaggttctggcgaaacactgcggcggcagccataaaacggtgaacgatcgcattcatatcgtgcaacgttttgatcagcatttacgggcgctgaacgtccagatccagcgggtgtcgcagattaaggttcgccacattgaaaactacattcatgaaaggctgtcgcaggggatcagtaaacgcacgttgcaaaatgaaatggcttcgttgcgtgctgtgttacaacaggccgggcgtaagcaagtggcagagcatgagagactgaccaataaatccctggggctttctggcgcatcctgcaacggtacgcggcaggccatcacaccggatcattaccgccatgtgctggaaacggcccgcgcgaaagatccgggactggcggcagcgctggagctgacgcggttgatgggattacgttctcaggaggcagtacaaagcgcacaatcactgaaaacgtggaaacaggccgttgaacgtggtgacacacgtttaaccgtaatttttggcaccaagggaggacggcctcgtgagacggtgattctggatcccgatgcagtcaaaaaagcgctggataatgcgttagctgttgcagaaagccgtaatgatcggttgatcgacaagccggatcttaaaagcgcgatggattactggcacaaccaggcagcgcgtattggtctgactggcgtatattccccgcattccctgcgttatgcgtgggcgcaggataccatccgtaactatctggcgcaggggttaagtaggaaagaagcgctggcaatggtggcgatggatctggggcatggagatgggcgtgggcggtatgtggcacaggtgtatgggcatataaaagaacaataa

SEQ ID NO: 380548 - DNA, 684 bp, Salmonella enterica
atggttgccattttaccggcagggcctctgcaaaaatgccgggccgcagatactgcggcagaggttgagagttatacacgctacatcctttcactgcgccagttcgctggctatgtttccatccgcccggaagtctcacgatttcccggtttatctgtacctgctgattatcagcgctttttatctgcgccagatctctggtcaatgctgtactgcgccggaaacgatccggtaacccctacacccgctgccacatcagctcctttgactttacgggctgcggcctgcaaagacgttcggctttgctgccgcgtgaccgtaaacctgcaccagaacctgcaatctttcgcgcactgcacccgaccagtgcgtcactttcgtcgcgcaaagcgacaaagtgacacacaaccaccacaccgcgctatgcccctgttttcggggttccagcgctcattcccgaatctgacacgcctttttagggccgctgtcagcaagaaaaaggagaaaaagatcgataccgaggggggcatgacgccccggagaattcctgctcacacaggcagcctgtaccgcgtacagtctgaaactccctatacctcaacaagctgccactccggcgtgaaggtatcgttctggcgcagcctaaaagcatacgccggagactgtttgtgttttcaaaattaa

SEQ ID NO: 380549 - DNA, 222 bp, Salmonella enterica
atgatgctacaagactggcatcccgccgacatcatcgcggcgctgaaaaagcggggaacgtcgctttctgcactttcccgtcaggcggggctggcatcctccacgctggcgaatgcactgataaggcactggcccaaaggtgagagactgatagctgaaaagttaggcgttgcgcccgaacaaatctggccgtcacgttaccgtaagccggaataccgttga

SEQ ID NO: 380550 - DNA, 462 bp, Salmonella enterica
atggcgactaccccaaaccagatgcacccgttacttgctgtttccttcaatgccgctacagactttaccgtactggctaatcattgtgaaaatttcgccgaacccctgattgaaaacaacgatcctacgttgaaaatggcgctttgtggcaggatcaacgcctgtctgacattattgcaacccacgctgcttgatccggttcctcctcatcttgttgaaagtctgaccgtcgatacacttcctaccagctatccccgcttcgggccggaatgcaccgagatttgtaactactgccttgccctgacccaaacgctggcaggacagggattttcctctgaaacggaaaaatatcttagctggctgctgtacgacctgatcaattacttcgctgcggaaatgaaagcaccgcgctggttgcgtactgccgacggcgtgaagtttatcgacgaggtggccgcatga

SEQ ID NO: 380551 - DNA, 1245 bp, Salmonella enterica
atggcattaaccgataccgctatccgcaagatcaaacccaccgataaatccttcaagattaccgacagttcaggactgtacctgctgatcaaacccaacggctcgaaactctggtatatgaagtaccgcattgacgggaaagaaaagaagctggcctttggcccctacccggatgtttccctgttcaaagcgcgtcagctacgtgatgccgcacgcgccagagtgcgtgaaggggcagatcctgccgctgataagaagattgctcggcagaaaaagaaaaacggacataccttccgccagatcgccatgaactggcacgccgatcaccgacgctggtctgcgcattatgccgcgaccatccagcgcaggctggaaatgtatgttttcccggatatcggagacaaattaatcgatcagatcgtcacggaagatttactgtttaccttgcgtaaggtcgagagcaaaggctttctggagatcaccgcgcgactgaaaaactacgtgacggagatcatgcgctatgaggtgaaaaagcagctaatcaaatcaaacccggcgctggatctggacggtgaatttacgccgccggaaacgcagcattacccggccctgccgcttgagaaactgcctgaactgttatcgcggacggatagctactccggcaggctgttgacaaggtatgcgcttaagctgtcgttgctgtttttcgtgcgctccagcgaactgcgctttgcccgctggagtgaaatcgactggcaacagaagctatggataatcccggaagagcgcgagcagatcgacaacgtgcgcttctctcatcgcggcacgaaaatgaaaacacagcacatcgttccactgtccgatcaggctattgcgatcttaaagcaaattgaagcgctctctggtcatctggcgtttatcttccccggcgaatacgatcaggataagtgcatgagcgacaataccattaacaaggcattgcgcgtgatgggctacgacactaaaaaagagatctgcggtcacggcttccgggcgatggcgtgcagcgcgctgagtgagtcggggttatggagcaaagacgccattgaaaaacaaatgagccatcaggaaagaaacagcgtgcgggctgaatatctggaagagcggatcgcgatgatgcagtggtgggcggattatctggatgcgaatctcaacgggtatatttcaccgtatcagtttgccagtcggctgaaaaaagcatcgtaa

SEQ ID NO: 380552 - DNA, 1371 bp, Salmonella enterica
atggaaagcaataataagctaaagcgtgggctgagcacccggcacattcgctttatggcattaggttcggcaatcggcaccggcctgttttacggctcggcggacgccatcaaaatggcggggccgagcgtgctgttggcctatattattggcggggtcgcggcatatatcattatgcgcgcattgggggaaatgtccgttcacaaccctgccgccagctcattttcgcgctatgcgcaggaaaacctcggcccgcttgcgggctatattaccggctggacctactgttttgagatcctgatcgtcgccattgccgacgtgaccgcgttcggcatttacatgggagtctggttccccgccgtgccgcactggatttgggtacttagcgtggtgctgatcatttgcgccatcaacctgatgagcgtcaaggtgttcggcgagctggagttttggttctccttcttcaaagtcgccaccattattatcatgattgtcgcgggtatcggcatcattgtgtggggaattggcaacggcgggcagccgaccggcattcataacctgtggagcaacggcggcttcttcagcaatggctggctgggaatgatcatgtcgctgcaaatggtgatgttcgcttacggcgggattgagattatcggtatcaccgccggggaagcgaaagacccggagaaatccattccgcgcgccattaactcagtaccgatgcgtatcctggtattttatgtcggtacgctgttcgtcattatgtctatctatccgtggaatcaggtcggcacaaacggcagcccatttgtgctgacgttccagcatatggggattacctttgccgccagcattctgaactttgtggtattgaccgcctcgctttccgctatcaactccgatgtgtttggcgtaggccgtatgctgcatggtatggcggagcaggggagcgcgccgaaagtctttgccaaaacgtcacgccgtggtattccgtgggtcactgtactggtgatgacgattgcgctgctgtttgcggtttacctgaactacatcatgccggaaaacgtcttcctggtgattgcttcgctggcgacgtttgcgacggtatgggtatggattatgatcctgctgtcgcaaatcgccttccgtcgtcgtttaccgccggaagaggtaaaagcgctgaaatttaaggtgccgggcggtgtcgtaacgacgatagcgggtctgattttcctggtgttcattattgcgcttatcggctaccatccggatacccgcatctcactgtatgtgggcttcgcctggatagttctgctgttgattggctggacatttaaacgccgtcgcgaccgtcaattggcgcaggcgtag

SEQ ID NO: 380553 - DNA, 483 bp, Salmonella enterica
gtgacggatgataaagtcatagaaatatataaaacatgcgttgagatggctgatagaataagtgatcgaagacttaagtcaaatacatttttattagccctaaactcatctattttaccgcttgttggctatttttcgttaaagccagcaatacagcctatttgggtaatattaatctctctagctggaatcgtaattaatgtttattggataaacctaattacctcctataaaagaattaatactgctaagtttacagtaattcaggagatggaggtcaagataggtataactccttttaaaagagaagaggaagtcattacaaaagaaagacatcgccatttaagtgatattgaaaaaatgttacctattactcttattgccattcattttttaattatcatcatgatgacattcttttacaccccaaaggtacaagaaaacagcacaaccattataaatataataagttcccatttataa

SEQ ID NO: 380554 - DNA, 933 bp, Salmonella enterica
atggacataattaaaaagatcgcagatgaaaccctaatgccagtatcaaaagtatctgcttttatatttacagccccatatagatataaagtatatcccatcccaaaaaggaatggtgggtttagagagattgctcaaccgtcaagggcattaaagtttatgcaaaggattgttattgctgaactagagaaagtgcttaaggttcatgaaaacgcatatgcttatgtcaaagggcgtagtataaaagataatgtagaaaaacatcaaagaaactcttatattttaaaagttgatttctgtgacttttttaatagcataagcccttgcgatcttgagttgtgtttaaaaaacaatgggttagattcattgttaagttcaaaagaattattgaataaactttttttctataagaaaagtaaaagaagtgctttatcaatgagcatcggggcacctagttctccatttttgtcaaatgcgatcatgtataactttgattcagtcattagtgatatgtgttcaaataaaaatattacttatacaagatatgctgatgatcttacattttctactaatgaaaaaggtattttgtatgagttcatacatgaaatagataaagtccttgaggggatagatagtcctaaattaaagctaaatgataagaaaaccatatttgcatctaaaaaatgcaatcgccatataacaggaattgttattaataacgaaggggaactttcaattggtagagataaaaaacgctacttaagtagtttagttcataaattctcgcttaatgcacttaatgaggaagaaattgaacatttaaaagggtatttggcgtatgtaaataaaattgaaccttcattcattagcggaatgaaaaggaaatatggagtcgaagttgtcaactccataattacatttaatccattataa

SEQ ID NO: 380555 - DNA, 297 bp, Salmonella enterica
atgaagatacgatggcagcccgatttacccgctggggtgagtagcttcaaaaactggttcgtaatgaggaacataaacagcctgttgatctcccgctcatgctttatcttggcacggcaagattatggtatcaggagcgctacgaatcacagagggcaggtctttgaagacgatatgttcaccatccgctactttcagaagggcagcggacatatcacatttaagcgtctggatctggtggagaagatgaatgatatcgtggcgaagcattatccgggggcgctgcccgcaaaataa

SEQ ID NO: 380556 - DNA, 1059 bp, Salmonella enterica
atgaagaataaaatgaagtggacaaagataaaccattatttacatccgaaaatttgttcggcctgcgcaatcttgctgatggctggcgctacactgccacaagtcgccgatgcggagactacctacgaccggaccagcaccgtcgacctgaattacgacaggagtaatgtactaggctttgaacgcatgtttgagcagcatataaatacgaattatctaggatgggtatgtagatccaatagtaatgaaaacgagggggcgtgtgacgatacaaatctgatatgggataaacggggggtaacaaagattcgtctgcgtttcagagaacaaatcagtcatgctgaaactacgctcatactggacgctcgtgctggaggagcatgtggatattttactattaatggagcctgtacttgtgtatatccatataactacgtaacggccggtatttccgccgaagagctagcgaaaataccgaaagccggtatatggaaagcaacgttggtcttggatgtacatagatggctagacggaaaagttggtgtcgggactgtagatatcacgctgaatgtaacagaccactttgctgaaaatgcggctatttactttccgcagtttggtacagcaacgcctcgtgttgacctgaatcttcaccggctgaatgcctcacaaatgtcgggcagggctaacctggatatgtgtctgtatgacggaggtatgaaagcccgttcattacagatgaagatagaaggaagcaataagtcaggtacgggatttcaggttataaagagcgattctgctgatacgattgattatgcggtcagtatgaattatgggggacgaaatattcctgtcacccgtggcgtggagttcagtctggataacgtggataaagcagcaacgcgtccggtggtacttcccgggcaacggcaggcggtacgttgtgtgccagtgccccttaccctgacaacacaaccctttaacatcagagagaagcgttctggtgagtatcagggaacgctgacagtgacaatgctgatgggaacacaaaccccctga

SEQ ID NO: 380557 - DNA, 252 bp, Salmonella enterica
atgcgggatacttacaaaacccacatgaccacctattactcgcgcatccccagcctgcaccttaagggcgactggctggcagaagcgggatttgataccggggcgagcgtgaccgtgaagatctccgaagggtgtttgactctgattgtggagacagacgaagtgagggatctacggagggagctttatcaggtgaaaaagtcgatgaagcacattaaggcgggggtatatgatgtggtgaacgggaattaa

SEQ ID NO: 380558 - DNA, 465 bp, Salmonella enterica
atgatgaaagataatactgtgattaatttagtttcagatataattccagggaaatctattggtggtatttcgcttggcgataatgttgttgatattattgaatgtattggagatgaatttactatagatgttttttcttttgagaactttggtgttaagtatttttgttataaaataaacaatggggctatttcttttacctgcaatgaatctggtagtattatttctttatggtgtgagcctccttacctaggaagttttaataaaagactgtaccctggtataactgttggggagctaaagaagatatctaaaaaacaatccataataaaaggctatttagttatagacaataataaattgatttattatggaatgccagatgatatagatgattttaaccatttttctgatctggatgatgatgttatttttaatgaattatatgtaggtaatctggaataa

SEQ ID NO: 380559 - DNA, 609 bp, Salmonella enterica
atgaataggacaataaagaaaaatatagaaaatataaaaataattactgatgaaataaaacgatgtgctattgaggaagatgaaggtaagatattaaaattggtttccacttttgaaaagtttcctcgtaaagaagttagttctttttataacgttttttttagggatttaaatctttgtgaaaaattgattagcatggcgaagtattatataaataatgataaaatacttatagaaataatatcttcgctaggaaatatggtcgttcgatatggtttacctccatcagacgatttgtatgaacttttttttagtttgaggaatagaaagaaagttaactattatatttcactgtttattctccatttcccacaatcggagtcatgtgattttagatgggattatattttatctatccctgatattgcaccaaaagagaaatcaaagaaaaacttttactcaatcattaaaaatatcaatgcgtcaggagagaaaatcccctttgaatataaagccagaatagtttatctattgggggtgtttagtgataataatatgtatggtgaagagttcatgatgttaagagcgcaacttcaatccgtagattga

SEQ ID NO: 380560 - DNA, 180 bp, Salmonella enterica
atgtcttgtccaaaatgcggttctggaaatattgcaaaagaaaaaacaatgcgtggatggtctggagattatgtgtgctgcgattgcggatacaacgactctaaagacgcatttggagagcgtggtaaaaacgagtttgtcagaattaataaggaacgcaaaggcaacgaaaaaagctaa

SEQ ID NO: 380561 - DNA, 486 bp, Salmonella enterica
gtgagcgaaattaattaccaggcactgcgtgaggtggcggaacgtgcaattccagcaatggaacgcctgttaatgttgccagctgatgatgacttgttaagtgaacaggaacttaaagattacggtgtggatattgatgcgctcaacgccttcaaatttctgaccggaccagaaaccgtgctggcactgctggatgaacgggaaagaaaccggcaatacatcaaaagccgcgatcaggagaacgaggatattgcgctaacggtagggaagctgcgcgttgagcttgaggcagaaaaacagcgggcaaaggatctgtttatggaaaatgctcggcttaagtcaggtatagccggtctgatacacctcggtattcgatatgcagatgttgaggtcatgagaattgctggagatgcccagctttctaccccatgcactgacagcatcataaacagcattgcaacaggcattcgcatcaaaggagagtga

SEQ ID NO: 380562 - DNA, 627 bp, Salmonella enterica
atgaaacaaatgtcactaattgagatggatggttttctgaaaggtaaatgcatcccacgagatttaaaggttaacgaaacaaacgctgaataccttgtccgtaagttcggtgaacttgaatcaaaactggaaacggcgttgcgggagtgtcgttctgctggaatcacgattgataaccttgaggccaagtgcactgcgctggcagcggagaatgcggggatgaagtcggtcattgaatactgcattaatcccgacaatcagcctgaataccatgaccagggcatgggatgtggagttgaagaccacggctaccagcgcgacggctattcggcttgttactacggatgggagtcggcaatggaacgcgtctactcagaggttattccagacgccattccagaaaccccagccaccgatgctttcctggctgaagtccgggcgcagggggtggatgctgctatagaagctgcaaaaaatctggtggcccaagaatatgagtataaggatttcaaagcggcgcagagtgattgctgtatgtaccctggttcagacctggtagggaaggttgaaatgactgagtggttagttgactttgctgcccagcttcgcaaaggaggcaaccagtga

SEQ ID NO: 380563 - DNA, 618 bp, Salmonella enterica
atgagcaaagagttttacgcaagacttgctgaaattcaggagcatctgaatgcgccaaagaatcagtacaactcgtttggtaaatacaaataccgcagttgtgaggacattcttgagggtgttaagccactactgaaaggtctgttcctgtctatcagtgatgaaatcgtgctgattggcgaccgttattacgtcaaggccacagcgaccattacagatggtgaaaatagccattcagcaagcgctatagcgcgagaagaagaaaacaagaagggaatggatgcagctcaggtaacgggcgctacaagctcttacgctcgcaaatattgccttaacggtttgtttggtatcgacgacgccaaagacgctgatactgaggagcacaaacagcagcagaatgcagcacctgctaagcaaactaaatcatcgccttcctcccctgctcctgaacaggttcttaaggcattcagtgaatatgcagcaacagaaacggacaagaaaaagctaattgagagataccagcacgactggcaattattgactggtcacgatgatgagcagacaaaatgcgttcaggtaatgaatatcagaataaatgagcttaaacaggtggcttaa

SEQ ID NO: 380564 - DNA, 189 bp, Salmonella enterica
atgactattgtgcctgttaacggaaccatccttgtgcagcaaggcaatcgtgagtttaacaagctctacgaagcatccttcccggatacgaaggaaggtaacagcgccgcatacgcatgggcatcatcaatcgcaatgggctgggaagattgtcaggacgaagactggaatcgaaatcatgcagcatga

SEQ ID NO: 380565 - DNA, 159 bp, Salmonella enterica
atgattatcgcaatcgcgggaagcgctcgcatgggcgtttcccagttacacgaatcacttttagatcgcatcacccgcaaattacgcgctggctggaaacggctggcagacatccttaatcagcctggagtgccgagccatgactattgtgcctgttaa

SEQ ID NO: 380566 - DNA, 237 bp, Salmonella enterica
atgaaagacataccgcattgggatgttgatgaagattacattgtcgatgttactgaaggtcacattctgttttcagccgagaacgccaataagcaggaaataaaattggcaagtgcagctcctgagcttctcgaggctctgttaagcattatcgatatggaacatgacgtgagcgagtgggacgctgtgtacgcgacggctcgcgcagccatcggcaaggctctggggaaggagtga

SEQ ID NO: 380567 - DNA, 654 bp, Salmonella enterica
atgaaatggtatgaactggctagatccagaatgaaagagctcggcataactcaagagaagttagctgaagagcttggtatgacgcagggtggaattggtcactggttgcgcggatctcgtcatccatctcttgacgagattggtgtggtgtttaaataccttggtattgataacgtctcattcaaccacgacggtacattttcacctgctggcgaatactcatctgcccccgttaaaaaacaatatgagtaccctgttttttctcatgttcaggccgggacgttctcgcctgagcttagaacctttaccaaaggtgatgcggagagatgggtcagcacaaccaaaaaagccagtgattgtgcgttttggcttgaagttgaaggtaattccatgaccgcaccaacaggatccaagccaagctttcctgacggaatgttaattctcgttgaccctgagcaggctgttgagccaggagatttctgcatagccagacttggcggtgacgagtttaccttcaagaaactgatcagggatagcggtcaggtgttcctacaaccactaaacccgcaatatccaatgatcccatgcaatgatagctgttccgtagtagggaaagttatcgccagccagtggcctgaagagacatttagttaa

SEQ ID NO: 380568 - DNA, 216 bp, Salmonella enterica
atgagcaacctacgaaaatatcgagagtcactgaatatctctcaaacaacacttgctaaggcggttggatgcacacagggagctatcggacattgggaatctggtcgtcgcttcccagaccttaaaacatgccgtgctcttgttgcgtgcctaaacaagttaggcgcaaaagtcagtcttgatgacgtgttcccgccggaacacaaagccgcttaa

SEQ ID NO: 380569 - DNA, 297 bp, Salmonella enterica
atggaacaaacaagttacagcaaactatcacagcgcgatgttgatcgcgcagaaaccgatttactgatcaacctgtcaacacttacccagcgcggtctggcaaagatgattggctgtcatgaatcgaagataagcagaacggactggagatttattgcctcggtcttgtgtgctttcggaatggcatcagatatcagtccgattagcagggcttttaagtatgcgcttgatggactcaccaataaaaaacgcccggcggcaaccgagcgttctgatcaaatacaaatggaattttaa

SEQ ID NO: 380570 - DNA, 273 bp, Salmonella enterica
atgcgaaacaaaggctttaatccacctgatacacacaaagaagctaagcgtttgcgcttccttcgttccattgatgaaagaactcaaatctcttttgtgaaagttgccagaactgagcttctgaaggctgaggcgagggcgttgctcccgtccctaccaaaagaggagggatatacgttcattccaaacgcatttctggaaaagctgctcaaagaagacatatccgtaagtcagtttaacgatgttcttaaggtctttcgtcaaggcaggtag

SEQ ID NO: 380571 - DNA, 186 bp, Salmonella enterica
atgctaatgcgactatcgaaagtctccgcgctgatgtttctgctggtcgtaagcgcctgcaagtctccgccacctgtccaaagtcaacgaccggagccagcggcatgggcgatggagaaagcccaagacttacagcagatgctgaactcaattattaccgtctccgaagtggaatcgacaagataa

SEQ ID NO: 380572 - DNA, 180 bp, Salmonella enterica
gtgagttgcgtaatcaatttgggtaaggagaagaaattcccaattactcaagagctatacgagcggctggaaagcgtcattcattattacgatggtgaaatcagtttatgtgaggcagttggcacactcgaattgctgaagcagttattgattgaaggcgcgaaagagcaatcaacctga

SEQ ID NO: 380573 - DNA, 702 bp, Salmonella enterica
atggcagacccgtcacttaataatcctgtcgttattcaggccacccgtctcgacgcttcaattcttccccgtaacgtctttagcaagtcttatctgctctatgtaatcgcgcagggaactgacgttggtgctattgcaggaaaggcaaacgaagctggacagggtgcttatgacgcacaggtaaaaaatgatgagcaggatgtagagcttgcagaccatgaagcaagaattaagcaactgcgcatcgatgtagatgatcacgaaagtcgcattactgcgaacactaaggcaattactgcgctgaatgtcagggtaactaccgctgaaggagaaattgcctccttgcagactaatgttagtgctcttgatggcagggttacgactgccgagaacaatatttcggcattgcaggctgactacgtatctaaaaccgccactacatctcaatcgctggcttcacccctcaacgtgacaacgtcatattcagtcggcggaaagaaggttgtcggcgctcgccagactggatggaccgcggcaacaggtacggcgaataaaggcgtattcgatgctgacctgacattcgccgttagcgatacttacacgcaatctgaaatccaggctatagccaatgctctaattactgagcgtcggcgcactaaggctttggaagacgccttgcgtgcacatgggttgattgattaa

SEQ ID NO: 380574 - DNA, 1830 bp, Salmonella enterica
atgaaagttaccgctaatggcaagacattcaacttccctgatggaaccagcacagaagacatcggcgctgcagttgatgagtattttgcagggcaggcatcagcagcagaaacacaaccagcagaacagcaggaagaaccacagcagcctgaacaatccctgatgcaacgggctggtgacttactcactggcggccagtcagcaggccagattgcagagcaggctgggcgtgggctcgtaaatatcccgtttgatgtattgcagggcggcgcgagtctcattaacgcaatcagccaagggttaggcggcccgaaagtgctggatgacgtgtatcgcccggtagatcgcccgactgacccatatgcgcaggcaggagaatccattggcgggtatctaattccaggcgctggcgtcgctggcaacatggcgatcggctcagtggctgaggcagccaatcagcagggagattttgctggcaacgttgcgaagaatgccgcggtaaacctcggcgctcaggggctactttctggcgcagctaaattagtcgggcgtggcattactgcagcaagaggtgagattgcaccagaggccagacaactgattgataccgctgagagtatgggtgttaagcccatgacgtcagatatgatcaagcctggcaatgcctttactcgcagcttaatgcaaggtggtgaaggtgcgttgcttggaacgggaggaaaaagagcagaacagtacgctatccgcagcaaacttctaggcgactatttcgaccgagtgggaggatacaatcctgatgatatcgttaagtcaatgaccagtacagtaggagggcgtaaaaatgcggcaggagcagtaagagatgaaatagtaaatagaatgggaagcgctccagtgggaaccaccaattcaattaatgcaattgatacaaatattgcaagacttgagaagctcggcacatcagcggaccagaggcttttgacagcgcttaaaaatctaaagggggaattgaatagcgggaatgttgattttgatctcctgcaacagcatcgcactgcattccgcaccaatgttcagggtgatgcgatggtattcccaaatcaggccaaggctgcaactaacatggttgaaaatgcaatgactcgtgatttgcgcaatgctgtcggtaaatcactagggccacaagatgcagcaaaatatctcaaatccaactcagacttcgcaaacatttacaataaggttctgaataagcgcatctctaatacgctaaataaagccagaagcgaatacacacccgagcttattaacaccgttgttttcagtcgcaaaccgtcagatataaagcgcatatggagctccctggataacaaaggaaaggacgcaatgcgagctgcatacatcagcaagattgctgaaaaaactggtgattctccagctaagttcataaccgaagtaaacaaattaaaagcgcaatccggaggtgagatttacaacaccattttcagcggacgacacatgaaggaacttgatgcgcttcatgatgtgctgagacaaacagctaggtctgattcggcaaatgttgtcacacagacggggcaggcgctggcaaatccggtaaggcttggcgctgcaattcctactttaggtaagtcactcgcagcagaggccggctatggcttggcaatgagggtgtatgagagcaagccaataagaaatatgctactcaggctggctaacaccaagccgggcacacctgcatatgagcgtgcgctgaatcaggccgctactgcagtgcgccctcttttagctaacgaagctacccggcagtag

SEQ ID NO: 380575 - DNA, 495 bp, Salmonella enterica
gtgtctgattctatgagttatgctgtgctagttgccgcaactctatttctggggataggattgcagattgcgtggttgtttttttctaattttattaaacgtaaaagacttgaatcaaggatatctgaggtttctattgcaatagggaaaaatgctaaaaatccagagaatgaggcctacgtactcaattaccttaaagaaaagttttcccctgaaagatttgaaaacagaattactgatgcccttggattgataatatcagtaattcatataccactaagtttgctgataacagtgtggtactttgccatgatcgcaggaagaatatttggtttcatgaatatagagcctgttgttctttgggttccaatgatactgcaattgttgttaagcattgctatctttattttttctgtttttataaaaattgtctttggaagataccccggagaagcgaatggatttaataaagaattcataaaaactataaaataa

SEQ ID NO: 380576 - DNA, 252 bp, Salmonella enterica
atggctagagatgatccgcactttaacttccgtatgcctatggaagtcagggagaaattaaaattcagggcggaggcgaatgggagatcaatgaactccgagttgttacaaatcgtccaagatgctctatcaaaaccatcgcctgtgactggatatcgcaacgatgcagaacgactcgctgatgagcagtcagagcttgttaagaagatggtgtttgatacgctgaaggatttgtacaaaaaaaccacctga

SEQ ID NO: 380577 - DNA, 225 bp, Salmonella enterica
atgatagaagcactctactatattctcaataggtccacggtggacctgtattgtgaggtgaatatgaaaggaatgagcaaaatgccgcagttcaatttgcggtggcctagagaagtattggatttggtacgcaaggtagcggaagagaatggtcggtctgttaattctgagatttatcagcgagtaatggaaagctttaagaaggaagggcgcattggcgcgtaa

SEQ ID NO: 380578 - DNA, 903 bp, Salmonella enterica
atgaatagtatagcaattttagaagcagttaacacctcttacgtgccgtttaatggacagcatgttcttaccgctatggtggctggagttgcctatgtagctatgaagccagtcgtggataacattggtctctcatggtcatctcaggtgcaaaagcttctgaaaatgaaagataaattcaactatgtcgatatcgacatggttgctggagatatgaagaaacgtctcatgggatgcatcccactgaagaaacttaacggctggctgttcagcattaaccctgagaaagttcgtgcagacatccgtgacaaactgattaagtaccaggaagaatgcttcaccgttctgtatgattactggacgaaaggtaaggctgaaaacccgcgtaagaaaacatctgtcgatgagaggacgccgcttcgtgatgctgtaaatatgcttgtaagcaaaaagcatctgatgtacccagaagcttatgcaatgatccatcagcgtttcaatgtggaaagtattgaagaactggaggcgtctcagataccgctggccgtagagtacatccacagggtagtgcttgaaggtgagttcattggcaaacaagagaagaaaaccaacgatctttctgcaaaagaagcaaacagccttgtatggttatgggattatgccaaccgctcacaggcgttattccgcgaactgtatcctgcaatgagacagattcaatctaactattcaggaaagtgctacgactacggccatgaattctcgtacatcattggaatagcgagagacgttttaattaatcacacgcgagatgttgatattaatgaacctgacgggccaacgaatctttccgcatggatgagacttaaggataaagagcttccaccttcattacatcgctactga

SEQ ID NO: 380579 - DNA, 2004 bp, Salmonella enterica
atgacagacatcactgcaaacgtagttgtttctaaccctcgtccaatcttcactgaatcccgttcgtttaaagctgttgctaatgggaaaatttacattggtcagattgataccgatccggttaatcctgccaatcagatacccgtatacattgaaaatgaggatggctctcacgtccagattactcagccgctaattatcaacgcagccggtaaaatcgtatacaacggccaactggtgaaaattgtcaccgttcagggtcatagcatggctatctatgatgccaatggttctcaggttgactatattgctaacgtattgaagtacgatccagatcaatattcaatagaagctgataaaaaatttaagtattcagtaaaattatcagattatccaacattgcaggatgcagcatctgctgcggttgatggccttcttatcgatcgagattataatttttatggtggagagacagttgattttggcggaaaggttctgactatagaatgtaaagctaaatttataggagatggaaatcttatttttacgaaattaggcaaaggttcccgcattgccggggtttttatggaaagcactacaacaccatgggttatcaagccttggacggatgacaatcagtggctaacggatgccgcagcggtcgttgccactttaaaacaatctaaaactgatgggtatcagccaaccgtaagcgattacgttaaattcccaggaatagaaacgttactcccacctaatgcaaaagggcaaaacataacgtctacgttagaaattagagaatgtataggggtcgaagttcatcgggctagcggtctaatggctggttttttgtttagagggtgtcacttctgcaagatggtagacgccaataatccaagcggaggtaaagatggcattataaccttcgaaaaccttagcggcgattgggggaagggtaactatgtcattggcggacgaaccagctatgggtcagtaagtagcgcccagtttttacgtaataatggtggctttgaacgtgatggtggagttattgggtttacttcatatcgcgctggggagagtggcgttaaaacttggcaaggtactgtgggctcgacaacctctcgcaactataatctgcaattccgcgactcggtcgttatttaccccgtatgggacggattcgatttaggtgctgacactgacatgaatccggagttggacaggccaggggactaccctataacccaatacccactgcatcagttacccctaaatcacctgattgataatcttctggttcgcggggcgttaggtgtaggttttggtatggatggtaagggcatgtatgtgtctaatattaccgtagaagattgcgctgggtctggcgcgtacctactcacccacgaatcagtatttaccaatatagccataattgacaccaatactaaggatttccaggcgaatcagatttatatatctggggcttgccgtgtgaacggtttacgtttaattgggatccgctcaaccgatgggcagggtctaaccatagacgcccctaactctaccgtaagcggtataaccgggatggtagacccctctagaattaatgttgctaatttggcagaagaagggttaggtaatatccgcgctaatagtttcggctatgatagcgcagcgattaaactgcggattcataagttatcaaagacattagatagcggagcattgtactcccacattaacgggggggccggttctggctcagcgtatactcaacttactgctatttcaggtagcacacctgacgctgtatcattaaaagttaactacaaagattgcaggggggcagagataccatttgttcctgacatcgcgtcagatgattttataaaggattcctcatgttttttgccatattgggaaaataattctacttctttaaaggctttagtgaaaaaacccaatggagaattagttagattaaccttggcaacactttag

SEQ ID NO: 380580 - DNA, 510 bp, Salmonella enterica
atgcgtaaattactcacagcgttgccggatggcggcgtaaacgccttatccggcctacaggatgcgcaaaccgtaggccggataagcgtagcgccatccggcagaaagtttttactcttaacgatcgtcctgtttttaatcaccttcgccaccaacgcccaggtggtggatacctggcgctttgacaatccgcaacagcaggaaaaagcgctgtctattgccggtcaactgcgctgtccgcagtgtcagaaccagaatttgctggaatccaatgcgcccgtggcggtcagtatgcgccatcaggtttacagcatggtggccgaaggtaaaagcgaagcggaaatcaccgcctggatgaccgagcgttatggtgatttcgtgcgctacaacccgccgttgaatgagcaaacgctgctgttgtgggcgctgccgtgcctgctgttattgctggtgggcgtggtggtctggcgggtgagaaagcgtcagcacgcagaagagggggaacaatga

SEQ ID NO: 380581 - DNA, 5193 bp, Salmonella enterica
ttgaaactgaaaacgaatacccgtcttttatccgggctacaggcatgtctgttttgtgttaccgctttttttgcccaggcggcgcaaagcagcaccccatggcaggagcctgacgtctcaactgccgccattaacggcacgccgccgctggctgatggcgtgacgatcccggtttatcagggcagcgttcagttgcgatctgatgcagcgaatcccgtcgattattccgcgaaacccagccagttcagcaccagtgatgtcggcagcgcgctgatcttaaccaatccgcgcgatgccgaaggcgatattttcgccgagccgccgctggtctggcagagtgaacggataccctccgtcacgctggtatgggccgacgccgccacgccggagacgccgctgtctccgcagccgtcggcaaacctgacgttctgtgagcaaaatatggcaggccgtcatctggtagtctggtcgcaactggatacctcaaccgctatgccgccgttgtggttgcttacccgcaccggcgtgccttataacacggcggtcgaagtgcttgatcaaaagtttgccgtggatatcgcgcccgccgtgggtgacccggtaacccttaccgccgatcatctggatgagtcgcttaacgccgcgaaggtgaaagcgggcgaaagcatcacgctgacggtgaataccaaaggttgtaacggtgagccagcgggcaatatcgcgtttgtgattacccgcggcgatgcgcaaaaccgccagggcgtggtgaacaataccgcgccggtacgcgtcggcaacaccgaactcaccaccactgccaccgaataccacggcacgaccaacgcggaaggggtggcgacggtgaccgtcacccaggctaacgggccgggcgttaaaaccccgttgatggcgcacccgtcgaacgcgcctgcgctgaaagccagcgcggatgtgatttttaccaccctcaccagcccggacagcagcagcgccaacatgtacggccatatggcggacagttccaccgccacggtggacggcgcaagctacacctttgaccgccccaaactggcggcggaaaccgagggcgaagaccgcgtcgccagtatcaacaatgaaaactgggcgcagttcacctggggccatgcggataaacactgcgatattctgccggatgcgcgccaactggaagggttaaaaatcgagcgcggcgatttagccaccactctcggctggccggtgggggggacatccggtgacgaagagtactggtcctcctcacagggggcgagcgcaactgaccacatcagcattgatatgcgcagccgcgcccttacgcagatgccggacgccacgcaatcgctggtgagctgtgtggataaagcctcgcctgcggtcacgccgaaattagtgattagcaccgataattttgattcgacggtcaacgcggcgaaagtgaaggtgggcgaagagatcaacatgaagatcgccgtcaccgacagcgccaccaataaaccgctgccttatcgctactttaatgtctacctgggcgacgagcaaaatcgccagaatcagaagaacgccgatcttgatgctgcgcatcagtggacggatgaaccggtagtcatcaccaatctggacggcggcgacggtcactatcacggcatcaccgacgccaacggccagttttcgctggcgctgacccaggacaagggcgctggcgtattaaccccggtgcgtgtggtgctgttcgacggcacggaagcgacgcagaacgtgatttttaccgtcgtcaccagcccggacgtgacgcaggcccgtatgtggggccatatgcagggcgtggtggaagcgggcaatatctacaaacgcccgctgctggcggaagaggccgcgcaggataccggttccgaatttgagaataacgagtactgggccacgtttaactcagtgacggcggcgacaaaccagtgcggcgcaggccaggtgccgggacaactgctgctggatacgctgtatgaagcccattccggcaatacgatggaaacgacttacggctggccgacacagaaacacagctatattgcggcggataccgatggttccaccactgcgcacgttaacctggcgaccggtgcggacagcctgttcagcggcgctgaaccgaactatctctcctgctccggtaacgagttggtgaccagcctggacgtgtactttgatggcaacgagtcgttacgtaatgcggtagccaaagtgggcgaaaaaattacgatgaacgtccattccgtcaacgcgatgaacgggttaagcgtgcccaacgccagctttaccgtcaccatgtcgcacggtaaaaatcgcgccaacgccaccacgggctttaccgactccagcgacggagcgctggtgatgggcggagcgtctttcggctcttcccaggcgtcgatgacgtaccagggcatgaccgatgccgagggcaacgccacgctggtcattgaacagccgcagggcgtcggcttgctgacgccgctgaccgtactgccggttaactcgctgatcaccacccccgttaaccgcagcgtgaagtttaccgtttccaccagccccgacacgccggaggcgcaaatgtggggccatatgtccgacaccatcacggtgggcgatatgacctttgagcggccgaagctggcaacagaggttgccgcgacccgcacccaaaccgaggctaacgagagctgggcgcgcgttacccatgccgatgcggtaggcaatacggcggcgggcggctgcgccgctaaccgattgccgcgcgccgatcaactggaggcgctgtatgccgccaaccgcgacggggctatcaacagcacgcacggctggccggtactgattaattactggacctctacctggcaaagcgccaccacgtggaaactgatagcgctttctaacggtagcgaatttccgggcggcgctggcgcatccgattacgtcagttgccttgccagcgataacccgacggcagcctccatcaccattgagccggtgaatacgtcattgtggtatgacgagaacagcgaacacgcggtgaaggtgaaaaagggcgatacgctccagctcaaagtgacggtaaaagacgccagcggcaatcctctgccgcaagcgccgtttgtgctcagccgcggcgacggctacacccgtcagggggaaaaacatatcgccggcagcggcgacggcatcgtctcggcggtagtgattgacggcgattcgctcaacgacaccgccaccaaaatcggcggcatgaccggtgaaaacggcagaaaaatcatcaacgtcacccgcccggatgcccacgggacgaaagtcgcgattacggcggcgctgtacgataacgccagcgcgacggccagcatcgacactatttttactgtggtcaccagccctaatagcgacaaagccaaaatgtggggccatatgccggaaacgaccacggcggccaacggcgtggtgtttaagcgcccgctattatcggctgaaatcgccagcggctttacccacggcgacaatacggaaaacaacgaagcctggggaatcgtcgattttgaagtggcgaacgacgcctgtggcgcgggatacgtaccgacacttgccgatctgcaatcgctgtacgacgccaggcccggcggcgccatgaatacgcagcagggctggccgctggatggtaaaaactaccagaacagcaccgctgatttgagcaggagtacggaaaaccgctacgttaagtcgattgatctgcgcgatggcggtattagctcgctggcgtggagtgaacaactctatttcgtctgcctgcaaaacgcccatccggcggcgacgcagataacgctcacttcgcctgtgtataacgacagcgacggctttgccaaagcgaaagtcggcgagtccatcccggtcatcatcaccacgcgggacgcccagggcaacctggccgccgacacgccggttatctttacgcgcggcgacagcgttgggcgcgcgaatcaggaagtgaatagcgcgtcggcggcggagatacagataaaccacagcgacgggcgtagcagcggcgttaaatattacaccgccaccggcgctgacggcacgctgacgctgaatatcagccaggacagcggcgcgggctttaaaacgccgctgacggcggcgatagagcacaacggcgtaacgagcgcgccgctaccggtcatttttaccgtcgtcaccagcccggacacgccgaaagccaactactggggccatatggcggaaacgctgaccgacagcagcggcgtggtgtacaagcgcccgttgctggccagcgagttcagcgtcacgcccggcaaatcgctgaccatcgccaacggttactacgacaaaggcgaaacctggggcatgataaccgtcgataaagcctggaacggcgccggcggcggctgcgggcgcaattatctgcccaccgtcagcaacctccagacgctgtacagtacctggcctgataacgccatgcgcagccgtaacggctggccgatgaccagttctggcaacaacaatgtcagccgctactggtgggcgggggattacgtgatgtcgtcagacggcgcgcagtcgctctacgcggcggtcaacctgtttaacgacggcaatgatgtcaaaacgacgaccagcaccacgacgtactatatgcagacctgccttacctcgccacgcagcgccgccgccagcctgacgctgacgctggcaggccaggatgcagccaccgggatcgcaaaagcgaaaaagggcgagcagatggccgccaccgtcacggtgaaagacgccgcaggtcagccgatgaaaaacgtgatggtgaaaatcagccggggatcttcgtacaaccgcgtcaacagcgccacatcgtcctcaagcgctgcagacgatattacgctgcgtaatgtgatgccgtccggcccggcgacatacctgctggatacctccgcgaaatatctgtatgcgcaaaccgatgcccagggacaggtgacatttacccttgcgcaggacagtaccgcaggtttaaagaccaccatcagcgccgccacgatggacggcagcaacctgacagacagcaaagacgctatctttaccgttatcaccagcccggatagcgacaaggcctcatactag

SEQ ID NO: 380582 - DNA, 1191 bp, Salmonella enterica
atgatgctgaatgcccgtaaggttgaagccgccaaaggaaaagagaagagctataagctcgctgatggcggcggcctgtatcttcaggtagaacccaatggttcacgatattggcgaatgaagtatcgcttcgcgggtaaagaaaaacgcctatcttttggcgtctatccagctgtcagccttgccggtgctaggcaaaagcgcgaagacgcaaagaaattactcgcagcaggtaacgatcctggcgaagtaaagaaagcgaagaagctggctttgacctctgccacagagatagtcaacccgttcaaagaggtcgcgttagagtggcacaagatgaagtcgccaaaatggtcaaagggctacgcttccgacatccttgaggccttcgagaaggatatctttccccatattgggcaacgacctattgcggatattaaacccctcgaactactagaagtgctgagactgatagaagccagaggtgcgatggaaaaagcgaagaaagtccgccagcgatgtggagaagttttccgttatgccatcgtaacagggcgagcaatttacaatcctgcaccggatctcgccagcgcaatgcagggccatgaagccgtccattatcctttccttaaagccaccgaattacccgagttctttaccgccctgaatgcctatacaggaagcccgattgttgtgctgggagcacatttacttatcctgactggactgagaacgggtgagctacgcgccgctaaatggtgtgaaattgattttgataacgctctttgggaaataccaaaagaacgcatgaaaatgcgtcgtgcgcatcttgtgccgctttcaaatcaagcattagcccttcttgaaaccttaaaagaactgactggaaactatcctttgatgtttcctgggcgtaacgatcctagcaaatctatgagtgaagcaagcattaatcaggtgtttaaacgtattggatatgcagggcgtgttacggggcatggtttcaggcatacgatgagtacgattctacatgagaaaggatttaacagcgcttggattgaaacccagcttgctcatttggacaaaaattctattcgtggaatttataaccatgcccaatatctcgaagggcgaagagaaatgatgcaatggtatgctaattatttatctgagctggttggtaatcataaatga

SEQ ID NO: 380583 - DNA, 825 bp, Salmonella enterica
atgaatgttctaaaaattaataatactgattctttgctcagagattactatcaattagatgaagcttcagaaaaaattggttgtaatgaaaaggatatactctggtttgccagggaacgaggtgtagagttatgcatggaatttcatgatgatgagtatgatgtttcatgtggtttgaagatcgatggtcaaatggatgagttcttatctaatctgaaatttttaccacgagacagaaatggcaatattatgttgtcagatttaagttctataagaattcctgatgaaaataacttaattgataaaaatggctttattcgatgcttcatatccggtttatgggctgttgattatgaatataaagatctgttagttaagcatgaagggcaaccggattcctggcctctgcattttctagtagcaggcacgcccaatgtaaattgtaaggcaatgctttttgttaattatgatgaaaaagaaaattattatcttttagaggttttgtggattacaaaagcacagattcaaaaattccttgacttagtatcatgcgagcaacagcgggtaaaaaacaccaacaaatataaatcacaatctgaagcacaaaaacaaaagcatgcagttcctcgagctgaaatactcatggctattatttcgctctatcatcgtgatatgaggttaagaagagagagcccagcagcgatagctgattatctttttcaacacgccagtgagttctggcctaagaccggagagccgcctttgagctatgatactgttgttagtttgctacgtagctgcatgaaaagtataaaatttaactga

SEQ ID NO: 380584 - DNA, 300 bp, Salmonella enterica
atgttatccaagcatgacaatactactttgcaacgaccttcaatggattctctgatcgatatgaagtttattacatcagattgcttactaagtgataaatggatttatcggctgatttctttaaatcgtttccctaaaccaataaaaataggacggatgtcgcgttggcgcgcagctgattattatatgtggagagatgggttcgaagaaaactctgggcagaaatttgaaggaatgagagaaaaggcaagaaatattaaaagcgggaataccttaacgtctattcccacaattcaatag

SEQ ID NO: 380585 - DNA, 174 bp, Salmonella enterica
atgtcaacaccacaagaaaaacgctctcctccattccaaatgcgtcttaacgaagatttcaggttgcagcttgaaaatgaaatgcgcaaagatggagataacgcattggcatcttggatcaagagaattttacgtaaagagcttcaattacgcggaattgagcctaaaggctaa

SEQ ID NO: 380586 - DNA, 762 bp, Salmonella enterica
atgaacaacaccgcagagaataccagcctttccacttttccggctgtaacgcagcgggcactggaaaccctgaacacaaccagaaacgcatggcttgaagcacgtcgtcagcaaaaagcggcagcagataatattgcgacaatccgccagcgccgcgctgaaatggaagccacgactaacgcactgaatgaggagtggcgcacgctgtttcgtgaaagtcagggcgtagtctcaaaggaaatgaaaaaactgcgcacggaaattgcgctgggacgagaaacgcttgaggattttgatgaactgctggcagctcaggaaagcgaaaatgccttattaccgcaggaagccgggaaattagccgggcagtatatcagcgcacataacacccttgtggaaattcgcgcaaagcaaatctgggaagacttcatgcagtcgcatggtaaggcgttaatccagacactgagcctgctcaaagccacaatggggcgggaagccagtgccgttgtgggggtggtgaattcagttaatgacccggacacagtactgaaagactttattcacaaacatatcaccaaaccggctcttactaacgctgtgatgccggaacaggaccctgtgtttaaactggcaggtgttgcgccggattatgctgcccttgctgatttccgaaaacttccctctccggcagcccttcataaaatgaagatccggcaggaacgtgaggaactgcaaaaacgtaaccgagccgcggagggtatctga

SEQ ID NO: 380587 - DNA, 273 bp, Salmonella enterica
atggcgttgaaatgccctttctgttcagccattgcacattgtcgagccagtgtgtacgaagccccctccgtaaagaaaacgtactaccagtgtcagaatctggaatgttcaagcacttttacagcgcttgaatcagtgcataccattatcacacgtccgcagaaagaagagaaaacgcagacagtgcaggggcctacagacaaaaaagggcagacgctgaatcgctatggctctgcatccaggctttccagccgccagcaaatccccgtctga

SEQ ID NO: 380588 - DNA, 141 bp, Salmonella enterica
atgagtctggttcttttcgtatcacttaaactgccagtattgttagggatgatgcccatatcatacggcgggaccctgtggggggcgattgtgcgcggaaagtgcttgggatttattcatcggttttatgattctacataa

SEQ ID NO: 380589 - DNA, 1257 bp, Salmonella enterica
atgccaaagaaggccaaggaactctcaggactcgtcgtatcacgattaaaatccgaaggtatgtatgccgttggtggtgtggatggtttataccttcgcatccgaaatcagtcccgtgcatgggttctttgtgtagctatgggaacccgaatcaacaatctcggtagaacagttccaagacgtttgaatatggggcttggcccttacccggaagtctccttagccgaagcgcgtgacaaagcgcgtgagctacgtaaacaaatccgtaatggtattaatccccttcaggaaaaacacgagcaaaaagcccggcaggaaatactggcccggaagaaaaagacctttgccgagtgttgtgaagaagtgctggaagtcaaagacagtgagatgaagaacaaaaaacatctcgctcaatggcgttccacactggagacctatgcctaccctttcattggcaaaaaggccgttagtgaaatcaccaaaattgatcttctggcaatactggaacctatctggttaaccaagaatgaaaccgccagccgtcttcgtggacgtattgaaacggtgatcgattacgctaaggctaaagaatactttgaaggggataaccctgccgcatggaaaggtatgttgaaacctctcctgcctcaaccaagtaaagttcaaatcaccaaacaccatgccgccctcccctatagtcagatcggcacctttatggaagagctgcgtgaacggagcggcgtttcacctcgtgcccttgagtttgccattttgaccgcagcacgctcaggagaaattcgtggtgccgagtggtcagagatcgatcttgaaggtaaaacatggactatccccgccagtcgaatgaaagcggcaaaaaagcatcgagttcctttgtctgatgctgccgttgcactgttaaaagatttaccccgctttaaaggcaataactttgtgttccctgcccctcgtaaaggacaactttctgatactgctttgctggcagtgttaaaacgaatgggatataccgacttaacgcaacatgggttcaggtctacattccgtgattgggctggtgaaacgaccaactacccacgtgaggttattgaacatgcattagctcaccagttggcagataaggccgaagcagcgtatcaacgtgggacgttatggcctaagcgggtcgcgttgatggatgagtggacggggtattgttttgcaaacatattaaccccactaagtgatgttactatgttatga

SEQ ID NO: 380590 - DNA, 747 bp, Salmonella enterica
atgattaagctggaaagaaattttacacctctattcttttctcctcagaatgttagtcgtttaactgaaaaatttaagagcagtggtactcatgtatggcatcatgatgatgtaaaaaattcgttgatggagttaagtgataaaaaatgtgcatactgtgaggttaagcttggtgaaaaaagcacatatcatgaggtggagcattttaaagataagaatgattaccctgatgatgtaatagagtggaataacctattaccttcatgtcgtcattgtaatggttctaaagggacacatgatgttgtccaagaaccaatagttaatccttttgaggaactcccggcagagtttttttatattaaaaatttcagaatgaaagggaggaatgagaaaggtattctgactatagatgttttaaatcttaacgatagagaacatttggttaagccaagatgtgaaacaggagctataattgcggaaaaaatagaggattctttaactttatttgagggatatctttcaaatccaataagcaaaaataaaagaaaattaatcggtactgttagagggatactgaaagaatgtcaaagaagtgccatattttctgcagtatcggctactgtattacatacgagcgaggattatctgactttacggggtaatatgatggcccataagttatgggatgaagatatggagaaccttcacataatgtcaagtaatatacaattaccaacaacagcttaa

SEQ ID NO: 380591 - DNA, 1182 bp, Salmonella enterica
atgaaaatacaaaaaattgatatcaaagatgttggtggtataaaaagagcaataattaattttgatgcgagcatgaatattatttgcggaccaaatgggataggaaaaaccacaattttagattccgtagcacatagttttattaatacaaacagctatgtccttaaaagacatgctcagtctactgatggtcagataaataccgtattaaatgattgtgacaatattagagaaagtcatatttctcttgaacagttcaatcctaaggattactcatatattagtggcttaagagagttaggaaggaaagtgatttatttgaatatttctagaatgttcaaatatgtatctttatctaatatctctaaagatgaggagagacaagatcatagcatatacacacttttgactgacggaatttcggttgcggatatgaaaaattggttcgcaaaacgctgtctcttctttaatacaccagaagcattaagtgaaaataataaggttaatttggagttggcaaaaaaatgcttttcactgcttaatgctgaatataaattttctcgcgtagatgcgaaaaaatttgatgttttcgtatctactccaaatggagaaatttggtatgaatatttgtcatcaggatttaaatcatgtctgagtattttattcggcataataaaagagattgaactaagaatgcctgatgaaaattgtttagcacagcattttgatggcattgtattgattgatgagctggaaatgcatcttcatcctgaatggcagtccaaaattgtttctgttttgcgagacacatttcctgcaacacaatttatagttactactcatagtcctcacattatacaaaatgcggaacctaatcagataattgcattagggacagatagtaatggatatacatacgtcagagaacttccgagtaatgagtttggttatactggatggacattagatgaggtactcaaagatgtaatgggaatggaagacacaagaagtcagaaattacaaagtatgcttgctgcatttgatcaagctattgatgaggagaataaaattgaagcagagcgtatttataaagaattagatagggcacttcatccagcaaatgtgcttagaaaaatgcttagtattgatctttcctcagtaatcgaggagggcagtaaataa

SEQ ID NO: 380592 - DNA, 216 bp, Salmonella enterica
atgagtaaaaacgtaaaacagactactgatcctaatgcctcagccatccagaaaagccttgcgggttccgcgctttctcaacgtgggacgtcaaaccagaccagtggcaaaatggaacataaggcttcctcagctcttgataacccacgctccagcgaattaacgaagcagcttgccgcttcggtattggcacaatcaaacaaagggcgtaagtga

SEQ ID NO: 380593 - DNA, 846 bp, Salmonella enterica
atgcaagtaagtaccatatccgaacaactttttttcacaacaataagaatagatacaatatcaagaaacggtgactctggttcaggcactggttttttcttttgtcataaaaaagataacattgaatatctttctattgtaacaaacaagcatgttatcgagaacacggttcaaggaacgcttacttttttaaagggaaaagataacacccctgctcttggtgatgggtttagcttgaatataaaaaatccagaatgggaagaattatggtttgggcatccagatgaagtaatagatattgcgatatgtccattagttccactcttagattttataaaaaaacaacacggcgttgatttatttatacgatgtgtcgagacatcgatgatccctaatgaagaacaaataaagcagatggatgctattgaaccgataaccttcattggataccctaatggcatttgggacagcacaaatctactaccagttgcaagacgcggtacaaccgcaagtcccatcgaagtagatttcgaaggttctccacgttttcttattgacgcttctgtatttggtggttcaagtgggagccctgtttttattctaaatcaaggctccttcgcaaccagagatggtggctttgcctttggctcacgtttccattttgttggggttgtcgccgctgtatattttagaacacatttaaataaaatcatatcagttccaattccaacaacaacacaaccaatggcaacacaacaagaaatgattgatttaggtattgtatttaaagccagaacagttgtggagacaattgaatttgctttatcgaagaataacaacagttga

SEQ ID NO: 380594 - DNA, 420 bp, Salmonella enterica
atggaatttttcagacctacagagttgcgcgaaattatttctctgccatttttcagttatttagtgccgtgtggcttcccaagtcccgcggcagactacattgagcagcgtatcgatcttaatgagttgctcgtttctcatcccagctcaacgtattttgtcaaagccacgggtgattcaatgactgaagcaggcatcaacgatggtgatctgctggtggtggatagctcacgaactgctgaacacggcgatattgttattgcagccgtggatggggagtttactgttaaacgtctgcagctgcgacctacagttcagctcaatccgatgaacagcgcttattcgccgatcatcgtcgacagcgaagacactctggacgtattcggcgtcgttactttcatcgttaaagcagcgagctga

SEQ ID NO: 380595 - DNA, 1269 bp, Salmonella enterica
atgttcgcacttttcgatgttaattcgttttacgccagttgtgaaactgtattcagaccagatttgagagggcgtccggttgtcgtactgtcgaacaatgatggttgtgtgattgcgcgtagcaccgaggcgaagcaactcggtatcgcaatgggtgagccatacttcaaacagaaagaacgcttccagcaatttggtgttgtttgcttcagcagcaattatgagctttacgctgatatgtcgaaccgggtaatgaccacactcgaggagatgtcgccgcgggtagaaatttacagtattgatgaggctttttgtgatctgacgggtgtacgaagccgccgggatctgacagatttcgggcgcgagataagagcgacagttctgaagcgcacgcacctgactgtcggcgtatgcattgcccagacgaaaacccttgccaagctggctaaccatgctgcgaaaaagtggcagcgccagaccgacggggtggttgacctgtcgaacattgaccgccagcgtcggctgctggccctgatacccgtagaggatgtctggggtgtcggcaggcgcatcagcaagaagctcaatgccatgggaatcaaaacggctctggatctctcagagcaaagcacctggattatccgcaagcactttaatgtggtactggaacgaacggtccgggagctgcgtggcgaaccatgtctggatctggaggagtttgcgccggcaaagcaggaaatcgtctgcagccggtcattcggagaacgcgttaccgaatacgaacagatgcgccaggctatctgcagttatgctgcccgtggtgctgaaaaactacgtggtgagcaccagtattgccgttttatctcggcgttcgtcaagacgtcaccgttcgcgcttaacgagccgtattacggcaattgcgcgtcagtgaagcttctcacacccactcatgattcccgcgacatcatcaacgctgttgttaagtgcctggacaaaatctggcaggatgggcaccgctaccaaaaggctggcattatgctcggggatttctttagccagggtgtcgcacagcttaacctgtttgatgacaatgccccacgtgctggcagcgagaagctgatggaggtgctggatcaactcaacgccaaaggcgggcgggggacgctgtattttgcaggacagggcatccagcagcaatgggcgatgaaacgtgagatgctttcgccgcggtacacaacaaggttttccgatctgctgcgcgttaagtga

SEQ ID NO: 380596 - DNA, 345 bp, Salmonella enterica; identical to SEQ ID NO: 118661

SEQ ID NO: 380597 - DNA, 171 bp, Salmonella enterica; identical to SEQ ID NO: 34003

SEQ ID NO: 380598 - DNA, 333 bp, Salmonella enterica; identical to SEQ ID NO: 99331

SEQ ID NO: 380599 - DNA, 216 bp, Salmonella enterica; identical to SEQ ID NO: 118659

SEQ ID NO: 380600 - DNA, 486 bp, Salmonella enterica; identical to SEQ ID NO: 99332

SEQ ID NO: 380601 - DNA, 135 bp, Salmonella enterica; identical to SEQ ID NO: 33096

SEQ ID NO: 380602 - DNA, 705 bp, Salmonella enterica; identical to SEQ ID NO: 33097

SEQ ID NO: 380603 - DNA, 324 bp, Salmonella enterica
atgacaaaacgaagtggaagtaatacgcgcaggcgggctatcagtcgccctgttcgtctgacggcagaagaagaccaggaaatcagaaaaagggctgctgaatgcggcaagaccgtttccggttttttacgggcggcagctctcggtaagaaagttaactcactgactgatgatcgggtactgaaagaagttatgagactgggggcgttacagaaaaaactctttatcgacggcaagcgtgtcggggacagagagtatgcggaggtgctgatcgctattacggagtatcaccgggccctgttatccaggcttatggcagattag

SEQ ID NO: 380604 - DNA, 195 bp, Salmonella enterica
atgaacaagcagcagcaaactgtactcaacatggcgggattcataaaaagccagagcctgacgctgctcgaaaaactggacgcactcgatgctgacgagcaggccaccatgtgtgagaagctgcacgaactcgcggaagaactccagaacagcatacagacacgctttgaagtagaaaatagcacagagatataa

SEQ ID NO: 380605 - DNA, 1521 bp, Salmonella enterica
atggcgattttccatctggattttaaaattgtgaaacgaagcgagggcatgacttccgttgcaaaagctgcctaccatgcccgtacacgtattacagatgatcgcattggacaggttttcgatttcagctacagaacagaccttcatggtcatattatattggctcctgtttccgcaccttctcatattattgaaagctcgtcagcgctatggaatgaagttgaaagagtggaacgccagaacaacggacaaacagcccgttattttgatgtcgctattcccgtagaactcaacaatgatgacaagaaaaaattagttgctgaatactgccagaagaactttgtcgataaaggaatgattgctgatatcgttttccacgatttagacggtaagaatccccatgctcacgttatgttaaccctgaaaactatcaccgctgctggctttggtaaaaaagacaggagctggaatgataagaagatggttgttcagtggcgtgagtcgtgggccacgatgtcgaacagctaccttgaggccgcaggcagtgaagaacgtatcgatcaccgctctctcagaacacaatgtgctgatgcccttgctcaggcagaagaagcattcagcgctgaagaaaaagcattctggcttgccaaggcaacagaaaccaatcgtcctgcaatgcagcgcgttcatcgtgccaagtggaatgacaccgagtcacaggaacagcgagcagctgaacaagccctacgcaaccttcaaattgaggaagcgaagaaggtctacaccacattcagtgagctaccacttgagatcgtggttgatgtcagaagctttacggttacacatcttgctgaaccagaagagatagtccttccagactacccgataacaaaagaaccgcagcctgttatgacgacatctgaaccatacagaagaccagccgtaaaatcttaccgtgatccaaacaagataagtaaggttggtatggcagaaaaaggaactcatgttctggttgcccctgaaccaagtaaatccactaaactgaaaacctcctcttctcgaaacacgagagcgaagaaccgcgctcccatgagcaatagaaaacaggttaagccgcgtcagaatggaatgtttaagcgtttcacgctactggtggtgggcttcttcaaagagagatttgtatgggccagaaggaaacccgataccactgatgctgatcatgataagcgcattgctgaaaattatgtgtttgatgaagttatgggggtttatgtttcacgctcagagtttgaaaaacgcgccaaatttaacaatgaccaaacatcatcacgtgaagaatgttatggcgacgagtcagataatgataagaccgttcgtttcccaagtcgtccgaagcatgaacagccggacattgataagaacatggatctcacaccatcgattacatcaaaacacataagaaaaggtagctcatcgcggatgctcccttcgggctatacaaaatgggatacagatcactaa

SEQ ID NO: 380606 - DNA, 636 bp, Salmonella enterica
atgcgagatcaagactttagttacttcattgagaaatttggagaagctacatcttatagcgctgttccagagaaaagtatgacaaaatggaaaggaattcttccggataaacttctttcttactggaaaacagagggatggggaacgtataaaaatggattgtttagtcttgtcaatcctgatgagtatgaagatgtactggatatatggctagaagatactccatttaaagaaatggacgcataccatgtcatagccaggagtgcctttggcgaattatatgtttttggtgagtctaccggaagaaatattacgattcagcccttatttaatcaaataatttttttcgaaaatggttttatggtaaaaacaatagatgaattagtaagtgaaattgaatcttttcttgcattttcaaatgtcgaagagtttgatttatttgattgtaatgataattacatttttgaccgggcagttaaacaactaggcgtattagctaataatgaaatgtttggtttggaacctgcatacatttttggcggagaaataaaaattgaaaatttgagtaaagtggactgtcaaatacatttgatgattctgagagagttatctccccctaatattatagtcttctaa

SEQ ID NO: 380607 - DNA, 126 bp, Salmonella enterica
atgtcacaaaatggcctgcgttttacgctggatgtggacggattaacgccgacggcaaccgctgtcgtcaatttccccctccagtggtatcaacagttcaacaggtgcaagctggaatcagaatga

SEQ ID NO: 380608 - DNA, 129 bp, Salmonella enterica
atgggcagggtaggggatgtgaaagcaggttatcgatggctcagatggcacacttttttggtgccgctccattacacgagcttctttatgcagcattttatgcagggtaaaaccaaaattacgttgtaa

SEQ ID NO: 380609 - DNA, 189 bp, Salmonella enterica; identical to SEQ ID NO: 20846

SEQ ID NO: 380610 - DNA, 201 bp, Salmonella enterica; identical to SEQ ID NO: 198501

SEQ ID NO: 380611 - DNA, 318 bp, Salmonella enterica; identical to SEQ ID NO: 140060

SEQ ID NO: 380612 - DNA, 1725 bp, Salmonella enterica
atgccatcatgggcgaagaaaaatccctccgagctatggaaagccgcagatgaatttgaacgaaaaaacgggacggcataccgtgaaattgagatcgcgttaccgcgtgaactgacacgcgaacaacggatagaacttgttgaagattttgtgcaaaaggaacttggcgatcgccatgcctaccagtacgcgatccacaatccgccaggtgcaattgacggaaaggaacaaccacacgcgcatatcatgttttgcgagcggattaatgatggtattgaacgcgatccgcagcagttttttaaacgtgctaacagcaaattaccggagagaggaggcgcaaaaaaggcacgctttggtgaaacacaacaagagcgaaaatctgcccttgttgaattacgttcccgctgggcggatgtgcagaatgagcaccttgcgcgtcacggtcacgagtcgcgcgtagatcatcgttcgctgaaagaacagggtatcaatcgcacgccggaagttcatcttggccccgttcaggccgccagtctgaatggtgagcagattgttgcaatccaggaacggaggaatgccgagcgggaactcaagaccgccagagatgccgcaaatgccattcagccggaacaggagcaaaagcaaaaaatcaaggcagttgagcctgttcgttctgcccgattaatggatgagtatcgggatgttgcccggaaagtgatcacactggagacaagacagaatgagagtcaggaactggcgctaaaacatcacttgtttatgaaggcagaagcgaaagagcaagaactggcgaaactgaaagaacaactaaaaaaaatggacgagcagcgttctgtttataagaacaagattgatgagaaaaaacagaatattacagcgttagttgaacagaaaaaatcgctcgagagaagttttattggcctgtttaaaggcgggatgaaacgtgagcttgaggaacaaatcaagacacaggtcagccaactggaaaagaccgagcacgaggtgaagcaattggacgagaattatcagcagcttcagatgcaggctgataatgaacagaagaatttctcacactcaccggaatatcagtattcggaagcggttttgagcggaatacctcgttcgattttaaaactgcaattcgctctgttgcccagtgagagcactatcgccttcaacaagaatgtactggacgtagaacaacgaaaagaagctgctatagctgccgaactttgccttagtgaagatgagcggcggcaaatcaggcgagagattcaggatgttctaaacggggacgcctgcgaagggcagcagacagaaactctccagcagaaacgtcccgagaaagatgcgcacatcgagtgggaacgggaagaatctccgcaagtcgtcatcccaaaaacttatgtttttttctctgcgtgcaggggcgttaagacagaaatcaggccgtttgagtcgtgcgatgatgctatcgagtgggggttggttgagtgtgaacttcatgatcgttttaagcgtgatctcattgtttatcgagttgatgctgaattgataggaaaaggtgatgatacagtgatgaaaaatgccgaacgcattgatcttactgatgaacttgaaggatggaatcagcaaacacacatcgaaaaagagagcctttttgaacgagtacagcagcggtcacaagatgatgagctggagatgtag

SEQ ID NO: 380613 - DNA, 1233 bp, Salmonella enterica
atgatgatgctaatcctgaaagcctacaaattcagactggaaccaacgcatgagcagtcgcagcgtttgcggcagttatgtggttgcgcccgttttgtctggaatttaggtcttgcggagacaaagcgcatacttggctcaggcgaaaagctaccttcggctttcgagttgaaccggatgattacggtgtggaaaaaaatgccggaatacatcttcttacaggatgcttataccgacaatctgcaacaaaagctgaaagacctgcataccgcatggaaacgttgttttgataaaaagctcgcagctaaggctccggtatggaaacgaaaaaatgagggcagagactcaatccgttttgtgaactttgagaaatattgctgccttgaaaatcgcagagtgaagctaccgtcaggtcttgggtgggtaaaattccggcaatctcaacgtgtgaacggtaaaatcaaaaatgcgacaatcagtcagttagcgggacagtggtatatctcgtttcaggttgaaattgaaacggcagaaccaaatcacacaagcacaacgatagtcgggctggatgctggcgtggctaaacttgccacgctgtcagatggcacagtctttgagcctgtaaacagttttcagaaaaaccagaagaagctggcgagactccagcgtcagttaagccgcaaggtcaaattcagcaacaactggcagaagcagaaacgcaaaatacagcaactgcattcccgtattgcaaatatccgcagggactaccttcacaaagtcacaacgaccgtcagcaaaaaccacgcaatgatagtcattgaggatttgaaggtcagcaacatgtcaaagtcagcagcgggtacggtcagccagccggggcgcaatgtccgggcaaaatcaggtttaaaccgttcgatactggatcagggctggtatgaaatgcgccgccagcttgagtacaagcagctctggcgtggcggtcaggtgcttgctgttccgccagcgtacactagccagcgttgcgcgtgctgtggtcatactgcgaaagaaaatcgcctgtcacaaagtaaatttgtgtgtcaggtatgtggatatacagcgaacgccgatgtaaacggcgctcgtaacattttagcggcggggcacgccgtgcttgcctgtggagggatggtgcagtcaggccgcccgttgaagcaggaaccagaggctgagcaatcagccgtcacccactaa

SEQ ID NO: 380614 - DNA, 990 bp, Salmonella enterica
atgaaaaaccctgatctccagaacctcacggactattccccctcagatgcgccctgggacgctcacagaagcgtttctgatgacgtgggagggatttacctgcttgcagccgaatatgagcgctacggggcgcgtatggccctctgtggtggtttactgcgtttcgggtggtctaccctcaaggaaaccggagaaacgcgtctgaggctgcgtgaggcgcatttctgccgtgtccggcattgtcctgtctgccagtggaggcgctccctgatgtggcaagcccgtttctaccagtccctgccgcgtatcgtggcggattatcccgatgcccgctggatgttcctgactctgaccgtgcgcaactgtgcgatcggggagctgggcgagatgctgaaccggatgaatgcagcttttcagcgcatgaaggttcgcaaggagttccggcctgtgcagggctggatacgtaccacggaagtcacccgcgggagcgacggcagcgcacacccgcacttccacaccctgatgatggtgccgcctggcatgctaaatgggaaaagttacgtcaggcatgaacgctgggttgaactctggcgggagtgtctgcgggtcgattatgacccgaatgttgatgtccgggcagtgaaacctcgtaagccgaagggcggcgaatcgctggcctgcgcgaccgccgaactggtgcgcggtgcggtggccgaaaccctgaaatattccacgaagccggctgacatggtggccgatcctgaatggttcctcgaactgacccgccagacgcacaagcgccgctttgtggcgaccggcggcgcactcaaagacgtgctgaaactcgatcaggaaactgacgccgacatggtgatcggtgatgatatttccgagggcgacgatgacggttcacgaatcgcgttcgagtggaaaaccgaggtcagaaagtaccgtcgctcaccgacgaaagataaaactgaatcaggctag

SEQ ID NO: 380615 - DNA, 462 bp, Salmonella enterica
atgtttaagtatatcgaaacagaagttgcaggcggttttggcgaagccactactcttgatatcagtatgcctcctcccattgtgttcaccttagaacacagttttgacggttggttgggtgattgcataatggaaacattcccttgttttgtaattacggaaaaggcaaaagtacttattgaaaatttaaacctttcggggatattttttgatagtgtaataacatcaaaatcagatatatttgaagaactttatccaaatattaaattaccagagatatattgggcaaaaattacaggtatagttgggaaagatgattttggtatagctgatgacctacggttggtcatatcagatgatgcactaaaagtactggaaagttgtggtttaaaacatgcaggcatcactgattactatcacgatatgaatctacatcgcactgattatctggagagacattaa

SEQ ID NO: 380616 - DNA, 390 bp, Salmonella enterica
atgagagtgtcgttattattgatttattttattccatttgcattactggcggatgacccttgtctcagtattcaatattctgaagcagtatttctttgctcaaaaaagacattcgaagatagcgatgcaaaacttaatgaaacctacagaacacttttgtccaccattcgcaagaaatataattcccagccaaattcaggcgcggagtttgttgaaaaaataaaattatcacagagagcatggattaacttcagagatgcaaattgtaccgttttttcattcataatcgatgaggaatcgcaagcatatgatacatcaatgtattcttgtaaaaatgatatgacactaaaaagaactaaagagcttgaaaccatactggctaataattag

SEQ ID NO: 380617 - DNA, 702 bp, Salmonella enterica
atgaaaacggtcattcagggagaagcaaggcttgctcgtttaggggatgccaatcccaatgcgctcaaagaacataagctgcttcagaatgcgaaagcaaaaaaagactctctttccgaatggagcaggcgaatatatgaaggggcacggtatttagacaaactggggcgtaatgtcgtttccgcacaaagggagctgcgggagctacaggaacaacgcaatgctttgaatgggattcgtggcctgtttcggggggctgacaaaagggagattgatgcgcgtattctggagcaaaaaagtgtgctggaaaccgctgaacatgaaaggaatgaattcaggaacaagctacagcaagccgaatccgagtgggacaaagaaaacgctgcttttaagcgtaccgagggatataagtacgttggggatctggacaggtacagagaacgtgagattctggccgcggcatctttagagaataccaggcaaaaggttgctgaagaagtatccgttgcccgtagccagatgttatctctggagcctgaactcagtatatctggagatgaaaaagctcaaatgcgacatgagttactggcagaaatggcgcaggaacggcagcaacaggaggaaaaggcactgcgtatacagcgatcctgggccagggaggcatcacgtagtaacgaacgtgatcaagatatggagcgttga

SEQ ID NO: 380618 - DNA, 378 bp, Salmonella enterica
atgaaaaaaatgcttattgctgtattggttattcttccacttgccagctgcacctttcatggcaataaatctctcacagatgaaaatcatcagacggtaaagctaaaaatcgtcaaaggaaaaaccacccaacaagagatcctcatcgcgttcggagaaccacagacacgcgccacgaacgatggacaagagatgtggagctactccagtatgacgggagaaagccagttatctaactatgttcccggccttgctttactgaccaatagtagcatggcacacattaaatcgctggatatctggtttaagggagatgttgtggatcgttataattttagtcagacagccagtaagacttcgcgcggtctgctggattaa

SEQ ID NO: 380619 - DNA, 447 bp, Salmonella enterica
atgacaaatcgtgaagagtggttaagtgcaaaaattgcctacatcaacggactgaaatcaccgtcagagcagcagagattacttgtgttactggcagagaaaaaaaaccgaacaacgacggatgaaaaaacgttgtccgcactgatacgggcagaaaaaaccgcagagaaagcagccgcagcaaaagccagggtaacggcaatcatagcggcagaacggaaggcagccgcaagggcggaacgaaaggcgcgggatcatgaactctacaaggccgcaggcctcatgattgtggcaggactggtggacagcaaaaccggaaaaccaaagtttagtgctgccgaactggtaggcgcactcgcaggaatcgcagagctaccgcgcaaccacccaaaatggcaggaatgggaaagacgcgggaaggagctactaaccaaagacagtgcgtaa

SEQ ID NO: 380620 - DNA, 1902 bp, Salmonella enterica
atgaggcattctgtttcagtaacctgttgtgcgctgttggttagcagcttttccctggcatatgctgcggatgttcccggcggaacggtactggcagagaaacaagcactggtgcgtcatatcaaagatgagcccgcttcgttagatccagcgaaagccgttgggctgcctgaaattcaggtgatccgcgatctgtttgaagggctggttaaccagaacgaaaagggtgaaattatccctggcgtcgccagccagtggaagagcaatgataatcgtatctggacgtttacgttgcgggatgatgcgcaatgggccgatggaacgccggtgaccgcccaggattttgtctatagctggcaacgcctggttgatcccaaaacgctttcccccttcgcctggtttgccgctctggctggcattactaatgcgcaagccattatcgacggtaaagtcacgccggatcagcttggcgtcagtgccgtggacgcgcacactttgcgtgttcagcttgacaagccgttgccctggtttgccagtctgaccgccagttttgccttttatccggtccaaaaagcgaatgtcgaaagcggcaaagactggatgaagccgggaaaactgattggcaatggcgcgtatgtgcttaaagagcgcgtggtaaatgaaaaactggtggtcgtgcctaatacgcattactgggataacgcgaaaacggtactgcaaaaagtgacatttttacccattaaccaggagtcggctgcgacgaaacgttatcttgccggtgatattgatatcaccgaatctttccctaaaaatatgtaccagaaattattgaaggatattccagggcaagtttatacgccgccgcaattagggacttattattatgcgtttaatacgcagaaagggccgacggcggattcccgcgttcgtctggcgctaagtatgaccattgatcgccgtttgatggcggaaaaagtcttaggtaccggtgaaaaaccggcctggcattttacaccggatgtcacggcaggatttaagcccgatccttcaccgtttgaacaaatgagccaggaagaacttaacgcccaggcgaaaacattgctgcgtgcagcaggctacggatcgcagaagccgcttaaattaactctgctttacaatacctcagaaaaccatcagaaaatcgcgattgcggtggcgtcaatgtggaagaaaaatctgggggtggatgtgaaattgcaaaaccaggagtggaaaacgtatatcgacagccggaataccggtaattttgatgttattcgcgcctcctgggggggtgattacaacgaaccgtcgactttcttatccttattaacgtccacgcatacggggaatatttcacgctttactaatccgacttatgacaaaatcctgacgcaagcgacgatggaaaataccgccgaagcgcgtaacgcggattacaatgcagcggagaaaattttaacggaacaagcgcctatagcgcctatttatcagtataccaatggccggttaattaaaccgtgggtaaagggataccccattactaacccggaagatgtggcctatagccgtacaatgtatatcagtgaagcactgatgcgtactggtttcttgttaacgcaaggtagccacgcccgccgcctgatgctggcagaaggcatggggattaagcgagcgcctgatgccaccgttctcattgctgtgttttcagccaggcggcaatatcctgtgtcggcagatgatgttgtgcattccaggtgtcactcatcggccaccacataccgtcaccacgcgcgaaggcgacgcgatagcgcagcattgggtcatgcggatgtaaacggagctgctcctgtaagtcaggtagcgtcaatacgcctcgggtaa

SEQ ID NO: 380621 - DNA, 1785 bp, Salmonella enterica
atgagttcaaaaattttttgcaaaagctggggggctgaatatatcgccgctgatgttgtccgctttcgtctttgggccaccggtcagcaaaaggttatgctcaggcttgcgggtaaagatcaggaaatgcaggcgaacggtgacggctggtttacgctggacgtctccggggtgacgccaggtacggagtataactttgtactcagcgatggcatggtggtccccgatccggcttcccgcgcccaaaaaactgacgtcaacggtccgtcatatgtggttgatccaggcagctacgcgtggcgcaacaccgggtggaaaggtagccgttgggagcaggccgtggtgtacgagatgcatacaggcacgttcactccggaaggcactttccgcgccgcaatagcgaagctgccttatctcgctgaactcggcgttaccgttattgaagtgatgcccgttgcgcaatttggcggcgagcgcggctggggctatgacggcgtactgctttacgcgccgcattctgactatgggacgccggatgatttcaaggcgtttattgacgccgcgcatgggtatggtctttccgtcgtcctggatattgtgctgaaccatttcggcccggaaggaaattatttaccgctattggcgccggcgtttttccacaaagagcgcatgacgccgtggggaaatggtatcgcctatgatgtcgacgccgtgcggcgctatatcatcgaggcgccgttatactggctgacagaataccatctcgacggcttacgctttgacgctatcgatcagattgaggacagtagcgcaaagcatgtgctggttgaaatcgcacaacgtattcgggaagacattaccgacagacccattcatctgactaccgaagatagccgcaatattatttctctgcatccccgtgatcaggatggcaatgcgccgctgtttaccgccgaatggaatgacgattttcataatgccgtccacgtttttgcgaccggagagacccagtcctactacaatgattttgctgatgccccggaaaaacacctcgcaagagcgctggccgaaggattcgcttatcagggagaaatttcaccacaaaccggcgaacctcgcggcgtaaaaagtaccggacaacccccggtcgcctttgtggattttattcagaatcacgatcaggtcggtaaccgcgcccagggcgacagactgataaccctggcgggtgctgaacgaacaaaagtattgctcgccacgttgctgctttcaccgcatattccgctgctttttatgggcgaagagtatggcgaaagccgtccttttcttttttttaccgatttccatggggatttagcccgcgccgttcgtgaaggtcgcgcaaaagagtttgccgatcatgcaggggagaatgttccggacccgaatgcaccagagacctttcaacgctcaaaacttaactggaagcaacagcacagtgaagagggtaaagcgtggctggcgtttacccgcgaactactgcttttgcgccagaagcatatcgtgccgctgttgtccgctgcccgtgagagctcaggaacggtattgcaaaccgcgcccgggtttattgccgttagctggcgttttccgggaggaacactgtcactggcgctgaatattagcgccacgacggtattgctgcccgatttaccgggtaagactctcttcgcctggccgaatgaatccaccgggtcgctttcccaacattctcttattgtccgcttagcccagggagagtctgcatcatga

SEQ ID NO: 380622 - DNA, 534 bp, Salmonella enterica
gtggaggcagccatcgcccgcgccaaagcccgtaagcaggagcagcaggccggaagcgaaccggtcgaagcggtcgatccgcgtaaagccgcggtggaagcggctatcgcccgcgccaaagcccgtaagcaggagcagcagaccggaagcgaacctgccgaaccgatcgatccgcgcaaagccgcggtggaagcggctatcgcccgcgccaaagcccgcaagcaggagcagcagaccggaagcgaacctgccgaaccgatcgatccgcgcaaagccgcggtggaagcggctatcgcccgcgccaaagcccgcaagcaggagcagcagaccggaagcgaacctgccgaaccgatcgatccgcgcaaagccgcagtggaagcggccatcgctcgcgccaaagcccgtaagcaggagcagcaggccggaagcgaacctgccgaaccggccgacccgcgtaaagccgcggttgctgcggctatcgcccgcgttcaggcaaaaaaagcagcacagcagcaggttgttaacgaggattaa

SEQ ID NO: 380623 - DNA, 414 bp, Salmonella enterica
atgaagactccacacctcgtgccgttaagtcgtcaggctttagaacttctaaaagccatcagagaaatcagtggggaatgcgaccttgtattcattggcgatcatgatttcagaaaacctatgagcgagaacacagtgaacaaggcactaaggtcgatggggtatgacacaaccgttgaggtatgtgggcatgggttcagggcgatggcttgtagtgccttaatcgaatcaggaaaatggtcaagggatgctgttgaacggcagatgagccaccaagagcgaaactccgttcgtgctgcctacattcataaagcagaacacctcgatgagagaaagcttatgttgcagtggtgggctgattatcttgatgaaacaactaagagaagaattgcaccttttgattttgataaataa

SEQ ID NO: 380624 - DNA, 567 bp, Salmonella enterica
atgacgccggtctttttgcaaattggtcttggtttttcaccgtttcatgccggtttgatgatgatccccatggtgctgggcagcatgggaatgaagcggattgtggtgcagatagttaaccgttttggctatcgtcgggttctggtggcgaccacgctcggactggcattggttagcctgttgtttatgtcggtcgcgctgctcggctggtattatctcctgccgctggtactgcttttgcagggaatggtgaactcggcgcgcttttcttccatgaataccttaacgctaaaagaccttcccgatacgctggccagcagcggcaatagcttattatcgatgattatgcagctctcgatgagtattggcgtcactattgccggaatgctgctgggtatgtttggccaacagcatatcgggatagacagtagcgccacacatcacgtctttatgtacacctggttatgtatggcggttattatcgcgctaccggcgataatttttgcccgcgtgccgaacgatacacagcaaaacatggtcatttcacggcgtaaaaggagcctgtaa

SEQ ID NO: 380625 - DNA, 894 bp, Salmonella enterica
atgtctcatattaactacaaccatctttattacttctggcatgtctataaagaaggttctgtcgtgggtgccgcagaggcgctttttctgacgccgcaaaccattactggtcaaattaaagccctggaagagcgtttacaggggaagctatttaaacgtaagggacgcggtcttgaacccagcgaactgggcgagctggtttttcgctatgcggacaaaatgtttacgctaagccaggagatgctggatatcgtcaattaccgcaaagaatcaaacctgttgtttgatgtcggcgtcgccgatgctttatccaagcgtctggtcagcagcgttctggatgcggcggtggtggtagacgaacccatacatctgcgttgcttcgagtccacgcacgaaatgttgctcgaacagctcagccagcacaagctggatatgattatctccgactgcccgatagattccacgcagcaggaggggctattctcagtcaaaatcggcgaatgtagcgtcagtttctggtgtacgaatccacttcccgaaaaagcgttccctgcctgcctggaagagcgacgtttgctggtgccgggacggcgctcgatgctggggcgtaaattgttgaactggtttaattcgcaggggttgcaggttgagatcctcggcgaatttgatgacgcggccttaatgaaggcgtttggcgcgacgcacgatgcgatttttgtggcgccgagcctttattcgctggatttttatgccgatgagtcggtaatagagattgggcgcgtggagaatgtcatggaagaatatcatgcgatttttgccgagagaatgatccagcatccggcggtgcagcgtatttgcaatgcggactactcggcattgtttaagctacagtag

SEQ ID NO: 380626 - DNA, 483 bp, Salmonella enterica
atgagagatgaaacgaaagaggctatgcgtatgtttctcggcggcagatgttacacagccgaaaacctcgaaagggattatctggcagaagtggccgggtacagtgacgaccgttgggaagcgccgcagcgtgccgcacgtctggcggcggcggtaaagcgctacaagacctcagaaatgctgcgcttcattttcgcgactgtcgcacacgaccccgacccggacttaacccctctaaccgtgaagcgactatgtaatgccttgttcggcagaacggggagccagtggctgattgtggaaattttcggggagaaggggcggctgcgacgcagcgacgacagcagcccggaggccgtagaaaaaatggccgccagataccgacgtgatgccggtctgcactggtcagcaacgctggccgagattgagcgggtaaagcggctgtatcagacgggaatccgggcatccagggaggaagagggctaa

SEQ ID NO: 380627 - DNA, 204 bp, Salmonella enterica
atgtcacaagtatcatacaacacaccgggaaccgtcgccagtgctccgcagaaaccggtaagacttcccacgataagggatgtaatgtattcctcaattgatgattatgaagcactgctggaacaaaaaccgcattttgctgacgggttaacaggactgttaagtacactggtagcccacgaatgccggtccataggtttctga

SEQ ID NO: 380628 - DNA, 255 bp, Salmonella enterica
atgcagcctcaggacgaaaagcccagtgctcatgaggtggcccggttcattgctgaaggagacaagcgcccttcaaagggcagggcgatatcccgaacctatcgtctgaatcaggtttttattgatgtaatggaagctgatgctcagcgtatgggacaggggaatacagatatactgaaagcagccctgacagcctggaacagtatggatgataacaccaagtatcactggttactgcaatcaaacaaaatgtaa

SEQ ID NO: 380629 - DNA, 663 bp, Salmonella enterica
atgggtaagtcagtaatatatgcctctgataaaggtggtgtgggaaaaacaacgacggtgactaacacagcatcggcactggtaaataaaagcaaatcagtagccatcctgaaaacggacaaaaacccggatgtactcaactggaacagacgccgccaggaaaatggtctgcctccggtccctgtctacgaagcctatggcgacatcagtaaggaaattaagcgactcacagcactgcatgaaacggtattagttgactgtgccggtcatgacagtcaggagttccgaagcgcactgacagtggccgatgtgctggtcacgctggttaaaccctcatcagcttttgaacgcgatacgcttacagacgtcacagaaaaagtccgtaaagcacagcgagtcaatccttcattacagccctgggttcttttcacgcgtattgaaaacaacaaggcaacaaaagtccgtgatgcaatagatctggacaaatttttacgttcagatccggtctggattcagccattaaaaacccgcattgcgtcactcgatattttcgaaagcgcatgtaatgaaggcgcaggagtgcatgatgtcgccaggggaagtaagctgggtgaagcgaaaggtcagattgagctgtacgcagcagaaataggaatactgtag

SEQ ID NO: 380630 - DNA, 690 bp, Salmonella enterica
atgccgaaatacctgctgtctccggaagtggccgttctgctgtcttactttgacaatcagcatcagcgaatgtatttcgacacactatggaacaccggagcccgtcccggcgaagcccgcgccatgaggccgattgattttgagctggagccctcccgccattcaccacagccgctggccgtggtgaaaacactgaaacaacgcgatcgggaagcccgccgtgggcgcggacgcccgtctacaaaaccggagccaccacatcccgatccgcgctaccgtaaaccaccggaacccgtcacccggattgtaccgctgctcgatgccgcctatgtccggagaatgcgggagtacctcgcaacctggagaaagcgcatcaagcatcagcctgtctggaatatcagttcccgtcagacagcagttaactggctggatcacgcgctgaaccgggcagcgagtgacggcgtaacatttccgatccctgtcacacctcatactttcagacacagttttgcaatgcaccttttaatgtccggcgtaccggagaaggtactccagtcattgctcggacatcgctacgcccgcagcacggagacttatacgagggttttcgcgctcgatgtgctgaccactcattcactgacatttaccatcgattcagacgttgccagaaaactgcttgacggtaagtaa

SEQ ID NO: 380631 - DNA, 255 bp, Salmonella enterica
atgactggtaacggcattaatactgtacggataaataatgaagtgaaacacatcactgagctagatcctgtgacactttctcttgaatgggcgaaactgaaaaacgaaaacaacgagctatatcgcagcataaaagaggccaattctggatggcgtgggtttattcttcgattgataggcgttcatctacctgatgggaaaacaattagcattcatggcataaatgccaaaggcggatctatctatccagaataa

SEQ ID NO: 380632 - DNA, 207 bp, Salmonella enterica
atgataagttcatggttttaccggaaattacttaaaaaatctgaaagtgaaggtttcgctacttttttcatcagcatggtgaaagaagtagaaactgaatacccttatgctcagatgcacgtgaatatctttgtgctttaccgattattcaaaaaagcgcgagatcaaaaactgtgtcagccttcctggtctaacgaccatcattga

SEQ ID NO: 380633 - DNA, 429 bp, Salmonella enterica
atgataaaaatagatattccggacctgaaaacacaaaaagatatcgtgcgcaaagaggctgtacgccaggcttgcgcacaactgaaaaacaatcttcaggctaagcacattcccggaccgactggctttaattaccgtcagttcgatctggctcacctgaaaacagaaaatgagggatggacacctccggcaactgaggtagttaatgcctggtttgaacactttaaaacttcattcccggaatacaagtctgacaaaaagttagggatattactcggattaacaggaaatactgaccgccgtataagatccttcagaaatggtgaacgtccggttccttatggggtatggagacgttttttgattataacaggaagagtttcacaggaaattatccctgttatcgctcacattgatgatgatgtgtaa

SEQ ID NO: 380634 - DNA, 288 bp, Salmonella enterica
atgaagctgtcagatgtcgcgaccatccggacgaattttcaggaagcagatttctggattactcgccggggctctttaaaaacctgtggcaaaccaacccgccagtacaatccagaacacatagggataaaggttgaaagaacagacctgctgttacctgactaccttttcgtgtgttttgaatggcttcactcacaaggtgtctgggaaccgttagccactggtacactggagctggtcaacatcagggtttcagacgtaagatctatcgtgctgaatccacgctga

SEQ ID NO: 380635 - DNA, 492 bp, Salmonella enterica
atgaaatggtatgttcttcagtttaccgctacacggtttcagacagtttttaagcatcttgaaaatatgggcgtgcaattttattgccctatggatgtatccaaacattaccggcgtcctgataatcagatcggtttcagaaaaagacctgtacctttattccccggttatttgtttgtgaatgttgattttggttctatccattccactaaaattacggcgctgccgtggactcaacggtttatctcatttggtggggaacccgttccgatcagtgaagaagatttaacaaatgtgcttgtttttgagaaagggcgtggcaagtcaccatcgtcagaacaggcacctgaagatattgttaaatctattcctcatgaactggcggttgtgctcctggaagataatccagaaaaacgaagcatgttgcttctacgttatctggatgagcgattctgttcgtcagtggaaaaaaccgagagtcttagcgcttag

SEQ ID NO: 380636 - DNA, 456 bp, Salmonella enterica
atgagtgaagataaagatggggtgccgcagtggtatctaatcaagcatgaaagaggggaaagcaataaagagcttcttatgcagtggctgtcgctcagggagatagagtgctgggcaccagtgatgatccgcaaaactcctcgtgcagataatatcgttggattccgtagacgaagtgtacctgtatttcctgggtatatttttgtttatgtaacaatgaataaagatgttcaaaaatatataatgtcgagttctgctttccatcatattatttctgccggaaaagctttattgccagttaaggctgatgtggttgaacggctgaaaagaattttccctgaaactggaattaaagaagatgttaataaaaaagataaagaaactctggtttatctgaataatgaaaagaacaatgtcatgcgtgaagcatggctgatgaaacaaatactttcttaa

SEQ ID NO: 380637 - DNA, 252 bp, Salmonella enterica
atgacaacgtcaacattaaagaaaatggtttcgggaaggaagagtaattcatcacgtcgaggtagggtattatatattccagaagataaatataaagagcatgatgatttagtatgggaagtgtgtcagaaggtagggactgttgtcgctcgttctgccgttttacatggcgttattgatattgttcttcatactccagaattgaaagagcaggttatcaatgaaatcgttaaacgggaaaaatcattctga

SEQ ID NO: 380638 - DNA, 699 bp, Salmonella enterica
atgtcggttatgactaccggttcgtttcttgcgctggcgatacagtgtgcgccgaacgtacatccggatacgtctttggatgtcgtaagagttgaatcagggatgaatccttatgctattgctgaaataattcccaggtcagaacgtaaacccggacaacgtggatttattagctacttaccaaagagtaaacaggaggcactgaagatagtcagtgagatagaaaaaagaaaacatcgttattctgtagggttaatgcaaataactagtacaaattttaaaaaactcaatgtgacagcagatgatttattttctccatgtgaaaatctgaaggcatatgaaaaaataatcacagattgctggttacggggaggaacactaaaaagagccctcagttgttattattccggaaatttttcaacagggcaggagtctgaacctgaactggataataccagctatgtgcaacgtattggctatgcacctccagacaaaaaatatgttgttcctggtactaaagatgatcagcatcaggggaactctcttcctgtacagacttacgaaagacaacctccttcgtttgaaagttgggatgtgctgcgggaatacccgcttcccccgtcaggaacgcttccgccaactccacaatctgaaaaaataaaggatgatgtaaatgaacaagctgatggctctgtttaa

SEQ ID NO: 380639 - DNA, 354 bp, Salmonella enterica
atgaacaagctgatggctctgtttaaaaataaaaaaatcacagctacacagtaccttactgcctactatgctctgattcttatttttactcctgcttatgcaaatgcagcctggtatgacccaattttaaatactctaaatgatttgaaaacattcattatcattgccggaggtacaattgcggttgcctctcttgcatatatggggattgcctgggttgcttctcgtatatcaggaaatatggaaacaacagctatggattattttaaacatgcgatggttcttgctgtagtcggtggggccgtatctctggctacctgggcttatagtttatttggagggtctgtcagttga

SEQ ID NO: 380640 - DNA, 372 bp, Salmonella enterica
atggagcaggaaagcgaaatcctcaaatttgaaacctataaagcgatgagtcgggttcccaattttgccggagttcctgtttttgctttgttgtttctttccattggaggagtgattggtacattcctttctgtgtatttctggggatggtggggacttcttgtcgcattaccttttgttctgattattctcggattacgaattatatgtgaacgtgatgataaggcgttccggcgtcttcgtttcattcttcgtcgtcgaaaaatgaaccgtaaatatggtcgacatcttcttattaccccccgaaatcctcgctggagagaaagatatgcaagacgagttatcaagaaacgtattctcgccggagagtaa

SEQ ID NO: 380641 - DNA, 2493 bp, Salmonella enterica
atgcaagacgagttatcaagaaacgtattctcgccggagagtaatgcaaaggttccctggttgggacatcacgtacatcctgaaatctgtactcttggttcgtctcatttactggcgttggttcgttttacgggcgttccgcatgatacgcgtgatcaggcaaccctgaataatgaattcagtcatcaggctcgttgtttcagggcaatggggaagaaagaaggcagtaatctgaaactacagacttatatattcaaaaagcgtattcaccttgatcataaataccaggtggaatcattagttcttcaggaactggttgacacctatgttaaaccattccagaacggtactttccgtcaggtcggctatgcgatggcgttgatcctcaagtatcgtgatcttgaccagggcattgcgaacatgatggatttgctgtcactttgtcgtgaaatgatgagtgattttgggcctaccgtcatgagcatggaagaacgtaatggcagactctattcccaaattgggcgattctactcatttatttttaacggcgttgatgttgacgtacctgtcaccgatacccctcttggtgacgccattatcgaaagcgaaacagcttttggtgcatatgactatgttgaaaaccgtccttacagcggccaacggcgttttgcatccacatatgatttacgcgattacccggaagaatcatatcccggaatgtgggatgaggcgcttgaagagccttatgatttctgtctggtgcagagtttcctctttgaggacagaaaccgtattaaacgtcgtctcagggttcagatggccgatctggcatccacggaaggccagtccagcgatactgaagatttggccgatagcgtacaggaagtgacacaagggaaaagaatatttggtgaatacaatgccagtcttatcgtttttggcgatacgcctgaaaaagcggttgagcatggtgccaaaatgcagtccctgatgatgtcaaaagatactggttttgtacgttcaacgagtaccaattatgtttcctggctgacgctctttccgggatatggtgatgttatttactcgatgccgaaatccacggataacctggcgtgcggtttttctctgcacgccacaccatccggcaaagctaccggaaatcctcctggtgatggctcggcgctgatgccaatgatgaccgagaacggaggcctgttcttcctgaactctcatgtcagtccgttggggcagttcaacacgggtcagccgctccccggccataaaaccacgattgccatgaccggtgcagggaaaaccactgttgaagcgatggaactgctgtttttcagtcgctggaatcccatgattttcactattgattacaacaactcactggaacacatattagtagcgcttaaaactcaatactttaacgtcagggtcggggcttttaccggaatacagccttttcagtggccggattctgaggagttacgtatctttctgttttccactgtggttcagtgtgcgggcggtgcagacagccatgaagaaactgtaatacagaaggctatcagcagtgtgatgaaccatcacaatgtagaggcccggtgtttttcactgcttcttcacgctatacccgatacaggtccgacagggttacgcgcgagactgactaaatggtgccgggatgtgcagggggctcggggtcattacgcctgggtactggattcgcctcgtaacatgtttgatcccggaaaaagtcgcaggctggggtttgattgttctcagttactgactaaggaatttgctaatcaaaatccggctgtggttgaagttctgctgaactctttcttctacatgaagcgctggatgcagaaagcagaaccgggatcattgatgattaacacggttgctgaattctgggccgctcttatgtttgagagtacgtcggaggccattatggaaatccttcatgcggggcgtactcgtggtgagatgttaatgatggatacacaggttccggaatatgttctcgaacacccgaaaggtccctctgttcttcagcagactatcacgcaggaatggatggcaaatgaaaaggcgagagaaaagtatgacagttatcgtcagtttggcgtatcgagggctgaatttgagaaaataattgaatttggcattcatagtcgcaaggtgctggttaagcaggctggaggtgctgttgtagttaaaatggatcttggtggaaaaatgaaatactggctaccgctgctttcgtcaagtgcgaaaaatatccctgtggcccggaaaatacgtgaatcgctggggagtgatgatcctgatgtatgggtgaaaccgtacctggatgaaatgtttgctatggatgtgcgctcggagattcgtaaggaccatcctgaactcgatgtagacgaccccgcagtatggcactcactttttgaggcgagaaaaagggaattgggcttgtcagcctga

SEQ ID NO: 380642 - DNA, 1077 bp, Salmonella enterica
atgttatggcaaccagaacgaccctttaaccagcttccgcttttacctcctgaactctctcaaatagagacgcgagcagtgctaaaagcctgcattgaggccagatcagctcttgctgaactgaaaacagccgggcagttgcttccagatcagggattactggttaacattcttccaatgctggaagcgaaagactcttctcgtattgagaatattgtgacaaccagcgatcagctgttccagtatgcggaccgtgcagaactggctgacccggcaactaaagaagcgttgcgttaccgtacagcgatgtatgaaggggtaaaacatatcgagaaatatccattatgtacttctacagctactgttatctgtaccacgctacgcggtgttgatactgatgtgcgtaaaactcccggaacggtactacgagatcaacatatgaatgtggtttatacgcctcctgaaggcgaagaggttatccgtggcttgctgactaactgggaaacttttattcatgctcaggatgatatagacccacttgtgaaaatggcagttgcacattaccagtttgagtgtattcacccattcccggacggcaatgggcgtaccgggcgcattttgaatattctctatctgatccagagtgaattgctgtcattaccaatactttatctttcacgctttattctggaacgacgtgctgactattacgcgttattgcgtgatgttacagtgaggcaggcatgggaagagtgggtattatttatgttggagggtgtcgcatcaacagcaacctggacgactcaaaagatcgcgcaggtaagagcattgatgaacagtacggctgactatgtgcgtaaagagctaccaaaaatatattcctgggaattgattcaggtgctttttatgcagccttactgtcgtattgaaaatgttgtgggagccgggctggcacgccgccagactgcatctgtttatctgaaacagcttgtcagtgttggtgttcttgaagagatggtttctggccgggaaaaactctatatcaatacccggttgctgaatgaactgaacgcataa

SEQ ID NO: 380643 - DNA, 678 bp, Salmonella enterica
atgaacagtaaaaaacatcttgcagccagtattgcactggttatgtctgtctctttgtgtcagcccgcattttctgctggcgtaccaacagtcagcgtggctgaactggctcagttggtacagaacgctcaacaacaggcacagcaggcgctggcgcagttggaaaaggcgaaagaagctattcagcaggcgaaaagccagtatgagcactacaagtctattatggaggggaatgacaaattaggctcattcctgaacgatccgtatgttaatcaactccttcccgcccgtgactggcaggatatttataatcagactcaggatttgacggacttacgtaagcggtatggtgtaagtggttatgaacctgaagtgcagaaggtttttgataagttgctccggcaggctggcgttctggaggaacaatataaggctacaaatatacgtaagaaaaacgctgaaaccttgcgaaacaaactgaatgaggtccagaccccggcagaacgtgagcaactggtacttcgttatcagcaggaacaattggaactggcgaaccaacagacgcagcttcagaacacgcgttacttgatggagcagcaggagaagctggaacagaagaaaaaagaacagaattttgtggactatatgttaggtaaaagtaaggttcgtccagagtaa

SEQ ID NO: 380644 - DNA, 399 bp, Salmonella enterica
atgaaaagaatattgttttttttaatggttattactgctgtttttatatctggatgtaaggataaaggaactgggtttattggaacttggaatgaggttactaaagagcaatacccgtcaactgttgttgttaattacgatgatggtgtatatcatgtagatgtaaaatatcttgataagaaacttgaagataaaaaaagagcacaggcttttgaggattatatgttggggaaaacgaaagagtccccttcaaatttaatggatcttagtgactgttatagtgtgagagctcttgaggctaaggcattaaatgatacgaccttacaaggagatggcttcactatgagaatagaaaatggaaatcttaaatacaacggtaagacttttgtgaaaaaatag

SEQ ID NO: 380645 - DNA, 945 bp, Salmonella enterica
atggctattgaggttgcacaacccgtatttaatgccataaacaccgccacacaatcccagatggcaagcatgaatacagtaatgtcggttattggaattgttattggcggtttctggattgtttatattcagatgaaatctctatattggtattttgacgggcttacggttattttcaaagatatattatttacaatattaaaagctagtataatactttatatggcattgtctgtttcatggtacaatagtacagttattccggttgttacagactttcctgtttggttaggtaatactatttctggaaccactcataactcaggcaacttagtggatggtttgattaatgcttattatgatgggtttattgctctagttaattccattaagtttagtatatgggatgctgctggtaatacaatatttattgcagtgtgttccgttttattctatgttcttggtggtctcccatttcttggtgttgcgattggtactctcattactctaaaagcagctacggcgattatattaatcttggggcctatatttattgggtttcttttatttcctcagacaagccaatatttctggggctgggttggaactattggtggttttatgttgacgcaggtgctttttgctgtagtgctagggctcgaaatatcatatataaataattttataataaaggacggagttataaatacagatttaattggttgtttatgtattcttttgtactttggggcatttaccatgcttgctacagaattacctggctatgctgcttcaatcatgagtggcgctcctagtggaggtgtcggtggcgtgggcggccttatcggtaaaacgactggtgtaggtgccgcaagaaatatgagccgtacattaggtagaactttggttaacaggtttaataaaaatcgcttagggccggggtga

SEQ ID NO: 380646 - DNA, 852 bp, Salmonella enterica
atgttatttggtaaaggaaagaaaaaaatagatgaagaacgccagttacattatggtgatggaaaactggagaaaaagaatagcgaagtaatacaggacatccgggcttatacaatggccgctcgttggttcgaaaaacgtgtggctgaagactaccgaaaaaaagccaggaacagccgtaggctgtctatatttttcggtattttggcttttgcatctgttattgctgttatggggcttacaccattaaaaacggtggagacaactattatccgtgttgaccggaatagtggttatatggatgtgattcgtccaggatggaaaaaagaagatacgaaagaggttgcggatgacaaacattatatttcgatgtatatactggcgcgtgaaagatataactgggccagtcagaaagcaaattttgctattgtccagcaactttcttatccagatgtttttaatgagtacaaaaatttccaactttccagtaaaggatatgtagctacgttaggctcatcccgtcaagtggatgtatcgattgactcaattgtgcctttacctgtcagccatgaaaagaaattgggtgaacgcgacgatataaaaacgtatcaggtacgtttttcacaatcgctacttgatgcagaaggcaaaccagtttccgatattggtcagcagttgaagcttgatgccgatggtaaacctattgcagaaccaaagcgtgtttactggacggcgataatttcttttgactacagaaatgcaccgttaaccgaaggggccggatgggttaatccgaagggattcggtgtacttgcatatagcaaaacacaggaaatccgggaggggcgatga

SEQ ID NO: 380647 - DNA, 816 bp, Salmonella enterica
atgaccacttttcgcaagggatttttggcattaagccttatggccaccttgttaccgaacgccagcgctgaaatcgcaggaaagggatctgcgcatgatgggagaatccagacagctacttacagcccggataacgtttttcgtatctacgcaatgaaagatcgcgtgacgatgatacgtctggaggacggcgaaactattgatagcgatgatggagctatgaatgttggtaagcctggagatccaaaaaatcgtgaatggattttgggcgctaacaagagagggagtgtgatcatgattaagcccagccgctatgcggaggagccagaaacaaacatgatcatcaatactaatcgtcgcacttatttaatagaactgaagttggctaaatcgctggcctccatgacatacatgctgcgtttcgattaccccaaacctgcacctgtgggagaaacaccattcaaaggacgtgatcttaacgttaacccttgcgatgggaaaattaacactcagtaccagcgacgcggtgatatagcgatttcgccatatcaggtatgggataacggtacttttacctgtttccggtttccgacgaacgccccgcgtccggttatttatgaagtgttaccagacggcactgaaagcatggtcaacatgagaacagtaaatgatattacggttgttcatggagtcagtcaggaatttcgtcttcgcctgaataagttggtaatggctgttcgttctaaggtgccaaataccggctggtataactataacggcaccaccacgggtgagattcgggaggtgaaaaagtga

SEQ ID NO: 380648 - DNA, 1341 bp, Salmonella enterica
gtgaatcaggatgaacaattatcaccagaccagaagaaggatagttctcctgtaacatcgtcagagtcccggagcgggaataagaatgtaggtcagggggctttttctttaaaaccggcgagtcgaaagaagccgattgactggaaaattgttggcgtaattgccggagggatcattattacgcttctgatcatcatctcgtttgcggcagcggtgatcaaaagcaatgcgagaccggaacctgaaattgatgagtcaaaagtcaatgctgaagcagttacgcaggtcaaccggacgcctgaagatgtgatgggcgcatttatggagaagaaccggcactcgatcagtgattcttctgcgggaaagaaaacagatgacaatcagaaggatactccccaagcgaaagataccacagaaacggccatcaaaactaagccagcagaagatgcagaatattatgataaaactccgccagtacgggaggaggaagatatgttttctcctgtcacgcgctttgactcggcaggtataagtcagggggttggaggtagttcgtcaggccgttcttcttctgatactgaagaacgtctccgtgcatttgctaatgcagatccagacgaactggtgaaacaagcgctcgcaaatcagggaggaggagacgacaacggtttgtctggaggctccagtggtcgtggttctgtgcgggcgttattgggcagttcaggtgaatacgcaatgacaagggctcgtcgctcccctgatcgtaagtttctactgaagcgtcagacccggttccagtgtgtcctgtacaatcgcgtcaaaacggattatccgggatttgtcagttgttatctgttacgaccgttgtactcatctgatggtagtgtaatcctggctgaagctggggctgaattgacgggggagcagacggtagaagttaaggctggtcagagtagtgttttcacttcctggagtgaacttgaaaccgcgccggatgggattcgtgcttcattgagtgggctgggaacagatcctatgggtagtagtgggactgaagcgtatatagataaccattacgggaaaaaatttggcggtgcggtgatgctttcctttattcaggatgcgttaggttctgtttcaaatctgacaaaaaggaattctgggaatggatacacggtagaaaactcagaacagaatgcggaagatatggcaagtaaagcgcttgaaaatagcataaatatcccgccaacgggatatgtattaccaggaacagttattaccgtgatagtggctcaggatattgatttctccagcgtctataaaaccagaacctctcgttaa

SEQ ID NO: 380649 - DNA, 213 bp, Salmonella enterica
atgaaactaatggatgtagtcagcaattttattgaacgtattcctcgccgtcttatctgggcgctgggaatgttttcggtcgcattaataataactttttttaaaccagataccccggctcctgtgagtgagcagaaaacagaatgcagagatatttctcgccatcaaggggaattacccgaatcttgtattgaaaacctgaaggagaagtga

SEQ ID NO: 380650 - DNA, 1068 bp, Salmonella enterica
gtgagtgattttgcatatggcgacgtttctggttcgcttcgcgaagacgaactgacattgggttatctggaacaatcgggggtaacagaaaggctaaagcggaaaggggttacagaagtggctattaatcgtccctttgagatctggattgaaacctcagcggatggatggttgcgtgaagaagctccctggttgacgttggacatgtgtgaacacctggcttctacactggcggtatacaaccacagagagttatcccctcagtcaccgattaaaacggtggagttaccagaaggtgagcgtggtcagttggttattccccctgcatgtgaacgtggaaccgtttctatgacattccgtaagccatcgttgcaacgattcactttggatgactatgtatccagtggtcgtttcggaaaggcgaatcgaactgtgaataggcagaaggaattattcgactggcaaaaagaaatgaaacggctgattgctgcacgtgaattcattgagtttttccggctggctgtacagcacaaacttaatattatcattttcggtggcactggctcaggtaaaacgacctttgctaaagctgtggtggatgtttaccccagaaataaaagattactgacgattgaagagctgaatgagatgaagcttccttatcacctgaaccatgtacatcttctttacggagattacgtcactccgaaagatctggtgtcgtgctgtatgcgtatgaaaggtgatcatattttgctggcagaacttaccggggatgaagcgtgggattttatggagctactgaatacggggcatccgggcacgattacaacagcacacgctaacggcagtcttcatggttatgcccgtattgccgggctcattaagcaatctgctgtcggggccgggctcgacttcagctatatcgacaggcgggtacgtacttcttttgatgtggtgatgtacatggagcataccgagatcctcgatgtcacctatgaacctgaagttcagttggcgctcttgaatggcgccagtatcgaaagcgcactctcatgcgttcgttga

SEQ ID NO: 380651 - DNA, 366 bp, Salmonella enterica
atggaaaaactaaagctgttagtcgtcattctcgttctgtgctgtgtattttttattatcggcctgtacgcaggaggctggatgtggcttacgttgtctggcgtacacgacagatcaccgtcactatttactctgataaatcagggagggatcacatcactgactgaccgctccagaatgttgttgccctgggcgtgggtcgtcacagttcttattacgtttttcccggctggagtatcgctttttgctcttactgttgggcgtgacggcaatcgaaaagatttacatggtaatgctcgttttgccaaccggcgcgagttacgccgtatgtggtataccgggcctgaacaggaggataaatactga

SEQ ID NO: 380652 - DNA, 1620 bp, Salmonella enterica
atgggacaaaaaattccgaaaggttgggtaatagagaatgggcgctgtattcagaagaaaataaccagttatcctcctataatctttggaaaagatccgtacagtaataatttcctggcatcttatgggcagacttacctgatacttgctgcgcctccggcaagtggcaaaggtgtcagcatagttgtacctaatctgcttacgtatccgcattcggttgtcgtcaacgacaccaaattcgaaaacttttatttgacggcgggatttcgtaaagcctgcggtcagaaggtatttcgtttttctccggaacgactggaaacgcaccactggaacccattgaaggtgattaacaaagaccctttattccgtctcggtgatacgcggacccttacatcctcgttatatgtaccggacaacatgaagaacgctagttggttttcgaaagctggggatgtggtaacggccattattttgtatctcatagagacgccgtctttgccgttaagcttgccccaagtatatgagattgcagcacagggaacccgtcttggcgaatgggctcagcgagtggttgatgagcggcacggcagacccgatgaattatcttctgaaactgtacgtgagctgggggtgatcatatctgaatcgaaaggcaaagagttttccacgctcatgtcctttgtcactggccgcttgagtgtatacggtgaaaaattggtagcgctggcattaacggaaagcgaaaacgaagaagaaaatatagatttcagcagattacgtgttgaaccaaccagtatctatttttgcgtaaccgaaggtgcgctaaagaaatttggtcctctgatgaatctattcttttctcaggctatccgtgaaaacagtaaagttcttccggaacagggggggaactgcgaggatggatcgctacggctgaaatatcaggtactattcctggaagatgagttcgcggttatgggacgtattgaagtaatggaaactgcaccggcactgacgcgaggcgcaggcttacgttatatcatcatcttccagaacgaaagtcagatttgctcagataattgttacggtcctgaaggtggtaaagcagtaatggagccatttcatattaaagttgcatttgcacctggtgatatagatacggcaaaaaaatacagtgaacggctgggaaatacgacgattaaagttgcctcaaccaacacgaacgtatctgaaggacagcgacgttctcgtgggcgaggtttttcattacaggcaagaccactgatgctcccacaggaaattaatgaattaccgtataaggaagaactggtttttattcagcctacaaaaaataacccgacaatgaatatgagagtagaaaagattttttggtataaggaaccaatatttaaagaaagggtggatgaaaaaaaatacccactacctgatattcctgaaggtgatacttcaaaaattgaagggcttgttgttccagtcagacccccggtgaagaaaaatgtatccatatcatcacctgaaggtgatgaccttaacgcggaacagaaacgccgtattatggctcctggtgtggaatcagaacaagatgtttatgaggatgaataa

SEQ ID NO: 380653 - DNA, 312 bp, Salmonella enterica
atgaaattttattttgttgctgtggtgatgcttttctttgttgtgaattcggcatatgcagaaaaaaataaagttgatccaaatgacccttgcgatgtttatttttgtatggcaggtatggtttatggtaataaatctgaatgtcaaccagctataaagaaattctttagtatacaatcattcaaaaaacatcaccgttttaatccctcgaaaacttttagagagagaagtaaatttctggggcagtgttcgaccgccgatcccgctcatgtcagtaaaattatgagtaaatttggcaggatgaagggctag

SEQ ID NO: 380654 - DNA, 993 bp, Salmonella enterica
atgtacagaaaaagactgatacttgccggggttcttgcgaatatccttacaggatgtagttctccgccaaaattaacggaacctgaaggacagtgggtcgattttgacacgtcaggggcgattgtcggtacagttgcaacgtcttctccggcttgccttaattgctggcaggaaatacaggcaccgataccaaaagagagtgctgtagcaaaacggatatccgtaacatccactttgctctcatcaccatctccggccataaccactgcgccagtagttaaaataaaagagcatacagaaagtaaaccggatatgaagagttttgtcagcaaggacggtgagaaagtaccactgtataaagcattacgtgaaataattcctgctgaatggaaggtaaatttgtcacctccggttgttgaaaaatttactcataatgtctcatggaagggaaatgaccaatggccgtatgtattaagaaagatgcttacagcctacggattaaaggccgagataaacgacaagaaagctgaaattgttattctgtatgcacagaaagcaagcgttccggtcaaatctgtaacgctatcggctaaaccacagataacacgactaccggaaaccagggttctgaaaccccctgtagtgccggttgtaacacaaggtatcttgcctcctgttaagaaaaatgtaccgataattaaacctgctcctgtgtcggtgctaaaagtctggactttggataaagggacaacactacagaaaggatttaattcctgggtcgaaaaagaaacttgtccgaccgcgaagaaaaaatggacggttaaatgggataccgatactgattatccgattgacgaacctctgacattccgtgtcagaaacttcgaagaagcgactgatcagctcttcaatctttatcggaaggcgcaggttccattgtatgcagatggctacaggaatcagtgtctgattataattaatgagggaaaataa

SEQ ID NO: 380655 - DNA, 1704 bp, Salmonella enterica
atgaacaaaaaaattatagcgtcagctattgctgttggtgcgttattgcttttgtcgcttccaggatgcactattcaacgaatgaatgaagtgaaaaagagtgctgaagatactggggtcaaagcatcttcattaattcaacaaatgggggataaccaccctgtagtccggtttacaaatagccagtacataaatacgtctcctttgccaaagcctaagtatgatgcgccgcgacaggtggtgaattgcaatattcaatatttaaccgtcaaaccccaggatatatttgaattaagtcaggatctcagtgaacagtgccatattcgctttcgcgtatctcccgatgcttctgcatatctgggttctgttggtactggcggtggtgtgacacagcgtctgactgatgttccgtctccggtaattaacagtggcgaaatgaagccgctggcgatgtttggtgctcaggcaaataataatgcggctccggctacagttgctaccaggaagattacggatatcaggtactctggctctctggggcgtttcctcgatctcgttactggaaggcttggtatttcatggaagtatgagaacggggaggtgattttttactacctggaaacgaagcgctttgatattcagccagcagatgcttcctacaaactaacagggacagtcaccagtgggttatcgagcgctactggcacggacagcagtaactctggtggtggctcagattctggtgtgtccgggtccggtggatcaacaatgtcctcaaccgttggtatggggaacgacctctataaggatttaaaaaccaccgtcgagagcatgttaactccgggtgttggccgcctgagtcttaactcgacgacgggaacgatgatggtgacggatgtaccggaagtcgttcgtcaggttggcgagtatatagaagatgaaaacagtacgctcagtaagcaggtaattctcaaggttgtgacatataccgttaacacggataccagcgatcttgttggaatcgactggaatcttgtctggaaatcccttagcggcaaatacggtattaagctggcgaatagcagccgtaccggttcagatgatgcaattaccggtgggtttagtgtccttgatacggctgaaggggctgcaaaacagtttgccgggacgtcattcctgctggatgcactttcacagcaggttcgggtagcagatgtcaaaaccaacacggttatgacaacaaatatggctgcggcacctgtgctggtaggccagcagactacatatctgaaaagttctgaatcgacaccttacgtttcaggaaattcaaccgttacgactcagaccctcacgccgggcagtgtaacgacaggtacaaacatcacgatcttcccgaaaatcctcaagaactctgatcgcctgatgttaaatatgttcatggatatatcttcactcaagaatatgcgtgttattacctcagatacgcagaaacttgaggctcctaacgttgatactcgctcattacagcaacgtatatggctgaaaccgggtcagacgattgtgatgtccggatttgagcaaaatacggataattcgacccgtaagggcgtcggtgagccggaaaatattgcgtttggcggttcattatccggagctaaaaccaagcaaacctttgttattacggtgacgccttatgttcgctaa

SEQ ID NO: 380656 - DNA, 1389 bp, Salmonella enterica
atgttcgctaaaaagaagtttcgactcagaacggaaaaagtgaagtctacggaaaatagtgatgctgacgccgcaatccgaatcctgaagattcacggttatcgttttgtggttgggctcaaatgggagctgatcaaggcccagcgcaacattatgaaggaagttcgccggataggacggattcgcaatctcgacgttgttgcgctcaggcaggcagaggcaatacaggctggatttgcaccaaaaacccgtcagaaacttaggggaacttactcattgattgtcgctctgtcctcactgatggatggtgcctgcattgcagtgatcccgctcggtaaaaattctcacgggaaggctgaattcacgttgctgggacgtacagcaaaaggaactatccaccctggttctgaccgtatccttagtcacgacgaaataggccaggctgttgttgacctgcgtcaggatatggccggaaaccgtcaggacgtcattccggtatatggtgatcctgatatcggtagttgggtgacagatgttctggatctggacgccatacttactcctggcaatatccgcaaagattttcgattgcggccgctgcgctggggaatgactcgaacacagttactttggtttgtcagtgcgctcttcgttttacttctggtgttgattttttacctcaaatggctcaatgagcaggaacagcagcgggccattgccatacaagtgaagatacagcaacaggaagaggttaatcgtaaagcgagatacaaggccgcgctcgataaactgcgccatccgtggataaacacatcatccgtacaggattttcttaccggatgtgaagtagcgcttaaacggctacgcctgtccattgagggctgggagctttctggaatgaagtgtgaccagagcgggatgagtgcgagctacaaccgacctaataactccgttgctactgctgaaaagtttgtggaggctgtgcgaaaaatttacggcatagagccggaggtcaacttcaaaagcacatcggtatctgtattcactctcccgcacacgttgccgcccaacggcgatgatccgatgaacaatatgggtgagcaactggtaaaggttatctcactgttccagagcgtgaatattcaggcgtcattcagtgcagtgcctgttaatgacgtgaagaaaaacgagcagggagaagatatgccattacaggactggcaggaatataccttcagcgtggatacagccgttccgccacaactggtattcaggaacgacgaattcaccggggtacgcatcaataacattatttatgaaattggtcaggcgggggagctggcctacaaaattacggggacggtctatggcgaatacaaacgcaaataa

SEQ ID NO: 380657 - DNA, 459 bp, Salmonella enterica
atggcgaatacaaacgcaaataaatatttgggggcaggcttaggcttgttgttactttccttttgttttatggccggggcagaagatttgaccggaaccgcctgggatctggataccctgcaaaaacagcgggttctctatgaagctcaggcggcggtcaaaaaagcacaggcagaggctgaaggtgtggggggaagtatcagcacaggtacgctctcatcgtcgaccggcgaggccggttcgggtatgcgaaataccgtgcctgccacaccagacataacgccgcaactggtgaaaatcaacgggcgaaacgcggtgatcagtatgcctggcggtaaaaccgtaacggttaactccggacagatgctgcctggcggacgctggcaaatagtaagtgtcagcctcaatggggtgaaggtgcgcaatatctccacccgacgtgaagagatactgaactga

SEQ ID NO: 380658 - DNA, 1563 bp, Salmonella enterica
atgagcgaaaacagtcagaatgaaagacctggcagtgttgaaagccggttttctgaacgtacccacagttgcattaacctccgtcagttattgaaggaggaaagtattgtcgctgatatccaggatagtgtcctgttgttgaaaaacacggaagacagcacctgccagtttctggtgctggataaactgaatcaaacgcctctttatctggagttaattgcaaagcttcggcagagcgggcatcgtcctgaagttatttgggtcaacaacgaagaaatggctcaggtagcatggaagtttgatgccggacaagaagatgagcagcctgaagacgaggccagtctgcaaggcaaggtgaaagatcttctcgcccgtgctgtcgctgtcggcgcgtcagatatgcacttatatgtcagcgaccactatttccgtgtctggtttcgtgttgatggtatacgccgtccgttccatgaatttgatgattcagcgagtaacggcaggcgtctgattcagtcgatgtttaataccatgtgtgcaggtcagagtaccaacacattgagctatacacagtctgctgatgcccgtttccgcgaagagttcgtaacagaatttggcctcagtaccgcgcgagtagccactcgtcctggtggcgataaccggattctggtagtggtgcgccttatcagcaaacgcaaggagtcgcttgcgcttgattcgttaggtatgacgccacaacagatagcgtcagtccggcgtgcggcaagaaagatcaccggcattattgtcgctaacggacctaccgggcatggtaagtccacgctgttacagtgtcttgccgaaatgactctcagagacgaccccggtatacaccttattaccgtggaagatcccgtagaatctccgatttttggagctattcaaactcctttaatggaggagtggcctgaagcgattcgaaatctactgcgtcttgacccggataccatttattacggagaggcgcgtgatgccgagtctgtttatggtgtgattgaagccgcgcagaccgggcatgaagtgttgactacaacacatacgacctggcccattgatgtgcttcagcgctggaaacgctttggtgttgatgagagctatctgacagaccccacgctgatcacctgtcttgtgggaattcgactgacgccgttgttgtgcccggagtgcaaacagccgtattccgggcatcgtgccagtattgagccggagatcgaggaaattattaccaggtacacccgaccggaagggctattcagtcgcaatccggcagggtgcccggcgtgcaaatttacggggtttcgtggacgtacaggtgtttttgaggtcattgagacggatcgaaaattcatgtcgttgtaccaacacgaagggaagtttgctgcctggcaatactggaaacaaaaagggaatacctccctggcggaaaatcttatcaggctgattaatgatggccgcgttgatcctgtaatgggccatagcaaagtctgtaatctggacagagatgagacatttaatgaaccgaattaa

SEQ ID NO: 380659 - DNA, 1065 bp, Salmonella enterica
atgaaccgaattaaacgctggatttatcagaaaacgtttaatgcctcagatcgcatggaaatatatgataattttcgtcaatatttgcttgatggtttgagcgcacaaataacctttgaaaaacttatcgataattacacgcgacgaggtaaaaaaacgggcgacccaataggcgaaattctgacggaatgtagccagaatcttaaagcaggattttcccttgccgaatcctttaaagagtggatacctgatcaggaactcagtattattgagtcctgtgataaagccgggaaactgactgatggatttaaaaatgccatgattattgcagaaggcacagataaaatttccggttctgtctggtcaacgttattaaattttggctatatccagtctttagctatcggtctggttgctattttctgtataacactagtaccaacgataaaacaaagtgtcccgctggaaaaatggaatacattacagactggtgtctggtatttctatgtagcgattaccgattactggtatctgatgctggctgtcgttgccacattagctgttactgtttatagatcgctgtccgtctggactgggaatcttcgtttctggtttgaccggtttccaccctggtcggtgtacaggcggttacagggagcctcgtttattctcaacgtgaatgccatgttatctgctggtattccgatagaaactgctatccgtggactggtggaatccagtacctctccgtggctactggagcggctggaagccatattgaggaacattgaggcaggggaaaaaaacctgggggcggctatggatgccaccggctacgagtttcctggggaggatgccatcatcaagatgcagagcctctttgaaaccgcaaatcaggagaattccctgcatcgttttgctgataaatggctggacaggacggtgaagacggttgagaaatcaggaacagttattcaggtgatggggtattttggaatagctattgcgattctgttacttattctggtgatgtccgatcttattcagcaggcattctttatgtga

SEQ ID NO: 380660 - DNA, 513 bp, Salmonella enterica
atgaaattaaagaaagttaaacatggtctgataaacattacagatcaaagtgttaatatgggtattatttttattgtcctggggattgtggctgctgttggctatacagtctacagtaagttctgggctgtaaatgaaacgaatgtcatcagtaatattattaatgaggttcgaaatatgggagaaggtaatggtggctatgggacagccaattataaccaggccattatcaactcagaagctatttcaagtaaggtaaaatattccggtacgacgatttacaatcattctggtggcacgattaccgtcgttggtgcaaataccggatttacagtgaccagtacggggctttccaaaaaggattgtattaatatggcttcgcaactcggcacggcagatatggcttcaacaaaaattaattcaacatctatcaatggcgtggtatcgacaattgcggcaaccgcagcctgttcttctgacagtaacacggtagcgttcactacgaggggctga

SEQ ID NO: 380661 - DNA, 939 bp, Salmonella enterica
atgaaccgattaaacgaattgagttttattgacctgtatctcggagaagaatttgctgaaataaagggaatgaaaggcgcaagtgcatatctgaccgatttgccggatatctaccagagcgatgcctttgaactcaggaacgcgtgcaacgaaattcatttcagcacgcataaaacggaattttccttacgctatgacgggcgcatttaccgtgtgacggtcgtttgcaatgactggtcgggagccagttttgtgatccgccagacgccggaacgtatcctgccctttaccgatgtgccactcagtacaccattacgtagttccatcacccgtcctggcgcaaccggattgtgcctgattgctggcgaattggggtcggggaagacgactactgctgcctcagtgttacgtcagcgtattgagataacagggagtctgggggtatccattgaagatcctatagaaacactgctgcatggccgacacggtaacgggcggtgtcttcagcttgaagtcggccagaatgaatcgtattcaacggcgacgaaaaaagccctgcgtatgggcgcgtcatgcctgctgttaggggaaatacgtgacgggcaaacggcacatgaggtactgaaagcgtcgttgacaatgtttgtcgtgtctacgatccacggttcatctgtctatgaggccattgaacgttacgtgatgttttgcgaggaaatcaaccacaacgcgaaacagaatgtagccaatacgctgtacatcatcgctcatcagacaatgacctcagtacgacgtggtgataaggctactggccgcaatatcagcatcaacgcttttaatctggtgaactgtacgcagaacgcagctatcaaatccaaaatcatgcagggcaattatcgggccttgcaggatgaattcaacggtatcgaatacaccctgtaa

SEQ ID NO: 380662 - DNA, 1317 bp, Salmonella enterica
atggctatattaataaatcccccgaagcgcggcatgatcaatatcaccgacgctgctatcggaattggtgtcttgtttcttattatgggggttattgtgatccccatgaataactggttatcgaatcaggcaaaagcgattgtggcttcaacccaggcaaaacgggtacaaaaggcggtacagctctacatcaaggataatcactcaatgatagccagcacggccacagccagcacgccgtacatatttggcgtttcccggttaatcagcgccggatatttgcctacaggattctccacgactaacggttttggtgctacatatcagacgcgagtatttgagccgacagcagataaattacagtccatgacctacctggcaggtggtgccaggctgtcaaaaagcctggcccgaaaggttgcgatcggaattggcgcagaagggggaatcattgacggcaacacagcgaaaggagcgctgggtagctggagtgtggcgctgtcttcgtttggtggttataaccccggtgatggtagcgtcgtgattgcgggtttttacgatcacggtatcagtattaatgattacttatatcgtaaatccgttcccggacatccggaattaaatacgatgagcacgtccctgaacatgggaaataacaatataaccaacgcagccactacaacgacaaccacgctgaatgcaactgatgttaattctactaatgtcaccgcaacaaacaatgtaacaggtacgaatgttaatgccaggacgacgcgcaccgaaggggagacatacacagggggatggttccgcacaaccggagatacgggatggtatagcgagaaacacggtggcggcatttatatgacggataattcctgggtcagggtatacaacgacaagaatttctcaaccggagggcagatcaaaggggggacagtaagagctgatggacgactgtatgcaggagaggcattacagcttgaaaaagtgtacaccgctggttctggttgctcaccaaacgggcttatagggcgggatgcttctggtggtatactttcctgccagtcaggaatatggaaatcgtcggaattttctttccgggttgccggaacgttccaggtctggccggggcaaacagtaaatctggggcggtttaaattgtgtatcaacacgtaccgtattgacggacgagaaatggctctgacagaacttattcctaccgatggtcctgactcaaacggtaacatgaactggcgtgcgtacaacggcacccaatattctgcatattatatgggaattcattgttttatttaa

SEQ ID NO: 380663 - DNA, 420 bp, Salmonella enterica
atgaaatcctttattgttatttcgctgctttttttatggctggctttttatggaaacctccgggatgataatgacagttatgcggcttcattgagggagggcaaagccctcctgtttctgaattacgttaatgtatttgactcttattatgaattaaatcctgattataatggagatgtgactcataacgtcaccgctccgtcatggcttccggctaatgtggatattaaaatgtttattgaaaataaaaggggatatgtgtttatgcccgcgtatccaggtgtttacaataatattctgaagagaacggaaggaagcgttcttgttggtgtttcggatagttcatctcttgtgacagaagccggaaggattaacaaaccctccttcattccttccggttacattgtttatatgaggtaa

SEQ ID NO: 380664 - DNA, 621 bp, Salmonella enterica
atgacatggtacttacttttactcacagtgattttattttcctgtgctttcgcagttaagcttccggccctttactcaagagagaaaaaaagagcaattattcagtgcgaagatttgaaaaatgaaatggataacattggagtgtatccgctggccgcagtttgtatgttattaatacccgtttcaatattttacttttcacaagatatattgttatctttatatcttttttttcttgcaatcgtttcctatactgatttaagcgccagatggattcctgattcaggaatatgttttttggttgctttgtcagtttattcgttgaaggataaagataccgtatctcaactgttgtctgctgcattttttatattgccagctcttatacttcatctttatggctatctggtgaagaaagaaatatggatagcgtccggcgatttttatgttataccgacaattggtattatggtccttccggagtatgcagccactctaatgtttgttgcactggttatcagtcttgctgttaccagatggactcccaaaataccttttgtcacagtcctgttttttgttttttcaggctatcaggttctgatattaagcggggcattatga

SEQ ID NO: 380665 - DNA, 483 bp, Salmonella enterica
atgaatagattctttcttataactatacttattatgttttctccgtttggtttctctcaggtagaaaaaaacaccaatggtttttacaactgtttcagaatggctggcacccgttactcaattgatcatcgtttactgattgctatcgcagaagtggaaagtggtatgagccctaaagcgatcggtctgaataagcgaggtggtaaggttgttagtgaggatgtaggcttaatgcaaatcaactcatcctggttcccaactcttaatagtatgggtattacacgaaacgatttacttgaaaacccatgccagaacatttatgtcggcgcatggatacttgctaagaacatttcaaccaacggtgttaactgggaatcagttggtgcgtataatgctggatttaaaggggctaatgcaccttttcgcatgaaatacgctaaaaaggtttatgctaaatatatttctttaacaggggaggagtaa

SEQ ID NO: 380666 - DNA, 387 bp, Salmonella enterica
atgacttatttttttaacagaaaaactgattatattaagagtttgtctggtgaagaaataaattcacttcaaaaaaattttgaagaagcatgtttctgtatgcctggttttaattctgataaaaatgaattgggggattataaggatggaggtacacaggcggcatgggaaggttatatgttttcagaagaatggaataaacatggcagatatcaaaagacttccttacctgaatgtcctgaacccttagatggatggtgtgattgtggtaagtgtaaggctatgcgactgcataagacaaaaaatatttatgtctgcctcgtttgccataaacaaaccgaaccgtttcttcctgttgactttaattcaaatgactggcttccttaa

SEQ ID NO: 380667 - DNA, 426 bp, Salmonella enterica
atgctttttatcatcctaataccgaagacttgcaagttctccgtgaagtcaattaaacattcaatcacatacaagcaaattaatgaaaaagataagtctgttatagatttgggccatatgttaatgaataaagaaaaggctttgcgagaattggaaaatttgctttctaaagttgagaatcaggcaaggattcttgatgaattagaaacggctcaatggcattatatggatttggtcggtataacattaagtgggcttttcgataaaatcgaactgaaaaaagaacggaaagaacattctcaccttattaaagttagtgatgaattacctgtttttgaagataatgaatgcgctgcgtttatgtctgaacaacataaccttcctttaaatatatgtgctgcatatgtttacagtcataaatggtga

SEQ ID NO: 380668 - DNA, 543 bp, Salmonella enterica
atggctggtaaaggtgtcaataaggttattcttatcggaaatctcggtgcagatccagaattaagatatatgccgaataatgttgcagtcgcaaactttactcttgcgacctcagaatcctggaaagataaacaaagtggagaagataaggagaagactgaatggcacagaattgttatttataataaattggctgaaattgccggagaatatctgcgtaaagggatgcaggtttatatcgaaggaaagctacaaacccgaaaatggcaggatcaacaagggcaagagcattatacaactgaaattgttgtggaccagaaaggggtgatgcaaatgcttggcggcagtcggcaaaatggcaatacaaaagcaggaggaaatagtggaggatgggggaaaacaccaccggcaaatgggaatggaactccgcagtcgtccgttccggcctccgctggggagccaccgatggattttgaagacgatattccctttattggacacggatacggggtttgtcgtaaggctatttacgctatttcctga

SEQ ID NO: 380669 - DNA, 2286 bp, Salmonella enterica
atgaaaatactttggatagcggaaaaaccggagttggggcggcttattgctcaggttctgggaaatggtcaaattcatgatggatatatcgtttgtggatcacatattgtttcctggtgtattggtcatttagttaaattaactcctccaggagaacttaatccagattacataaagtggcgtcgggaaacattaccgatgaaactccgtccgttgcagtacagtattttaccgaatactgaacagcaatttagggtattgaccaatcttattaatggtgctgatgaaattatccatgcaggcgatcccgatgaagaaggacaattactggttgaagagattctggattactgtggtaataaggctccagtgaagcgagtattgattaacgatctgaacccggaggccgcacatcgggctatgcgtaatcttcaggataaccaggcgttttacggcttgtaccagagagcactggcgcgtaatgcagcagattatttgtatggtctgaacatgacaagagcatataccattgcggctatggaaaaagggcataccgagacaatttccgtgggaagggtacagacgccggtactggggctggttgtcaggcgctttgaggagaacagggaccataaggcatcattctactgggttgttgaaggtgaattgtccggtgaaaaaggtgtttgtccggtggtgttgagtgtacctgatgatgcacctgtggatgaaaagaaacggattattaacgaacaatatgcaactgatattgttaaacgttgtcaggggaagacggcgacagtaacgcttgcaataacggaaccgaaaagcaagcagccacccttaccgtttgccttgctggatcttcaggtgaaaatgaaccgccagtatgatttcgattcagaaaagacactggcaataacgcaacgtttgcgggaagaatatagggcaattacctataaccgctcagactgccgttacttgtcgtcagaacagttcttacaggctccagctactctaatcatgctacgccagcggctcccggagctggagaagtatttggatctggccgacagtagccgtaaaagtcgcgcatttaatgataaaaaaatcagcgcacatactgcgattatccccacgccgttacctgttaatctcgataaaatgacaactgatgagaaaaaggtgtacgacgtaattgttgcacaatatctggctcagtttatgccggaaaaaacttttgaatcatctgttgcagagtttgatgttgatggtctggtgttccgccagagagctattcatcaacttgaacccggatggagtgcattactttccgagcgggaagatggggggtcacaggatagtcaggctgttttcaatgtgatttctgcattgtgtccaggcgaacagatggtatttaataaagtgatctctcgtcgtgaagctacgtcaccgccctcattgtacacagaagcatcattactcgaagatttacagcgagtggcgaaatacgttgatgatccccggattcgccagcttctggtggatagagacgaaggaaaagaaggcgaacatgggggaattggtacgccagccacccgaagtaagattctggcgcttttgcagcagcgtggcctcatggttcttcagaataaaaagtttgttcctacagaacttgggatttcttttatccatgccttgccgcctgttatgactacaccagatatgacggcgctatggcacgagcaacagcgtatgattgaggctggagagttgaccgttgatgagttccttaatgagctggagcaatttatttcctaccaggtggaacatgttgatgtatccggactgaaggtaactgtttatccatgctcctgtggtggacgctatattcgtcgacagaacgacaaaggcgtattttggggatgcaataattatcctgattgtcgtaatgcagttccggataaaggcggtgtacctgatttcagtgttcgggagtttgaagctaaggtcaaatgcccgatgtgtggcagtaaaatgaaggtttctccaaaagcttacagttgcacaaatattccaaagtgtgagttccgtttgtgggggactcagtttaacaaagagcttactatgacccaggtagtggaactgctgacaaaagggaaaacaagagagattaagggacttaaaaagaaggatggtagtaagttcgatgcagtgttgactcttaatcaggatggttcgattacaccgacttttctgaagaaaaaaaagcgatctgctttttga

SEQ ID NO: 380670 - DNA, 438 bp, Salmonella enterica
atgtttttctctgttgggattgagtccccaaaaaatgccagcactgcatttggtattattgttcctgcttttgaccagtttaattatggttgcgtctccgcagcggacgaacaggctgacattccggtaatggctcgtgaagctattctaagcatcgttgaagaaatgattatcagcggtgctcactctgttgaagatattacggatgccggttttatgttctatgccgccaaccctgaatatgcgcattgtgatacctggttcatgattgacgttgacctttctgaattcgaaggaaaacagcaacgagtcaatatcactcttcctgatgtgttgattaaacggattgatggttttatccaggggaaacgccctgtatataaggacagaagtcattttcttgcacaggctgccagacgtgagctgtcaagtaaatag

SEQ ID NO: 380671 - DNA, 429 bp, Salmonella enterica
gtggatgactggcgttcaaagcccagaaccgggcgcgcaaaaataacagaacattcaaatgaaataagaatacttcttgctgaaggaaaaacaaacaggcagatatataatcttttgaccaacaaaggattagatattagtgaatctcaatttaatcgtcatattaaaaaaatatttcgccctcatgataaaaaaagtaaaagtcaattatttaattccgaggttaatgagaagaaatgtaatagtgctattaattcagatatctctttgccctatgaatggaataatatcggagttttttctgaaaagttaatcattgatttagaaaataacggttatacacctggcatcgtgagagaatgggggttgccggagtctcaaatccggcagaggttaattattgaaaatgcacgtcagaaaggaaaatga

SEQ ID NO: 380672 - DNA, 702 bp, Salmonella enterica
atgaatattaaaattgctgtggtaaataattcaggaaacatggggaagtcaacaatctgtgattctttgttattacctcgtcttgaaggagcaaaagttgttaaagttgaaactataaatactgatggtacaaatgatgtgaagatcagtgcaaaagaattccttgaaataactaaaaaaattggtgcgaaaggtagcgttattgttgatgttggttcatcgaatgttgagatattttttgaaaaaataagggagtttcatggtacgcaagaggactttgattattttattgtgcctgttactcctgaaaacaaggggcaaatggatactttattgactattggtgcattactggatcttaatgtagaacctgaaagaataagggtgatatttaataaagttgatccggggcgagcttttgataaacaattctcagggattcttgaaaaccagttattttgttctttaaagattaaacgctatccaataatcagaaatacagagttgttctttcatcttaatgaaatgaacaaaacgctaaaggaggttttggatgatgatcgtgatttccggaagttgatgcgagaatgtgaagatgatgatgaactggagatattatcaacagaacgtgctattaaacggctggctactggagtaaatgaagatttaaatatggcctttaatttgttagatattgtttga

SEQ ID NO: 380673 - DNA, 678 bp, Salmonella enterica
atgtcagataatattgatgaaataacatctgaatttatacagaagtttgagagtgaacttaacaaaaaggttgagggcgtactggaaaataaagtaagagggatgttggttgattttagagacttgcaaaaaagaattgaggattttcccggtttatttgcttctaaaattgatgatgtaaatgatgctatacgtgcgacacctggtactcttgaggagtcattacaaaaggtttttgtctccgtagaggaaatggagaaaacaaccgagcgtcttcttgatgactataaagttactatgcgggccaactccattaatgaacttgagttaattaagctgaaaatagcaggacaaattcatgaatctatccagaatgcgcttgataagcctttggaagacgcaaaggaaaaaacgaaagagataaataccattttaaaaaatgggcttagatctgaaatgagtaatcgcgttgcattaggacttggagggttaattggcatagcattgttatcaatttcagggtgtcttgcgtttggaattatgtacttacagcaacaggataaagcagagcaatattataacgcattccgtgatcagaaggcagttatcgaacgtatgccggaggtggtacaacgtcagttccgggaggaaacaaagaaatactttaaccttgattga

SEQ ID NO: 380674 - DNA, 351 bp, Salmonella enterica
atgtcagaaaacattaaaaaagacagggttgtctcattccgtttatcagaaagcgaatttgctccttttgaaaaaaagctcgctgcttcagaaatgaaaaaatctgaattctttcgcgaaatttttttaaatgctaatgttaatcttacagtaaaaggagcaccatcaaaagaattaaaagaccttatttatatttttagtaaatcaagtaacaatcttaatcagattgcatataaattaaatttagctcatcaaatgggaagggtttctgaatcgttgtacataaatattcttaatcgccttgtgaatattgaggagctaatgttagcaggagttaataatgctgattag

SEQ ID NO: 380675 - DNA, 3693 bp, Salmonella enterica
atgctgattagggtttctggatataatgatggtgcaaaagaataccttgaggagggagttaaaaaagagagagagtttacccgcgacgagttggatgaacgtgtcatgctttggggaaatcttgatttaacccagaaaatttaccagcaaattcaggataatggtcaggaacggtatgtatcaataacaatgtctttctttgaagagcatattcctgttgagactatgaaggatattgttcaagagtatcgtcagtttttaatgtatgcttaccgtgatgatgaatataatttttatgctgaagctcatctcccaaagataaagcaagttcaggataagaaaactggagaaatgatagacaggaagcctcatattcatatgataataccagaggttaatcttttgtctggaaatgtcataaatccacgaggtaattatacagcaaatgaaaaatattttgaggcattccaggaatacataaaccagaaatacaatcttgtttctccacgagagcgggtacgtgttgatcctacaaacgctgccgatgttctgtcacgttataagggagacgacttcaataataagaatagagagtttaaacagcaactggtaagagatattattgataaaaacattacaacccgtaatggcttctatggttatgttgcatcttttggtgaaaccagaatacgcaataagggaggtgagaacgagtatattgctgtgaaacttccggaagataaaaagtttaccaatctgaaggagagtattttttgcgatgattttattgtacatcgggagctaaaaaaaccaccactcgacaaaaatgttatttatcaacggttacaggaatggccgcagcgctcatacgaacttaaatatgtcagcaaagccagtgaaggtttccgccataagtacagagactcatctccgagtgaaaaattaattctactggaacagcgaaaaaaagaattctatcagacttacgggggaaaaaatggcctataccctacccaacgggaaagtaataaccagcgaagtattactgaaactgaaagcagaagaacttcctgggttgcctatagcttgcaaagtatgcccggcagcgacatggcaactgacgggaaatctggattcaccaggcctccgttgcttttgccgggtgatgcatcttttcagttgggacagccggaatccaccggaggagattctggattgcgacatgatttacgaaccggaagaagaggacgacgagacgattcacgaccagaaggacaaactccctccgttcctggcatcccgccgctctcttcttactcaggatggtcaggaagtaaataccgatcaggacttcgagggattatggccggaggcttaaacctgcctccttatgctggaaatccccgtcgaaaatccaccaccaaagatgtggaacagcgtagtcagttattgctacggcgcagtaccagtgatggaaactggtatttcagtccagcacggaaacaatggccgcacagggaaaagaatgcctcatatgtagcagcctggtttctccgtcagagcgaacagaatcaaattctgccagctcaaaaaagagctattcgcagcgtcgatagccagttttttacggccagacgactcatttttcaggatgaacgtcttacacgatcggagaaaacacaattgctatctgtattaacttttgagcgcctcaaggctcatcgtggtattaccaggccggaagaaccggcattagaggagatcagagatatgggaagtgaagatattcgtaagttgattaaagaaaagagccgtacatcaagaaacagcattgccggtgatgacgaagaagataaatctgttcctcctgccgggcatcgtttctcccggatagtccataaactgaaaaatcaaattgagggcgacgacattcaccaggaacgtcagaaaaaactgacggcagcggatctttatacccgcaggtcaaaactcaccaaaaatgtacactataaagacaaaaagacggacaggacgttatttgttgacacaggaacagcgattgctgttcgcagggaaggcatgtcatcagcggcgctaacagtcgctctggagttagcaaaagaacgttttggtagcacgttaaatattaagggaacagcggaatttaagcagcaggttattgatgttgttgcgaagaatggtctggatattcatttcaccagtaaggagatgaaccgacaactggaagagagaaaagcggagctggccacagaacgagacgggcaggccatagaacaaccaggtgttgttccggaaaaggcaccaatgtctcaggatacttctcccgttgcgcccaccacaaaacaatcggatgaagcaaatgccagtgatacgaatacggacagcgagtcctctgatgttaatgtgccggtagatttaccattctggcgaactgtggttcatcttgaagggaaactaattgatcacggcagggccccacttgagcatcaaaaaggcaacgtagagagctattttgttacggtcagggataaagacggaaatgagagaacacactggagttctgaccttcaggatgtaatgaaaggtcgccgccgagggcaaaatatttctcttgaacagaaagaatctcgtcctgtagaggtgaacgtccgtgatgaacacggtaattctgcaatccgggaggccgtgcgccgtgaatggagcttctcgcggcttccaaatgatgtcgttacgaaagagagcgatagcccggttcagggtagtaaggagcaggctacagatattaaaactattcaggagggcgcagtggccggatctcaggacacagaactggaagacatggcggacctgaatatgattcagtccggaaatgccgttgatatgatcctgtcgaatccgatgctccgtaatatggcaatgacagccgggcaaaaagcgcgagagtttaatgcaccggcggacgaaaaaaataccgttaatgcgcaaattaatgctgaaattgttgaacgatttaagggagtagatcaggagcgcgaaccacttgaattgattctttcggatacagaactgcgtggtatggcgctttcgatggagcagaaaatgcgtgagcaagctgcaccgctggacaagctggatgctgtggtagcggagattaatggggaagttgctgcaagggttgcccgattagtcagtgttcccattccttcttctacggtggccgcaactgttcagacgaaagatatccatgcaaagaaccaggagaaggaaggcaagccgagcgtagccaagagggataaggttcatgaaggtgtacttgtggacagtggtgcggctccctacaagtttaaaccagatatgaataagcccgaagaagagcgtaatgacagtttctatgtgaagctgaagatggaggatggtaagacgcgaacgctgtggggggtcggactggaaaatgttgtacgtgactttcagaatggggagcgtgtgaaattgaaggataagggcgttgaacccgtaacatggaaagagactttgaaggatgggcgtgtggtcgagaaatccggcgatcgtcggatctgggaaggcacatcattaacccgcgaagcagaaataatgaaaggtttccgtgtatcgaatatggaacatgataacgacggtccggacatagcgtga

SEQ ID NO: 380676 - DNA, 261 bp, Salmonella enterica
atgtctgatgccgtaaacccagctacttcctcaaaaaaaacgaaacgaccgtatcgtaaaggtaatccgattccttcaaaagaacggcagcaggcttatttgagcagaaaaagtgagacgcataaagctctcagtgctgttatccgtattccattgaaaaagaagctggaacagtttgcagcagaggaagggattacccaggcggagatgattgaaaggctgattgagtctgaaattatccggcgctccgagaatttgtga

SEQ ID NO: 380677 - DNA, 765 bp, Salmonella enterica
atggaaaaagctcaggggttctctgaacgctttgagtttcttgtccacgttgcgttttcgcgttcgattggaaagcgtcggcgtaaaccgcctgttttacgttgtcgggcgattgacgccctgatgcagggcatgtgttttcactatgaccccctggcgggtaatttcggacgtgttcagtgttcgacaaccacccttgcgatagagtgtggactggcaacagaatccagaaaggataagctgtccatcacacgggcaacccgcgccctgcgttcccttgccagtgattttggactcattacctatgatacagagtttgatccggaaatagggtgcaacataccgtccaatatccagtttaccccggcgctgtttgagactcttggtatctcgatggcgtcactggaggctatccggaagaatcgtgcggaatggcagaataaacagcgagagaaggaaggtctgtcacgtctgtctctcgaagagctggcgctaaatgcatttaattatgttcgaaacaaattccgggaatatcatcgggaactacgtttgcacgggcttaaacgcgccagggcgaaacgtgatgcagaacgcagccgtaatgaaatcagggtactggtgaagcgcgaactcaccaaagaaatctcgatgggacgttttccggccaatatggagcttgttaatcgcgaggttgagcggcggacgtccgagcgaacaatcatgtccaggggtaattactctcgtctttcccctgcccccgcctga

SEQ ID NO: 380678 - DNA, 2172 bp, Salmonella enterica
atgagcgctatctccctgatccaaccggatcgcgaccttttctcctggccgcagtactgggccgcctgctttgggccggcgccgtttttgccgatgtcacgtgacgagatggatcaacttggctgggatagctgcgacattattctggtaaccggcgacgcctacgtcgaccatccgagcttcggcatggcgatttgcggtcgtatgctggaagcgcagggcttccgcgtggggatcatcgcccagccggactggaacagcaaagacgactttatgcgtctgggaaaaccgaacctgttcttcggcgtcaccgccggcaacatggactcgatgatcaaccgttacaccgctgaccgtaagctgcgccacgatgacgcctacaccccagataacgtcgcgggcaaacgcccggaccgcgccacgctggtctatacccagcgttgcaaagaagcgtggaaagatgtcccggtgatcctcggcggcattgaggccagtctgcgccgtaccgcgcattacgactactggtctgatactgtgcgtcgttcagtgttagtcgattccaaagccgacatgctgatgtttggcaacggcgagcgtccgctggtggaagtggcgcaccgtctggcaatgggcgaaaccatcgatcagattcgtgatgtgcgtaacactgcgattatggttaaagaagcgctgccaggctggagcggcgtcgactccactcgtctggacacgccgggtaaaatcgatccaattccccatccctatggcgaggatctgccgtgcgcggataacaagccggtcgcgccgaaaaagcaagaagctaaggcgattaccgtgcagccgccgcgtccgaagccgtgggaaaaaacctatatcctgctgccatcctttgaaaaggtgaaaggcgacaaggtgctgtacgcccatgcgtcgcgtattctgcatcacgaaactaaccctggctgcgcgcgggcgctgatgcaaaaacacggcgaccgctatgtctggatcaacccgcccgccataccgctctccactgaagagatggatagcgtgtttgcgctgccgtatcagcgtgtgccgcacccggcttacggcaatgcccgtattccggcctatgagatgatccgcttttcgatcaatatcatgcgtggctgctttggcggctgctctttctgctcgatcactgaacatgaagggcgcatcattcagagccgttcagaagactctatcatcaacgagatcgaagcgattcgcgacacggtgccggggtttaccggcgtgatctccgatctgggcggtcctaccgcgaacatgtatatgctgcgctgtaagtcgccgcgtgcggagcagacctgtcgtcgcctgtcatgcgtctatccggatatctgtccgcatatggatactgaccatacgccgacgatcaatctttatcgccgcgcccgtgagctgaaaggcattaagaaaatcttaattgcctccggcgtgcgctacgacatcgctgtagaagatcctcgctacattaaagagctggcaagccatcatgtgggcggctatctgaagattgcgccggagcatactgaagaaggtccgctgtcgaaaatgatgaagccgggtatgggcagctacgatcgctttaaagagttatttgacctttactctaaacaggccggaaaagagcagtatctgatcccgtattttatctccgcgcatccgggcacgcgggacgaggatatggtgaatctggcgctgtggctcaagcgccaccgcttccgtctggatcaggtgcagaacttctacccgtcgccgttggcgaattcgaccactatgtattacaccggcaaaaacccgctgggtaaaattggttataagagtgaagatgtggtggtgccgaagggagacaggcaacgtcgcctgcataaggcgctgctgcgttatcacgatccggcgaactggccgctgattcgccaggcgctggaagcgatggggaaaaagcatttgattggcggtcgccgtgagtgtctggtgcctgcgccgaccattgaagagatgcgcgaagcgcgtcgccagaaccgcaacacgcgcccggcgttgaccaagcatacgccggtggaacatcagcggcaggggcttgctgcgaataagaaacgcgggaaaggcgcagggcgttaa

SEQ ID NO: 380679 - DNA, 984 bp, Salmonella enterica
atgaaaaacacacgttcattcacaacatcagcggtattactggccggctgtttgctactggcatttccagcgctcgccaaaaccacgctgaaactgagccacaatcaggataaaagccacgccgttcacaaagcgatgagctatctggccgataaagcgaaagcctattcggacggcgaattaaatattcgtatttaccccaacgccacgctgggcaacgaacgtgaatcgctggaattgatgaactccggcgctctgcaaatggtgaaagtcaatgcggcatcgctggagtcttttgcgccggaatatagcgtgtttagcctgccgtttttattccgcgaccgcgatcactactacaacgtactgaaaagcgacttagggaaacgcattctcgcgtcctccgaaagcaaaggcttcgtcggcttaacctggtacgacggcggtgcccgcagtttttacgccagtaagcccatcactcaacccgacgatttagccggtatgaaaatcagagtgcagcaaagccccagcgctatcgcgatggtgaaagcgctcggcggcgtgccgacgccgatggcgcaaggcgaactctataccgcgctccagcaaggcgtggtcgatggcggcgaaaacaaccccgtggtttatgccgatatgcgtcatgcggaggtggcgaaattctattcccgcgacgagcacacgatggtgccggatgtcctggtcatcagtaccaaagtacttaacaaattgagcgataaagagcggaaagcgttatataaagccgcagatgaatccatgcagcaaatgaaagacgtcatctggcccgccgcggaaaaagaggcttatgagagcatgaaggccatgaatgcgaccgttgttgatattgataaatccgcgttcaaacagcgtgttaagcccttgtttgatgagttccgcgcgaaagatgctcagtcagcgaaggatctggaatacatcgagaatatgtaa

SEQ ID NO: 380680 - DNA, 822 bp, Salmonella enterica; identical to SEQ ID NO: 380003

SEQ ID NO: 380681 - DNA, 162 bp, Salmonella enterica
atgttgacgaatgacagggggcggcaggtgcggagggcgcggttgcttcgtcatatgaagcaaagtcacctagctgaattaatgggtgtggatcaggcaaccgtgtcgcgctgggagcggggcacccttgcattgtcggatgggaggggctttgttgaataa

SEQ ID NO: 380682 - DNA, 660 bp, Salmonella enterica; identical to SEQ ID NO: 35583

SEQ ID NO: 380683 - DNA, 1191 bp, Salmonella enterica; identical to SEQ ID NO: 151662

SEQ ID NO: 380684 - DNA, 129 bp, Salmonella enterica; identical to SEQ ID NO: 33085

SEQ ID NO: 380685 - DNA, 306 bp, Salmonella enterica
atgagcggcctcatttcttattctgagttacaacagtccgcaccgctgccggtagctattgactatccggctgcactagccctgcgtcagatggctctgatccaaggcaaactgccaaaatatctgctggcaccggaagtcagcgccctgcaccattatgttccggatctgcatcgcaggatgctgctggctaccctgtggaacacctacatctgtattaacgaagcgctggcattgaccctgagtgatttttctctggtgccgccctatccctttgtgcagcttgccacgctcaaaggggtttga

SEQ ID NO: 380686 - DNA, 585 bp, Salmonella enterica; identical to SEQ ID NO: 199155

SEQ ID NO: 380687 - DNA, 1116 bp, Salmonella enterica; identical to SEQ ID NO: 199156

SEQ ID NO: 380688 - DNA, 468 bp, Salmonella enterica; identical to SEQ ID NO: 199157

SEQ ID NO: 380689 - DNA, 681 bp, Salmonella enterica; identical to SEQ ID NO: 199158

SEQ ID NO: 380690 - DNA, 450 bp, Salmonella enterica; identical to SEQ ID NO: 199159

SEQ ID NO: 380691 - DNA, 414 bp, Salmonella enterica; identical to SEQ ID NO: 31404

SEQ ID NO: 380692 - DNA, 657 bp, Salmonella enterica
atggtcggcccatgcctcgcgggtctgctcaagccatgccttgggcttgagcgcttcggtcttctgtgccccgcccttctccggggtcttgccgttgtaccgcttgaaccactgagcggcgggccgctcgatgccgtcattgatccgctcggagatcatcaggtggcagtgcgggttctcgccgccaccggcatggatggccagcgtatacggcaggcgctcggcaccggtcaggtgctgggcgaactcggacgccagcgccttctgctggtcgagggtcagctcgaccggcagggcaaattcgacctccttgaacagccgcccattggcgcgttcatacaggtcggcagcatcccagtagtcggcgggccgctcgacgaactccggcatgtgcccggattcggcgtgcaagacttcatccatgtcgcgggcatacttgccttcgcgctggatgtagtcggccttggccctggccgattggccgcccgacctgctgccggttttcgccgtaaggtgataaatcgccatgctgcctcgctgttgcttttgcttttcggctccatgcaatggccctcggagagcgcaccgcccgaagggtggccgttaggccagtttctcgaagagaaaccggtaagtgcgccctcccctacaaagtag

SEQ ID NO: 380693 - DNA, 585 bp, Salmonella enterica
atggtgctggctaagcgctcagaccgctcaaatgacgggcgcatgaagcgtaagacagctgaatggttttataagctgcataataaaatcagcaatccgaaaattgaagagaacgtcggtgatttccggttaatgagccgtgaggttatcgaaaatattaaattaatgcccgaacgcaacttgttcatgaagggggtgctcagttgggttggcggaaaaacggatgttgttaaatatgcccgtgccgaacgcgtggccggtgattcgaaattcaacggctggaaattatggaatctggcgctcgaagggattaccagcttctcaactttccctctccgcatctggacgtatatcgggttagctgtcgcaggtgttgcatttctgtatggtgcctggataatattcgacactctggcgttcggtaacgccgtgcggggatacccgtcacttctggtgtcgatactgtttcttggtggcatccagctaatcggcattggtgtactcggcgagtatatcggaagaatttacattgaaaccaaagcaagacctaaatatatcattaagaaagttggtcaaataaaatga

SEQ ID NO: 380694 - DNA, 453 bp, Salmonella enterica
atgagccgtgaggttatcgaaaatattaaattaatgcccgaacgcaacttgttcatgaagggggtgctcagttgggttggcggaaaaacggatgttgttaaatatgcccgtgccgaacgcgtggccggtgattcgaaattcaacggctggaaattatggaatctggcgctcgaagggattaccagcttctcaactttccctctccgcatctggacgtatatcgggttagctgtcgcaggtgttgcattcctgtatggtgcctggataatattcgacactctggcgttcggtaacgccgtgcggggatacccgtcacttctggtgtcgatactgtttcttggtggcatccagctaatcggcattggtgtactcggcgagtatatcggaagaatttacattgaaaccaaagcaagacctaaatatattttgaaggggaagaatagtgttaaataa

SEQ ID NO: 380695 - DNA, 558 bp, Salmonella enterica; identical to SEQ ID NO: 373956

SEQ ID NO: 380696 - DNA, 1011 bp, Salmonella enterica
atgaaaaatccagatagtccgatcctctcactgcgtgactacagtacgcaggattcaaaatgggacagcgatcgcgcgagggctgaccaggtggcaaagatttacgcgtcagaccagcagttttcccgtcgcggcgagaggatgtttgattgcagtcagcgtttacagttcgctccgcaaagttcccgtcttacaggcgagatgcggcttgcgctgcgtcatggtgaattctgtcatgtccccttctgtccggtgtgcagccgtcgccgctcgttacgctggatgcgtcgtttgtgggaggcgctaccgaaactactggctgagaaccctaccgcgagatggctctttctgaccctgaccgtaaaaaacccccccgttggtgagttgagagagacgctcaagcagatgaatgcggcttgggagcgtttaaccaagcgtaaagaatttgcgcctgttctgggctggctgcggagtacggaaatcacctacgggaatgtactagggggctgtcatccccactttcacgtggtgctctgggttccttcgtcgtggttcaagcgggattacgtgaagcatgaacgctgggtggaaatctggagcgagtgcctgcgggtggattatgcagcgggggcgcacatcaagcgcgtgcggccaaaacgcgggagtgtaccggaaggagcaagcgctgcagaggtgcaacgggcggcgctggaagcgggggtgatcgagacactgaaatacacggtgaaatcctcggaaattgtgcgcgatccggcgtggtttctggagcttgcgcggcagacctacgggctgcggatgattgccacaggaggacggtttcgggagatcctccaggtcgagaagccggagacggacgaggatttgattggtgcggacatgccagcgaagccggacgagttcgaggagatggcgttctggctggcgttcgactggaggcgggacgagaaacgctacaagcggaatcccagagcagacaggcggaaggattga

SEQ ID NO: 380697 - DNA, 354 bp, Salmonella enterica
atgcctgattctttaactttgtcatcaacattagaaaaattagatgctaaagttaaactgctttggaataaaaacattccttcaatggtaaataactatttctatgatttaaatgttatcttagaaaactcaatgcgattgctcaataataacggaatggctgttgtcgttattggcgatagcaaatatgtagatgtgaaaattgatactgtaaaaataacatgtgaacttgctaaaaaaatcggatttacagttagagagactcaagaaattaggataatgaaagccagtgctcagcaggggtggtcaaaaagtctgagcgaaacagcaatatacttaggtaaagatatttaa

SEQ ID NO: 380698 - DNA, 255 bp, Salmonella enterica
atgataattaatgggaaattaattaaagcaaaagacttagctaaggctgcaggtgtatctcgttcaacagtgattaaatattacggcattagccgtgagaattacgaaagggtagcaactgaaagaaggaagcttgcttttgaactaagagcatcaggtttaaaatggaaagaagttgctgaaaaaatgaacacgacaaaatatagcgcaattgcatattatagacgatatttagcattagagaaaaacaaataa

SEQ ID NO: 380699 - DNA, 345 bp, Salmonella enterica
atgcaggctatcgccagcgagctaagcgcccggttaaataccccagttgaagtcggtggtgtggaagccaacatggctgtggctggcgcgttaacgacgcctggatgcgacgctccgctggcgatcctcgatttaggcgcaggatccaccgatgccgccattatcaataacgatggcgtagtgaaggcggtacaccttgccggggcggggaatatggtcagcctgttgattcaaacggagcttggcttaagcgatccgtttttggcagaggaaatacccgctggtcaaagtggagagcctgttcagcattcgccacgagaacggcgcggtggagttttttcgtga

SEQ ID NO: 380700 - DNA, 126 bp, Salmonella enterica
atggaatcacacagtatcacactcgatgaggcctgtgcatttctcaagatatcccttccttccaagttcgattcccaaaccggagataaaacctatgcgcgaattacgcgacgactcacttgttga

SEQ ID NO: 380701 - DNA, 267 bp, Salmonella enterica
atgggtggcaaagtacctaactaccaaatcgtttatagagacgagacactcaattatttcaagcctggaggatatgttttctttcaaaggcttaaagaatatggcggtggttattggttaggaaaaattcacgaggatgggttcgagtttgtacttgaaaggccaacctcattaagtgagggaattaagcatttacttgttttaaaaagcgttgaagatgggtatctggaatttgtagatgatatcgacaacttcaagctccaatga

SEQ ID NO: 380702 - DNA, 351 bp, Salmonella enterica
atggataagccactcaataaacgtgagcgtgagtttttaaagcccgccatagttcactactgggaaattgaaatctccccaaccagaaaaacagcgctgtgggatggtgattcgcttctcccggtgaaagtcggggtgatggctgagaacctgataaatcgcggctatctggagcgcgtgtctatggggtttggaagggacattatcagagctacagataaggccaaaaaactgcgctgttatcgctgctcatacggtcgagtaattgatgagcacggccagcagggtgagaagtgcccacactgtgacggcggcgtaatcgtgaacaagacagaaggaagcgcagcatga

SEQ ID NO: 380703 - DNA, 789 bp, Salmonella enterica
atgacaatcgacaaacgtgcgcttcgtgaagtggcggagagggcgacacaagggccgtggaagttattttctgatatcgatactaaaactttttccatccacaccccgcgagataagcgctgtgagaacgttattaagtggggtgggtttgattgtcaaccgaatgctgaggccaacgctgaatttattgctgcatttaacccgaaagtcgcgctggcgctgctggatgagaatattcaactccagcgggcaaaagacgcgctcgaagccgtggcgctggcgctgcgtgatgatatgcgggatgcgcgcgaacaactggaagaagcagaaaagcagatagttgagctgtccagagcggcaagtgttaacagccagtggaaaccagatgtttgcccagttaccggacgcaagttcttcatgtggattgaacatgaaacgcttggttatgtgccgacatatggcgggccgttcgacagttacactatcccgaccagagatagcagcggtgagttttcttgcgagcgttacgaccatgatttaggtggctgggtggggggtgagttcatcggcctttatctgattgatgatgacgaacaatgccgagtctgtgaactcgaggagcgcatagcagaactggaggcgcggacagtcaacctgtcaaaactcagcgttggagaagtcatgcacatgagcggattcagccgggattatgccgagggttggtgtgctggtaatgacaatgcgatacacgaaatacgcaccgctggcatcaaggttaagggggattga

SEQ ID NO: 380704 - DNA, 501 bp, Salmonella enterica
atgaattcagcagatttatcgatgattcttgagtatgagccttctacaggagttttccggtggaataaatctaaaggaacagcattggctggtgatgtcgctggttctgtcaatcatcacggttatcgagagataacaattgatgggaaaaagctacaagcaaataggctggcatggttattcgttactggtatgtttcctaatggcgtaattgatcacataaacagagtcagggatgacaatagattctctaatctaagagatatttcagttgctgaaaacaatctaaacaaatccattaggttagataataaatctggaacatctggagttaattgggatattaaaagagaaaagtggagagccactggccagatcaatagaaagcaaaagcatcttgggtatttcaaaaacattgatgatgcaatagaggccagaaggatattttgcagaaaatatcatttaacaagtaaagaatatgcgtatgaagttactgagtaa

SEQ ID NO: 380705 - DNA, 450 bp, Salmonella enterica
atggaagaacaggcaaacaatattctcgtagaactactgcaaaaagccagtaatggaatagatgcggctgtttcatttagccagacacagcttcctgatgttgttcatcagttgctgctatggaatatggttgacagtcttattaaaacattaatagccattctaacaatccctctggttttcaggtttatgaagaagcagtgccaaagagttgaaataggtaaaatctgcgatgaaggatattcatgggagcgtggaaaccctaaatacaggcagactatggtttgggatagcaaaggagagattaactttcttatcttaccattatctggagttttgattatgtgggggctttttattattgccacagtaaccaatatggtttggttaaaaatttggctggctccaaaactctaccttatcgaatatgccgcatcattgattaagtaa

SEQ ID NO: 380706 - DNA, 162 bp, Salmonella enterica
atgttcacacacatgctcaagatttccatacctgatccgttcataggcattcacatgaacttctcgatcgaactggtcattcaaattgtatgtagccatctgttttttctcatgttagcggcagccctacaaccgcttgaaaaaatgtaccagacgcgctaa

SEQ ID NO: 380707 - DNA, 519 bp, Salmonella enterica
atggcagaatcaaacgttagcgtacaggcattcaagggcttccttgaagagcttatgtcgctgaacataatgaaggaggccaccgctcgaaatttaaaaaactcatccgctcgcctcttaacggtagtcaaagaagaggaaatggatgatgttacaaagcttgatgtgaatgagcttgccgagcgctacatcaacgcaactgagccaaagcctagtgacagcagcattactgcgtataaaagccgtatggaaagtgcgattaaaaaatttgtggcttaccaagctggagagacaatcccttatatccctgtagagcgccaagaggaggaagaagaattggttgagttaaaacagccagtagaggtaaagagtgctacgccatcctcttactcactacccgtagtcattcgcccagaattaggagtcacagtaaccattagcggaatacccactgaccttacaagcgaagaagccgaacgcatctcttcaatactgaaggtttacgtccggcctcattaa

SEQ ID NO: 380708 - DNA, 291 bp, Salmonella enterica
atggaactcacaaatcacagcaaaaagatacgcgaagtggaaacagagcttcgcgcccgactcgtatcaatgggtcagacaaattttgcaaagatggcgggatggtctgattcaaaagtaagccgcctgaacattcaggatatggcggtgacgttcgttcttctggagaaggtatgggagacgagtttaatcagggaagtagcaaggcaagcggtggaagctgtgatgccgagaaataaaaaacgcccggcggcaaccgagcgttctgaccaaatccagatggatttctaa

SEQ ID NO: 380709 - DNA, 657 bp, Salmonella enterica
atgaaatgcaagattgatggttgcgatcgcgaatgcaggtacatggaacagcaggtatgccaaaagcattacttcagaatgatgcgatacggaacatacgaactgactaaacatggaaaaggaaaaggcatctcggcgaacgccaagggatacgtgatgattaaagagccatctcatcccctggcaatgaagaatggattcgtgtacgagcataggaaggctgtgtatgcaaagttcggagagcatttacctccatgcgaattgtgcggaaaatatgttacttgggcgaatgcgcatattgaccacaaggatgacagagtcaataacaacaacccagataaccttagagttttatgcaatgcctgcaatgtaatgcgatcacgcattcatatcccctcacataccagaaaaaccagccacgccatcaccttcaatggggaaacaaaaaccccagcggaatggtcgcgtgacccaagagtaagcatcgccgggaatacaattctgttcaggcttaggaaaggcatgagcgtagagcaggcgctattcggtcaaaagctcacacatcgaggtaagaaggcaaatggataccaaccgaaatacggtgagtatcagcagaaacttaaagacctgcgtgacagcagaagagaggcagcatga

SEQ ID NO: 380710 - DNA, 381 bp, Salmonella enterica
atgaacgaccagcaaatcgaaaaagaaatagttgagaaaggcaaaacagccccgcgaatcactccgcagcacatcgaatacgtgattaaaagcgagcactactttactgcttatgatggacgtaatggtgccatttccagcaacgaatattgtggcagagaaaaaccagaagaagacgatcgtgatttatcaccattgaagttgctcactttctgcgtactggtgctgaagaatggcttcaccgtcaccggagagagtgcctgtgcaagcccggaaaattttgatgcagaaattggtcggaagattgcccggcagaatgctgtaaacaaaatctggatgctcgaaggttacttgctgaagcagaagctaagcgaacagtag

SEQ ID NO: 380711 - DNA, 1140 bp, Salmonella enterica
atgtctaataaacgattaaatggaatacaatttttacgaggatttgctgttcttgctgttgttcttggtcacaacagaggaacaatgtatgacaatatagttgcaggttcatttattgattacataacatccaatgctatttttggtgttgaggtttttttcgtaataagtgggtttataatatctcattcaacacagagtataaaattcagttcatttgcagaatctttatcattcttaataaaacgtttttttagaatctatcctttgtatttaatggtgttggcactttatgtgtcattatactattacaactattatacaggggtatttagtttagggcatctttctattgaaaatataatacaatcagtatttatttcttcttatcagagtgatgttatatctccaatttatggctggggcacgctcgttgttgcgtggacattgagatatgagatttatttttatataatttttgccatctcaatgatatttacagcaaaatacaggtctgttttaacaactgcaataattattactatatttattttttcatcatattattaccaaggccatttagttttagacgcgcaatcatttccaatacctaacaccacaccagataagtacattggttttgcaggaaacccaatagttttagattttattttaggaatgattatagcggaatcagaaaagttatttggggacaacagattttataacaataaaaatactgggtatttttatatagtaataataaatatttgtttaatattatggtttactagtgcgttcggtggaaacggtatcacgcgctcaggtattattgctttctttcttgtgtttagcgttgtgagaattgaaaggattttttccccatcgtttcctaaaataattacaataattggtgaatcatcttattctttgtacttgatacacatccctgtaaaggagttcgcagattactacggaaactatttttcatttatacctaaacaaggtacattggcattatttattgcatcaatatcgctatcaatcacactttccgtgttaatttttaatttaattgagaaaccaataaatagatttggtcatagacttgctaataaaatattacctccgcgcaattaa

SEQ ID NO: 380712 - DNA, 153 bp, Salmonella enterica
atgtgcatgaataatatcaacacaatactcaggattatgagaaaaaagagcgtgaggcataagtttccttgttctatcggatttaatttgactcctttttataacgaccatcgccccttgctgaccaatacacttttcacgtgtcatcaatag

SEQ ID NO: 380713 - DNA, 792 bp, Salmonella enterica
gtgatttccctggaagatgcaagcctgacgaaaaaaggtatcgttaaattaagcagtgccacggatagtgacagcgaagcgctggcggccacaccaaaggcggtaaaaaccgttatgggtgaggtacggaccaaagcgccgctggacagcccggcattcactggaacgccgaccacaccgacgccgccaggcgatgctaaagggcttcagacaacaaacgcggagtttgtccgcaaactgattgccgcgctggttggttccgtactggagccactggacaccctgcaggaactggctgacgcgttgggaaatgatccgaactttgccaccacggtactgaataaactggcgggcaagcagccgttggacgaaaccctgacggcgctgtcaggaaaaagtgttgacggtcttatcgaatacgttggtttgcgagaaaccataagtcgtgccgccgatgcattacaaaaatcacagaatggcggcgatattccggacaaggatttgtttgtgcgtcgtatcggtgccgcgcgagcgtttgatggcgcagttattatcggctgtgatgataatccgtggacgacggcggagtttatcgtctggctggagtctcagggcgcattcaatcacccttactggatgtgtcgtggctcctggtcttacgcttataacaaaatcatcacggatactggctgcggtaatatctgtctcgctggcgcagtgattgaggtaatgggagtgcgtggcgcgatgactattcgggtgacaacgtcccattcagtatctggttggtga

SEQ ID NO: 380714 - DNA, 1353 bp, Salmonella enterica
atgcggaaaaacgatgtacctaaaattgtacctaaatttccccttccaaatccatcacttaaacgccgtggcaacacttacagcgtcagggtacaacttccttcgcaaattctgaaaattcactctaaaaaatacagtgatgtgatagtttcgttgaaaagatgcacagatttaatgaccgctcaaaaaatgttaaaaagggtaaaaattggttttaatttgcaacgacaactaaaagcagaaagtgtatctgaatatcgattcaagattaaacaattaatattcagtcttattgattgtgaaaaatctgaagaaataaccatgcgggatttattgcaaactatcgttattaatcaagcgaaaacagataacgcgatattttttaaggactggtttcctaaatatcaaaaagaaaaaattagctctggtgaatggacaaaaggtacggaagaaacaaatcaaacaacttataatgaattatcattttatttaatagataaaaacttagcttcaatgacgcatggtgaatttattgaaatgcgagaaacatatttcaaggataaattaaaagcagggaaaagtaaaagtgaagatacattaaaagcaacggtaaatcttagacttagtaaaataattgcgttttttaaatggctgcaagtaaaagggataataaatgagaatagagcaatagatattaaatttaaagataaacgttcagataatgacaagagaggtactttcacgaatgagcagtgtcatagaatccttgatttaattcatgcgggatttagttgcaacaacagtaagagaaggacttatggtgatgatggtgaaagtctggttcaacaactaattgtattaggtatgtttacaggagcgcgtatagctgaattacaagatttagctaaggaagattttttatgtgatgcaaatggcgcacccaaaggtatttatattcatggtgcggtaaaaaattcagcaagtgaacgccttattccgcttggtgatttccctaagtggtttaagttagatttatcgttgtttcgtacttgcaggaatgaagattacaggtatttcactaaggatacacttggtaaagaagtaaataaaaccataaaaaagattatcccagaagcgttagaagataatttaacgtttcactctttccgccattcattcgaaacacgcgcaagcaaatatgaaaatataaatacaacacatattgaccagataacaggtcacgcctttaaagatacggggcgtaaaatttatctggctaaaaataaaaacttagacgatatagaacatttattttcagttattaataaaattaacttggcattgttgagttag

SEQ ID NO: 380715 - DNA, 531 bp, Salmonella enterica
atgtttttcagcgcggaaaaattgcagtgcgtgatgagtttcgaagggttcttacagaccgcaaaccaacaatacagtaataaatacagatattataattttactgatttattttctaaattacacatttattgctcgttgcatgggacttataaacgaattggtatatatcatatttatggtgatgaatgtccgatttgccagaacaacagggaaaaaacttattttaattacattattctttgcggagggattataaagatcggaaggacagctaatgttaatgcaagattaagtgaactgtctttcaggctaggaataggatgtacgctgtattcactattttcctacccttccagacaaatagcctgcattgccgaaaagaaagcacatgaaattttaaagccttatcaaacattaccttttaatttaaaatttggcggttcatcagaattttttaatgtagaaccatcaatagcattaagcgcattagcatttacaggaggggatattatatatcaacattattag

SEQ ID NO: 380716 - DNA, 327 bp, Salmonella enterica
atgaccgacacaaattactttgaagaaaaattgcgttcaatggcaatagaaaaatacaccaataataataagaaattaatcgccgcacaaatcaatgagcaatcccagaaagtacaacttgcagggcttgtatgtggtaaggatgcaattgccctttcaggcgtaacttcccctatgttctatgctgcaaagcgttttaacccaaaggaatttccacaagaaatttaccatgagacagagggttatatctggtatcgaaagcaagacattgtagacttttttgcaaaacatccagcaagacgatatggtagtaaatataatggctaa

SEQ ID NO: 380717 - DNA, 1614 bp, Salmonella enterica
atgaatgctcctatacgtatggtaatagactggaacgcgaagccaggaaacggctatcatttttatgatgaaaatggtgatgaagttgggccgcttcaccaatttattaaagatgaccgtattagaatggtaatagattgggatacgaagccttccaatacagaagcaactcttgatgaaaatggagatgtaatagaatggacagatgaaaattgtattaggtatgatgcattcggtaatgctatccccaccaagatattatgcgcaattgaacaagaagaaataaaacttcaatccgaaaagcggttacgccctataattgagcatttatttaatcgaaaacaagtgggattcctttatggtgaatcaaatacaggtaaatcatttgcggcactatccttattaaaccgtgttgcacaaggtaggccgtggtcgggtttgcgtgttgctaaagaatgccatgctttttattttgacggtgaaacaggcgtgaaagttaaagacaggaataccgcatggagtaaaaaatttaacggcggaattaaaaataaaaggatgcatattctatcaccgcaaataaatctttttgatgtgggtgttcaaaacataattattagcgacataaatagcatcaccaataacaaagggggcatcatttgctttgatacactttcttcttttctggcgtattacagcaaacaatgtattgatggaaaaaccactttagacatggataatccagatgaaaatgatgctattgcaatgcgcaaactggtttcaatattaaaaaggattgcggttgaaactaattcctttgtgcttatggttcaccacggcggcaaagatgcagctaaaggcatgaaaggcgcaattacattaaaaaatgactgtgatacggtaattaaattagcggctagtgatagacaaactggaggtaataatattgcgttttcagtgtcattaaccgtggaaaaaaaccgcagcgccgcaaagcttccggtaatggaattcaatttatgctcagaggataacggtattacacaacaagagttacatgaaatcgacaatgaattatgtgactatcccgatgaaggcgaaacaggctatgaggcaaaaaacagcactaaaacattagtgtttattgataagcctaataagattaataatgatgaaaaaactaataaagaaggtgcattcccagatcgaaaacaagctggtgatgaatcacttgaggcgaaaccttcacagataaataaatatgctcaggcacatacgcatcatcatcccccaacgacacaacaacagcaacaagaaacaatagaaactaatcgaagtaatggagaaacgcgggtggttgctagtggcttcacaggagaagcgagagttaaaaataatgatagttatattatgcacatgaatacgcttaaaaaattaaaggatgcaccattacaaaaagagttatacgaaaagatttatggtgaaattagtgataacaagtatatcagtgctatcaatttagatatctttattaacaaggaagaaaaaacaataggcaaaaggaaagatgtgataaaaaaagcattaagcgaaatagtgaaaaaaacgcaatcgtga

SEQ ID NO: 380718 - DNA, 270 bp, Salmonella enterica; identical to SEQ ID NO: 86011

SEQ ID NO: 380719 - DNA, 525 bp, Salmonella enterica; identical to SEQ ID NO: 86012

SEQ ID NO: 380720 - DNA, 207 bp, Salmonella enterica; identical to SEQ ID NO: 86013

SEQ ID NO: 380721 - DNA, 252 bp, Salmonella enterica; identical to SEQ ID NO: 86014

SEQ ID NO: 380722 - DNA, 693 bp, Salmonella enterica; identical to SEQ ID NO: 86015

SEQ ID NO: 380723 - DNA, 324 bp, Salmonella enterica; identical to SEQ ID NO: 86016

SEQ ID NO: 380724 - DNA, 789 bp, Salmonella enterica; identical to SEQ ID NO: 86017

SEQ ID NO: 380725 - DNA, 4182 bp, Salmonella enterica; identical to SEQ ID NO: 86018

SEQ ID NO: 380726 - DNA, 618 bp, Salmonella enterica; identical to SEQ ID NO: 86019

SEQ ID NO: 380727 - DNA, 4632 bp, Salmonella enterica
atggaacagttcaagaagaagagactgcctctcctgattgcaggtgctggcggtaagaaaagcagtggctccagccgcacgccggttgaagccgacgataccgtaaactcgcgtgctatggcgtccatcctcgacctgctcggggagggtgtcattggcgggctggtggatggcgcaaagtcgatcttcgttgatgacctgccaatcctgaacgaagacggatctccaaactttagcggtatcacctgggacttccgcgatggctcacaagaccagacgccgatgtccgggttcgatttcgttgaaacgccgaagtcagtcaacatccagctgaaaagaatgcacgacgttacgattgccatcgataacgatgaggcagaccgtgtccgcgtcattctgaagttcccgtctctgcgtagcattgacaaaaagaccggtgataccaacggcacgaccgtgaagtacaaattccagattgccaatggcgataatgccttcaaggacgccattgcagaaggggagagcacttccgaaattacgctgacggcaaaaaagacgggcgtctactaccgcagctatgaactaaaactgcccaagccaggccgtgcctacaaggttcgcgtgcttcgtctgaccgatgacagcaacactcagtacatctttaacgatacgtgggtggactctgtcggtgagatcgtcgatacgccgatgaactacccgaactccgcgctggtcggcctcaaggtcaactcagagcagttcggcagctcgatgccgtctcgttcgtatctggtgcgtggtctgaagatccgcgtcccgtccaactacgacgaacacacaaacacctatatcggcgtatgggatggcacattcaagctgttgtcatcttccaaccctgcctggattctcttcgacctgcttaccaacgctcgttatggcctggggcagtacgtttctgagtccatgattgacctcgggcagatttaccagattggccgctactgcgatgaagaaattgacaatggcttcgggggtaaagagaagcgcttcgctatcaacacccagatcaccagccgtcaggatgcgtaccgactgattcaggatatcgctggcgccttccgcggtatggtcttctgggctggcggcatggttaacgtcatgcaggatagcccgtcagatccggtcatgatgttcaccaacgcgaacgtcaaagacggcatgttcagctacaagggatctgcgcgtaaagaccgtccgtcagttgctcttgtgacctacaacaacaaggaagacggctacaagcagaacatcgagtacgtcgaagaccaggaggcgatgcgtcgttatggcgagcgcaaaaccgaagtggttgcgttcggctgtaccagccgtggccaggcgcatcgtgtcggtctgtggcttctgtataccgcacgcatggagtccgacgttatcagctttacggcagggctggatgcttccttcctgatgccgggcgaaacggtgctgattcagaacaaataccgtgctggtaaacgcaactctggccgcattgtggcgttcacaaagaacagcatcactctcgacgcaccggttacgctgaataaggctggtagctacatccggatcttgaatcaggaaggcgaaatcgttgagcgcgatattcttgagaccggggaagacattaccaaagtaaccttctccaaagcgctcaattccggtgatatgccggttatgaatggcgtctggacgattaccgagccagatctggagccaatgcgcgtgcgtgttatcaacgttgcccagggcgaggctcaggggacgtttgacgttaccgttgtccaaaataacgcatcgaagtacgaagccatcgacaacggcgcgacgctgatccccgagaacaacaccgttctcgacccgacttattcgaagccgaccaacctgcaggtgacggaagggacgtatatctccagtccgggcaacctctcaatcaagctcgttgccacctgggaaggtaagtctgcggaatattggatcagctggcgtcgttccgatgagaacaacgtctctaactggcagtccgcacgcgttaccgaagagcagttcgagatactcaatattgccgagaatggccaatacgacattcagctctatgcggtttcgttcagcggcaagaagacggacatcatcagtaccgtttaccaggtgaaaggtacgatgacgccgccaggctctcctacctctctgacggccgttggtgactaccgcaacgtgattctgaattgggtcaacccggactcaatcgacctcgatcacatcaacgtgtacgcctcccagaccaacgatctggaaacggcaaagttgattgcagaggctgccagcaccacgttcacccatgccggtcttggggatagcgagacctggtactattgggttcgcgcggtgaacaagcgtggcatgttaagcccgccgaactccaatctgggtacggaagcgatgacgcgagacgtcctctcattccttaccgggaagatcacctcttccgagctgggacaggagctgctggaggaaatcgactctaaagcctctcaggatgcggtcgacgccatcaacaaacagatggaagaaagcctgaaagagcttgatcagtccgttgccgatctggacagcaaactggaagacaccagcggtcggcttgaacaggcccagaacgacctcaaaaatgaagtctctggcacgctggacaaggtcaacgacgcgctgcaacaggttgaggactctaatgcggctctggttgagttgcaggagaccgtttccgagcagggcaaagccgttgcaggtgctgtggaagcggcacacgctgcgctcgacaatgcctccgcgctgattgctgaagagcgtgaagcccgtgtcgaaggcgataaggcaaatgccaaacagattgaggcaatgaaatcctccgtcgatgacagcgttgccgccgtcgaagagatgaaaaagaccgtagccgaagtcgaacgcgccagcgcggaagtatcgaccaatatcgaggctctggccaaaaccaatattgacctcgctctgcgtcaggatgaagaccagcacaagcaaatggtcaataacgcgaagatcgccaccactcagaagacgtttgccgacgatatgtctgcaatggcctcaaaagtggaagagatccgcgcagaaattggtgaggatatccgggcatcgattctggaagagacaacggctcgcgtagaggcagataaggctattgcgacgcatatctccaagctggaagcccagctcaacgacgatatttcagcggccatcgttgctgaacaagaggcgcgtgcgactgcggatgaagcgctttctcgtcagatcaccacgttgcaggcgaaagttgaaggggatatcagcgcggcactcactgaagaacagattgcccgagccacagcggatgaggcgctatcgaagcaaatcacccaactgaaggcccagactggtgaggatatcaaagccgccgttgcggaagagacccaggctagaaccgatgcagatggtgctctggcttcgcagatcagctcgctgaaggctcagacggcagaggacatcaaggccgctgtcgacacggagacgaaagcgcgtacagatgccgactctgctctggccgggcagatcaccaatcttcaggctcagaccggcaaagatatcaacgctgctatcacatccgaagccaccgcgcgtgcaaatgctgacggtgctctcggtaagagaattgatacagttaaggctgaagttgatggtaactcggctctcatccaggagcaggcgaaggcaattgctgataccgataagaaggtttctgctgcctggacgctgaagatggaaacgtctaccagtggcggccagaagtacgttgcaggtatcgcgctgggtatcgacagcaccggtctatcgcagtttttggttcaggcagaccgttttggtctggtcaactccgtaaacgggaagatcaccacgccttttgtcatcgaaaacagcgtggcgtatatgaacggcgcttatatcaaagacggcacaatcactaacgccaaaattggtaacgtcattcagtcgaacgattacgccgctggcagtaaaggctggattatccccaaaaatggtagtcctgagtttaataacggtacgttccggggaagcatcactgcgaactccggctcgctgaataacgttaccatcgcacagaactgccagattctggggaaactgcacgccaaccagattgatggcgatatcgttaaagcctacatggttaatggcagcagtatctatcttgcgcctcagacgttcgctcgtgtgatctacgtttccggtgggtactactattacgctccatcggagaataccaacacctattcatggtcaaggattactgaatatacggtaaatggtgtcaagcagcagatgtatggcaaacgagacaactcagaaaaccagtccggcatgttcggctattacaacttgcctgctggccagtctgcaactgtcgatgtttatacctggcacgagcagcgtaaatacaatcaccgtgttaacgagccttatctcgttctggtgtttaaggcttaa

SEQ ID NO: 380728 - DNA, 588 bp, Salmonella enterica
gtgtctgagttagttcatgtgcaacttggtggcccgatggccagacatttcggccgccactggcatttaaaagtgcgcaacaccaaacaggcgttggatttggtcgaagccaaccgtccgggcttaaaagcctggatgaaacgcaacatgaagacctacgacagttaccacatccagatcaccaataagcaggggcataagtggtcggttgatgagagcgagtttcaaatgatggggcagtccgacaacatcgcgaagatccgcatcacgccggttcctcgcggtagtggcggtaaggcttttggttggttccagacagtcgtaggggcactcgtcatggttgcctcattctggttcccagcgctggccccgctcggcttgtcgctaatgatgggcggtatttcgcagctaatttcgccccaggcgaccaatgacagcgtaaggcaggcagataactcgaactcgttttatttcgacgggccacaaaacaccactaaccagggcaacccggttcagctcatttatggcgaggaaattctggtcggctcacaggttgtgagttcttcgatcaccatcgaccagctttag

SEQ ID NO: 380729 - DNA, 798 bp, Salmonella enterica
atgggtaatagagctttcccggagcttggttcggacgttatgcaggaaatctatctgacagccatcaaacgctacccgaacgaagcgtgtggctttctggtgcgtaccactggcgagaaatatcgcttcatggaagcccggaacgtgtctgaaaacccggaaaacacgtttgttatgcacgctgacgacattatcgcagcggaagatgcgggagacgtggttgccatctggcactcccacactgacgaatcagctgaagcgtcagacgccgaccgcgccggatgcgaggcaacggaagttccgtggctgattctggctgttaggaagaatgtcgagggcgatgcgccatttcacttcagtgagatgaatgtgatcaccccagacggctttgagatgccttatctggggcggccctatgtgtttggtgtcttcgactgctggatgctgtgccgcgactacctgaagcgtgagttcaacgtcgagttgaatccaaacccgcacctgcatattccatcgtggtacacgggtgataccgacattctcgatcagaactaccgcaatgaagggcttgttcgtctggcgccggggacggaaccccagcgtggtgacgtcttcttcattcagtacggaaagatgcctgaccactgcgcggtgtacatcggagacggaatgatcctgcaccaccagatcgaccgtctgagctgtcgcgcttattacggtggcatgtaccagaaacacacgacgcaccacctgcgtcacagagacttactcaagggagatgaagcgtgtctgagttag

SEQ ID NO: 380730 - DNA, 732 bp, Salmonella enterica
atgttggcgcctctttatttcaaggaagaaacgatgggtattaaagctgatattcagagcttgtcgccctccgcgctcattgagctgttcgaacttgatatgtcgaacaccacctctgggggcaagctgtttttccacgccggtacaaacgaactgatggagccagtcgtttggcaaggcgtgtcctacgaaccgtggccaatcaaggcgtcaggctttgataagactggtcagggtactttgccgcgtccaaaaatccaggtctccaactttgccggaactgtctccgctgaagttcaggcaaacgacgatctggtgggctgccgcatcatccgcaagatgacgctggcgcgttttctcgacgcggccaacttcaaagacgggaatccaaccgcagatccaaaccagcacttcccggatgagatgtggttcatcgaacagaagactctcgaaacccatgaggttgtcgagtttgagctgtcgagtgtgttcgatctgatgggtgtgcagctgccgtaccgccagatcatcaaaaacacctgcccgtggaaataccgcggtccagagtgcggctacaccggcccctatttcgacaaaaacaaccagcaaaccaccatgtcaggcgcggattactgcacgaaacgctacgactcatgcaacgcacgccgtaactactttgccaatggcgtaatccactttggcgggttcattggagcaacgcgttatgggtaa

SEQ ID NO: 380731 - DNA, 336 bp, Salmonella enterica; identical to SEQ ID NO: 86024

SEQ ID NO: 380732 - DNA, 4569 bp, Salmonella enterica
atgtcacaaaacgtagagtttatcctgtcgctggaagacaagcagtttacagcgtcaatcgaccgggcgggtaagctacttaccagattcggggagcaggccacaaagcccgctcagaaaattaacaatctggaacgctcgttgggttcggtctcccgcatcatcggcgttctggagtccaagctcgatgccacggcagacaaactacaggatgtagctgccggcttcgagcttgtgtctgatgtttcgcgcaagacgcgaggcaacattaccagcctcaactcaggtctcaaaaccctgattgagcgcgtcgacacaaccacctcatccgttaataaactcaccacatcgctgcgcaaggttcagtctgaactcaacgagttttccgattgggcaacgttcgctggcaagagcgccagccgcttcggtacggaggtaaaagaagcctcttcctccgtgagtggcatgaatacgcgccttaacaccacgacgaagcgtctcagtaattggggtgtcacaacgagccaggctgccgaggggctgaagaaagtccgcgatcagatggatgccgtgattggccgccagcaactgatcagcaagccggtacgtgtgcgcaccagcggctacggtgagggcggtggcggtcgacgtggcggcacaaatggccacggctggcgcggtgctgaaaatggcgttttctctggtctgcgcggcaatattttcctgctgggcgagattggtgatgcagcaagaacggtaactgacatcctgtttggctggcagaagccaatcgtcgaagccgcctccgaaatggagcgtatgcgcgtcatgttgcgcgggctgaacaaggacaaggccaaccctggcaaagcagccgcagaggatatgcagtacatcgtggatatggcgcaaaacgccccgtttgcgatgcaggcgctgaccgattccttcgttaaattccgctcggcaggtctcgatcctactgacggatcgctgaaagcactggtggactccgttgcacgcttcggcggcgatagcgagctgcttaaacgtgctgccgtggctgtccagcagatgtccggtaagggcgtcgtgtcgatggaagagctgcgtcagcaattaggtgaagccgttcctaacgcgatgaaagcgatggcagacgctgccggtatcactatgggagaactgaccaaagcagtctccaccggtactgtggaagcgaaacaggcgctatcgctgatgttcgttggtctgcgtgcggagaacgaaaacgccgccaaagacatgatgcaaacctacactggtgcgctggcgcaattgcaaacctcctttacgctgtttgccgatcgtgtcggtcaggcgggctatctggattctctctcaaaggggatgaaagagctggcctccatcatgaatagcgcagagggcatttcgttcgctaactcgctgggttccggactctccacggcgatcgacggcttacgcgagctggcgcagtggctggctaaaaaccaggaactggttatcagcctgggcaaagtcgttgctgcaatggtggcgttcaagctgatgcgtgccgggattgcaggcgtgattggcactgccgggcaaatggttaacacatttaccaagatgtcgaccgttctccaggctccgttcaatctgggcgcgacagctgtcacccgctttaatcgtgcggctcgtatggggctggctccaatcccatcgctgatcttcgctatccgcggcgcgattacggggcttcagggcgcgtttgctgggctaactgcgttcattgcagcaaaccccattggtgcagtgttcaccgtagctaccgtggctgtagccggtcttatcacgtatatgaccatgctccgcagcgaaacgtccaaagtcgtggatgagatccgcaaaatcccggaggcgatgacggcggccaagcgtgcgcagatggcagcgcgtgcagccgagcttgaaaagcagatccagcgagaccagcaggcgcttaaaaccggcgaaagcgtgaactactactccacagcggctggccctgtcgccgtgaaggagtccaaagaggttgttgaggctcgcctgaagaaaaatcaggaagagtacgaaagaaccacaggcacgatggcgctgggtgatggcgcggtggccaaacggctggcaaaagaggctgctgaatctcagattgagaaaatccgggcagataaccaggtcttctctgcgacgtttgtgaaagcccgtcaggaggctctggataagatccagaaaatcaacgacgacaaatcgctttcggacgacgagaagaacaagctgctcgcaccgcttcgcgagaaggtgaacaagtcctatctggaaccggcgcagaagctggtcgacgacctgtcttctcgcaaaaacgcaaccgagaagcaaattgcccacttcagcgacatgctggagaaagcgaagaaagaggggaacaccgagcaggttcagaagctacaaggcagcatccgtgggtatcaggagcatcttgaagctgttgctcaggagctgactcaggcggagttcgagcgtgatagcgcggcgaaaaccggtaagggcgtaatgtccaaccagggaaccgttctggggctgggaacgaccgataaagcggctcagaaagcactggcgcagtatatgcggaaccagatggactccgcgacctaccagcgcacactgccagacggtacggcgatgctggacttcgaaggcaagccgatcatcgggccgaaacagctcaaaacccagttgaacctgcagaaagcctccagcgccagctctctggagaaaatgagcgacgaggaacgtgcagccgcgatcgccgcactgaccaaagcgcgtgagcaggacgccgcagcagcggaaaaagccgggcagcgtactgccaatgcttctcagcgtgccgcgaggaaggaagaaaatgcgcagcgtaagctggcggccggctaccagaaagccctggataaagccgatcagcttatggggcagatgggtgaaagctcaaaagcgaccgtgtcgtttgatcagtctctccgcgataccaccaaatcgctgaccgaactggccaacgccgtaccgaatgagttcatcactcaggagatgatcgacaaagccaagtcacgcctggctgacctggcgaacgcgagcgacgactatcgcgagatgttcaaccgccgcaacgtcgagcagatgatctccacctgggcgccggaatccgattctatcatcagcgcgggttacaagccgtctcgtgaagagaaggtggtcgatttcaacgacacctacaaccgtaacctgaaagcgttgatggatctgcgtgaccaggcttctgatccgaaaatcgtggcgctttacaccaagcagattaaccagctggtggcggcaggcaacaccgctctcatcaaagagacgggtacggcgacacagaagctggcgcttgagtacgagaatctggccgatcagctggaaaatagctggagcaacctgttcagcaacatgacggatacgctgaccgacttcgtcatgaaggggaaaatggacttctccagcctggcagaatccatcctccgtgacatcaccaacatggttgtgaagacgcagatcaccctgcctctcatgaacatgctggggatgggaacgacggcagcgggcagctctcagagcggcaatctgctttctggtgtcgcgtcagcggttgccaaccagggcgtccggatgaatgcggtcaacggcgataagagcgtgggtgaggcgacgaaagagacctccagctcggtctccggtctggggcagaccactcagcagacgaccagcgcgattggatctgcaaccaacgcgatcggcagctgggtaaatggactgttcaccagtactgaagccaaagacgcggaaaccaaagcggtgaagacatccatcttctccatgcagaaccttagctctgtcactggggcgctttctgccgcgtttgccatgctgggcgcaaacatgtccggctctggcaataagtggttgagcttcggcgctaccattgcctccgggctggtgtcggcctgggctggtggtggcttcgacaacatcggatctggttcctccggctctaactccggattcaacaatctcaccggatcggcatctgatggtactggcggcatcccggcaattccgaagttcgccaaaggcggcattttcgggaaagacggcgtggttccgctgcgtgcgtatcagaaaggtggcatcgctgattctccacagctggcgctgtttggtgaaggggatatgaacgaagcctacgttccgcttccggatgggcgttccatcccggtcacgctcaacgcagagggtgttaaaggcggtggcggcgttttctcacctgtcagcattgagatcaacgtcaacagcgacggcagtgtctcggagaacagcaattccgaaggcgcatggagtcaggcagcgcagcgcatgaaggcgatcgcgcttgaaaccatcgctcaggagaagcggccaggcggttcgctcaaccctaactctcaacgtaactaa

SEQ ID NO: 380733 - DNA, 270 bp, Salmonella enterica
gtgtcgccattagagctgctgggcgtccctctaacgatgttctggatgctcagtcgcaacatcgaccgtctgcgcgcggaagaggatgtccgcaacctgcaagtcgctcgcgctgcccaggcagatggcgagggcgtgaaggcgttcatggagggtttgcaactcaggattggaagaccagtcgtaaccgataaagtctacgatccacgcaagaataaggcagaccctgacgccaaagagcaactgatgcaaatttttggcagaggatga

SEQ ID NO: 380734 - DNA, 318 bp, Salmonella enterica; identical to SEQ ID NO: 86027

SEQ ID NO: 380735 - DNA, 747 bp, Salmonella enterica; identical to SEQ ID NO: 86028

SEQ ID NO: 380736 - DNA, 384 bp, Salmonella enterica; identical to SEQ ID NO: 86029

SEQ ID NO: 380737 - DNA, 474 bp, Salmonella enterica; identical to SEQ ID NO: 86030

SEQ ID NO: 380738 - DNA, 345 bp, Salmonella enterica; identical to SEQ ID NO: 86031

SEQ ID NO: 380739 - DNA, 834 bp, Salmonella enterica; identical to SEQ ID NO: 86032

SEQ ID NO: 380740 - DNA, 396 bp, Salmonella enterica
ttggggtacacgggcattctctgcggtatccagtttgtcgacggcatctcggttgccgaactgccattcatcgatcagcagcggatttgtgcctccatgcgtgccactaccgttgaaggcaaaaatgtatctccttctgccgcgtacagcagccgcaatgatttgactgcggacgacattgtcgagacggcggccccggatattgtgccaatgaaacgtggtacggctgaagtggaagccaaaccggtacagcgctttactcgtgaagagctggagtcgattgcggactgtgaaggtattgcgggtctgcgtcagatcggcaaccagattggcgtgaaagccaaaggtatcgttgaaatgatcgaaggcatcctgaaagcacagggcggtgagtaa

SEQ ID NO: 380741 - DNA, 924 bp, Salmonella enterica; identical to SEQ ID NO: 86034

SEQ ID NO: 380742 - DNA, 876 bp, Salmonella enterica; identical to SEQ ID NO: 86035

SEQ ID NO: 380743 - DNA, 897 bp, Salmonella enterica; identical to SEQ ID NO: 86036

SEQ ID NO: 380744 - DNA, 1575 bp, Salmonella enterica
atggaattgactgacaagcaaatcaaagaccttgtggcacgacgccaccctgaatatgagaagaaaaaagaacattgggacttcctcgccagcacctacgctggcgggcgtgcctggttcaacgacaatatcttccgttacttcaaagagggcgatcaggagttcaaagagcgcctggaacgcgcttatcgcttcaaccacactcgtgaagtggtaaacctcatcaacaaatacctcttcaaagaggtcattcaccgcaacactgatgaagcgccggagcagatccgcaatttctggaagcgagccacgcgccagaacacctccatcgatgcgtttatggcggctatcgatctgcaatcatccatttatggccgtatctgggttgtcgtggacagcaccatgaacgtcgatgttgagtctgttgcagacgagaagaaaaatgatgcgcgtgcctacgcttactggatttcgccgcagcagctgcttgatgttgcctgggacgaagacggcaatatgttgtgggcgctgattgttgaaatcgcgcgcgacgacgaagatccgttcacgtcaaccgggcaggaataccagcgttaccgtctgtggacgcaaaacgagtggtatctgttccgtgaagaagtgaagaaaggttccggaaatagcggtcgtcgtcaggccaaagtcgttctggaggatagcggccagcacaatctgggcgtggtgccggtgtttccggtggactgcattggcgaaagcgagtctccgtatttcagcccgtcgttgattgacgatatcgcctatcttgaccgcgccgtggccaactacctgtcgaaccttgacgcgattattcaggatcagacattcagccagctggcgatcccggttcagtcactgctgccgggcgatgaaaaccacaccaaagtgctcgaaatggggacaaaacgcgtcttcaccttcgactctgagagcggtaatcagccattctacctgtctccagacccgaaacaggctcagatgatcatcaccacgattaagacggtgattaacgagatctaccattccgttggtgtggcaggtgagcgaaccaagcaggataacgcgcagggcatcgataactcttcgggcgcagcgaagatgtacgacttccagcgcgttaacagtctgctggtgacaaaagcagagcgcctcgaaagggcagagcgccagatgatgcagctggcagcgaaatggatgggtgtcgaactggatgaagaccactctctgatcgcatacccggaaagtttcgacattcgcggtctgactgacgagtttgccgttgccgagaaactgtcgctgcttcaggcgcctgattctgttcgtcgtcatcagatggaaatgctcatcgagaaggtcttcccgaacatttccgaggcgatgcaaaaggaatttcaaaaagatctcttgaaatttcctccaaaaaatgatcttaacacccttgaaaataagtcagtacttacttatgatcaagatgcagcccaagaaagcgggcaagatcaaccccgagggaatggggactcatctactcaagagaccgagtga

SEQ ID NO: 380745 - DNA, 1257 bp, Salmonella enterica
atggccatcccgtcgtctctgagtctcgtacagctgcattctgggcagatgcaagtcttccagtcgccacatcgtttcaaagtggtgtgtgcgggtcgacgctggggtaaatcccggttgtcgatctccaccatcatccgcgcggcagccaaagagaaaaagcaacgtgtctggtacgtcgcaccgacttaccagatggctcgccagatcttgtgggatgacctgcaggaagttctgcctcgtaaatgggttcgtaagaaaaacgacaccacgatgaccatcgtgctgaagaacggctctgaaatcgcgctgaaaggtgcggataagcccgatacgcttcgtggtgtggcactgcacttcgtggtgctcgatgaatttcaggatatgaagcctgacacctggtacaaggtactgcgtccgacactgtcctctacccgtggcggtgcgctgatcatcggtacgccaaaaggcttctccgagttccacaagctgtggactatcggtcagaacaaagatttgcaacgcaaagggcagtggaagagctggcagttcgttacggccgattctccgttcgtaccgagcgcggaaatcgaagcggcgaagaacgatatggaccctaaatcgttcgcgcaggaatacctggccagcttcgaaaacatgtccggacgcgtttactacccgttcgaccgcaatgtgcatgtgaagccactccagttcaatccgaaactgccgatctgggttggtcaggacttcaacatcgaccctatgtcatcggtcatcctgcagccgcagccaaatggtgagctgtgggccgtggacgaggttgtgctgttctcttccaacacggctgaagtgtgtgatgagctggagcgtcgtttctggcgctggaagtctcaggtcactatcttccctgacccggcaggtgcgtatcgccagcacgcacgcggtgaatcggacgtcgatatcttcaaggaaaaaggtttccttcgagtcgattatccgaagaagcacccgccgatcgcagaccgtgttaacgcagtgaatcgcatgttgatgagtgcctcgggcgaaacccggttgtacatcgatccgaagtgcaaacacctcatcgactcgctggagaaggtgatctacaagccaggctcacgcgatatggataagactggcggcatcgaacacagtgcggatgcgttgggttatccggttcatcgtaggtatccggtgaaaaatcgtgttattcttggtggatctagatag

SEQ ID NO: 380746 - DNA, 642 bp, Salmonella enterica; identical to SEQ ID NO: 86039

SEQ ID NO: 380747 - DNA, 267 bp, Salmonella enterica
atgacgttgaccgacaaacaaaaagacatcatcaaaaccatcaatttaggccatgagcgtgggcatctgctcgatctggacgagctgcttgaagtgctgccgtacaaaacgaccaaacagagtatgcagttctctatccgcgcactggtgaaaaaggggctggtggagaaaggaatgtgccgccagcgcggtgattccggctaccaccgtcgcacgctgggactgaccactttaggtcgtgccagagccaaattactggtgatgtaa

SEQ ID NO: 380748 - DNA, 891 bp, Salmonella enterica
atgacagacatcatcatcaaacgctaccgcccggaagagttcccgcgtcatctggactttctggagcgtatgaccgttaccaaaggcacggttgaagactggcacgcgctgaagtcgctgcactacaagacggatggtaagccgttcgcgccaacgtattatcgctgcgaactggacgaccggctggtgggcgtcgtggttatggcttacccgaaactgctgctggcgcctcgccatcgcatgtttcctaagctgaagccaaccaccaataccaccgtggccaaccagtattgggggcggtacgtgaacaacaactttgcggtgatcagccgttccgttgtggacactcagtaccgcggcgtcggcgtctcctatcgaatgattaacctggttagcaggatgcacgaccggccaatcatcgagatccagtcgtcgatgagcaaatacaacccgttcgccatgaaagcagggttccagttcatccgtccggagcgtccgaagagctatgagagtgcgttgcgcgtcttccagcgtcatttccgttccgaccctggcgacaacgaagcgatcgtcaaagagctgttcgccatgagcgagtctcgccgtcgtcgtgcgctgcgtgatctggtcgctgactaccacaagaacagttccctggccaaagccgggcgtaatcgtggcacgacgattcaggacattgccgacagtctggtggacgaggccagcatcgtgaagctgctcaaggacattcacaacctgagcttcacgtctccgctgtatggcgtgtaccgaaacccggactttggtcgtcagctgccggacacgctgccactgctggcattcgacaaacagcctttgaataaacctcttgaaattgcattaccggcataa

SEQ ID NO: 380749 - DNA, 255 bp, Salmonella enterica; identical to SEQ ID NO: 86042

SEQ ID NO: 380750 - DNA, 639 bp, Salmonella enterica; identical to SEQ ID NO: 86043

SEQ ID NO: 380751 - DNA, 669 bp, Salmonella enterica; identical to SEQ ID NO: 86044

SEQ ID NO: 380752 - DNA, 681 bp, Salmonella enterica
atggatgtgaaaattacgattctgcaggtggaagtcgcgaacctgcgtccgaatccctggaataccaactccgttggggcgcaaaacttcgaaaaactgaaaggctctatcgaaaaattgggcttttttaagccaattctggcgcgggagctggacgggggcgtttttgagatcctcggtggcgaacaccgctggcgtgccgcgatggagcagggcatttcaacggttcccgtcatctccgtgggcaaaattaacgacctggtggccaaacagatgtccctcgtcgataacgagcgctacggcgaagacgatcaggtcgctttgcagcgcttaatcgaagaaatccagtctgaaatcgactaccggttgtccgatatcgccccatatgacgacgaaatggcggcaacactcgccaaagcgtccgttatcgatcttgaagcgctggaagcgctctcccgtggcgatgacgagccggtcgatgaggacaaacgcgagaaaaccgagcgagtcggcgctgaacaccagacgatgcgcttcaaagtgacgtttgatgcgtcagatcgcgtcgccgacaccatcaaaaccatcatcaaagagcagggaatcaataccggtaacgaaatggagaacgccggggaagccctggtgtggctggtcgactactacaaggagcgtatgtaa

SEQ ID NO: 380753 - DNA, 1560 bp, Salmonella enterica
atgacagttcggattgtatcgaatgcagtcaatgcgctgatttctggcgctgatgacaacgtgaaacggctcgttcaggagatgttgagctatgaagtggaggctggtgactggaaaggaaccagcacgatgttcaactggagcaaaaacgcattcccggctgggtttgcgaagccagtagcagccaaccttctgaaagctggcataaaatgcgtgcatgtgcgtaaggaaaaagcccccgcgctgggcaagccgaacccggtagttaacccattcccgtataacccggactatgcgtatcaggatcagactgtggaaacactggtgcgcgaagggatgatgattgcccagattgcgacgggtggcggtaaatcgaacgtagcgtgtaaggcagctgctcgcattggtcgtatgaccctgtttttaaccacgcgctcggttctgatgttccagatggcagagaacttccagaaatccatcgactaccgcgcggagaatggcgaaccgtggctgaaaggtcagaaagttggggtgattggatctggtgagttccaggtctcgcgccatatcaacgttgccacggtgcagaccctggccagttttctcgaagagccaccgcgcgacgcatcaccggagaaaaaacagtaccacctgaagcgccgggaactggttaagcgctttctgtccagcgtttctctgctgattctggaagaggcacacgaatcatctggttcaaacttctacgatatcgccaggttgtgcatcaatgccgattaccgtctggcgctgacagctacgccgttcatgaaggactcgaccgaggcaaatatgcgtctcatggccgttgccggccgcattgagataaaggtaacggagaaatatttgatcgatcgaggtattttagcgaaaccatactttctatatcataaaatcgcgtacactccagacgaggtgcggattagggccgaacttgcttcgaaacacctgaactttcgggttggaatgagtacggcttaccagaaagcctatcagttaggcatcgtttacaatctgggccgcaacgaggctattgtgcgcgaagcgttaatgtacaaaagtcacggtctgaactgtatgacgctggttcgtttgaagcgtcatggtcagattttgatggaaatgatgaaggaaagcggcctgaaggtcgatttcatctacggagaatcaaaccagactacccgacaagcaaagctcaacagtctggcggcaggcaagatagatgttctgattggttcaaccattctggatgttggtgtcgacgttccaagcgtaggggcggtgattctgggtggtggcggcaaagccgaagttgagatgcgccaacgtgttggtcgcggtcttcgagccaaaaagaatcaggctaacgtgtgctttattaccgactttatcgacgtgagcaacaaatatctcatgtcgcattcatatgagcggaagcacattatcgacacgacgcctgggtttgccgagggcgttttgccggtgggtagcacattcgatttcactgttttgaatagagagtaa

SEQ ID NO: 380754 - DNA, 279 bp, Salmonella enterica; identical to SEQ ID NO: 86047

SEQ ID NO: 380755 - DNA, 258 bp, Salmonella enterica; identical to SEQ ID NO: 86048

SEQ ID NO: 380756 - DNA, 528 bp, Salmonella enterica; identical to SEQ ID NO: 86049

SEQ ID NO: 380757 - DNA, 651 bp, Salmonella enterica
atgtctaacgttgctatctctaaaaaatccatcatcgacgctgctgtagttatcgctaatgaattacaagttgcagccaataacgctactcagacttataacaatcattatcagaatggtacgcacacaaaagcagataaagctaacatgcttgcagcgactaccaaacttgcatacttcaccaacaacgttttaaacgctgttaatgatgagaaattagctggtgtcttttactacgcgattaaagcaagcaaacaagcgccagaagtgtttttccgcgaagctatgaccaatagctattcactcgaaaaattggtttatctggttaagtctatcaagtctggtaaatgcgtttattccgtcgctgatatgtccggatctcgcgtattcgcattaatcgaaatgattaatgatgaattagaaacattcacaaatggcgctgttttcgatttgatgaatgaagcgaaaaaagccaacgaaattaaattggacgctggctacactcaagccaaccagctgattaatctttgcgagcgtctcggactggtcgagaagatcaaaggaatgggcgcagcgaaaaacggatcgcaacaatatcgctttatcaagaatgatttttataactatctggctgatgctttcaaagcgtaa

SEQ ID NO: 380758 - DNA, 204 bp, Salmonella enterica
atgattagttatgaccagatccgcgcggagtatcgcgcaaaatatcgcgcttataaacttgaattaatcgacgacttaaaagcgcaacgtgacaaattaaattttacgttttctgatttgcttagcagcaaaagagactgtaaacgcaaacgtgaatatttgcgcttgtctgaaatgatcggaaaactacaaaacagcatttaa

SEQ ID NO: 380759 - DNA, 483 bp, Salmonella enterica
atgaactttatcgctactgttaacacccctgcgcatggccatatttctgtgacgttctctgataacgagaaaagcgtgctgggcgcctggcgtgacaatgtaaccatcgatctgtccgggaaagagaaacagcagatcaccaatgacattatctgcaaccgtcgccataaacgcgtatttgaaaaagcgtatgtctccacttcgggatttggcgtattcatcttcccggtacgcagcggtcgcttctgccagtcaaaactcatcgagttcgccacgcagatcgcgctatgggttaaaacagaatccgggttcaactttaccgaacaggaagcagtgggggaggggatgcgtatcgccaacaatgccatcaagtgcaaaaacgtcacctatgaagcaggagtcgactcgtggagtgtctcgtgcggggaatacgtgaaagaggtgtacggaaagaaccgcattcacatcctgactggcaagtaa

SEQ ID NO: 380760 - DNA, 282 bp, Salmonella enterica
atgaccgatttcactatctcccctaaagctgaaaacgtatggctggaatcctggctcgacctgtcgccggaagaacagcaggaaatggatcacgttgaacaggacgaacaatgtgatgcccgcttcttccgctttgaggacagcgtttatgatattgccgacttcatgcgcgatgaccgcttcccggactggcacgcaggctccccattaaatgccttcgccatgctgatgatccgcgtggatggctccggcgataccatcgacgtcggtctgctccactaa

SEQ ID NO: 380761 - DNA, 396 bp, Salmonella enterica
atgactgtaattcgtgaaaacctggttcttgatttgtactatgcgtcagaaacaacctcaggcggaaaagttgcaaaactgaccgctattctgcgtgacagcacgaacgggactgaagtgctcaccaccaccctgatccgcaccgggacagaagaggatggggtgtacaccgtaggcttccagagcatcagcgacgcatccgaaccaatgctgctgaaactggaaacgtatttccgcggcgtagacaaagagatgtttgagaagatgatggtgaaagcagacgagctgtacacctcctacttgaacccgagcaacacctggcttggacaatacggtctgcgcatcgtgtccaacgaaccggttgaaaactacatcccggaaagcgtattcgcttaa

SEQ ID NO: 380762 - DNA, 312 bp, Salmonella enterica
atgaaaaacgcgatgatcaccaaactgagcgcgggccagccacgtaaagaaaaaccaaccgtaatgagccagctgaccctgctcgatatcatcgccaacggcactgccattcgcctgttcaaagagacgctggtctcgttcgacaatggttcccgcacgcgttacgtaatgagtgtgcgtcgccagagtggaagagggtggatggcaaaacagatcatctggccggaaggagagctggaacaggcgctactggaagcgaacaaagtagcccagcaagaaatccagcgtgcctctctcctggcgacagcctga

SEQ ID NO: 380763 - DNA, 219 bp, Salmonella enterica
atgattaagatgcctgtgatggttgaggtgtggagtgtggattccctggctgagtgcctggatgctgtggggccggagttgtaccgcaagttgtggtcgttcgtaccagctgaaggggaatcacccaaagggaaggatatctggcatctgctcagtgaagatgaacagcgggagctggtggacgcggtacacatcgagttcccggacgacgaagattaa

SEQ ID NO: 380764 - DNA, 216 bp, Salmonella enterica
atgtacaagcatctgaatatcagcatcaccctctgtggcgaggaagcgtcctccgagtgtgagatctccctcgatgacgttatccgatctcaggatgttgctggtcgcgtggcgacgctcatctctgaaggatacagagaagggacgtttgatttccatatcgaggacaacccaatgtccgtcgcgtggaactgcacaacgtccgaaacgaagtga

SEQ ID NO: 380765 - DNA, 1203 bp, Salmonella enterica
gtgactgatacagcatactcaaaagccttacaaaaagaagtcgacccagagcaatacatggccctgttggggttggataataacaccgtacatgcttttgcgcgtgaagacgtcgtttgtcctatttgcgaggctggtggcggttcctatgtacgagcttcaggagtcggcaactatcgcaaaaaagctcatttccggtttattggggggagtggtgttagcgcacaccatccatcctgcgatttttatgatgatcgactttcgaacgaggtcaggcagcacctagtgcgattcaccactgatcgcacgagaattacgcatgtgatcagaaaaatggtatgtgcgggcattcaggaaaatgtcttcacacaagaagctatgcgaaatatgcggcagtggttttttgccaaacgtcgcgaatcgacattcgaaatcacattgagccatgagcagatcgattggttggcctatattattgagttgcctgcttacccatatgcgtggcacagagataccattttgccgttccatcctatgcaggctatcgtgcctggcttcgattgggcaaaggcgattttgagagagaccgttaggctacatcagcctactttggagtgcttggataggctaaatatccaccgcaaaaacatcgtagaactgcgaagttttgtccataaaacgcaaaaccccacactgttagatcctgagttattgagagaagaatacgcaaagaccctccagttgaacgcatttattatcaataactacattgaattccaaaacaaatcggtaaaagacagagctgatggtgaggaaaaactactcgcattttccgccttattgttgttcgtttcaggctgggatattgatctggccattgcaaagtttgcggccattgccaatgtgcgacaggtagatgacatgcttgccggtaacttcatgggcttgaacccttacttcaagttttcaattgccaatacaaccaaagcacttcaggacaactggccgattaactaccaagaaattgacggatggcaggtagagcagtctatgagagatacttatgtgaaacatagccttgtgttacctgtacctcttcccccactacagcctgatttgtacgttacaaagcacttagaaagtgagaaaagaatggccgagataaatcgcatgatagaaagcgattccatcgacttccagtag

SEQ ID NO: 380766 - DNA, 321 bp, Salmonella enterica
atgatgctgaaaatcaccgaatcgtataagacggcggtgatcagcaccgcccacgttacacagcatgactctgagtgtctgcctaatatctgtttcgacccactaacagatcgtggactgaattgggttcacggcacagagtacggatggattgtccgcgcaggtatgcgtggcaacgactggaaagaagagctacgtgattacggcgtcacatggcaaaccatcgagaacattcagaaggtactggatgccggctatgacgcggttcacttcgattgcgacgccgagctggtggatgggctgcctgcatgggattggtaa

SEQ ID NO: 380767 - DNA, 237 bp, Salmonella enterica
atgtttggaaccgcaaaagacatcatcgaaaagctggagaactacccagaagacgagccgctgctgatggtgatgtggcacaaggaagatgtaggtgaagtgcgaccagacctgactgacgaacagtgcgttcaggttatgcgaaaaatcaaagagtgccatgacgccaacgtcggcgtgaattgggacgtcatctctgacacggccgacactctgtttccgaaggagaaggcatga

SEQ ID NO: 380768 - DNA, 267 bp, Salmonella enterica
atgggtggaaaagactcaagctatcagatcgtttacagaggcgagactcttcaaaatttcaaaccggggcagtacgtattctttcaacgattgagggagtatggcggcggatactggttgggcaggactcatgaagatgggttcgagtttttgctggaagaaccaacctcgcttggaagaggtcttgagtttctgataactcactcgagcgtggaggccagatttatggagttcgtcgacgatgcggacgacttcaaactcacctaa

SEQ ID NO: 380769 - DNA, 204 bp, Salmonella enterica; identical to SEQ ID NO: 86063

SEQ ID NO: 380770 - DNA, 288 bp, Salmonella enterica
atgacggtttctcttgtagacaaacgacgtagtggacagcgtatccctggtcttgatcttgctaacggaacctggtttacgatactggacattccgggcatggagagtctggttaaccagaagcataccaatgaccctcttaatgtgacgccagccaaagcgaaaaagatggctgatattgtcgaagcgtggacaccaccagatggatggtcgggagacgaaccagagaagatgaagcgctatatcgttgagtttcttcgcggttgtaatggattcagaagccactaa

SEQ ID NO: 380771 - DNA, 303 bp, Salmonella enterica
atgagagagaaaatcaagaacccggtcgtcgtactgtataaacgggaaaccagcgattcgtatgcggtcgccattactgacggcagccagaacatgcacgatggtctgctgatggcttccgtgtctccggatgaggcggacaactctttcgctgtcttcgcgatggtcggttactacatggccgctgaaatcgaggcgctgcgcaagcgtgtatccgaactggaggccaaatccagcgccgaagaagccccgagtgtggcaatcactttgcctgcaaatttgagtactgaggacttgcgatga

SEQ ID NO: 380772 - DNA, 543 bp, Salmonella enterica
atgaaggtcgaaaaaatagatgttctttcctttgtgctgacggatctggaacgtctcgacccggtacgcgtaatgattgaaaactacgagccgggcaagggaagagtcaccatcacctgctatgggaaagcatggactgctgcctggttcgcgatgggcggtgacgatgtgcagacgtttattaagagagtgagcaacgattatttgattggttgcctcgaccctcaattgctgagtacggtcgacgatgacaacgacgcaaacctgcttttcgtgaagaccgaaatcataaagttgcgcagggagagagaaatcgacgcggaacaggcccgcaatatgtgggacgaggcagaaaacgctgatgacgtaaaagaaagttgctgctgtttcggtgtcggtaacgaactgctgggtctgtttggtgacgatccgtggtatgccggttggccaacggtgcaaaaccccagataccaatacctggaacgtatcgtgaacgcggtacgtgatgggctgaaagagttggataaatcagataataagtaa

SEQ ID NO: 380773 - DNA, 642 bp, Salmonella enterica
atgtcccgtatttccaaagcccatatgtttgccgctggcgctcatggcggcgttggccagaaaagaaaatataccggtgaagactacatcatccacccggttgctgtccgcgagattgttgcctggcatggtggaaccgtggagatgcagatcgcggcgcttctgcatgatgtggtcgaagacacccatgtcaccatagagatggttcgtgagcacttcggtgagcacgtagccgaaatggttctggctctgaccaacattgccagaccagaagacggcaatcgaatacagcgcttcatcatcaacgtccgggagctggagcaaagcctcgacatgcagacgcgcatgatcaagctggctgacctgctggacaatacctcttctatcgtgagtcgcgaccctgagttttcagccatctacctcgcagagaaagagctgatgctggccgtactctttgacggcaaggagattggtgccgatgccggtgttgtcgagtacctggagaaaaaaggcatagagcattcgttgctgataaacgcccgggcgatggtgacgaaaggcattgccagtctgcaaccggtgcacaccaaacgttatgaaaaacacaaagcgctgatctggggcgcgtgggaggctgcatga

SEQ ID NO: 380774 - DNA, 372 bp, Salmonella enterica
atgaagttgggtaatgccgtttcgctgttttttacagcattactggaaggtttcaattatcgcttttgtccggtctgggataaggcgctggatacacttattgatgaaggaacgctgcttgaggtgcgaaatgggatcgctctgtttgagcgcgatgcccagctatatgaagtgttcgtcggggctggcttcaaccacttcgggcatcttattagcttgaataccaaagccatcgacgagagcgtcatgcgccgtccgtcgttccgtgtaatggataagctgcaacgtcatgtaaatgccgaattactccgcgtagccaaagaaaaagaacgagagctacaggcgatgattggatcgcttatcgctgagtaa

SEQ ID NO: 380775 - DNA, 282 bp, Salmonella enterica
atgaatgacctgcttgtcgagcgagtctccgcttttgttaagtccccgctggataatcccctcacccgcggtgagcagatggagctggcaaggtggtttctgcatatccatgagcagatggaagtttttaaacagttgccggatctgcccattacagacggccatgttcagcaggtgattaacagccacgaaaaaggctgggcgatgattgtgccgtgcaaaattacctacgagctggctaaggaagtgcaggctaacagagcaaggagtaaggaagagtaa

SEQ ID NO: 380776 - DNA, 690 bp, Salmonella enterica
atgaaaaacacagtagcaccatttatagcctctgcgagtatggctgagacgccatttaacatcgtgtttcagggcaactcgaacaaacaagtcggcaaaattaccatcgacaaagataaagtgacgttcaccggcgaatttgatcccgctgcacaggtgtttgtggaacacattgcgaagcgctggagccagcaatggaaaaacctggaaaaacgcgccaatgagtttgaccggttcatggacgcaatggacacagcaaaagaggctctggctgccggtactccgttagatctggagtcgcttttcaaaggagagatggcctctgcgatgttcgccaccatgttcgcaggtgagttcgtccgcagcggcgccagaaactacctggagctggggtacaacgttcctgaaatgggcgagtttaccgtcaccatccaacgcaaagaaggcaagacgccaggcgaacgtatcgctgaacttgaggccgttgtggatcagcgtaacggcgagtgcgtccgtttgatcaacgaacgtgatgcgctgcgcgaagaacagctgaacaaaggctcgaacacacgcgcggccgcagacatctacttccagttggttgaggaatgccagatcccgccaggcggctctttggtcgagtacgttcgcgaattgcaagagaaagcagagaggtgcgcggcatga

SEQ ID NO: 380777 - DNA, 1686 bp, Salmonella enterica
atgaatacagccctttccatcattgacgctatcaccccaaacactgatatcgactacaggcaggaaatgaacgtcatccacgaaattgtggccgagtgcgagaaagagatcgcattcatgcatcaggttcacgacttcgtttatggcgacgaacgccacaacatgattaaccgcctgctgcgactcaaccaccggccggatgacgagcgcacacgctttaacagagcctggctggacaaggtcgaccttgaatgggtgaaacaaaatatctgggccgagtactggaagaaggtcacggatatgacaaacgttctgctgatcatgccagcttcccgccgcgacgagtggcgtgagcagttcatcgagggcaagcaggagaccatcaggactgacagaaccggctaccagatgaaggttaaggagttcgttggtgtgccggagttcaaagcagaaacggtcatccccacgatgctcaatctgctgaatgacaggcacaaatatctctctgagcgcgtgtatggcttgtttaaggcgctgagtcctgcccacaagaccaataagacgaacggctttagcgagcgtctgatcatcgccaactgcatttccgagttctggcgggacagcgtcagcgtgaactaccggaaagaggactacatcgacgacctgcgcgtcatgcttcatttcttcgcacacaaagagttcatcaccatcaaccgcacaactgagatgctatcagctgcgtaccgggcaaacgactgccagaccggtgactggatgaatgtcgacggaaacctgatgcgcgtgaagatgttcaagaacggcaacgttcactttgaaatacatcctgacgtggcctggaagctgaatgaggtgttggcttacagtatgcctgcagcaatcccggcgccatgccgtactgcacccaaaacacgggcaccaaaagagttcgggttaatccagaagacgatctccgagccggttcgtaccgcgctgcgcgacgggcgattcagcaaagacaaaggcgtctggtacttctctgattccaacctacagaagtcacaggtggaagagcttgagcgcacactgaacttcattggcggtgtgcaggagaaaaagcactggcagttcccgtatgagatcgtccatacgctcaatacgattgtggccaccggcttaataccggatacgaaatcacaccagttctaccctaccccacgtttgatagcggagtacgttgccagagccattgagctgaagccgggtgagaagctgctggagcctgaagccgggcgcggagatctgctggcctgcatcgacgtgaatccggaagacgttacctgcatagaagtcgcacctctcttcgctgatatcctgcttggcaaggggtacacaaatacagtctgctgcgacttcatgaagtggtctgaggacaacgcaggctatcagttcgacaaaatcgtcatgaacccgccctactctcttggccgtcacagagagcatacgctggccgcgctggagcatctgaaagtcggcgggcgactggtggcagtactgccgggtgatgcgccagttctgaactggatgacgctggataatttcgtttatgccaaaggaaagtcgtttactgacgagtttgaagacaccggaatcactgtcagcgtatacgttttcaaacgcgtaaaatga

SEQ ID NO: 380778 - DNA, 573 bp, Salmonella enterica
atgtgcgaaaaatgcaaaaaaactaatgccaaagttgaaaacgtgattaaaaaagttggtgcggccgaactggttgagatcatgggtcttgtggttggtcacgaagacgacgcctcccctatcgaccgccttttcagcgttctcaagttctcaagcatgattgatgatccgattgaaattgtgatgctggcgcgtcatttcggcgaagcgtatctggaagagaaagaacgcgccgacaaacttcaggcaacgctggaaatggtaagcaagccgaagtgctcaccggattcagtcaaggcagatgaaaccaacgccagcaaagatcgcgaaatcgccggactgaagtcttctctggcgatgttgctggccgccttcaaactgatgtcttcccaggctgggttcaaaatgcctgatctgaacagcgacgatccgatggccgttcgccagctgctgggggcaatggccgaccagcttgacgacaccaagagccgtcttgaagacatgatgcgcgagctgacccatcgccacgacctgaacaaacagccgcacaaaacgcagcacgtacaccactaa

SEQ ID NO: 380779 - DNA, 843 bp, Salmonella enterica
atgtttgagatgactactttatcgattcccggtgtgctcccggacagaccattgatgtcctcaaaagaaatctcaaagctgaccggtaaacgacacagcgacattcttcgcgacatccgtagcgtgctgaatgagctgtatgccgacgattaccataacgcaaaattgcgttatgagaaaaatcagttacttacaattgttgaaggcattgttgtcaacatcgattaccggggaatggaaggcgagtacatgctcgaccgaaagcataccgatgttctcattaccggctactcgttgaagtaccgcgctgctgtcattgagcgctggcatgagctggaaatgagtgtttcaagcggggcgctttacggtgcctaccccagcatcccggaaaccttttcagaagcacttcgactggcagccgatcttgaagaacagcgtgctgatcttgagcgcaagctgtcggtggcaaggccaaaagccattctcatggacaccatttgcggcactgctgatgagctttatgggctgaatgaagctggtcgcattctcggaacgtccggggctgttctgggtgcgctgatggactcgctgggtgatgtgtacgttaagcgcaaatacaccactgttaaccgccagttcctcaagatcttcattgaccgcggatatggcaaaaacgttgtcatcggaaacggacgcaaccaggccaagttcacctttaaaggactttgctttgctgccgtgaagctaattgctgccgggaaaattaccgccagcgccattgagtatgagccgtgtcgtgagcatgtcgaacgtgaaatgaaggaatccaaacgtcttcattaa

SEQ ID NO: 380780 - DNA, 189 bp, Salmonella enterica
atgaaatggagcttccagaaagtcaccgcgatgattgttggcctcgccatttttctgcttggtggctggatcatgaatctggtgaaactcgtgaacggtggcgatcttcagtttgatgccggaatgacgcttgcgcgtgtcgtgggcattttcgttgttccggtgggcagcattctcgggttcttttga

SEQ ID NO: 380781 - DNA, 495 bp, Salmonella enterica
atggcacgtcaaacgcctttcacttctttcaataaacgtccccgttcaattcgcctggttctggccgagctgtttagcggtcgtgtttctgcacgccttgcggaactggaagaacgagtgtttgagctggagaagcgcattgatgcgcaagctaccgccatagcaaatctgggcgcgacagtaggcatggagaaggtgcgtgattccgtcgcctctcgtgtgttgcgtgaatcccaggcacacaaggacagttctcatggaaaattttcaacgaaatcgactgaagccaatggcctacggagtaattttagcaaccctggcagcggtagccgtgccagccggtcagagtctgttgataccggacacaactacttccaccacaaccttgcagacgacaccccttccagaacgacctcctgtctctctggatgggatgctgctggacacgattccagctcgacctgcaactccggatcttccttctgctgtgactga

SEQ ID NO: 380782 - DNA, 609 bp, Salmonella enterica
atgacgaccaagaccccagcccggcaacatactggctgccgcacgaagtccaaagccagataccaaacccaccagcaatcccgtaccaacttcaaaacccccgtagtcgagttcaatccccagctcaaaaccgtaaaagtattcagtgatggctcttgcctcaaaaatccgggcgggccgggcggttacggcatcgttctccagtatcgaggcgaagagcgcgagctttctgagggcttccacagcacgaccaacaatcggatggagatgatgggcgccctgattgcgctggagcgtctgaagtacccctgcaatgtgatcctgcattccgacagccagtatcttaaaaacggcatgacgctctggatgaaaggctggaagcgtaacggatggaccacgtctgagaagaagccagtcaaaaacgtcgatctctggaaacgtctcgatgcggccgccagccgtcacaatgtccgctggaagtgggttaaaggtcatgccggtcatcgcgagaacgaaatgtgtgaccgcctggcgaagatcgccgcctactccgcagctgatatgcctcacaagcgtgacattggatttttgtcacaaaatgataagtaa

SEQ ID NO: 380783 - DNA, 231 bp, Salmonella enterica
atggtatacccgacgaacgtcgtagcgctcgttgagagcgattttctggccaaagtgcgcgacatgatgaaagatcgcgataaggctttcaatctctacgaatggtcgctcaaatgtcttcattcaggcgagcacaaagagctggtggagcagctgttaggggaactcatcaatgaggtgtttgccctgaacgtccagcttcatggtcgagaaaataatcaatcaaaataa

SEQ ID NO: 380784 - DNA, 594 bp, Salmonella enterica
atgatcgcagccgaaaaaatcaaaaagcgagagcgtgatgcctctcttcgcgacctttggcgcacaccgaagtggttgtttgtcgccatccaacgttacataggcgtaaagttcgatgtggacgtcgcctgcaacaaagataatgctctcctgccgaactttatcggtgttgagcgcgatgcgctcaagtgctgctggggagaagctggcacggtggcgttcctcaacccgccctattccaaaatcaccccctggatagacgcagccattcgcgagcaggcgcgtggagtgacgacagtcatgctgataccacaatccctcgatacgcagtggtacgagcgtgcggctgaatgcgccaacgaaaccgtcatcttgtctggcggccgcgtggcgttcgttgagccggatgttgaacttgggctggtggaggtgaacatcaaccctggtggtagcatgttgcttatcttccgtggctactgtcaggaagctgggcacaccatcagcaagataccgctggcggtgatgaaaaagctgggtggttatgatcctgccaatgttgtcaggaagaagagaccacgtaaaaaggcagcgtaa

SEQ ID NO: 380785 - DNA, 843 bp, Salmonella enterica
atgagcgcagttacaaacactgttaaaaacgatgacctggacgaactgactgcaatgttgcaatctctcgacgaaccagtgcagaaagctgcgaaaatgagcggcgtcgacgagatcgacgatcttctctctggtctggatgatgcaatcgcaaaaccagtcgaggcggtggcggatgaagtcatgaatgccagctctaccggcgatctgagtagcgttctggaagagcttgagattgagcacgaatcggtgaaggtcgaggaaccagagcgtgacattgttgcggagatagtgaacgagccagcgcctgaacttgacgctcgaagtactgagactaccggtacagatccaacccctttaccttcagtggcgtcagagcctaaacctgaagaagagcagccaaaacgccagaaggcaaaatcagagcgtacccctgccaaacctcgcttcacgctggaaggtaaggacgaatcgttctatgcgacagccggtctggaaagtgagagctttactgccgcattcgaaggggcgccagtcaaagcgaaagacaagatcttaaaccttttgaactggtttagtggtgggccggaaatcagcgtctacacggtaatcgcaatgcgccatatccttgacgcgaacacggcgaccagcaatagcattaaactggcgctaatgagcaacccggagaaaccatatccgctcaacaccgcttcgactcaggctggccagatgatggctgtgtttccagctactggcattgccaccagggaaggtggaaatctaacccttaataaagagtcgccgatcgtcaaaaaattcatagcggagtattccattggatga

SEQ ID NO: 380786 - DNA, 558 bp, Salmonella enterica
atgaccacgattgtcggtggcgtcgatattgagtccacagggctggacttcacatccggccacaaaattatcgaaatcgcgataacccgttatgaactggaaacccagaagcatatcgacagccttgagatgcgcttcaacccgcgtcgcagtatcgatccgaaggcgcaggcagtgcatggcatttcactggaagatctggcgacggaaccgctactggctgaccacgcaggcaagattgctgcgtacatgggcgcatgtagcgcgttagtcgcccataacggagaggcttttgaccttccgttcattcgccacgagttcggtagctatggggtgaaattgccagatatccctctggttgactccatgctggatggcttgtgggctaccgaggatgggaagcgcccacgcctggaagagctggcgttctcacttgggttcacttacgaccgtgagaaggcccacagcgctctctacgatactgacctgatgatgcagtgtttcttcaaagcccgagagaaatacggcttcttcaaactcccattcgaaagcgcctga

SEQ ID NO: 380787 - DNA, 420 bp, Salmonella enterica; identical to SEQ ID NO: 86079

SEQ ID NO: 380788 - DNA, 645 bp, Salmonella enterica
atggattaccggattggaatcactggcgcacagggcagtggaaaaacaaccctggcaaggtacatcgatgcgcattatggcattccgtatgtggatgccggcgttggcaagctgatgagcagtctgggggtgaaggttggcgagcgtttgcccctttacgaacgtcttcaggttcagatggagattgccagacacatcgagatgatcacccgcggcgttgaaggttttgttatcgaccgcacgccagccgatgtcatggcttatacgcttgacctggtcggccagaccaacgaagaccgctgcatcgagctggctctcgacattgagcagttttgccacaaagcggccatttccaacttcaatgctatcgcgggtcttcgcccgggcgttgagctttccagcaaagatctcgcgcgtccccagcgaggatcgcttgaccgtctctatgttgctcgcatcgatgcacttatgtgcggtgagctgacgaaaatcaacacgcttccccaaaccggcgatctgcaggtgttcgttatctctgaaaagtgccgcacggttgaagcgcgagccagatcggtattgcgagtgctggacagagccgctgaaaacatcgagcgccgtataacaggacgagtgaccttccactga

SEQ ID NO: 380789 - DNA, 477 bp, Salmonella enterica
atgaagatgattgcagctgtcggccgcaactatgaaatcggcattggcaacgaacttccctggcgttgcccgaccgatctgaaactgttcaaacaactcaccaaaaacgccactgtcgtgatgggacgtaagacgatggaaagtctcaagcgcccgctgccagagcgccataacctcgttttgacgcgctctcgtgggtatatccccaatgggttctaccccgctggcatcgatgacgttttgagactgccagatccggtctgggtgattggtggcgggcagatttactcgctctttatgccacacgtagaagagatctggctgtcgcatattggcgtggatgtgccgggcgcggatgcgttcttcccggcgccaatgatgcgttctttagggttcgtaccagtcgaaacggcttatacccaacgtgcaaatgaggatgagcctggctttttgcagatcgtatacagaaggtcgtaa

SEQ ID NO: 380790 - DNA, 414 bp, Salmonella enterica
atggccagagggatgtatgtgctgtgtgaaattgagggtgtgctggcgagagccagccatcgcaaagcagtgtctgatgcggatgcaggcgctctcattgccggtgatgaactcatctttcccaccagccgcatgttgcgtggttttgctcgctccggtgctgaagtggtgcttatcagtagtcgtccggaagcgctcgaaggcccaaccaaacgctggctgaaggacttcggcattgattatgactggctccatctggttccgcgcggtgtcagttttgaaacccatatcaagcgcacgctggcagagcacaaaggcgacttacttatcgccgcactggttcatgatccgcgtctgcgttctgcgctggcagattctcaccagcgaccaaccatctatgaggtaagccaatga

SEQ ID NO: 380791 - DNA, 1104 bp, Salmonella enterica
ttgtctatcctactgaatcgagactttacgaacggtcagtttgccagtggttcgtatgccaaagtggttgaaacggtgctcaacactggcgttcacgcgggtgatcgcaccggaaccggcacaaaaagcgtttcatatgtcccttcctactacatgctaacgggcggctctgttccacttatctccggaaaagccgtcaacctgaagccgttactggttgagctggagtggtatctcaaaggaacgggcaacatccagttcctgaaagacaatggcgtcaaaatctgggatgcctgggctgatgaaaatggcgatttaggcccggtctatggcaaacaatggcgtcggtgggaagatacccgcatcgtgagccatagcgagtatttgagcaaaatcgacacgttccgtgagcgcgggtacaaggtcgaggggtatctgggcgtaagtgaagatcgcgttgtgttgtcccgtgaaatcgaccagctacagcgtatcgttcacacgcttcgcaccaacccgacagatcgtcgcatcctgctgaatgcctggaatgttggcgaactggaagacatgaagttgccgccatgccatttcgtgttttcactgtggagtcgcgagctggactttgagacccgactgacgatggccaccgacattggcattcagcacaaccgccacggccacgagtccatttacacccagatgctgtgtcttctggaaagagatggcggcattactgagaacatgctggacgagctgggcatcccgaaacgcattctgaactcatgcctggtgcagcgcagcgtcgatacctttgttggtatgccgttcaacatcgccggttacggcattctcacccacttcctcgcgaagatcaccggccacatggctggcgcattcgtgcattttggctttgacgttcatctctacgacaaccacatggaaggcgttgaggagctgatgaagcgcgagccgcccaaagagtccgacccggttgtcatttttccgcatgaatgggccgaactggacgacttcaaatgggaaggtgtgcaggtgtgcggctacagccctcttccgtggatcaaggttccagtggcggtgtga

SEQ ID NO: 380792 - DNA, 870 bp, Salmonella enterica
atgaaatttacgaaactgaccgatcatctgaaacttgccgcagacaaactcgtgggatttaagccagagccttacgagttgaatcccggttttggcaaggcaacggaaagcatctacctgatggttgaccagttccacacactgtttcagcacccacgccgtgccattccagatcctgcactactgcgtctgcgtgccaagctgatccacgaagaagctgttaccgagggcatcccggcagctaaaaacggggacatgacggcgctgctggatgcgatggctgacttcctttacgtgggcgtcggcacaatggtggccatcaaaggcggtatctctacaggcatgagctactacacccaagagcagagtgttgatcgcttcatccacaccatcatggttccaggcaacacggtctttgacgacatggccatcccgtttgaagaagcaaaagaagctgcattaatgctgaatgcgctggctgacaaactcgaagcgaagccgattagcgattccgaattggtgcaggagctgcgccgcgtgatgaataaaatctacgttgcctgcatgatgacctaccgcctggctgattttctcggtatcgatattgttgagctggtggcagaaatccatcgttccaacatgaccaagctgtggccggctgacgccgaagagcgtcgtgtggcggtagagaattgcaaatacgacaagggagatctgggcttccgccacgctgaagggactgacatgatgattggcttcagagtttctgatggcaagatcctcaaatccccaacctacagcgatgtggatctgactcgctttgttgagaaggcgaaaacctcatctctttacgagatggtaaaaaaataa

SEQ ID NO: 380793 - DNA, 1143 bp, Salmonella enterica; identical to SEQ ID NO: 86085

SEQ ID NO: 380794 - DNA, 2316 bp, Salmonella enterica
atgataagcatcgtaaaacgtaacggttccacagagccgttgtcagaggaaaaatacaaccgcgttgtgatgtggggagtcgaaaacattcgcaacgttagcgcgtctgctgtcgctatgggcgccgctgccagcattttcgacggaatgaccacctgccagctgcatgaagcgctggtgaagtccgctgccgatctgatctctccggaaaccccgaactactcgcaggttgccgcgcgactgagcctgttcaagatccgcaaggacgccttcgggcagtatgactacccgaatttctacaatcacatcgtcagcaacgtcagccgtggcgtttacgatgaagaccttctcaagtactactctcaggaagaaattgccgagctgggcgtgtacatcaagcctaagcgcgacgaatacttcggctatgccgcaaccgtgcagctggcgagcaagtatctcgttcaaaaccgtgtaactggcgctatctacgaagggccacagcaactctacatgctggtcggcatgtgcctgttccagaattgggaagatggctgcgccggtaagacgcgtctggagatggttaaaggcttctacgatgtgaccagtacattcaagctgtctctgccaacgccaattatggccggcgtgcgcacccctactcgccagttctccagctgcgtgctgattgaagctgctgatagtctgaaagggattagcgctgcgtcttccgcaatcatcgactacgtgtcacgtcgcgcgggcattggtattggctttgggcgtctgcgtgcgctgggaagtgagatccgcaatggcgaggccacccacactggcgttattccattcctgaaacacttccagacggcggtgaaatcctgctctcagggcggtgttcgcggcggcgctgctacagcgttctatccgatctggcacttggaagttgaaagtctgctggtactgaaaaacaaccgtggcattgaagagaaccgtgttcgtcatctcgactatggcgtgatgattaaccgtctgatgtatcgccgcctggtgcgcaacgaaaacattacgctgttcagcccacacgatgtgccgggcctgtacgacgcgttctttgttgatcaggacaagttcgaagagctgtacctgaagtacgaagccgacgagagcatccgtaagaaatctatcccggccgtcgacctgttctctacgctgatgcaggagcgtgcctctactggtcgtgtttacattgccaacgtcgaccacatgaacgatcacggcgcattcgttccggaaattgcaccggtacaccagtccaatctctgcatggagatcacgctaccgaccaggccactggcgttcactgacgatcccaacggggaaatcgcgctttgcaccctgtctgcgttcaaccttggcgcgatccgcacgctggactcactgaaagacgtggcgttctacgctgtggcggcactggactctctgctcgactatcaggactacccgatggctgctgcagaaatcccggctaaagctcgtcgtagtctgggtattggtgtgaccaactttgcctactatctggcgaagaacggctttaactactctgacgctgcgggcaaccagctggtgcatgagaccttcgaagccattcagtactacctgctcgatgcgagctgccgactggctgaagcgaaaggtgcatgtgactggttctcccacaccaaatatgcacagggccagctgccagtcgaccactatcgcaaaacgctggataccaacccggagacctctttcgagctgaaaatgccgtgggaagagctgcgtggccgtatccgtgagcatggtctgcgtaactccactcttacagcgcaaatgccgtgtgagacgtccagccagatcaccaactccaccaatggtattgagccgccccgcggcccggtgtccgtgaagtcttcaaaagacggcatcgtgaagatggtcgttccggacttcgcgcaactgaaagaccagtacgagtacctgtgggatatgccggataaccgcggctatctgactaaggtggccattattcagaagttcttcgatcaggccatctctgcgaacaccaactacgacccgactcgcttccctggcgataaggttccaatgatgaagctgctggaagacctgctgtttgcgtatcagcaaggtgtgaagacgctttattaccacaacacgcgtgatggcgctggtaagcgtgatgacgacgatcaggtgtcagaaccttccgctgcggaggttgttgagccagaagatgagtgcgatggcgcgtgcaaaatctga

SEQ ID NO: 380795 - DNA, 570 bp, Salmonella enterica
atgagtaaaaccattcgtgtggtcggcgtcgacccttcaatgagcaattttggcctggcgattggcacgctggatctggaaacggataagctggacattcatggcctgacattggtggaaaccaaagctggtggaaacaagaagacggttcgcgttaacagcgacgatctgcgccgcgctaacgaaatctggcgtaccgccaagcccataatcgagcaggctcatatggtgttttgcgagttgccggttggtagccagtccagtcgcgcacaaacctcatacggcatctgcattggtgtactggcgtgcgtggataagccactgatacaggtcacgccaaacgagattaagcactatgtcgggaataagctgaccacgtcgaaggaagagatcattcagtgggctacgcagaagcagccaaacgccccgtggttgcgccggaagcaatctggtaaggaagtgctggtgaataaaaacgagcaccttgcggacgctgtcgcgtcgatttacaccggtatgcaaactgatcaattccgtcaggttcgcgatgttcttgcaggaattttataa

SEQ ID NO: 380796 - DNA, 747 bp, Salmonella enterica; identical to SEQ ID NO: 86088

SEQ ID NO: 380797 - DNA, 1917 bp, Salmonella enterica
atgaaatttctaaagctccaggttgagaacttcatggcgttagccagcgccgaagttgagttagaccaacgcggtctggtgctcattcagggggttaacagtggcgactcttccgctgccagcaatggcgcgggcaaatcgactttgatgaacagcctgatgtggtgtctgtatggcgaaactgcgcatggcgtcaaaggtgacgacgtgctctctacaggccacgagaaaaactgtcgcgtgatggtgactgttgaggatgaaggaaagcgttacgccatcattcgccaccgcaaacacaaagagttcaagaaccggctgatcgttcgtggcgaagacggtgatatgaccaaaggcaaagacacactgacgcaggagttcgttgaacgcctgattggtgcatcgaaagaggtgttcatggcgtccatctacgccagtcaggaagcaatgcctgatctgccgggtatgtccgacaagaacctcaaaaccatcgttgaagaagccgctggcgtcgaccggttaacgcgagcctatgccattgctcgcgagcgtgctaatgcagctgccgcacgcatggatgttaccaaatccaaaatggacgcctgtctcacgcttatcgagaccgcgcagtcagagattgaggcggccaaagcgtcctctgatagttgggagcgcgatcgcggcgaacgtctggacaaggcccgcgtcgatttggctggcgcggaggtaacgctgtctgaagtcgtgatggaaattcgctcgctgccggaacagatccgggatacggaaaacgcgattgctggcgaacgcagcaagctggcctccaaagaagagcatgacgccaaactgctgaaggtgcgcggtgcgattacggagatccgctcaagcatccgcacttcagaagcggcacagaacgagtccatgaaccgtgctcgctcgtttaaaaccaaagcagaagaggtcaacacaaaggtcggagcaccttgtgttacgtgcggaaagccctactgcgaagaagatttgtccaccgtgaaggagagtttcattgaacaagcgcgtaatgagatcggccaggcgcaggcatcagcagcggcagtggctcaacacaaagctcgtcttgagaaagcgctcggcatcgagtctgcactggtcgcagccacacccgacgtctcagaaatcatcgccagaatcgaacgcctgaccaatgagctaagtgcgctgcgtcatcgagaacgtgaagttgtggccgtcgaagcgatggtggcgcgggcgcgtactgacgtgaatcgcatcatggcagaggtaaacccatttctggctgtcattaagcgccatgaagacaacctggctgccaataaatctaatcatgcagtacttaaaaaagagttaaaaagcattcaggaacaggctctgttgctggagaaagctcgccaggtttactccccagcaggcgtgcgttcacacatcctgacgtctgttacgcctttcctgaacatcaggactgcggagtatctcaacacgctgtcggacggcaatatcgttgccgaatggtcgacaatggagacaacgaagaaaggcgagtatcgcgacaaattcaatatcagcgtaaccaaaacaggctccagcaaatccttccagacgttatctggtggcgagaagcgtaaggtacgcattgcgtgctctcttgccttgcaggatctggttgccagtcgcgccagtaagaatatcgagctgtttatcggcgatgaaattgacgacgcgctcgacactgccggtctggagcgtctcatggggattctggaagccaaagcgcgtgaacgcggcacagtgatgatcatctcccacaaagagatgaaatcgtggttccgggaaaccatcacagtcgaagtcaaagaggatcgcagctatgtcgtttaa

SEQ ID NO: 380798 - DNA, 162 bp, Salmonella enterica; identical to SEQ ID NO: 86090

SEQ ID NO: 380799 - DNA, 1086 bp, Salmonella enterica
atgacattgccatacggggtgatatcagatccccattatcatcgttgggatgcttttgcgacaacaaacgctgacgggctgaactctcgactggagatccaactggacgccacgaaagaagcagccaaagccatgaaagctgcgggctgtaagtacatgctggtggctggtgatactttccatgttcgtggtgctatatcaccttccgtcctgcatttcgtgactgaaacttacgagtggatcatcaaagagttgggcctcgaagtggtaatgctggccggcaaccacgacctcgaaaccaacgattccgtatacagcgccaatgcagcggcctctctgcgctcaatcggtgtggaaatcgtctgcggcaaacgtccccattccatcaaaatgggcgacgttaccgtccacttgattagctggcgtaacaaccacgcagagcttatcagcgacctcaaaacactgcgttccgggcttgatggcgacaaccacgatgttgttgtgcatacctcgatcaacaaagcgatccccaccatgcctgatgtcggcatcgacgcacaggaactgaaagatatcggcttccgtttgttgctgtccggacactaccacaaccacaaagaagtgctgcctggagtggttagcatcggggcgctgacgcaccagaattggggcgatgttggctcgctggctggcttcatgatcgtcaaccctgacggcacattcacccaccacgaaacctccgcacccaagttcgtcaaccttgaggacgatgtggaagacgaccaaattcgcggtaactacgtgcgcttccgtgccgttgtggagagcgatgaagagggcatcaaaatccagaacgtcctgaaaacaatgggcgcgaagggtgtcgtctgcaacttcatccgcaaggcatcgatgatggaaggcactgccagtactgcggagaccagcaaaatagacagcctgggcgagtccgtcgcggcgtactgcaagatcgttcacgacactgacggcggcttcgacctgagcaagctggacatgctgtgtcaggagatcctgaccgaagcggagagtgcggaggcaatgtga

SEQ ID NO: 380800 - DNA, 504 bp, Salmonella enterica; identical to SEQ ID NO: 193466

SEQ ID NO: 380801 - DNA, 495 bp, Salmonella enterica; identical to SEQ ID NO: 193465

SEQ ID NO: 380802 - DNA, 645 bp, Salmonella enterica; identical to SEQ ID NO: 86093

SEQ ID NO: 380803 - DNA, 1056 bp, Salmonella enterica
atgagcgaaaacggcaataaaaacatagcgatcgttgaagcattctcagaaacagacaaaaagaccggtgaagttgttacgttagttcctaacaccaacaacacagttcagcctgttgctctgatgcgtcttggtctcttcgttccgacgctgaaatcgaccgccaggggcagaaaggggcaaatggtctctatggacgcctctgctgaactcaaacagctgtctctggccaaagccgaagggtacgaggacataaggatctccggcgttcgtctggatatggataacgacttcaaaacgtgggtaggcatcatccacgcgttcgccaaacacaaggttgttggcgacaccgtcacgttaccgttcgtcgagttcgtcaggctctgtggcataccaacggccagatcgtccgcgaagttacgcaagcgcctggacagttctctaactcgtattgctacaaacactatctcattccgcagtaaaggctctgatgagtattacgtgacgcaccttgtgcagacagcaaagtacagcacaaagaacgacacggtctcgctgcaggctgatcctaagattttcgaactctaccagttcgacaaaaaggttcttttgcaactccgggcaattaacgaactctccagaaaagaatccgcgcaggcgctctacaccttcatcgaaagtttgccacctgacccggcaccaatctcgttggctcgcttacgcgccagacttaacttaaccagccgcaccattacccagaacgcgacagtcaggaaggcgatggagcaacttcgggagatcggctatctcgattacaccgaagtgaagcgcggcagctcggtctacttcatcatccactataggcggccgaagttacgcccgtcattgccaccaactaaagctgcgcctgaagaaccagaagacatcttgcctggtgatgatcaggaggacattatcgatgttgttcctgaagaaaaagagggtgagatggtcatgttgagcaaggaagaactggcgattctcgaagagctacgcaaggcaaaagctcgcaaataa

SEQ ID NO: 380804 - DNA, 213 bp, Salmonella enterica
atggcggttacactggcaggtctggaaatcgaaaaaacaagcggctactggcgtgccaaagggtttaagcaacccggcgtgctggagcgactggaacgtgaggacggtgtcattgtccaccagcgtcgcgaatggcgcatgtacgatccggaaacaggtaagctcacgacgaaggccgggacactctggggtctgctgaagaaaatccactga

SEQ ID NO: 380805 - DNA, 336 bp, Salmonella enterica
atgaagaaaatagccctggctctggcgctgctctccctccctgtctacgcggacacgcacgtctatgagtgtgagatgtcagtggccgaagtgaaaaacgacgtgatccgcaatgtcgtcaaagccagctacggcgcgatggttgtggacagcggcgaacagttttatgttgttcgcgatgatcgcgtcctgtcttccccctatctcaccaaacgtaacggcaaactgtctggcgtgggtgaagataagttcgtttacaacaaatcaggtgatgtctacggcgttcacgcgaagaacgccagctaccttttcgatgactgcaaggaggttggttga

SEQ ID NO: 380806 - DNA, 180 bp, Salmonella enterica; identical to SEQ ID NO: 193460

SEQ ID NO: 380807 - DNA, 276 bp, Salmonella enterica
atgaagattttggttcgcatttcagccagcaccgactatgacgtttacccgctattcatggtcaagtgcgatgggctgaacgatgaagaaattcaagcggcaattgagcgcaatctcgttgagtacactggcattgatgcagattctgtgtatgtcgatgatgacggtgtttgttggcacaacggtagttgctggtacgtcgacgacacgatgccggtaagcgatgaagacgcggctcatcttgagcgtatcttaggcatcagcacttttgagtga

SEQ ID NO: 380808 - DNA, 411 bp, Salmonella enterica
gtgaagaaactgtatgacgcggccaacgctgcgctggatgtagtggataccgaaattgcccatggcttcccggagccagaatgggcgacgcagctgcgtgaggcgattgcagagatgaacgcaccggaaccttcagaagatgaagccgactggcagcgtttcatcagaatgtacgcggaagagattggcccgacgcccaccgctgaacaggccatgctgctcaagtacttcaaggaggctggagagaatctgccggttgatgatacaccgcactggtttcacgccgcctggcgtaagttcgacgtgatctacacccgcggtctgggaagcaaagatatggtcgtctggcatctgatgcacattgataaggctgtcgaccggacgctggagaagttcttcccaccagcctga

SEQ ID NO: 380809 - DNA, 372 bp, Salmonella enterica
atgaaaaattacagcgagatgacggactttgagattaactgcctggtcgcggaagccaccggccatcgaccgcttatctcacaatatggctggaaaggctcacaggaaggcgattacacagcagtggtcgccatcggcccgaacggagccggaaccttcgactggtgtaacgatccggaagatgcgtgggacattatttatcggcacagaatcggcgtaatccctgccagacagcctggcgagtggagggcggcccacagaaaggtggatagctcaacgccacaacatctgatccagaaccctaaccctttcagagcggcaatgaccgtgttccttttaatgcaggagaaaaagcgtgaagaaactgtatga

SEQ ID NO: 380810 - DNA, 831 bp, Salmonella enterica
atgaagaaaggtttactggcggtggctttggctgctatttgcacaatgggtctgaccggctgcgatcgcgtggaaccgggatacgttggcattaaggtaaacaaattgggtgaagacaaaggtatcggtgaagttgtcggcgttggccgtcagtggactggtctgaataccgagctgtacaccttccccactttcaaacagatgaaaacctacgatgagccgttcacattccagatgagcgacggtacagccatcggccacaaaattggtgtggcatatctggttaatcgcgacaaagtaactaccgtattccagacctatcgcaaaggtgttgatgacattaccgacactgatctgcgccagaagattgcggactcactgaaccgtctggccagccgcatgactaccgacacgttcatcgacggtggcaaggcgtctttgctcgacaatgcgctgaaagacattcaggcagaaatgtcaccggtaggtattgaggttattagcctgtcatgggtgggcaaaccagactacccggacactgtcatcgaatctatcaatgccaaagtgaccgcgaaccagaaaacgctccagcgccagcaggaagttgagcagcgcaaggcagaagcgaacatgctgcgtgaacaagccgaaggtgaagccgacgctatccgcaagcgtgctcaagcagaagctgatgccatcaagttgcgcggtgaagcattacgtcagaacccgaacgtcatggagctggaagccatcaacaaatggaatggtcagttgcctcagtacatgactgaaggggccaatactccgtttatcgcgttgaagtaa

SEQ ID NO: 380811 - DNA, 201 bp, Salmonella enterica
atgatcaagggttatctcatggctgtttcagcggtgatatcagtctgctttatctacggtttactggttccatcgcttatctcagctaaaagcgatctggccttatttatcggacttgccatcgctgtagtcttcccggttgccttgttaaaagctggccgcaggtatatcaactcactcaataaaattaaggagaagtaa

SEQ ID NO: 380812 - DNA, 1077 bp, Salmonella enterica
atggcaaaaggcaaatccgcactggcactggcgctgaaaaagaaaatcggcagcaatgacgagatccagaaagtctcccactggattgactccggttttcccccactgaacaaagccatttccggacgttacgacggtggttttccgtgtgggcgtatcgttgaagtcttcgggccaccaagcgctggtaaaacctttttggcgacggctgcaatggtgtcagcacaaaaacaggatggtctggccgtgttccttgaccacgaaaacagtttcgacgttggtcttgcggtggcgaatggcttgaacgccgacgaagacgacggtcagtgggtctacaaacagccggataccttcgaagactccgtcgagctgatcggcacaatcctcaagctggtgcgcgacgaagagcttatcccggaaacagcccctatctgcatcgttgccgactctctggcgtcgatggttccgaactcgaaggctgagaagttcgacaagatggcagaaggcactgcgaaggacaaagatcagctgaacatgaacgacaacacggcgctggcgcgcgcgacgagtgcgaacttccctactctggcgctctgggcgcgtaagtacaacgcgtgcatcatcttcttgaaccaggtgcgtaccaaaattggcgtgatgtttggcgatccgactacgtctccgggtggtgactctccgaagttctacgcgtcggtgcgtatccgtctgggcgcatccgtcatgaaggatggcaaagagaagatcggacaggacgttggcgccgagtgcattaaaaacaaagtcgcgcctccgtttggcaaatgctcatggaaattctacttcgacccgactcgcgggctggacgtcatcgaatcgctggttgagtacatgctggaggaaggatacctgcccaagaacgccagcgggcgtgtggaaattggcgataagaaatacaccaaatcgcagatcgtcgagatgtaccgcgagaagccacttccggaaatcatcgcagcactccaggcgatagacgagcgtcgagcgaaagagtcgaccccagccgaaacagaagaagcgtaa

SEQ ID NO: 380813 - DNA, 267 bp, Salmonella enterica; identical to SEQ ID NO: 86104

SEQ ID NO: 380814 - DNA, 945 bp, Salmonella enterica
gtgaattatctctttgtggacggtaacagcctgggctattaccaccagcaatccgacaaattacacaacggcgagatggaagttcaggcggcttttggcttcgtgaagaacgttcgtcgttacgcctcaattctccatgcccgcccaatgatcttgtgggatggattcagcgacaaacgtcgcgacttctacccggagtacaaagcgaatcgcgatgacgacccggatatgaagaagatgaaagaaggctttgctctccagaagccgtacatcttgaaaatgatgaccgcgctgggcgttaaccaactcattgcaaaggatgcagaagcggacgacctggctggaatgctggtctctcgcctggcaccgcagccgaccgttgaccatatctacctgctgacaggtgatggcgactggctccagctggttcgcgagaacgtgagctgggtaagcctgcgtgaagatgccaagcacaaacaggtgaacttcgaacagttcgcagagctgactggtctgccgacgccacgcgcgtttctggaagcgaaagcgttgcagggcgataactcggacaacatcaaaggcgtcggtggcattggtgatggtggcgcgaaagagctgcttcatgaatggggaagcgtggccgcaatggtacgcggcattaacgacggctccattgtcatcaacaaaggtcgctataagacggcattcaacaaactggcaaagaatgccttcaacgagaagacgggctgccggatgctcgaagcctttaagcgcaacatgatgctgatgaaccttatcgacacaaaattcccacccagcgaaatcgagtcgattaaaggcgcacgcgacatgaatgccttcgaacagatgtgttacgagctgaacttccggtcgtttctggaagatctggaagtgtttgttctgccatttgagaggtactgctga

SEQ ID NO: 380815 - DNA, 1029 bp, Salmonella enterica
atgtctaagtcattacttgatctgcttaacaagacccgtggcgatattgcttctaaacgtggcaataacgttgatttgacccgtctgaaagacggcaataactatctgcgcatttttccgaacaaggacgacccgaatggcgtgttcttccagactttcggtatgcactacgttaagcatcagaatgaggaaggcaaagatgtaaccgccgcctacatctgcgaacagcacacccacggccacgcttgccagctgtgtgagatggttatggaaggtcgtgctcgctttaagggcaacaaagcgatggaagagcgcattaacagtatgcgtgctacaccgcgttatctggtcaacggtgttctgtctgcgcgtgaagactttgcggacgcagagaaatgccagctgattgagctaccgtctacggtcttcgacgatatctgcaaagtgatgtccgaagatattgcggatgatatcggcaatccactgagcaaagaagaaggctatgcgttcctgattaagcgtaccggttccggtcgtgacaccaagtacgacgtatccccgaaacgtaaagtctacaaaggcgacattcctgagaagctctggactacccaacacgatctgatcgcatacgcgaaccaggctgacgaaacccgtctgctgtctacggctcgcactatgggtcgtctgattggtatcgcggctccggcagcaacaatgtcctctccggccatttcttccgctgcaaaatcagctgctgctgaactgccaggctttggctctatcactggtcatacggaaggtgcagctgctgtcgctacagcacacactccggctccagagtccaccagcctggttgatgaagagatcctgcgtgccgctgaagctgagttcaaaccggaaactaaaccggaagaagttaaagctccggaagccgccgcagctgcaagtgcttcagcatctgctgccgctgcatctgcaccagctgacgaaggtctcgacgacctgctggctgaactggacgctctgtaa

SEQ ID NO: 380816 - DNA, 432 bp, Salmonella enterica
atgagtgcagatatctacgaaaaaatcatgtccgatctggagttcgaccgcgacaatcttgaggaagtctggcgtcagcaaccgcgcctgttgatggagtacggctctaagctggcgcgggcagaacgcgaagtcgcagatgcaaaactctccctcgatgcgattgaggcgaaaatctacgacaatgagcgtaagaacctgagtatgaacggcattaagtttaatgagtccgtactggaggcgaaggttagaaccaacccgcaatacctcgcgaagcgccagaaactcgacgatgcccggcacgttgctgatctgtacaagcacgctgttgtcgccttttcccaccgccgcgacatgattgtccaggcgtccaaaatggctatcgtggagattgagcgtttgggcgccgaacgtttccactctccccgttaa

SEQ ID NO: 380817 - DNA, 564 bp, Salmonella enterica
atggcgctttataacttcactctgacactctcaggcgtaacgtatgagaccgaaggactggaagacgcgctgtacgaaagcggctgtgacgatgcgctgatttgcgcatatggaaactccgtctatgttgagttcgaccgcgaagctgaatcgctggatgccgctattgcatcagcggtcgacaatatcgaatcagccggaatcggcgctattgttgaatctgtcgactctgcccttgtaggcttgagcgacattgcagaaataacagaaatgtctcgccaggcgattgcgatgctgaaagatggcactcgtggtagcggagacttcccttgccctatccaacgaatcaaaggccaatctccactttgggattgggctgatgtagccgaatggctactaaagaacggtcgattaaaagaagacagcaacttggtaaataacgctcgtgtgctgagtaaatggaaccttgccttacgtgcaagcgcttcaaaagattttcaagaagttgagtcgatcgcggtagctcttatcgcacgtcgacgtcatcacgccgaatgcgcatga

SEQ ID NO: 380818 - DNA, 444 bp, Salmonella enterica; identical to SEQ ID NO: 86109

SEQ ID NO: 380819 - DNA, 3519 bp, Salmonella enterica
atgaaggctctgatggtcagaactgacttctccctgggagagtcggctctaaaagcagaaaacgcggtgaaaatcgcgagagacgctggctacaccgctgtcatttccgctgacagcatgaacattgccagtgtgatccccctgcagcgtgccgctggcgacgacatggcggttatttgtggtgttaagctgaatgttgtcgacgatccgacatacgagcaccgcgcccgccttgcgaaagagtcagggggatgtatggaatcattggtacgtgatcgcagctactgcttcacggcactgataaagaatgagcaaggttatcgcgacgtgtgcgaactgatgaccttagccaacaagcgcgagcaattctactttgtcccgcgtctggcgcttgaccagctggcggccgcatatgccaaaggcaacatcatcctgctgacgtctgacattggcagtgtattccagcgccaggacttcgcaaagattatcgggacgctggtcacagctggaggacgcgataacttctacagcgtggtttatccgcaccctaccccattctacgaccagattaacgtccgggcgatgaaagtggcgagcgcactgaaaatagagccagtggcgttctaccccgcttattacgaagcggtcgacgacgctgacattaaagacattgcgcacatggttacgaacaacatcaaaatcgaccagccgcatcgtctgcgtattccccaccagcgagataacgccgttaatggtcgccgccatctccttgaagcgctgaaagccttctccgttcgaatggatgtgccggtaacagctgcaatggcctcaacaacgcaggacaccattattgaagcctgcacatggcgctggcatgaattgccaccagcactgcccaagatggcagacgacgagcctgcaacgctgatgaagctggctgtcgcggggctgcgtaagcgtcttactaccaaagagtttggctacacaccaccggcttctgagcaccgtgtgtatgttgatcgcctgaagtacgaaatggacacactgacccgcctgggcttctgtggttacttcctgatggtgcgcgacctgatgaatcacagccgtgaaactggcattcctgtcgggccaggtcgtggttcctctgccggttctctggtggcgtggtgtataggcataaccaacgtcgatcctatccgtcacggtcttctgtttgagcgtttcatcaaccctgaacgtctcgacttaccggatgcggatctggacttcagccaggcacgtcgtcatgaggtgatcgagtatctgaatgaacgctatggcgaagattacgttgccggtattccgaacttcacctatctgggcgccgcttctgcgctgcgtgacactgcgcgtatttacggtgtcgacgctgcggatatggcggtatccaaagagttcaagaatctggaagacgatagcctgtctctggaagagctgcgcgagcaactggccagcctggacaaatacgccacgaaaaacccggaagcgttcaaagcggcgtgtaagctgcaaagcctgatgcgtggttttggtcgtcacgctgcggggatgatcgtcgctggcgttccactggtagagcgcacgcccgtcgagctgcgtggcaatgctcgctgtattgcgttcgataaacgttactgcgaggcgatggggctgattaagctggacgttctcggtctggccacactggatctgctggatagcgcgaaacgctacatcaaagagagtaccggggaagacatcaatctcgatgctatcccactggacgatcgcaaggttctggatgggttcgctgcagggtacacgcagggcgtattccagctggagtccggccccatgcgcaagctgcttaaagatctgggcggtggcattgagccaatgagcttcaaaaccgttgtcgccacgaccgcactcttccgacctggcccgattcaatccggcatgttggacgactatgtctccgtggccaaaggcttcatggctccacagtcgctgcacccggtactggacgaacttaccgcggaaaccaacggcgtgattctgtatcaggaacagacgatgaacgcgacacgattgctggccggcttcacgatggccgaagcagatggtgtgcgtaaagcgatcggtaaaaaggatatggaaaagatgaagagcatgggcgagaagttcgtcgttcaggctcaagctggttggatcgacgttgagatggaagacggcacaacgcagcgcattcaccgcgcggaacacttcaaatgtgaggacggcgcactgcggacggtcgaagaagcgctggaggcaggtgtgaaattgcctatggctgctgtacgcgttacagggtcacaacccggcttgtctgagacgaaagctaaggagatctgggatgccttcgagaagaacggtgcgtatcagttcaacaaatcacactccgttgcctactcgctgatcagctatcagtctatgtggttaaagacacattaccctgctgagttcttcgctgctgcgctcaccattctgggcgaggataagcaccaggggctggttaaggatgcgctgacctatggcattcgcgtattgccaccagacgttaacgtgtcatctaaccgaattgagatccgcacgctggaagacggcagccaggtactgtatgcgccattctctgctgtgaaaggctgctctgagaatggttgccaggccatcatgagagcgcgtgagaaagttggcggcaaattcgagtcacttgagcaatttgaggaagcggtcgagaagcgtgcgtgtaacagccgggtacgcgagtcactgcaaaaagtaggtgcgttcgcatcgattgagcctggcagtctgccagcgacagatccggaacgactgcgcgaccaggcagagttgatgggcaatctggtgatcgacgctgtaaaagcctctcgaccgttcgagatgaaccctaagcgctctgctgaagtgaatgtactgatgactcgcatggcggccgaaatgggtctgggagacgacctgatccgcccaagcattggcattaagccgaaaatcatggtcattctggacaacgcgaacggcaatgatgggcgtaccggttacttcatggagaacggctacgacgactttaaggcgaagttgcttactgcaggcgatctgcgcatgggcgatctctacgtcaccggcgtgtgcaaaaaggtgaaggacaaagagaaggactacaccaaagacgagatcggccagttcaccgactttatgcgtgaagagatcaatctggtgcgtccgacctatgtgctgacgtgtggcagccgggcgacgtcgctcttcaacaacaagagcaaaccatccgacctggttggacgcaaagagtatctgccggagctggatgtgaccgttttctacggatttaacccgaacattttgtactttcgcccagaagaaggcgaaaagctggaagcaattctggcagaggtagcggagactattagcaaatga

SEQ ID NO: 380820 - DNA, 1236 bp, Salmonella enterica; identical to SEQ ID NO: 86111

SEQ ID NO: 380821 - DNA, 2367 bp, Salmonella enterica
atgtccaaagccatgaccagatctgtgctgaaagaggtacaggactttcgcgactgcgtaaaacgagttgtagcgatgctatcaggcaaacagatacctgttgcagagcgaggcaatgaagcatatgtccgctacaaccggcgcggcgaaccagtgctggtaaacatcccatctataccggacgacgcgtcaccaaccctcatgaacgcagtacgtggttttctcgaccatgagatagcccatatcctctttactgatccgaaagtcgcaatgaagatgcgagagagaggaaaggctccgtctaccgggctttggaacgcgctggaagacgtttttattgaacgcagaatggggcaggtattcaacggaacccgtcgcaatttgctggccacacagaacctggtgatcgacaaatacttcaagggcaaagtgtcagaggcggtttcaatctgccacggcaaccagcgtgaattgttcctgaaattcttcctttgcccggtcgttcgcgcctgggatggccaaagccctttcatcgactttatggaagaacactggcacctcatcgataagcctgtagccttgctcaaagagcatggcatcgacgtggccgttcgcaatatgtcgaacacagaagactgcgtgaaggtcgcagctgctatcgcccaaatcatgcaggatatgaaagacaagccagagggcaaattaccagagcttaaatcgtctgctaggaagccgtcgaagagtgaggacgagtcagaggaaaccccagaagccggtgacgaaccgactcatagtgaatcagcaccaaagcgtaccaaaggcgaagacgacgacaaggaagagcaagaagatgatgcctcagaagaggaagagtctggggattctgatttgcctgaatcagtagataaggacttacctacagaggataaagaaattagtgatacagaaagtaaatatacagaagcaggcaaagaagaatcaggagacaccccagaatccgatgatgccggcatggaatcaggtgattctgatgacgaaggtggtagtgatgacactggctctccaacgcctggtgatggcattcgcgaagacgccgatgactccgatggttatggctctggcgccgctggcgatggtgatggtgatgacggcgaagactccgatgccagtcacggggagtcggaaggagaaggcgaagaggaagatgacgccgccgatcacacagacggcgaaggtaaagaaaatgaggatgccgcggaagcgcctgaagacagtgagtcaggctttgttcctgctccggatgaaatgactctggaggacgcactcaaggcgctcgacgagatggaagacggaacaggcgaaatgaccgaagacgcactgtcggccaccatcagcaaagagcttatgagcacctcactttctgagtatcgcccatacgatcgttcatacgactttatcgggttgattgatgaggctgaagagcatgtaaagcgcaccagaaagacgtttggcgcaatcccaatgcactcaccggtcgatcgctaccgcatggttccggaaggcagaaggctctttgaactgaaaatcgaaaaacatctgtcagcaggcgtttcttcgactctggccaaagacctggagcgagctatcgccagccgcaatcgagtccagtttatcccaggccagagacgtggacggatacatggcgcgaacctgtatcgtctggcaatgaacgacgaccgcgtgttccgcaagaaagaagaccacagagcggtgaacgcgtgcgtccagcaggtgatcgacttgtccggctcaatgggcggcaggaagattcaactggcactcgccagcgcctacaccattgcggatgctctggatcgtatcaatgtgcctaacatcatcaccggctttaccacgtttggtagcccagattatgaaaccatgtcgaagcgcgggtttactcgtttcgaggcgctaatgctgcccattatcaaaaactggaatgagaaagccaactctccagagatccgcgcccgcatgggctgcgtgtgtgagacgttccccctgctcaataacgtcgatggtgagagcgtcgcgcagctggcgactctgtttgcagggcgaatggaggacaagaagatcatgctggttatgagcgacggggcgccatgtgctgcaggcgatgggttccatcagcatttgcgaaccgtcaccaaagaaattgagacgttgagtgacatcgatttgatggctatcggcgttctgaccgacgcaccacggcgttactacaaaaattacgcactggtaaacagcgtagaagagttagggccgtcagtcgtcacagagctatctcgtatcattcttgggtaa

SEQ ID NO: 380822 - DNA, 213 bp, Salmonella enterica
atgaaaaatataacttctaaattgaccgcccttgaggttggacacgcatatgcgattggactggatggcgtcgcgacgatcctgacagaactagaatctgaagagcttcccgtggacatgaatgacacgaccgttttcgcttttgaactcaaaaataagcatttcactctcatcaatactggttgcggctctctggccgtaagaaccaattaa

SEQ ID NO: 380823 - DNA, 387 bp, Salmonella enterica
atggctaccaacgaaacagagatcaaacaaggtcgctacgcagcttacattgactcgttaatcacaatctcgcctaaaagtcaggctaccattgccaaagaggttgggtacaagaacgccaacaacctctccctcatcaaaagcggcaaaatcccacttccagtcgataaggttcgagctttagccgaagcactggaggcagatccggttcgactgatgctgatggttctggaagaacgtcatcctgagctgcttgagttttttcgcgaagagggcactgcacctctctccgctgatgaaaaactcgttctagaagcgttccgtaaccgttttgacggtcaacagggtgcgtcagaaaaggtggtagaggccatcaagtcactgtga

SEQ ID NO: 380824 - DNA, 1107 bp, Salmonella enterica
atgaaaaacacctttgataaagcacgcgcagcagaaaacacctctcgggaagccatcgagtacctcgaacgcgcttccggtttgtcggcagtgtcgaccgccaaattcgacggagacatgtcgttttcttccgccttcatgttattcactcgcttatctttactgataacgaggcgtcgacctgaaatagccgttcattgtgttttgatacatgtaatgccgcatatctctgatgtaaaggtaagtgatataagtagggtcttggtcaaccagctggtgaacccactgatactggaaggcaagatcgtccagggcagacgcgtgttctccctgatgaaacagttcctgagctggtgcgcctttcaggggctgattgatacatcaacgttgaatgatatgtcgctcaatagagttgccggtggcgcaaagccagtgccgcgcgaacgtaagctgacggacgccgaggtctgggtattctggaacgtctgggattacttcaatgtgtgcgaaggcacaaagtgggcggccaggctctgtcttgtcgctgccagacgacccgatgaagtgctccgggccagaaaggatgagttcaaccttcaacgtgatgtatggaatcaaggtacgcgaaacaaatcggccagacagcacgcgctgccgttaagcccattgatgcgtcaatgcgtggaagagttgttcgagtacgggaaagacagccagtggctcgttccttcgaataagaagaagggcgtggatacgccaatgtctaaggtggccattgcccaggcactgagaaggatactggaacgacctgagttgatggaggttgagtcattcaccccacgcgatctgagacgtacagcgcgtagttatttccctgctctggggattaatcaggaggtggcccgtaagattatgaaccacagtcttgaagggatagatcgcgtctatgatcgccacgattatatggatgagatgcgagacgccttgaataacttctcaacgtacatcgcatctatcgttaatcaaacagacttagacgagatagaccacaaattcaagggagatcgtctagccacggagcttattcgtgtaaatttctcacagtga

SEQ ID NO: 380825 - DNA, 417 bp, Salmonella enterica
atggctctgattgtcgagatcaaccccgatacacgcgccgaatttttagaccccactttcaataagttccctggattggaacagcagctcatagacgaatttatttactgcaaggagcacaacgccacaacggatatcttcggcaatgacgccgtcttcacttttccaccttatgccgtagacgctcaactcgctcgcatccacatcaagctacccgacgaacaaccctggccacctcgcactccagatcggcagaagaagagtaatacttatttagtttatgcacagcatttgtggaatccggacagatactccattcttgcacttgttaccccagcacacgatctcatgagcgccgccaacacacagttaatctcccacttttcagcctgtgctgaagattttcacaaccgctaa

SEQ ID NO: 380826 - DNA, 525 bp, Salmonella enterica
atgaaagactcaatcaccaaaatcgcaatggttgtggcactggcactaagcagcctgtcacacggatcttatgccaaagaccacacccatgaacgcagcgctattacttcaggggcgagcgcaccatccctcgcagaactgcgcgaaagtgtgggtaaaatccaggaagtcaccgctgatggccgtgaaatttacgccagactggatgcgctagcagaacatgattttgagcaggcaaagtttgccgcagaaggcttgcgtgctgatgtaattggctccctggcaattgccgagttcttattccaggcattaccagagatgtcgatcatccggtcttacgacaaaaactccactgaatacaagctatgcagggctgtcgctgagatgcgtcacggggccaaaaatctcgataatctggttaatcagatcctgacagttagccctcttcgcgaatcagaaattagccatgcggctcttgctgttctggcagccagtggcacagaggcttcgaccaaatggctctga

SEQ ID NO: 380827 - DNA, 246 bp, Salmonella enterica
atgaaggtcgttatctacggacgggataattgctcatactgcaaacgtgcggtcgagctggcgaagcagctccacggccacggctttggcgattatgaatacatcgatattgtgtctgccgggatcgacaaagagaagttgagcgacctggttggcaagccggtggaaaccataccgcaggtgttcgtaaatggcgaacctatcgggggttatacggaatttgctgcttttgcgagcaccctgtaa

SEQ ID NO: 380828 - DNA, 366 bp, Salmonella enterica
atgaccgatatggatatcgaaaacgagattgtggccaaaggcaaaacggccgcgcgtgttaccccggaacgcattgaagctgttatctcaggcgagttttactttaccggcgcggacggatatcgcagctcaccgttgtggctgaagcaggaagagcctgaaccggccccgcaatcactcgaactgctgaccttctgcgttcttgtgctggagaacggctacaccgtaaccggcgagtctgcgtgcgccagcccggagaactttgatccggagatcggacgtaaaattgcacgccagaacgcgattgccaaaatctggcccctggaaggctatcttctcaagcagcagctgcacgaggtgaagtga

SEQ ID NO: 380829 - DNA, 204 bp, Salmonella enterica; identical to SEQ ID NO: 133980

SEQ ID NO: 380830 - DNA, 774 bp, Salmonella enterica
atgggaaacaaacgtaaacaggcgcgtcgcgcagctcgtcaggctctgaagtcaaaaccacgcatccacggctacgaaattgacacaatcatcgttgacgagctggccgccgcccctgctctgccaccaaaacctaaacgcgacaactctcccatcgaagcgcgtaacgaggcccaggcccactatcttatctctctcgataccaaacctctgacgttcgccactggtgaagccggttgcggcaagacctacctggctgctgccgtcgcagcgcagcgtctgctggataaggaagtcgggaagatcatcgtgacgcgtccggtattgcaagcagaagaagatctgggcttccttccgggcgacatgagcgagaagttcgctccgttcttccggcccgtctatgacgtgctacagaagcgtttgggtggctcgttccttgaatattgcttaaagccagaggtggccaaagtagagattgcccccttcgcttacatgcgtgggcgcacgttcgagaatgctgtagtcattctcgatgaggcgcaaaacgttacagcgtcacaaatgaaaatgtttctgacccgtatgggcgagaacgtaaccgtcattgtgaacggagatgtgacgcaatgcgacctgccaggcaatgttaagtctggtctggaagatgcactggagcgttttaaaccttcctcccatgttggccttattgagtttgcgaccgaagactgcgtgcgttctgagctatgcaaagtcgcactggaagcctatcagtaa

SEQ ID NO: 380831 - DNA, 792 bp, Salmonella enterica
gtgagtaacagagatgattttccccaatcggtgaagcgaacactggccgaacgcgtaggctggaaatgctcttttcttggctgcaaccaggtaacagttggcccggatagcagcaatccaaacggcaggattaataatgggattgcggcccatattacggcagctgcaaaaggcggcccgagatatgactctagtttgacccaagaacagagaagctcgattgataacggtatatggatgtgtcgttcacatgccgcactcatcgactctgactacgttgtctattccactccacaattgaaactttggaaacagcaggccgaaactcagcaagctctactgctccagatgacgcaccaggtgagccaaaacaattactcagaaagagacatcggtgttctaaattctattactgatatttttaattacaactacctccaaatactgaagaacgagcagttccgagtaaaagtaagtaccaacattaccgaccctctctacgcttttgatgatattgcaaacaatcccttttacagcttcaatgatgttgttttagaaggacttcgtatagcgttgatcggcaaagttaacaacttttgggcgctgttcagacagcattgcgctggagggtatggcgggtattatgactatatagacatacccaaaatcagacagttccgccctgatgaggttgaacgccattacgatataattaacgaaacccaagatctggcgtatgacatcagtgtcgcggcacaaaaattactcgaaattagagcaaaactgccgtga

SEQ ID NO: 380832 - DNA, 555 bp, Salmonella enterica
atgaaaaagcgcaacctcaatattctcgcatctctggtgatcgcgctcgctctgacgggatgtaacgagtctgaagtagataaaatcacgctgataggccaagacaaaaacgctcttgagagccagtacaaaacccactttgaaaaacgaaccccaaacatcgaagccttcgctctgttcgataaaaccgcggctgaaggcaaggaaccgcataccactggtggattaattgacggcaaagttgagtcgagcatgactactaacgtcggcaaatataccttcatgcagctcgacgaaatgcttactaaagaatacggtaagccggttgccactaaagaccaggtatttgatgagacagccttgaatggactggaatgcgccaagacaatgtcatgtgcagcgggaaagtattatgaggtattccgcggcaaagagcgcctgatcatgatgataaacggtgccggtttcatgaataaagatgagggcgtaacgttacttacctttaccgacaaacacttaaaaacggcgcgtctggaagaagacaaacgccactaa

SEQ ID NO: 380833 - DNA, 144 bp, Salmonella enterica; identical to SEQ ID NO: 168362

SEQ ID NO: 380834 - DNA, 306 bp, Salmonella enterica; identical to SEQ ID NO: 112250

SEQ ID NO: 380835 - DNA, 153 bp, Salmonella enterica; identical to SEQ ID NO: 112251

SEQ ID NO: 380836 - DNA, 213 bp, Salmonella enterica; identical to SEQ ID NO: 112252

SEQ ID NO: 380837 - DNA, 177 bp, Salmonella enterica; identical to SEQ ID NO: 86002

SEQ ID NO: 380838 - DNA, 1323 bp, Salmonella enterica
atggaaaaactgatcgccctaaagcacaagctggatgccataaaaacgatgggaaccaacgccaagaaagaggcgctggccaaccttgatgaatttgagcagagcatggtctcgctaatgctcaacccattcattcgattcggtgtgaagaagtacaaagtggccgagccactcgatacttccgtacccagcgatcagaaggtagtcgagctgctggagaagctggcggcgcgcgaactgaccgggaacgcggccattactgctgtcgaatcactcgttgcctcaatgtgcgctgacgggcaggacgtgtttcgtcgcttcctgctgaaagatccgaaagccggcgtcggcattagcctgtgcaacaaggtgttcgaaaacccaattccgaagtttgaggtacagctggcgtctccgtacaaggagaaaggcgacaaatacccatttaaacaaaacccaaaggccaagtggccaatgatcggcagcctcaaactcgatggtctccgggttatctgcgaagttatcgttgacgaggaagaggtgaacttcttgacgcgtaccggcaatccgattacgtcactcgatcaccttaaaccagccatgcttgagcgaggcagactctccggtttcaagcacatctttttcgatggtgagggtactgcaggtacgttcaaccagtccgtgtcggcgcttcgcaagaagaacgtgacagccattggtgccgtttaccatatcttcgatttcttcttaccggagtggcgtgctcaggcaaaaagcaaagagtacctgaagaccggcatgaagctgaaagagcgcctggctatgctggtggcgttattccgcaacacttgcggggaagattacgcgcaagatatccacctgcatccgttctacatcatccatagccatgaagactttatcgaacgcttcatgaagcgcctggacgagaacgaagagggggagatgggcaaagatccggattctgtttacgagttcaagcgtacccgcagctggtggaagctgaaagatgaggattccgaagacggtgaaatcatcgacttcgagccaggcgacccggactcaggctttgcacatacgctgggcaagatagtgattcgtctggagaacggcgtcatcgttcgtgccagcggtatcaagcataagtacctggatgaaatctggaacaatcaggagaagtatcgtggacgcatcgtcgaggttcactgccatgagaaaacgccagacggtagcttacgccacccacgtctgaagtggccgaaatgtctgcgagataccgaagaccgtattggagataaagactga

SEQ ID NO: 380839 - DNA, 477 bp, Salmonella enterica; identical to SEQ ID NO: 233659

SEQ ID NO: 380840 - DNA, 795 bp, Salmonella enterica
atgaaagcagatattcagaagtccgttaccgaaattatcgacaaatcaggcgtagaaattgatacagaagagcgccagaagattatcgatgaggcgatccaaactgcgctggagcacatcgccacgtctgtgagcacagcacctcttggggaaggctcgaaatacatgcgggtatgggttcgttttggagagtccccggagctgcctggtgttaaacagaaacgcgcggcactcgtggcgttcactcgcaaaatgaaggacgcaacggtcgaagtacgtgccggtgcatggtacgacggtcgcgttgtctacaccaatcaggcggtgtgtgatgaaggtgaacgatttgaggaaattgtcgacgcaactcttcgcgcgatcaaaggcagggctggtgtagaggatgatccgtctatcgcggcgttcctgagcattgtcgaactgcctgaagttaccgaacgcgttaccgatctgacaacaccacctggtttgctggaattggtggtcagtggcgataccaaaaaagccgttgagcgcattcgtgaggtggaatacggcatcatctgcgatatgtgccgcagcgacttagacctggtgcgcatcattgttgacgcgggtcaggcatgtgacggtgtgctcgccagttttgcagggcaggtggcacgcctggccaacgagctgccgatgattaaacaggaggcaaaatcatacgccgtccaccatgccaacgatttactggagccataccggttcgaagccgctcaggacaaaatgactggctgggcgacctggtaa

SEQ ID NO: 380841 - DNA, 1116 bp, Salmonella enterica; identical to SEQ ID NO: 112257

SEQ ID NO: 380842 - DNA, 1341 bp, Salmonella enterica; identical to SEQ ID NO: 86007

SEQ ID NO: 380843 - DNA, 726 bp, Salmonella enterica; identical to SEQ ID NO: 86008

SEQ ID NO: 380844 - DNA, 795 bp, Salmonella enterica
atgatattgtacaaatacgtcccagaagaaactttaaaactgttttttgatcatgacgcaaccagcttcaaatttactccagttggtcagttcaatgatcctttcgaaacctacggtgtatcgtttgcctctgaagatgaagactcgctagcgcatttgacgtttcgctcaaagatcaattcagacctagccagtctatgcttatcaagatcacctttagaagtgctaatgtggtctcactatgctcaacaccacagaggttatgttgttggcattgataccgaattagcagggtttcacgatgagaatctttgtttaatcactgcgaatgaagggggtattgattatctcgatgaacgagacaaatccagagtcatcatctccgataaaaactttaaaaacaaggatatagttaaaaaggtcttatttagaaaaagccaacattggaaatatgagaaagaagttcgaattgttattgaaagtgacaaattgatacctatcggtgttgatgaagaagataggttttatatatacaaggcgccaggcacaaatattattaaagagatattcataggaatcaacaatgaggattttgaacttacagcactcgaaaatgataatttaagaaatggcattttggataacaatattaaaatccaaaaatgttgtttcaagaggggaacttgggacttagataaaacggattatgatatgagtctgcttactgattggcctagcgctgatttcggtattcttgccggtgtgatatcagcattcgaaaaaaacgaaatttga

SEQ ID NO: 380845 - DNA, 360 bp, Salmonella enterica; identical to SEQ ID NO: 86010

SEQ ID NO: 380846 - DNA, 189 bp, Salmonella enterica
atgaacacgcttactattgatatgtatgtctcagagaataatccgacgttaataatgctatcggcaaatacgatactcaggcctgaagcctgtttgaacgcaatatcggatagctgctatttcaggtatccggcaggacatacgtcttggcatcaggagcataaatgctctgccttttacatctcatga

SEQ ID NO: 380847 - DNA, 282 bp, Salmonella enterica
atgaacccagattatgttttttggacggtcgtataccataagaagtccgaacctttagaccctaattctttttacaacaagaagaacaagtctgtttttaaatactcaacccgaagggaggccgcttatgtttgtgcggaaagaaacagtaaactaaaaggagattcaaaatattccacgcaaaaattttatgactatgatgctgaaaaggcggacttggaagaattaaaaaagagtcagcaaaggaaaagacgggaaatgttaattaggcaggggcattaa

SEQ ID NO: 380848 - DNA, 867 bp, Salmonella enterica
atgccatttacgaccgttttctgcattttcataaatctcggtttaggcgaaacgataaatctggcaaaaaatgccgttccggcgacacggcgggttaacagtaaaccactgaccggtgatatcactttgtcagctgctgatgtgaatgcattcgcgctggggatgacgggagactacacactggaaaatgacaaatcagtcggctggaactggaaaagcggtgtttacaacgttcctactggaggtgcatccaagctgattttgcattttaatatgaatatcggcagttgtccggcagtgcagttttgtgtgaattacaagaatggcggtatttcctaccgttcggcacgcgacgattttggctttgaacttgactggactgaattttataccacaacacgaaaaccatccgcaggtgatgtcggtgcattacctgttagtggtggcgtaattaacggtaatctcggtatcggtacacctaatatattgggaggtagttctattgtattaggcgataacgataccggcttaaaacaaaacggcgatggcctactggatatttatgctaatggtgttcaggtattccgctttcagaacgacacactggagagtaaaaaatccatcaatgttaccggacgattaacgccaacagactacggtaatttcgacagccgatacgtacaggatttccgtctgggtagttatgaatctggacaggcatggatgggcccgggattcagtgatacaccaggttatgtactgacagcggcaactaacggcaatggtgatgagcttattgacggtctcggaagacgtccaatgcaaaaattgattggcaaccagtggtataacgtgacgagtgtttaa

SEQ ID NO: 380849 - DNA, 738 bp, Salmonella enterica
atgagttttgtatccacaaataataaatccggtataggagggctgacgacaaccacgccgccgataaccggagaaagtggcggtgtcaccgcagattcagtcgccggaagcgtggcagatgcggcggaagccgccgtggaacaggctgcgggatcgctgtttggcgcattgccggagccatcaggactggtgaaagccgcggtggcagcggcgcaggctgccgccgccgcaggtatggcgcaggatgcggtatcggccatcgtctccgctgttgcaggcgggccgggggcgcataatgtgacggtcagcggcagcgccgtaccgccgggcgcattactgttcgccagcctggacggcggcgaaacattaagtgaactgttcagctatgtggtacagctaaaaacgcccgacaccctgaatctgggctatgtctcccccgcagccaacctgccgctcaaaccgatggtgggcaaagatctgtgcgtcaacatcgaactggatggtggcggtaaacggcatatcagcgggctggtcacggcggcgcgggtagtcggtcatgaagggcgttcggttacctatgagctgcgtatggagccgtgggtaaaactgctgacccacaccagcgactacaaagcattccagaataaaaccgtggtggatattctggatgaagtgctggcggaatacccctacccggtggaaaagcgactggtggaaagctacccggtacgcacctag

SEQ ID NO: 380850 - DNA, 4497 bp, Salmonella enterica
atgacggaaaaaagcgcgcaggaaaagctggcggaactggaccagcgggacagtaatgccgaaacagtagaaaacatcgccaccacagggcatgttgccagtgtcggaatcacggtcgtcagtatggtgggggcaacggcaaaggtagggctggcagcagcagcggccaaaacctgtgcagccggaatagccaaagccgttgctggatttggcggccctctggttgcaggactggcgggagggatgctggggggatggctgggtaccaaagcgggtgactggtttatggatacctggggtaaagatcacgcagtttctggccccacagatataccggcgtgtgtgggacatcatattgttcataacaattcctttctgggcgcaattggtgggttgattggcggacttattgtagggattgcggttggtgcactggtcgttgcgacgggaggggctgcgctgggggtactcgctgccactgttgctgccggagctggagggctggcggggggatttgtcggcggtgccgcgatggccattggttcccgctgggcctctgataccggagaaattcatgaaggttcgcccaatgtcacttttgaaggaaaagcagtggcacgggtaaccgatccagtgatttgcagcgacgatccgggcgaaccgctgccgcagatagctgagggcagcaaaatcatttctgtaaacagtctgccgctcgcacgtaaggggcataaaatcacctgttcggcagtgattcaggacgggtgtaaaaccatcacggcggataagactaccgggcagtacgggccgattaatgcggatatgtctgttacagaacaatctatcgtgtccggtttagaggttctgacagctctgtggggcgcaaaacagttaaatcgggcagccaatgagcgtatcagccagggattcagcgacccggtggacgcgggaaccggcgaatacctcgactaccgtactgatttccactggccccatatcctgccgttaacgctgaaacgcgcctacactggccgccacaccgtgagcggctttctgggcactcgctggctgtgtaactggtcgcagtacctggaattcgacagcgacgggcagaatgtcacctattttgatgctgagggtttatgtccggcctattccacggtgcaggagccatacaactgccgcaacctgctggtgccgcactaccgcctgacgggtaaccgcaggcgggccgtcatcttcgatgagcatacgcagcagggctatatcttcacacccgtttcccccggcgcacgccgcctgcgtctgtccgctatcaaagaccgtaaccgcaacgaaatccgctttctctataacggcgtgggccatctgacaaacgtcgaacacagcggcggcctgcgcctgcgggtgatgtgtggcccggaaggactgatttaccgcgtcagcgacgaggcggacggcagtgagctggtacgttatgactacactcaccacggcgatgagtggtggctgcgtgatgcgcagacacggtttaacggcacgctgcattacacgtacaccgaacagggctggctgaattcctggcgcgacaacggcccgacacattttcacctgcgctacgacgatgaagggcgggtggtggcgacgggcaccgaagaggggctgtataacgacaccttccgttacttcccggcagagcgcaaaaccgagtacaccgatgcaaccggggccgtcaccacgctgtggtttgatgaaacatggctgctgataaaacagcgagacccgctggggcgcatcacggagtgggggcgcgatgaatatgaccatccggtgagcatccggcagccgggcgggcgtgtcacacagattaaacgcgattatgccggacgcatcctgagcgaaacggatgccgacgggcgcaagcgggaatggcagcgggatgcgttcgggcagataacggcttaccgggaccaccgcaccacggcggcataccgctataacagcgaaggcaacctggttcaccgggaagtgaatgaccagaaatggcagtaccgttacaccgaagatggccagataaaggaggtcatttacccggacggcagccgcgaacagtgggcttataacgcgcagggcagcctgacggcgcataccgatgcggcaggccggacgacgcattatgcggaagaccgctggctgcggctgacgggcgtgacggatgcggaagggcgcagcacgcactggcagtaccgtccgggagagagcaacccgcatgaaaaggtcagcgcggttatccgggcagacggcggcgcagaaacgttccgctacgacggcgagggaaaaatcgccgtccataccggcgcgatgggccagaccacgcgctaccgccacggggcattcgacctgctgcgcgaggtggaggacgcaggcgggcagcgcattgtctgcgactatgacggcgcggcgaggctgacacagttaacccgctccggcaaccagcgctggcggctgtattatgatgcggcggggcaactggcgggggaggatgactggtcgggacggcggacggtttaccgccgggatgaacagggcaggctggcggagaaagtgcgcccggacggcagcgtgtggcgctatgcgcgggatgaattcggtcgggtgacaaccatcacgggtgagcgccagcaactgcgctacggctgggaccgttatgaccggatggtgagcgcggaggtgtatgagtgcaacgacgccacgcagaaggattatacgctgaccagccgcatcacgctggaatgggatgaccggcaccggctggtggcggaagagcaggacggtcagcgcacggaataccgctacgatgaagcgggacggctgacgggaacgaaaaccgcggacggcgaaacacagcgggaatacgatgcctcaggcgtattaacggcttaccgcagcaacggccaccggatggagtttggtcatacgcgggcagggcaggagcggagctgccgctaccgcccggaggatgaagaaagctggctggcgcagacgccgctgaaccacgcggtctacatccaggagcagggtcatgatgcctgtggccgcacggcgtggcagcggccgggggcggagcgactggcaggcagccatgagagcgtggcgtcgtggcgaccgctgggagagcaccgttacgcgtgggataaatcgggccgcctgacgggccatgaggtatggtcgaaaacgcgcagcgaacaggaaacgcgctaccgctatgacaaccgcgaccagataaccagcgtgctgcggctgaacgccgacggcccggcgcaggaagagcgctaccgctacacggtgaacgagcaaatcgcggaaagccggataaacggcattctgtcacagcatgattaccgcaacgaatgtgtgacgcaggcaggagacagccgctacgaatacgacgcctgcgggcgggtgataaaacgcaccgaacagaaacggggcttccggccacaggaatggcgctaccgctgggatgacttcgaccgtctgcgggaggtgaaaacgccggacggtgaggtgtggcagtaccgctacgacgctttcggacgcagaacggcgaagcgtaatattatccgtgcggcgtggaaacaaaatcaccacaccgtcagcgaggtgcgttaccagtggctggggatggcgctgtcggcgagtgagaagcgctacgcggacgggagtccggcgctgcgtgagcaatggcattaccggggcggttttgagctgctggcgaaggaggcgcgggcggcgaacgacgacaccagcgacttttatcccatactcatcggtccggatggcgcgccgcaggagatgtacagcgcgaacgggcggaaggtgtggcggcggcagcgaagcctgtgggggctggcggcggcgaatgacgcgtcgcctgacgcgcgtgaaagctgtgacgcgggctttatgggccagtggcaggacgaggagagcgggctgtggtataatttacaccgctacatggactcacggacggggcagtatttaagccaggacccgctgaaactgggcggcgggctgaacacgcagtcgtatgtgcatgatccggtggggtggtgcgatcctgttggattgaaaggttgtattcttaaggaagtggataatgaggactatgactttgagttgcgtattagtaaaaaagaatatcctgaaacagcacagcatatagaggatgctattaattcagggaaagcagatgttgttactattgacagagacaactccgcagcaaatcgagcgaagtcattgaagggaataccaacgaaaccggggaaagacagggatgaatggcctatggctatgttcaaagaggggggtactggtgctgatgttgagtatatatcaccaagtgataatcgaggtgcaggatcttcgattggacatgctttagatggcgtaaggaatggtgcgaaacttaagattattattgttgattaa

SEQ ID NO: 380851 - DNA, 654 bp, Salmonella enterica
atgcagcagatcacggtagcgacggacgctcaacggcgtattcgccagcgcgagctggccatgctggacgagaaagaggctcaggagcgcgaggaagcgcggaagaacaaggggttcacacaggtgtattcgaggggttggaggcgcgtacgggagcttgctacgggcaattcaggcgctgccggtctgtacgccctctttgccgagcacatcgacccgacttgtggcgcggtgatctgcgatcagcagtttttggccgatcacatgaaggtgactaccaggactatccggtcttggctcgcctacctggaagaaaaccgggcgcttgtccgcatccctgtcgctggccgagtttgcgcctacgcgctggaccctcacgaggtctggaagggctacgacaacgccaaggaatacgcggccttcgtgaccaaaaccttggtcaacaaggacggcgatatccgccgccggatcatgtcgatgttcagcccggaagagcggccaaacgacgaccgcgacccgaacacgctggacatgtttgaaggcactccccacaatgagcaacgaaacgaaggagaaaatctttatgaaaaaaacgttcgctcttgctgccatgatggcggcaatcgctccgaatcttgcttcagcggcggataa

SEQ ID NO: 380852 - DNA, 249 bp, Salmonella enterica
atgatccagaccaagtacgcttgcgaaggcggaaagacgttggatgtcgtgtacgtcggagactatgccgtgatgctgcaaatggatgagcttgtcccgctgaaacgcgccaagagtgcatcaggagtacgctacatctctaccagcaaaaaccactcctacgaactctgggggaagaacaacgacatgaacctttcaacccacgatggcggaaaaaagcaagtcgttctcagtaactgcaagccataa

SEQ ID NO: 380853 - DNA, 975 bp, Salmonella enterica; identical to SEQ ID NO: 338817

SEQ ID NO: 380854 - DNA, 204 bp, Salmonella enterica
atgaaagtgtttttcgcatatatgtttattattgctggtggaattcttgtaatgtacggggcaacaatgaaaaccactagtgggttttctgaaacgctgaatattgggcttttatttaatcagtttgaatttatcgttgtcggcgctttattatttattggtgggtatattgtttcgtcaacatgtaaattgtcgaaagagtaa

SEQ ID NO: 380855 - DNA, 213 bp, Salmonella enterica
atgaccaaagcagaaaccaagcgccatttacatggggtttaccttgaatggattcagggaaatatggataccagagaaaaagaattatcttttcatggatatatttgccatctcccagatttttcaacttttagatttggtgctgcccgcgactatcaacaaacagctatgtgggttagagaatggaatgagcaattaggaattaacagctaa

SEQ ID NO: 380856 - DNA, 975 bp, Salmonella enterica
gtgggtcgtcacgtatggacaacgaccggcgatagtaaaaatgccgaccagacttatgcccagattggttttaaaggggaaacgcagattaacaccgatctgaccggtttcggtcagtgggaataccgtactaaagcagaccgcgctgaaggcgaacagcagaactcgaatctggtccgtctggctttcgcgggtttgaaatacgcggaagtgggttcaatcgattatggtcgtaactacggtatcgtttacgatgttgaatcctataccgatatggccccctacttctccggcgaaacctggggcggcgcctatactgataactacatgaccagccgtgctggcggtttgttgacctaccgtaactctgacttctttggtctggtggacggtctctctttcggtatccagtatcagggtaaaaatcaggacaaccacagcattaactctcagaatggcgatggcgtaggttacaccatggcatatgagttcgacggctttggcgtcaccgcagcgtacagcaacagcaagcgtactaacgatcagcaggatcgcgatggtaatggcgatcgcgcagaatcgtgggccgttggcgcgaaatatgatgcaaacaacgtctacctggctgccgtatatgctgaaacccgcaatatgagcattgttgaaaatacggttaccgataccgtggaaatggcaaacaaaacgcagaacctggaagtggtcgctcagtaccagtttgacttcggcctgcgtccggcaatctcgtatgtgcagagtaaaggtaagcagttgaacggcgccgacggctcggccgatctggcgaaatatattcaggcgggcgcgacttactacttcaacaaaaacatgaacgtatgggttgactaccgtttcaacctgctggacgaaaacgactacagctccagctacgttggcaccgacgatcaggcggctgtcggtattacttaccagttctga

SEQ ID NO: 380857 - DNA, 429 bp, Salmonella enterica
atgatggcggaaattattcctgttaacgctacgctgaaactgcgagcggcagatgaaagtcatgttccggcgctgcaccaactggtacttaaaaacaaagcatggctacagcagtcgctcgactggccgcaatatgtcacgtcgcaggacgaaacgtgtaaatatgtccagggtaatatgctgttgcaccagcgtggctacgccaaaatgtatctgattttctgccaggatgaactggcgggcgtgctttcatttaatgtaatcgagccgctaaacaaaactgcgtatatcggttactggctggatgagtctctacaagggcaggggggaacctcctcgccaacatgcgcagcaatacaatacatcaagcaaaccagccgaatctcaatgagattagacccaaaagtcccgcagcaaccaggacattaa

SEQ ID NO: 380858 - DNA, 327 bp, Salmonella enterica; identical to SEQ ID NO: 380138

SEQ ID NO: 380859 - DNA, 1551 bp, Salmonella enterica
gtgacaacacgacatctggtcagtctggtaacgggagtacttatcctgtctgtccttttcccggtaggattgagcctgtggctggcgcaccgtcaggctgaaaaaaagtttaatgaagagctcaatatcttctcgtcccgggttgcgctacgtacagaaagggtcagtgaccaggcaaaagccgcattaacgcatatcgcctcctttaaaggcgagccctgcagcagtgcccatttactcgccatgcgccgcgtgtcttatagctttcggtatgtccaggaagttctgtaccttaaaaattcgattcccgtttgctcctcacttgaaaaagagagccatattcccgcgttccctccgcccatgaaaatcactcaggacggttatcgcgcctggtttacggcgcaaaacgatctgggtataaaacgctatatggcggcactcgggagcgataactatatcgtgatgatcgacccggcatcctttattgatgtaattccgttcggagcatggccgattgacgtcgccattattggccaggaacacaatactgtggtcgccagcagcggtaaacctgaccccgcaatccttccgctaattcagcatgagacacccctgcgactggaaaaccgaggcattcagtacgctattcacccttttccggaaatggatatcactatcgtaagctgggcatccaccgccccgctggaaaagagctggtatcgccaggcgtttatctggctaccggcgggcataataacgggtctgctggccgcggcgtttattctgcgtattttgcgtcggctacagtcgccccgacaccgtctccaggatgcgatagacaatcgcgaaatcaacgtacactatcagcctattgtctccctgagcagcggaaaaattgtcggcgccgaggccttagctcgctggcaacaggcggacggcaccttcctttcaccggaaatttttatcgcgctggctgaacaaaccgggcttacggagccgctaacccggttaatcatcgaaaccgtttttgaagacatggggagttggttaagggcccatccagaacaacatatttcaatcaatcttgaggcatccgatctggcgtcggaaacgctcccggcgctgttaagcacgctgctgaaccgtagccaaattcctccgtcgcaaatcgcgcttgagttaacggagcgcgaattcgccgatccgaaaaccagcgcgccaattgttgccagataccgtaacgcggggcattccatttatattgatgactttggcaccggctattccagcctcagctacttacaaaatctggatgaggatgtccttaaaattgataaatcttttgtcgatgcgctggaatataaaaacgtcacgccgcatattattgaaatggcgaaaacgctcaaacttaagatggtcgctgaaggcatcgaaacgaccaggcaagcgcagtggctacgccagcatggcgtgcattatggtcagggctggttatacagtaagccgctacccggcgcggcatttattctttgggcggaacagcggctataa

SEQ ID NO: 380860 - DNA, 999 bp, Salmonella enterica; identical to SEQ ID NO: 380089

SEQ ID NO: 380861 - DNA, 531 bp, Salmonella enterica
atgcgaactgccggttcgctcaagctgggcaccattcatgcttcagagctcattcgctctttgctgaaaagctcgcgcccatcagggctggcacaggcgatcatggaagtgggacgcgtcaacaagacgctgtaccttcttaattatattgatgatgaagattatcgcaggcggatcctgacgcagctcaaccggggaaaaggccgccatgctgtggcgcgggcaatttgctacgggcagcgaggtgagatcagaaagcgctatcgtgaagggcaggaagatcaactgggtgctctgggcttggtcactaacgcagtggtgctgtggaacacgctttatatgcaggaagcactgagctggatgcgcagtaatggagaagaaaccggtgaagaggatatcgcccggttatccccgctgatgcacggacatatcaatatgctgggccattatacgttcacgctatcggagaatattatgaacggtgaactaagaactttaaattttaatttaaacaatgaattatctccttaa

SEQ ID NO: 380862 - DNA, 702 bp, Salmonella enterica
  misc_feature (632)..(641): n is a, c, g, or t
atgatgcttttctctatcatatctgccgtaaatggtggtgtgttatcatctgcgtgcactcattttcttttagatgagagtaagttagttgagcctggtattattggcgataataaagagcgaacattgcactttgatgtgttacttaaccagctcacactctatccatatgaaacagcagatccgttgttcatatctataaacgcggtgacctcatgctgcggtgagagtagtgcctaccaattggcgatatctacagggcggttccctttgtatgaatctgagattaatgagttgatgaaagattttctttatcaacatgtcgttgatgccaatggtcatgtaaaaattactttcaccgatgtatgtaagaggctgaattcattatggaggaagttcactgaagaaaatttacgcacaacttcaaaagatgaagaggttgtgtgttcgtcttataccatgcctgtatctgtgccggaaaaagagagttctcttgacgaaaaagatgaaaaggttgtgtgttcgtcttataccatgtctgtatctgtgccggaaaaagagagttctcttgacgaaaaagatgaagaggttgtgtgttcgtcttataccatgcctgtatctgtgccggaaannnnnnnnnnaggttgtgtgttcgtcttataccatgcctgtatctgtgccggaaaaagagagttctcttga

SEQ ID NO: 380863 - DNA, 588 bp, Salmonella enterica
atgccctttcatgttggaagcggatgtcgtcctgccgcaatcagtaaccgccgcatttatcgtattgctctgtttgatactccccctgaaatgagctcatgggaaaaaggtaaggaatttttttgctcaacgcaccagactgcagcgctggagtgcatccggacgatttgtcacccgccggccggaacgacgcgggaggatgtggtcagcagatttgaactgctcaggacgctcgcgtatgccggatgcgaggaaaacattcattccggtctgcacggggaaaactacttctgtatcctggatgaagacaaccaggagatattatcagtcaccctggatgacgccgggaactataccgtgaattgcctggggtacagtgaaacacatcacttaacgatggaaacagaaccgggagaggaacgcacagaacacgcggaaggggcatccggacatcctgccttcctgccacaacggcgccacagacggctgcagagtatgatgctgtctggtcagcatggcaaagggcggcgccagaaggagaggcacgcggccgcgcagcagtggtacaggaaatgcgtgactgtctga

SEQ ID NO: 380864 - DNA, 789 bp, Salmonella enterica
atgtttgttgcagccgggcaatttatcgtgagccctgtatgggaaaataatgtgcaagtctgcgtttcgttaatgtctcaggcggcggaccgcggcgtatcgcttctggtgctgcctgaggggatattagcgcgagatgacatcgacattgatctgccgatccgcgtcgcgcagtcgttggatggcgcgtttatgacgcggcttcaggaagaaagcgctcataataatatgacgacgatattcactatccttgtcccgtcaacgcctggacgggcggttaatatgctggtagcgttacgagcgggtaatattgttgcgcactacgcgaagctgcatctctacgatgcattttcgatgcaagagtcccacactattgatgccggaaccgttatcgcgcctgtgttggacgtagaagggtttaaggtcgggctcatgacctgttatgacctgcgctttcctgaaatggcgctagcgctggctttacagggcgccgaagtgctagtgctgccagcgggctgggtccgcggcccgttaaaagagctgcaatggtcgacgctactggcggcgagagcgctggataccacctgctatatgattgcggccggggagtgtggtaatcgcaatattggccaaagtcgtattatcgatccattgggcgtaacggtcgcggcggctgccgatcgcccggcgctgatcgtcgcggaaatattcagagatcgaatagaccaggcgcgggagcagcttcctcttttgcagcagcgacgatttgcgccaccgcaattattatga

SEQ ID NO: 380865 - DNA, 450 bp, Salmonella enterica
atgctgtttggcctggcgcaagagggagtagcaccgaaagcgttcgctaagctgtcaaaacgcgcggtaccggcgaaagggctgaccttctcctgtatctgtctgctgggcggcgtggttatgctgatggtcaacccgagcgtgattggcgcattcacgatgatcactacggtttcagccatcctgtttatgtttgtctggaccattattctgtgttcatacctggcataccgcaaaaagcgtcctcatctgcatgaaaaatccatctataagatgccgcttggtaagctgatgtgttgggtctgcatggcgttctttgtattcgtgctggtattgctgacgctggaagacgatacgcgtcaggcgttgatggtgacgccgctgtggtttattgcgttgggtttaggctggctgttaataggtaagaaacggatggcgggaatgcgttaa

SEQ ID NO: 380866 - DNA, 1197 bp, Salmonella enterica
atggtgcatctgcaccgaaagcccttcacccggcttgacggtaatacgcttcacctggtagcgctcgcccgcgtcgatggagtcgtatttgccccacggacggtaaacctcacggtgcatgtggtgctcatgacgcccgtcggccttgattttctccaccaccttttttacgtcctgcactgcgtggcgatcggcaatcagcaccgcgtctttggtctgcaccaccaccagatccttcacgccgacggtggtcacgaggccggattcggcgtaaacgtagctgttttcggttttatggctgatgacgtcgccgtggtggacgttcccctccggggtatgggcgctgatctcccacagcgacgaccaggagccgacatcgctccagcccgcgtccatcggcatcatcaccgcgtccgccgtccgctccatcacagcatagtcaatggactcttccggacaggcgaggaaggcctcttcatccacgcggatgaagtcaagatccggatcgacgccgcgcatcgcctgttcacaggcggccaggatatcgggccggaactttttcagctcttccagatagcgtccggcgcggaacagaaacatgccgctgttccagtagtaatcgccgctggcaacgtaggcctgggcggtttccagccccggcttctcaacgaactgcgccacctcaaaagccaccgcattcgtcgcgcccggtacgacatcgccgcgccggatatagccatagccggtttccggcagatccggcacgataccgaaagtcaccagcttgcccgcgtcggcataggacatggcgctacgtaccgcgtcgcgaaaggcctcttcattcgcaatcgcatgatccgccgccagtaccagcatcagcggatcgcagtccgtatgctggcgcgtcgccgccagcgccgccagcgcaatcgccggcgctgtattgcgcccggcgggctcaagaataatgttctccgtcagcttattgagttgacggagctgttcggcgacgataaaacggtgctgttcgttgcagataaccactgggctttcgcactccacgccgttcaaacggcaaatggtggtttgcagcatggtgagatcgcctttcaggcacagaaactgttttgggtaaagcacacgggaaagcggccacaaccggctaccggagccgccggccatcaccaccggatataa

SEQ ID NO: 380867 - DNA, 1089 bp, Salmonella enterica; identical to SEQ ID NO: 380115

SEQ ID NO: 380868 - DNA, 780 bp, Salmonella enterica
atgaaaaaacgtaataatactcttgatgtggcccgaggaataagcattctgtcaatggtaggcttgcatagtcatttgagtgatggattttattatcctatagcacataacatatttgttaaattcttaatgctttatttagtgcctttctttttctttatatctggcgttttttatagaaatgatagttataaaaaactgatttttgagaagttctcaactattattaaaccagtgctatttaccgttgttttttataatattttattctgggacaatgattggtatagtatctattgtgatatttatggtatatttcaattccctctatatgctttgtggtttatgccaacactattaactacaatattagtatgctcagttattattaaaacagaatgcaaaaatattcaaagtttgtcagtgatactagttctggtagctatgacttcttataatggtcttatagctatgttaggcggagccaattcagatgtttttgtaatttatatacttttgtgtgtttctgaaatatttcaaaaaataatttttgtatcttcgtttctccgtttatgtggaagagatagtctctacatagcattgtttcatgggcctttactattctatttcggtaagattataaattattttcattcttttggtttaccaatgattataagggatttgatcgtttttgctttgtctgtaacaatgccattgttttttaaaaaaattcttgcattaaataaaatttcaaaatggatgtttgcgatcagataa

SEQ ID NO: 380869 - DNA, 1224 bp, Salmonella enterica
atgcttagggaaatatttaatgatgggatatattcactctttaataagatttgctattttggagctaaaactcttgctataattctcattacgcgttctctaggatcaactgaaggtggtcagtttatatttttaattggtattgtagaaatactgcgggtgatatgtgattttggagtagatatctatgttattaaacgttatggtgaaatacatgaaaaaaataagcttttaataacggttttgtgccaaaagatatttatgggctgtgtgttttttttgatgttgactggctattgtttcacagagagatatagtactaatatatatttccctgcctcattagcattagtgttttcattgctttttaatctttcaaatagttattttcaatcattaaatgaaaacaaaaaactaacaccatttatctcagtcgctggtgttttttctgctttattgctgggttgtctttatcttatggagatggagtttaaagcctataattatttaattgtggaaatattgttttttttcgctgtcctatgtgcgctaattaagaaaatagattcaaacataataagagaatttcaagcatttaaattttcctcaattatcaaactctataaaaaaacctatagtatcggtattactgccgctattgtaattatttatagtcgattagataatatttacttaaaaatttttgatccgcaaagtctcgctgtgtacggtcaggtctttaggttggtggatcctttagttatggtttcttccgtattttctaccgtcgcgtacgcaaaatttagtaattttaatttgagaaaaagagaagttaaagtaaagccgtttatatatatgatgttaatgtatgttttactcagttctatctcatactatattgtgcttagtattattggagagtggtttgtattgcctacaagccacttccaaactttcgtattaggttttttatgtatagcgggaattaaatgtttaaatggcgcattgactgccatactgcagtcgcaaggtttgtataaaataggcctttatgtttcgttgtgttgcatatgtttggcattaccactcatgtatatgcttataaaattttaccaggcaccaggtgcaatttattcaattataattattgaatcactgagttttatattgctcagtgcgagtgtattgcttttaccaaatcgtctcattaaaactagcagatag

SEQ ID NO: 380870 - DNA, 630 bp, Salmonella enterica
atgtacgataaaaaactatcagaaatttatatggaaaatatttctaagcaagagtccatgccagaagaaaaaagggattatcatttactgcagctattgaaaaaagaattgagtgatattcaagagggtaatgattcattaattaaatcttacttactagataaaggccatgcatggtttgatttttacaggaatatggctatgttaaaggctggtcagttatttttggaggaggataaggttgggtgttatgatttatcaacaaatagtgggtgtatatatctcgatgctgatatgattatcacggaaaaactggggggtatatatattccgaatggaattgctgttcatgtagaaaggatagatggccgtgcttctatggaaaacgggataatagctgttgatcgcaataaccacccggctttacttgctggattgaaaataatgcatactaaatttgatgctgatccctattctgatggtgtatgtaatgggattagaaaacattttaattattctttaaatgaaaattataattctttttgcgattttattgagttcaagcatgataatattatcatgaataccagtcagtttacgcaaagttcatgggcgaggcaggtgcagtag

SEQ ID NO: 380871 - DNA, 189 bp, Salmonella enterica; identical to SEQ ID NO: 380171

SEQ ID NO: 380872 - DNA, 549 bp, Salmonella enterica
atgcgcatggtcggtatcgtagtaaccagccgtgttgaggaagtacgacgaccccacccaggccgtatcatcactggtgtcatcgtccagctctccggcgcgaaatttcagacgggcgcgggaaggggcataacactcctcgacaaaatcccgcagttcctgagccagcgctggatccttgattcgggtgtgctgcacctcaaagcggatctgacgcaggtctggctggcagggcagggtggcaaccgttgcgctggtaatgcctttgctgatcacatgaatgaagtaccaccagaccgggacggcggcggttttgccgcccagcgagttaataattggctgatagccggtatcggcgggttgcggtaccgacatcccgcactgcttcgagcgcgtggtgtcatatttgatggtatcgaggtcgatgttcaacattggcacgcaggtgaacataatcaccagcagcgaggtgtacatcaggtgctcggtccataccagggacagcgcggctttgttgccttcatcggccccctgacttctggcctgtag

SEQ ID NO: 380873 - DNA, 936 bp, Salmonella enterica
  misc_feature (919)..(928): n is a, c, g, or t
atggatacaaagctagaaccatattatttaagtgcagaaaatgcattgtctatagtttcaaaaaaattcaatataaaaatagacattaaagaggaagatataaatattcgatttaaaaaatatgatagaaataataccgatgactcaatacaaatgaagaattttttcttgtcattaggactttctttacaggatatattatttagtagtggcgaagatctattaaatgaacctatgcccattttactactgacccctgaaatgaaatggatggtatgtatcagcggtgggcaaaaaattaaattagtaaatgcccgaggggaactgtgttatgtagagatacctgatgagtatctaaaaaaactatctgcatttagtatacttcccttaaataaagttgttgatagtataagagtgaataatattattaaaaactctttatcaatgaacaaggttttttatacaaaatactttttttcatctttgtttatggcaatttttgcgctgacaattccagtttttagtaatttgttttatgacaagcttattccaagtgcttctgtttcgtctttatttggtgtcgctattattgtagctgtatttatcgtttttgagtttattctacgtacgtcaaaagatatttaccaatctataacggccagacaagatgacgtcgatattgatatctcgtttctcgaggcggtgctttatggtaaaaagaaaaacggtaaatcaatgtcatcagcatttgttctgtggaatgagtttcagaaggttaaacctattttattgaattctgtttttcaacgtatagccgatatcccaatttttttgatatttatcgctgttatttatgtgaatttaggatgggtagtggttgttcccattattgtttttataatctctattattttgtccnnnnnnnnnnattgttaa

SEQ ID NO: 380874 - DNA, 1182 bp, Salmonella enterica
atgaatagcgaattgcactcttcacattacggttctggtgacattgttatcggtgataaaaaaataataatcccatccgaccttactcctgaaaatctgtttcctattgcagaagacatttttagaaagatccgtgaaagcgacataggctcagccaagacgattgtagatacaataaaaaaactccctgccacaactgtcgccaagcaatttgtagatgtattaaatacagcaatccttgcatcagaaaataccttaaccacaggatttaatgaactgtattctcttgctaaagaagatgatttatcagataaactaagagatgttgttttttcagttattatgctcatagagtttaaaaacaacaatcatgaaaatactatagctatatattcacagtctccaaagaaaaaatactcacacatgttttatcttcagtgccttgcaaatgaagatgaaataaatgatttttggaataagagccgatctctcattagtgaggatgaactttatgcaatatctataggtgccagtcgggtaaataatcaaatatcagcaaaaaattttgcaacactcttagttgaaagatcaccaacctccttaaactctattctgcttaattatattaccgtattggaatttgcagaaaaatatcataatatagatttactatccttggacaaagatgtttatgaacaaataatcaactgtattaatgatacgatctcattttcagaaaaatacccagacaacaaatggttgctttactctttaagcaatttagttatgctggtaaaagcaaatcatcatcaacttattcaaacaatagttaaatataaagataaaatatcatatattaactcatctgttactgactttgttgatatgttattccctatcgatgaagcagcaccactcactttacgggacattaaagaagatgatgagttaacatcagactccctgattgtattactagaagccgcagcaaaaggaacatatattaaggagaatataaaacagcttattctgaatactgacttaaaacaagatgactacattaaaaacttacctttcaactaccaactcatctcgttgaaagctaagttattattaaatgatagtaatgaaaatattaataaaaaaagaatcaaagtctctttccggcaatggattggttaa

SEQ ID NO: 380875 - DNA, 912 bp, Salmonella enterica; identical to SEQ ID NO: 380221

SEQ ID NO: 380876 - DNA, 378 bp, Salmonella enterica; identical to SEQ ID NO: 380215

SEQ ID NO: 380877 - DNA, 468 bp, Salmonella enterica
gtgcgcctgccgtaccgcgagccgtcgggcctgttcgacggcgcggcagagtcggtctgggatgtgcgaacctggcacaacatagccaccggcaccgtcacgacgcgggattacaactaccggacagccagcacgccgatggatgcggcggtcagcgtacgtaatgatgcggtcaccaccggagagtattaccgttatgccgcgccttaccgtgaggcgggtgatgacagcagcccggagccggaaaccgaatccggggcgttttatgcccggcttcaccatgagcgggagctgaatgatagaactcaagaaccaatatcaaatattagatatgaattgacctctcctacaggttcggtccttaaaggagtttcatgcgagaagggcctcacgagttttataagccattcaaaagaagctgatatcgagttaaccattttaaaacaagattcattatatatagggtag

SEQ ID NO: 380878 - DNA, 471 bp, Salmonella enterica
atgtctggtgcagaatacacaataatgatccgcttatgtaaactcatgcagcatggaaacctcattgccagtatatctcagtcggcactcgcagaagagcttaatatgagcaaatctaacgtgtgtaaatgctggaataagctaataaataaaggcattctggtcaaagaagggaagcataccatgataaacgcaaatctctttctgaaaggccagtacagaacattaaatgccacaaggaaagaatatgttaagaagtcgctgagaacgaccagtgaaggtatagaagacgtattcgtcaccgtttataaagatacggtacttacaaacagcgcagaaaaaacaatcgataaagaagatgataaacctttactttctactcccgaagaagatattgactgggactctgtttcagaagataacattttttatgattatcctgaagatgttgatcaagaagaaagaatatag

SEQ ID NO: 380879 - DNA, 1014 bp, Salmonella enterica
atgagcagaaaatattttgaagaagaaatcattcaacagactttagattataactatacacaacatagtgatgctaataaactcaatatagcttatgggattgataaaaactttctttttggctgtggtgtctctattgcatctatactccttgctaatccagcgaaggcgttagctttccatgtttttaccgattcctttggccctgaagatcggcagcgatttgatgcattagcaaaacagtacgctacgcagatcattgtctatttaatagattgtgagcgattaaaatcgctacccagtacaaaaaactggacctatgcaacatactttagattcattattgccgactatttttcagataaagcagataaagtgctttatctggatgcagatatcgcatgtaaaggaagtattcagaaacttattgatcttaatttcgctgaaaatgagattgcagcagtcgtggctgaaggcgagttggaatggtggactaagcgctcggttagtctggcaacgccaggcttggtttctggctattttaatgccggctttatattaattaatatacctctttggacggcagaaaatatttctaagaaagcgattgaaatgctaaaagatccggaggtagtacaacgcataacgcaccttgatcaggatgtattaaatatattactagttaataaagctcgttttgtcgataaaaattttaatacgcaatttagtcttaactatgaattaaaagattcagttattaatccagttaatgctgatactgtatttgttcattatatcgggccaacgaaaccctggcatagctggggagcctatcctgtgtcacaatattttttacaggctaagcttaattctccatggtctgattatgcacttttaaatccagtcactagccatcaattacgctatgcggcgaagcatatgtttaatcagaagcgttatacttctggtatagcttattatatagcttactttaaacgtaaacttcttgaataa

SEQ ID NO: 380880 - DNA, 981 bp, Salmonella enterica
atgaactgcgaaatgtttttcttttgtcgtaatgacaaaatggataaagcatggctggaaaatattaaatacacacaatcattttcaaatataaagttaagatttcttcggcggacaaagcatatttataattttagccagtggttgaaagaagcgtccccggatattgtgatatgtattgatgtgatctcatgtctttatgctaataaagcccgaaaaaaaagtggtaggtattttactattttctcgtggccgcatttctcgctcgaacataaaaaacatgcggaatgtataacgtacgcggattatcacctggccatcagtagcggtattaaagaacagatgatcgcgcgtggtatctcagcacaagatgttagcgttgtttataatcctgtctccatgaaaacaatcattgtgccaccgcctgaacgagataaacccgctgtatttctctatgtagggcgtcttaaatttgaaggacagaaaagagttaaagatttatttgatggtttagctcgtacgacaggggaatggcagctacatattattggtgatggctcagattatgaaagatgtcaggcttatagccgggagcttggtattgagcagcgtgttatctggtatggttggcaaagcgcgccatgggtcgttgtacaacaaaaagtaaaaaatgtcaccgcgctgctacttacctctgcatttgaggggtttcctatgaccctgctggaagcaatgtcatatggaattccgtgtattagttctgattgtatgtctggtccacgcgatatgattaaaccaggtataaatggtgaactttacgctccgggcgctatagatgattttgtaggacatctgaatcaagttatttccggtgaagtacaatatcagcatgctatcattccgggtacgattgagaggttttacgatatgttatattttaaaaattttaaaaatgcgctattctcgaaattacaaaagtga

SEQ ID NO: 380881 - DNA, 951 bp, Salmonella enterica
atgcttaataaggatattgcagtcggcgttctgaacacacaggcactcgcgagagccaaaattaacgctgagaactttaagaaagggattgataaaaagcttaaatacggcgagtcgaaatgtgccagttatgttaaaaaagcattgattgctggcggggcatctgtaaaaaattctgcgattgagtcagctaaaaactatggtccatggctgattgaaaacaactttaaagttgtagataacgccacaacagttagtagtggcggtgtattcacaatttctggtcagcaagcgggtgatgtagttgtcattcaggcggcaccacatcatgtgcatggtcatatggcgatgtttaatggtactcattgggtatctgatttcgttcaggaaaaaggtttttatcctgctcagatatatcgtgaccaaaacattccctataaactttatcggtatggcaataataacaagtcaggtcagaatgaatcggccacccaaaaaggaaaaatcaaaatagtctggccgatcccctcaaatagccggggaatcgagttcagcaatcaggaaagcatcctctctcatttagcaggcgagtctaccgggcagtacacgattggccgcagcgggatgtggcatggcgggatccatatcaccgaagcgacaaccccgtggtgtgcgctgagtggtaaatctcctcttgaagcgatagatttccctgttccctttaaaggtgagcaggcggtgcgatgcatggctgacggggaagtggttgcctatcgtgtctgcagggattatctgacgattgcatgggaatccggtccgctgaacttttccggctcgtttgttctggtgaaacactatattcaaccgggtgaaaaggaaagcagcgggctgcatttctataccctgtatatgcatcttgatcctacccgcgtaatgtggacacggcgctaa

SEQ ID NO: 380882 - DNA, 309 bp, Salmonella enterica; identical to SEQ ID NO: 380256

SEQ ID NO: 380883 - DNA, 474 bp, Salmonella enterica
atgataaataataaaataatgaatccggcagggcagtgtgaatcattaatgactcctgtaagcaatttcatgaatgaaaaagggttcgataatattcgttatcgaggtatatttatctgggataaaccaacagaggaaatgccaacaaatcattttgcagtggttggaaataaagaaggaaaagactatgtgtttgatgttacagcccatcagtttgaaaatagaggtatgagtaatctgactggcccattaattctttcagcagatgaatgggtgtgtaaatatagaatggcaacaagaaggaaacttatttattatactgattttagtaattcaagtatagcagctaatgaatatgatgcattaccacgagaattagagtcagaatctatggcagggaaagtttttgttacatcaccgagatggtttaatacctttaaaaagcaaaaatattccttaataggtaaaaggtaa

SEQ ID NO: 380884 - DNA, 402 bp, Salmonella enterica
atgcttggatttgtttctgcattatcttccgctgtggcagtaatgatattattactgtctgtattattagctaatttgctatctgtagctataacgaaagacaataagcttgattcggcaaatctagcctatgaagctgataataaagatcagattgacgcggccatgggtaaaggattttctttgtcagtcaaggatctcttaccgttacgttcatcggatgttgcagtcagactatattgtacatatggtaataatttaagtctcgaggtggccaaaaaatacaccacttataattatatcgttgccaaatcagccttaggagataaaaaaattattgtagagcaaccgatatatgaaaataaaaagaatacttgtattgtagaagaagtaaaaaaatga

SEQ ID NO: 380885 - DNA, 501 bp, Salmonella enterica
atggccctgaatgacagtaaaatccgctctgcaaaaactctcgataaatcttacaagctcatcgactcgcaaggtctgtacctggcggtatccaccagcggcgcaaagctgtggtatttccgctatcgcttcgatggcaaagaaaaccgtcttgcctttggcgcttacccgctggtgacgctggcggaagcccgtgaaaagcgcgatgcggcgcgtaaactactggcatccggtatctgcccctctcagcttcgcaaaacggataacgacgccgttgatggatcccgcacgtttaagtttatcgccaccgcatggcacaccagttgccttaagctctggtcggaaggtcacgccgataaaatcctcacctgcctgaagcgctatgtctttcccgatatcggcgcgatggacattgcgaagatcgaaacccgccatctggcgcagcttgttaaggctattgacgataagggcgtgcatgacgttgccgggcgggagcgttag

SEQ ID NO: 380886 - DNA, 276 bp, Salmonella enterica; identical to SEQ ID NO: 380248

SEQ ID NO: 380887 - DNA, 873 bp, Salmonella enterica
gtgctccgcgccagcctgatttgcgacggacgttcgatacccttgctgaggtggatagttccttcggagaaacagcaaaatgcaaaggtacagcaggcctttcttaatactcttgccgaagcggtaaacccagaagcaagagtgatcatcgtcactgatgcagggttccagaatgcctggttccggcacatagaatcactcggatgggattttatcgggcgcataaggggaaatatccagatgcggcttaaggccaaaggcgaatactggttcagacgtcaggaattgcaggccagtagcaaaccggaatatctggggcctgggatgcttgcccgctcagaatatgcgcggtgcgatggtcatttttatttgcataaaaaagagccgaaaggccggaaaaataaacgctcccgttgcggtatagccagaccatcacagccaaaagatgccatcccggcggcaaaagaaccgtggttaatattcagtagcactgatgactttaagccgcgagtgatcatgaagttatacagccgccgaatgcagattgagcagcacttcagggatgagaaaagtgagcgctttgggttcggtctgcgggccagttacagccgttcggcaggaagagtgctggcgctgagactgctggcaacgctgagcacaatagtcctgtggcttgtaggttatcacgctaaaaataaaggattacatttaaggtatcaggccaacagcgtcaggatatggcgggttatcacgtatttgacgttagcggagaatgtcttacgacagtccccgctaattttaaaacgaacggtgctgcgcaccgttctgaatcacctcgccagaacctaccagaatatggtgttggtttattag

SEQ ID NO: 380888 - DNA, 456 bp, Salmonella enterica
atgggcctgcgctcgcaggaggcggtacagagcgcgcagtcattaagaacgtggaaacaggcgctggagcggggggagcgccggctaaccgtggtgttcggcaccaaaggcggtcgcccgcgtgaaacagttgttcttgatgctggcgcaatcagaaaagcgctggataatgcgctggcggtgacagaagatcgtcacggcaggctgatcgataaacccgacctgaaaagcgcgatgaaatactggcacagtcaggcatcacgtatcgggctgactggcgcatactccccgcattcattacgttatgcgtgggcgcaggatgccatttgtcactatctggcgcagggattcagtgagcgggaagcgctggcgctgacggcgatggatttaggccacggcgacgggcgcggccgatacgtggcgcaggtttacgggcagggatatgggacagattga

SEQ ID NO: 380889 - DNA, 324 bp, Salmonella enterica
atgaaaaaaagaaatttcagcgcggaattcaaacgtgaatccgctcaactggttgttgaccagaactacacggtggcagatgccgccaaagctatggatgccggcctttccacaatgacaagatgggtcaaacaactgcgtgatgagcgtcagggcaaaacaccaaaagcctctccgatgacaccagaacaaatcgaaatacgcgagcagaagaaaaagctacaacgcaatgaaatggaaaacgaaatattaaaaaactgtccatgggggaaaccccgtcctgagtctcagaaactccccggaaaagttggcaggctaatttag

SEQ ID NO: 380890 - DNA, 141 bp, Salmonella enterica
gtgcgggcggcttatgtgcataaggccgaacatctggaagcccgcatggagatgatgcagtggtggtcggattatctggacgtgagccgtgaagggtacgttgcgccgtatatttatgcgcggcggcataaagcggcctga

SEQ ID NO: 380891 - DNA, 156 bp, Salmonella enterica
atgttgaagaagactccgttttttaaaaagtcagtatactgggctgaaatcctgccattcctgattttcaactggttaataattatcgtacaggttatctgtattgtggtgtttctggttggcacgtttgaagttgtgctcaataatatcggataa

SEQ ID NO: 380892 - DNA, 378 bp, Salmonella enterica
atgattattgtcggtaaaggtgctttatacactgagggaaaatctgataagggcggtggtattactgcgataaaaacagacggcatcaccattaccggcgatggcaatacaaccccgttagcgctggggccgggggtaattgatggtgtgggtgggtatgttatggcttactgcccaggaaatggtcaaggacatgatgcttatgggcaaactctatctggttcgtctttagtgccgacatcttatgcgactgtcggataccagggacgtacttatgttacagccagttatacccgtagtttaccgggaacctggagactgtgttgtgaggccattactacattaggttctgttggtctgtatcaacgtattgcatag

SEQ ID NO: 380893 - DNA, 513 bp, Salmonella enterica
atggcaattgggtcaggctgggttggttctcaggccgtggcagaaacagggcaacggtggatgtcagccgcgggggcggcagtgaaagtttccacgccgttctggatgagcgcacttgttggaaagtcggtagtgggcgttgcgtcgtacgccaatcccgcaggccggggatatgatacaagatattccgcattccttgattcgtattatgtagatatcaccctgacagcgccattctccggcacgatagcaactaataatccgtctcttgtggtatccacttctgatgcgctctttaatgatggcacgacggcgggagtgacctggggggcaagcatcacagcaaccagcaggcaaaggttcttcatcggattgaggtttaatgtaagctggaatgattcaatcgtggatatgccaaatacccgatggcagctattactgaacggcagcgttgtagccacatatacatcaaacttctcggcgtatagccagtttgacacaaccgactggtaa

SEQ ID NO: 380894 - DNA, 2355 bp, Salmonella enterica
atgccagtaatttcaggcgtcttaaaagatggcgcggggcttcccattgccggttgcaccatccagctaaaggcagtgaacaccaccagtgcggtaatcatgaccaccacggcgagggttggcgtaacggcgggcacgtaccgtattgatgcactgcctgcccggtatgaagtcacgctggcggtagaagacttccggccgcaaaaagtaggcatcatcgatgtttacactgattccccggatggttcgctgaatgattttctgacggcaacaaaggtggagtacctgacgccggatgtgatgaaccagtttaacctgctggcgcagcattccagggaagcggcagacgcggcagcagcagcttctcagggcgcatccacgataaaggatgccgccgaaaaagccgccagtaatgccgccttgtcagaaaaaagtgcgggagcttcggcgctggcagccagggtaagcgaaacagcagcggctggttcatcatcaggagccgcgtcttcagcagcgggagccgctgcctcagtcgcctcagcgaaatctgacgccgcaagcgccgctgcgagtaagctgaatgctgccacctccgcagcggtggcagtcacatccgcaacaaccgcgcagacagcggcagacgccgccagcgccagtaaagatgtagcagccaaatcagcgtcagatgcgaacgcagtcgcaaccgccgccaaagcatcagaaacagcggcaatggccagcgagaacagggcagtactggcggaaacccgcgcgggtacatctgccagctcagcatcaacatctgcatcgcaggcggcagcatcggcagcagcagcgctcgccagtcagaacgcggcaaaatcatctgaaacgaacacttcaacaagcgcgaatgctgcaaagatttcagaaacaaacgctgcaaccagtgcttcaggcgctcttgccagtcagaatgccacaaaactgagtgaaaccgcagcgtcgctttcagcaacaacagcgggaaatcatgaagcgacagcgttttcaaatgccaacgcagcacgccgaagtggagaagcggccaattatgccgcaacagttgccacaacagcaaaagatgcagcgatcgctcaggtaacgggttttgatacgcatgtaagccagcaaataacggttatcacacagacagcaaccacagccaccacaaaagctaacgcggatattacggcggcaactgatatcaaccgcaacaacgcaatccaggcgattaatcagaagcagacagaagcgaccagcgccattcagggaagcgtgaatgcggcagccacttccgcatcaggggcaaacgcatcagcaaccgccgccaaagcatcagaaacagcggcaatggccagcgagaacagggcagtgctggcggaaacccgcgcgggtacatctgccagctcagcatcaacatctgcatcgcaggcggcagcatcggcagcggcagcgctcaccagtcagaacgcggctaagttgtctgaaacaaacgcgggcacttctgcgacctcagcacaggccgcattgcgtgccgccgaactgatagccaaaacgccggggccagcaggaccgcagggattgcagggaccagtaggaccggcaggtccacgtgggttgtcggggcctgtaggtaaatcagcctacgaaatctgggcaagcgaagaacggagtgctggacgagcaggcacaatgtctgattacctgaacttcatgaggggtaaaaatggaacaccgggaccagtggggccgcagggtataactggcgcacaaggaccacagggattaatcggccccgctggtccgcagggggtaagaggattaacaggcgctcagggacctaagggtgatactggactgccgggaccgacaggccccaaaggtgatacaggtccggcaggcccgcaggggattcagggtgttccgggtccagttggtccgatggggccgcgtggtcttactggtcccgcaggcccgacaggttcattcagtgggacggtctatggtgatttgacagtaacgggtaacacttatgtcaacgacacctatattcgttctgaccgccgcagtaaatgtaacttccgcgcaatggataatgccctggacaaggtggataaactgcatggtcagttgtatgacgttctgagcggagggcggcttgtacgttccggtggtcttatcgctcaggatgttcaggccgttctgcctgacctggttacggcagatgaagatggcggacttttgcgcctgaattataacggcgtgaccgggttgctggttgaggccgtgaaggaattacgggcagaactgcgacagttaaaaggagcggcataa

SEQ ID NO: 380895 - DNA, 549 bp, Salmonella enterica
atgtggtcagaacgccgcagggcgaacggtattttccgtgtgaaaatctgtctgctgaacccacaatgtattttcgcatttcaccggaagattacctgctggcctgcgcggcgggtgaggtggtggcgctggtacacagtcatccgggcggtaaatcattcctcagtagcggcgaccgcacactacagctacagacggcgcttgcgtggtggctggtctgcgatgagcaggtttataaattccgcagcgtgccgcaccttacaggccgacagtttgagcatggtgtatacgactgttacacgctgttccgtgacgcttaccatctggcgggaattgagttacctgattttcaccgtgaagaagactggtgggataaaggtgaaaacctctatctggataaccttgaggcaaacggtttttatcaggttcgcgcagataaagcacagccaggcgacgtgcttatctgttgctttggcacatcgaccgccaatcacgcggcgatttactgtggcaatggtgagctattgcaccacgtacccgagcaactga

SEQ ID NO: 380896 - DNA, 330 bp, Salmonella enterica
atgagaacatttgcatgggttcctcgcccgggaatggggataaaaacaaaaccatccgtcagggtggttaagtttggggatggttatgaacagcgcagccagggagggcttaacagtcagttacggtctttcacaccgacattcagggtaattaatgatgaattaccttatctgctggatttttttaatgaacatggggcgtataaagcctttttatggcgtccgccagcggtgaaccggacaatcaacgtggtgtgccgggagtgggatgtaaaagcgcagaacctttatgcggatgtatcatgtcagtttgatgaggtggtggtttga

SEQ ID NO: 380897 - DNA, 2481 bp, Salmonella enterica
atggccgttttacgttccctgaccacaacgcttggtctgaatgctgcatcttttcgttctgaactgaaacgttctcagcattccatgaaagagttcagctcttcagcgaaagatgttggcgtggcgctggcgaagggatttggaaagatatccggcgtcaccgcgctgattggcggactcggggcggtgatgggcagtgtgtctgcggtgggcctggtatctgaaatcaggaaaacctaccgcgccctggatgatgttatcggtactgccaataatctcggcgtgatcccgcgtcgttttgacgaaatgcggcgtgcagcgcagtggtcgggcgtgagcatgaacgacctgtctgactcgatgcgggatctgaacacgcagataacccgcgtggcgcagtccggaaaaggtccgatggcggattttttcaccaaaattaaccagaaagcctcggactgggcaaagctggcgccggatcagcagcttaataaattcgcggaggagctacacaaactgccggataaccaggtgctttactggctgaaccgggtaaacggcagtctggcgaagatgaaagacccgctgatgacgggagaactagcgaaatcgcgggaggagattgaaaagctggggctggcgctgagtggtggtcagttcgacaatattcacaaggcccgcgttgagtttgaaaaaatggagtcgctggcgtccggcgtgtgggaacacgttcaggcggccgcggccccggcaatatctatggttctggaaggtatcagcgactggataacagaaaccgcgagtgctcgcggcgggttcaggaaaatggggcgtgatatcgcggtctttatcgttgaaggcgtgaagatagcggctcaggccatagaaaacctgatcaacgccacttactttcagacgaacaaacttgccggttcatttggcgtcgttcttgacaagaattaccaggcaaggcttgaagaaacggatcggtacaaagaaaaactcagtgaaaaatttgctgagattaacgcgcttcgtaaaaagttctccacaaccgaggtcattaacgggataccaacagggcgggaatttttctccggtacgcagaaggataaagagcaccttcaggcgctcaacaaggaagccgaagaacttgccggacacctaagaagcctgcaacaggcgaccgaaaagcccgtcagtttcgcgccatttatgcacggccttgatgttgccgtcgataaaataaaatcgcaggcagacgagaaagaaccggaagacagcccacagggtaatcgtggtgcaccgcctattattgatgtccgcaaaatgaagggcgcggtcggtgagttttctcgattgcgacagcagatcgaacaggacaacgccgacagtctgcagcgtcttgtgcttcaggagcagaaagcgcggcaaaaaatcattacttccgggcgtgaggcgaggaaatcacagtctgagattgataaagtcgtggcagaaaatgcggaactgtatgcccgcaagcgtcaggaactggctgaacagtatgcgccagctaaacagttgcagcggcaatacgctgatgtttccaccttgctgggtgagtttcgtcagaatgacctgcttaatgagcaggaataccaggaagcgcttggaaaactcagggctgattccttccaggaaatggcggaattatacgctgatggtcaaatctccccggataacaaggcactgggtaatgttgatccactggtcgccatagaaaatcagtatgagcgtgaacttgctcttcttgattattacaaccagaaaaaacttctttctgatgaccgttaccagcagttacgcgctgaaaaaatccaggcgagatcggaggctgtaagccagtaccagaaccgggatgccagaaagcagttgcagacgcagcaacagctatttgagggtatggccggactggtgcaggggtttgcgggaaaaagttctggtgcttaccgcgcattgttcagtatctccaaagcgttccatctggctgatgtgatcatggcttcgcaaagtgcgatagcagacgcatggtcgtctgcacctttcccggcaaaccttgctgctgttgccaccacaacagcaaaaacaggcttgcttgctgccgtggtgcagtcggtgacgatgcagggtatggcgcatgatggcattgatcacgttccgcgtgaaggtacatggttgctggataaaggggagcgtgttgttgaccgacgaaccaacgctgacctgaaagcgtatctggcgaaaaagcaggaaggcagccgggtaaataacgtggtggtcaacagtaactccagcctgaccgttaataataacgggcaggacggtgatgataaggcaatggattattccgcgatggtaaataccctgggagagagtatcaagtcaatgataagggaagagattatgggaatgatgcgtgatggtggcgtgctgagcaggtga

SEQ ID NO: 380898 - DNA, 357 bp, Salmonella enterica
atgtctgcactgaaaaaattaaccgccattacgcttccacaggaaatcgttgccgttcccgaactgggcgaggatgctgaaattattatccgccagatgtccgttggcgacatgctggagtttgagtcgctgtgctttgatgatcagggtaaatcagccatgtcctttaacgagtttatgatgaccctgcttatctgcacgatggtggacgaagacggcaacccgatcgcctcaatggatgaacgggatgttctgatggacagcctgtcgggaacggtcgccatgcgtctgttcaaggccgcttcacgtctgaatggcctgacggcgggtggtactgacgacataaaaaaatcctga

SEQ ID NO: 380899 - DNA, 729 bp, Salmonella enterica
atgactaaaaaaaatgatgccacgctgggagccggaacccgcacgttctggagagcgaaaggcgagacagcatggaaaaaagtgccgggcatgaccgctattggtcaggtggggaacaccgcgccgacagtggagcagaccacgcttgaagaccgcgcgcagcgttatatggcggggctttatgaaggtcctgataaagagcttaaaggccgctattacggcagcgccagccccgaacaggcggcgtttgttcgggcggcgctggcgtgtatggtggttgaaatgtgccatatctggccgacaataccggcgacggtggcggtctatgaggtggcgctgctgggctttaagctggatgaaacgcagggggccagctccgttgatttcattgtcagcggcaagcagaacggcctggtggactgggatcatcccgcgcccgattatgaccaggatattgcgctgttgttgtctgcggatgtttccagcctgaaaggcgataacaaagcgaccgccattctgacggccacgttgaaagaagacggcttcccgctgccgggtgtgccgctgacgctgaccaccacggcgggcacgcttaaccagtctgaggcgacaacaaacgcgctgggccaggttgccgccacgctgaaaaataatgctgcaggtgccgtgaccgtgacagccacttatggcgctgtacagaaaacccttaacataaccttcaccgcgtga

SEQ ID NO: 380900 - DNA, 366 bp, Salmonella enterica
atgcctgaaaaattcaaagcactgtgtgaactggtggcggatgtgccagcttatcccggcagactgccggaaaccgcagaattaccggctgtcagtttctttatggttagtcgggtgacaacccgctgtctggaagatgttgtggacagcgtaacggaaaactggcaggtgcgtgtgtctgcggcaaggcagatggaagcccgcgagatagcgaagtgcttttaccgtctcgatggcagaaagaccgccatttaccagcggatcgtgattgatagcgattcagatgaacccgcagcggaaggtgctcaggtacgttctgtactgcttaatatttcagcaacactcaggagtgtaagtgatgactaa

SEQ ID NO: 380901 - DNA, 531 bp, Salmonella enterica
atgagcgataaggcgtggtttgaaattgacgggctgcaggcgcttgatgaacaactgggcgaactgtccggtgtcgttcaggcgaaaatcctgcggaaagtggtccgcgaggcgatgcagccggtactttcggcaacgatcagaaactacacgtcagagtggcacagtgtcacaggacagcttgaaaactcctttggtcttcgcgtacgtatcccgaaaaacaacacctgggctgatgttatcgcttcggtgggggtatttacgaacaaaaggctgaaagagcagaccggcagccggatggatgcgccggttgttgcctggtggcttgagcatggtgttgaacctcatgctactggcaacggggcaaaacgggcacgggacaaacaccaggaccgcggtatacagcatccggggatagcggcaaaaccgttcatccgtccggcttttgacagcaaccttgagcagatcatggcttcccagaaagaggcgcttggccggcttattgataaggcactggaaaaacatgcctga

SEQ ID NO: 380902 - DNA, 330 bp, Salmonella enterica
atgcaggtcggaaaactgcgtgaccggatacgtcttctggcgttaaccggggatcgtgatgctgccggagagccgctggataccgtgaacgaggtcgccacagtgtacgccgatgttcgtgtggtatccggccgggaaatggtacgttccggcgtggatatcaatcagcaaattttcactatccggatacgcgccagaaaggtattaccgcagtggcggattgaggttctgtccggtccaaatcgtggcgtcatgctcagtatcagcagcgtacagcccgatccggcgcgtaaagacaccatcatcacggcggcaacctatgagcgataa

SEQ ID NO: 380903 - DNA, 336 bp, Salmonella enterica
atgtcggtaacgactactgatttagcgatgcatcatctgcgggtggacgctgattcccctgaatggccgcttattcaggggtatatcgatgctgcggaagatattgccgcacagtacctcaacaggaagttttacgccgacagtgacgcactcaccgccgccgttaatgacggcagcgccggagaaaaccccatcgttatcacgccagcgatacaggtcgcggttctgctgatcctgaccagcctctacgagaacaggggggatgcaccatctgagggcgttccggcagcggcggcgcgtttccttgatccgtggcgtacagggatggggatgtga

SEQ ID NO: 380904 - DNA, 408 bp, Salmonella enterica
atggcacgcggaacaaaaaagacggatgccggtgaagtcaccaacgaacccggcgttacattgccggaaaataccgccagttctgatactggtgcagatgttgtattaccggaaaataccgccagttctgatactggtgcagatgttgtattgccggagatgacgggcagcgcggatctgtcaacgacagacacagcagttactgaaaccaggggagcggatgacgttatggtgcagccagtgcgatatttcaccgattcggcgacgggggtgtttcgtacaccgtctgatgaacccttcagtgtaaaccggcgcagggccgcggaattatccgcaggtggactggccagagaggttaagcctcagccggataacaaaatgaggccggacccgcagacgaaagagtga

SEQ ID NO: 380905 - DNA, 1227 bp, Salmonella enterica
atgagctatcagaaaaaatccgcagatgaccagccgcagaggattggcgaggtatccgcaaaactcggcgagatcatgagccaggtgaaaaacttcggtgaagatgtcgcgaaaaaaatgcaggcaggtgaaaccgtcaccgaagagctgaaacggcgcaccgatgagagcctcacgcagatggccgaactgaaggagcgcctcaccgaactggagcagaagtccgcacgccgtcaggacgatttgccgcaggcggttaaaacgctcggccagatggtgatcgagagtgaagcctttaagggcatgagcagctcagatcgaaaaggggtccgggttcagatgtcgcggaaggacctgatgaacgtcacggcgacaactggcacgggggccagctccacaaacagcctggtggtggccgaccgtatacccggcattattgccccgccagaacgcaccctgaccattcgcgatttgctcgctccgggcgagacagattccgccagcatggagtttgttcaggaaacgggttacaccaataacgctgcgccggtgccggaagggactaaaaagtcgcagtcagaaatcacctttgagctgaaaacggcgccggttcgtacaattgcgcataccttcaaggcgtcacgtcagatcctggacgatgcgaaggggcttgcgagctatattgacgcgcgagcgcgttatggcctgcggtttaaagaagaactgcaactgctgagcggggacggaaccggggctaacattctgggtattatcccgcaggcgtccaccttcagcccgaaagtcacgctggcgagcgcgacggcgattgaccgtatgcgcctggctatcctgcaggcggtactggctgaataccctgcatccggttttgtgctgaatccgatcgactgggcggcaattgaactgaccaaagacggggaagggcgttacatcattgcccagcctgttaatggcagcgtggcccgtttgtgggggctgccggtagtggaaacccaggcgatggcgcagaacaacttcctcaccggggcgttcagcatggccgcgcaaatcttcgatcgtatggaaattgaggttctgctttccactgagaacgaagatgactttgtgagaaacatggtcaccatccgcgcggaagagcgtctggcgatggcggtctaccgtcctgaagcttttgttaccgggcaggttaccgccagttctgctggctga

SEQ ID NO: 380906 - DNA, 705 bp, Salmonella enterica
atgtaccggaaaaacgcagccttaaagtttaaggcgttcggcttcgacgtgaaggctgtcagtgatgacggccttttttctggctacggatcggtgtttgacgtggtggattcgtataacgaagtggtagcccccggcgcctttcttgaaagcatcgaagaggtgaaaaagaaaggccgtaccttcccggtattgtggcagcaccgtacgggtgagccggtgggtaactgggacatcgacagcctgaaagaggacgatcacgggttattcggtgacggctgcctgtggctggatgatgcagcctatgcccgtaccgcctggcgggggatgaagagtcgcgccattacggggctttccatcgggtattacgttcgtgagtctaatttcgatgaaaaaacccgcatccgtaccctgacaaaacttgacctggtggaaatttccatcgtgaccgtaccggccaacgatgaggccagaatcgacgttatcaaatcgaagctggcccacggcggcttacctgatatccccgaatttgagcagctcctgcgtgaggcaggcttctcgaaaacccaggcggcggttgtcgcgaaccgtggactggcgcatctgcttctccggagtgagtccgggagcaacgaaagcgacgttaaacaggctgtggcggaaatgatgaccgcgatgagccagccccttttccctgagttataa

SEQ ID NO: 380907 - DNA, 1299 bp, Salmonella enterica
atgaaaagtgcgttgctccggtggctgggtgtacctgtttccctgacgaacggtgaatttatgcaggcgctgatcggcgcggaaacggcatcgggcgtgacggttaacgaggctaaggcgtcgcagctttcggcggtgtgggcctgtgtgaatctgttatcccagacggtggcaacgttgccgctgggcttctttgagcgtaccgctgacgggagaaagacggcgcgtgaccatccgttatatgagctgctgcacaaccagccgaacgccgacatgaccgccgttgagttctgggaatccatgatggccggtctgctgttacgtggtaacgcttttgcggagattgaccgtaccggaaaacgtataaccgcactgataccactgatccccgagagggtgaaaattctgcgggataacgctggcggatatgtctacgcctacagtgatccgtgtccgggcggtgcaacccgaaccatccgggagcaggacatgctgcacatccgctcgcgtatcgcgaacggtatgacgggcgtttccccgctggtgatggggcgtgaaacattcgggctggcgattgccgccaataacgccagtgctgcggtgtttaaacatggcatgcgacccagcggcgtgctgaagacggataagatactgaccacggagcagcgtaaaaacttccaggaaaattacgttaaggaattctccggcgcgatgaatgccggcagggtgcctttactggaggcggggctggatttcaataaaacctcaatgagcctggaagatgcgcagatgcttgatacgcggcggttcagcgtggaggagatttgccgctggtttggtgtgtatccggtcatgataggccatgccgcgcaggggcagacgatgtggggcagcggcgttgagcaactgatgatcatgttcctgacgctgtcattgcgcccctggctgacgcgaatagagcaggcgatacggcgcagcctgctggcgccgggagagagaaaccgctatttcgctgagtttaccgttgaagggctcctgcgggccgacagtgccgcgcgggcagcattctattccaccatgacgcagaacggcgtgatgacccgcaatgaagcgcggcacaaagagaacctgcccccgcagccgggcggtgatcagcttaccgttcagtcgaatctgctgccgcttgatcagcttggtaaaaacagcgacaccgaatcggccaaaaacgcgctgcgtgactggctggatattgataaacaaaaggagggtccggcatgtaccggaaaaacgcagccttaa

SEQ ID NO: 380908 - DNA, 1740 bp, Salmonella enterica
atgacggaaacaaagaagaagacccgctcagccagttcttcggttgatcaggccacgcaatacgctatggatgtgacttccggtaaagaaattgccgggcctgatattcgtaacgcctgtaagcgccacctgaatgaccttgattcatgtcatgcgcgtggtctgtcgtgggatgttgctgcggcgcagcgtgcgattgattttttcgcgaaggtactgaaactcaacggcggggattttgaaagtaaacccttcgtcctgttgccgtggcagtgctttgtaattggctcaattttcggctggaagaacgcggaagggtatcgccggttccgtacggtgtatgtggagtcaggtaaaggttccggtaagtcaccgctggcgggcggcgtgggcctttactgcctgacggctgacggggaagcgcgtgcggaagtctacgcggccgccacgaaaaaagaccaggccatgatcctgttccgtgatgctgtggcgatggtggatcagtctccggcgctggcgaagcgcctcagtaaatcaggtggcgcaggtaaagagtggaatctggcatttttgcagacggggtcatttttccgacccatcagttcagatgacgggcagtcagggccgaggccgcactgtgcgctgatagacgaagttcacgagcacaagagcaatattgtggtcgaaatgatccgcgccggtacgaaaggcaggcgccaggcgctgattttcatgatcaccaacagcggccacgacaaaaccagcgtctgttatgactatcacgaatacggccgtaaggttgctgaaggttcagttgaggatgacagtttcttctcctttatttgttcgctggacgaaggggaagatccctttaaggacgaagcctgctggaaaaaggccaacccgtcgctggggcacacctttactgagcgctatctgcgtgagcaggtcacgcaggcaagggggataccctcaaaagagagcatggtgcgccgccttaacttctgccagtgggtggatgctgataatccgtggattggcagtgacgtctggatggggcatgagagtgactttgatccggaagaactgcagggggaggaatgttacggcgggctggacctgtcgggaacccgcgaccttacctcgctggcactgtattttccgaaacagaaaaaactgctggtggagttctggacgccaaaagacaccctggcgaaaagagcgaaaacggaccgtgtgccctatgatgcctgggaaaaaggcggacatatccacaccacgccgggtaaggcggtgaaatatggctttgtcgccgtgcgcattgctgagcttacgatgcagtttgacattaaagcgatcgcctttgaccagtaccgcatcaaatacctggagcctgaactggaagaggcgtctgtttcagtgccgctaattcctcacgggcaggggtactacaaggcgaaagactcggggttgtggatgcctcactcgattgagcttttcgaggggctgatagacgatgacgacttcaccattaaaaccaatccgtgtctgcggtggaatgcggcttctgctgttaccgaagccgatcagaaagaaaaccgcatatttgcgaaaaagaagagtaccggacgtattgacggtctggtgtcttcagcaatggcgattggcgccgccgaagattacgagccggaagatgaaggcgatatcagcgacttctttaataaccctgtctttatgtga

SEQ ID NO: 380909 - DNA, 465 bp, Salmonella enterica
atggcaggaagacgcccgaaaccaacccggctaaaagtggtcgccggtaatccgggcaagcgaaaaataagcgacaaagaaccgacccccgcacacgaaatcccttcaccgccttcacatcttaccgactggggaaaggtcgcctggggaaaactgaccgtgctgcttgatggcatgggagtgatgacgatagcggacgggctggcgctcgagcgtctttgcgatatctatgctgacatccttcagttgcgtgacacgatcgcaatggaaggcagaacctacaccgtgcagacggacggtggctttctgataaaacctcatccggctgttgccatgcttgccgatgccgatcgccggtttaaaagctacctcgttgagttcgggctgactccggccgcaagaacaaaggtgaatacacatgacggaaacaaagaagaagacccgctcagccagttcttcggttga

SEQ ID NO: 380910 - DNA, 363 bp, Salmonella enterica
atgaagaaagaaccccgcatctacggcagcaaatgggacagggcccggctggtattcctgcgtgaacatccgctgtgtgtgatgtgccaggagcagggacgggttgtactggcgacggtcgttgaccacatcaaaccacacaggctgaaagaggccctgttgtcggagaagcctgttgcgatagcgcaggcgcaaaagcttttctgggacagaaagaactggcaggggctgtgtaagccgcatcacgactcaaccaaacaacgcatggaaaaaagcgggagaattgttggctgtaatgctgatggcattccgcttgatcctggctcccactggcacaagggggaggggcgggggaaaacttaa

SEQ ID NO: 380911 - DNA, 339 bp, Salmonella enterica
atgatggggataacaatcaccggcgatcggatgactatctgtgatagcgaaggccggccgaggttagttactggttgcctggataatacagcgacagtggacagggagccgccagtgccattaacagccgaagaagaaatctacgggcgcgggctttattcgttacccgagggctgggaggatttatccggtgatgagcgatggctttactacctgagtgacgaactgcgtaacatgtggctgcagtttaaccgcgagcaaaagatggcgatagcttactcagtgaatgagatggttgaagatatgttcgatctggaatgttcgttgcgtgagaggtga

SEQ ID NO: 380912 - DNA, 333 bp, Salmonella enterica
atgggtacaccagttaagcttgcaagaacagcgccagactttgtctttgagcttgatcagcttgtcgatatctgcatcagtgacgaatggggacaagtgaaagcccgcgctcagtatgccagcggcgagaaccagtacctgtccactatcaggcggcggataagtgtgcacgcagcgcatggttcggggagtcagaacttgatgctgcatgcgatgatcgttatcccggatgcccggtatttgctgctgttgaactgccggaaggggcaaaggcagaggactacccgcaatgatggggataacaatcaccggcgatcggatgactatctgtga

SEQ ID NO: 380913 - DNA, 477 bp, Salmonella enterica
gtgggggcagaaatgaaccgcataagcacgggcgtaatagcctcattgttgattgtggtcgcggcgctggcctggacaacggatcattaccacagtaacgcggtacgattccggcagcagcgggacaccgttactcataagctggcgctggcgaacgcgacaattaccgacatgacgaagcgccagcgtgacgttgccgccctcgatgcaaaatacacgaaggaattagctgatgcacagaccaggaatactgatttgcagcgccaccttgctgctggtggccgggtgcgcgtcgaagggcgatgtccagtgcccacccagaccgaaaccgccagcaccagccgcgtgggcgatgctgccaccatcgaactctctcctgttgctggacgaaacgttctcggtatcagagccggaattatcaacgaccaggaagcgctgaggtatttgcaggactatatcagaacgcagtgcagataa

SEQ ID NO: 380914 - DNA, 483 bp, Salmonella enterica
atgcggacaaaaattaaaagccttatagctggtggcgcgggcgcaatagcgatagcggcagcgctgctaggtggtcatgacggtctggaaggcaggcgctacgaaccttatcgtgacgtggtgggcgtcctttccgtatgcgacgggcatacgggaaaagacatcgttccaggcaagtactacaccgatgcggaatgtgatgcgctactgaataaagacctggaccgcgtaaaagcgcaggtcgatccactgattaaggtcagtatccccgaaagtgaaagggcggcgttctactcctttgcatacaacgttggtactggcgcgtttgccaggtcaaccctgctgaaaaaactcaacgctggagaccgcgccggagcctgtaacgagcttaaacgctggacgtatgcaggcggtaaggagtggaaagggctggtaacgcgtcgcgagattgagcgcgaggtgtgtacgtgggggcagaaatga

SEQ ID NO: 380915 - DNA, 294 bp, Salmonella enterica
atgacggagaagcatataacatcgtggcttgcctatatgtgggcggtgatatgcggcgttcttgcccaatggacagtacacgactacggggcgctgattggcattattctcggtatcggtacgttctgggttaaccggcattacaaaaagaagtcagaacggacgcaggcaaggcaggcggcagcactggaaaagcgcaaccagatactggaacagatagtccgaaagccggacagcgcggccacggcactaatagttgagtctgagaggctggatgatgcggacaaaaattaa

SEQ ID NO: 380916 - DNA, 243 bp, Salmonella enterica
atgtacaaggtcaaagtcacatacatattgccggaagcggatcaggtgcgtgtcgcggtatgcgcagtgaaagaagacggcagccagattttccagatggagatccagtcgccgaacgaaaagggtaaatcactggatgcctacgagcaggctgcaattgcgcaatataccgctattgtttgtgatattgcggcatctgcacaaccagcaccggatgtaaccgaagccggcgccaaaaagtaa

SEQ ID NO: 380917 - DNA, 252 bp, Salmonella enterica
atgagtgatgaaaataaaatcccgatcttccctgtaacaggttggaagtcaggaccgcttcaatcaggtgattgtttagttttaaaattcgagtacattacatctcccatgcaaagcctggaatcagcacaatcgactcagtttttcggacttactccccaaattgctgaaagtctcatcgctgatctacagaaaagtattaattcactaaaaagcgacgggaacgccccccgtcaagctgaaaagcactaa

SEQ ID NO: 380918 - DNA, 192 bp, Salmonella enterica
atgagaattcaggctaaagggcaggcgtcaggcttgtcggatgactcaataaagttggattttcctgtaatgatgaaagataaaagcgcccttaaatacaggcgctttacatcggacgaaatatcaaaggtcttcagtgttagtgcttttcagcttgacggggggcgttcccgtcgctttttagtgaattaa

SEQ ID NO: 380919 - DNA, 420 bp, Salmonella enterica
atggaaatgattccgataattggattgtttttggctgctgctggcttattcataccctcattaattagctcccgttcctcacgaagaagagaatttaaagcggcatcagcgccattgttgataaagcttcttgaagaaagaacgatgatatccaaaggctcgtatccattccgaacccttacagaagatgagttatttaaagttttcccgctcgccaccaaaagaaaacaaaagcgactgctggtggcgtttcaccgctatatgaatgctcatgataaagtcgcaaaaaccaggcactatcacagtgagcgcccgtatgacggtgggcccttttttgcatttagctttactgtgtccaatcctgatgaagtgcttaaagagatagacccacttatagatgagcttacgctacgttgttga

SEQ ID NO: 380920 - DNA, 441 bp, Salmonella enterica
atggacagttctggtgtaaaatacaaggctggaggccagttattattgtcggtcattattgcactgtcgatgaccgggtgtgtgaaggctgattcagttgttaaaccggttactcccagtggcaaggttgctgatatgtttgtaacccataaaagcacaacatctcctgcgacgggagaagaaataagaaagtatgctttgcagataaaatatgcgattgaaagtaatttctatgatattgaccagtatacaggtaaacaatgtgttttaagtatccagatggctccggatggggtgattctgagtatcaagtctgacggtggcgatccagctctgtgtcgggccgcgatgaaggcagctaaaaaaactaaattgcccagccccccttcaccagccatttatgacgtattcaaaaaagcagtgctcgactttcagctataa

SEQ ID NO: 380921 - DNA, 342 bp, Salmonella enterica
atgatcaatattttaaacatcgatggccagaaggctgtcatcaccttcgatccggaaatcgaaatgtttcgcggtgaatttatcggtctgaatggtggcgctgatttctacgcttacagcgttgaagagctgaaaaaggaaggcgcggaatcactgcgcatctttctggatgagtgccgtaaagatggcatagacccatacaaatcattcagtggaaaagtcactacccgcctgtcgccagagcgtcaccaggcattaacgatcgccgctcaggcgacgggcatgtctatcaatgaaatgctgaatgaaggtgttgatttagttatccagaaacattcctga

SEQ ID NO: 380922 - DNA, 1116 bp, Salmonella enterica
atgcgggccatactgacagcatttccacaaaacggcgccaggataacactgctgaaatccggaaacctgacaaacagactccgcgatggtcagcgcataatgatctgcgatgttccccggcaacttgagaatgtgctggcaggagaaatacccgatacagggcaatggctgacgcaggatgaggcgttacaaccatttttttctgacagccgggtaattaatgctgctggtggtcaggaggggctgaaaacatgggtcagtagaatacctgattgccagtgcgaaaacggggatcatgtcaggaacctgacgacggcgcagacaaaagagggcgacgccgtgaggctgtgccatgcgtgcgataacgttcactacatgaagggataccgcgatctgagtgaaattatcgccagtaaccgcgcggagtggatagtgggctacgccagaatgagcctcaggctgaatgccgatcaccaactgacgttgccggagttattttgctgggcggtattacgcggcgtggctgaagccatgcccgtgaacgtgatgcgctgttttgcctccctgccggaagatgaggtgctcaccggcactataaaagaagcggatattaacccctggcaactcagcgcccgccagttggtggagaaaaaagccggggagggcatagcagctatgctccctgatattcatacagtgtcaggcgtaaaaaatcttattaaggattcaggtcttaatgagaccgctacgggcagggtaaaaactgttctggtactggtggctgacggcgatccaccggctggatatatgcgaaagccgaaaatgcagcgtctggaactgccggagtacacgcggtgggtaaagcgtcagccctgctgcggttgcggtaagcaggcagacgatccacatcacatcattggtcatggttttagcggaaccggaactaaagcgtgtgatttgctggttataccgttgtgtcgggtgtgtcatgacgcgctgcacgcggataccagagcatgggaagagcagaacggcagtcagttgttgtggctggcgagaacgctggcaagagcgacaggcattggtgcaataaccgcagcgagggcgaaagagtga

SEQ ID NO: 380923 - DNA, 282 bp, Salmonella enterica
atgaaggggatagactttggccggatgacgccggagaagatgggagagctgattgcagcggcaacccgtcagcttgaggtcatgaacgagagtggatgttcaaaagacaccatgaagaaaagcctgttaccggcaatgcagcgcatgaagcaggccaggcatgagttacagatagtggtggatcagatgattgataaaacagcagaccttgaaaagcgcatggaacagatggaaaaggtgctgagcgcgatattcgatcaggatactggtaacgggcagtaa

SEQ ID NO: 380924 - DNA, 615 bp, Salmonella enterica
atggcgatggtcacgcacaaaaaccgcttgcctgtctcattgctggtgggttacattcgccctgcacctcataaagcgggtgccgggaattccaccccgacagcaaccaaagcgcacaaccgcgcgagcggtttttttacgtgcatagcatcgttacacctacgtattatggtggggcgtatagggccgctttcgggcgggccggtttctttggttgccggtagtggaatccctgtacgtctcaccaccccaagcattccacctttgggcggtgagttaactttaccaaccaaaggatcgtcatcatggcaaaccgtaagcacactcgcgctgacgctcagcgcattcatactcagacccaaatcaaccgccgcctgtaccgcgcacagcaactggctaaatgcctgtatttcgaatccatcagcgataacagcattatggtggaattgtgtatatcgtccgttctcagctatctggctgacgatctacgcgacgttcacgacttgtttaacggcaaaaagcgcaacatgtaatacccctgaaaacctgatacaaaagcaacactccgcctgctggtggggtgttcgcctgtctgacattcaggaggcgctatga

SEQ ID NO: 380925 - DNA, 789 bp, Salmonella enterica
atgaaaaacatgattaacagtgaaccatcaatgaccagtaaagagatttcagagctggtgagtaagcgccatgacaatgttaaacgcactattgaaaaactggcgaaggatggagttatccgacatcctcaaattgaggattacgaaagaatcaataacttaggattcttagtgacggataaatgctaccggtttatcggtgagcagggaaggcgcgacagtattgttgtagttgctcagttaagccctgagtttactggactcatggtagaccgctggcaaaaacttgaaagaaaggttgcgttattaagcgcagaagagcgaacgatacaacatcagcataaggttgatgtagttgcactggcctgtgctgtcgctgaaacaacggtgacaacagcgataaaagcagctattgaagctgtgacggtacaacaggaaaaactggcatcacagaggcgtgatagtgatgatttcgttgtatttgattactccagtgctgatagcgatgttgataacagcgccttccagccaatacatgcgctgtctgccaaatcaggccttgcggattctgcatgtcgtcgtctgattgagtttgcgcatgttccagccagaaaaatagggcggtcaggcctgcacgccgatagtgatgccttcgttgccgccgcctgtaagctgattggtgaatcagagacaccaaaagggaagattaagcgctggcagcatcctgaatttggcgggtttatccttcgccgcgcactgtcagtgtccgatcaggaaaagcaggactga

SEQ ID NO: 380926 - DNA, 960 bp, Salmonella enterica
atgaccactaataccaataacaaactaacagacgagaaaatcaaaatacgcattaaggcgattgaggacagacgttctgccagtcgtgatttttgggacggcgattacgaatatcctgaggatatcgagctgttggcgctgcgtgagttgcaggaacgccgcaaggctgaaagcgagccagccggataccacgtcatcaaagagtgtggaaagattggctgtagtgttgcaacgcttgagaaggccgagaaaacgcgagacttctggaataaaaagtggactatcaggccgtatttctactccgccccgccagcgtcagagcgcgaacgtattcgccgcgagcacgccgaatggtctgatgccacgttcggcgatgtcggtccggtcggtccgctgaaacacctctcgaaagaagcgctggaggccgccgccgacccatcagacccgcttgaatgggccgatatgcagtttttattgtgggatgcccagcggagaatgggactctccgacgaattcattacgagggcgatgatagaaaagctggagataaataagtcacgccagtggccggagccgaaagacggtgagccacgactgcatatcaaagagcagccagtgccggtagtgccggaggaaatcacggcggacggaattataggaatgcatgagtgcggatttgtggagggttggaacgcctgtcgcgccgccatgcttcagggaaaattccgcgatttatcacaaccagtagacccgcagattgccgaatatgagcaaatcatgcttcaggctgattgggttatggtgcccgtcgaaccaacggacgaaatgatagcagcggcgatggaatgtgatgatgtggttttcgacagtaaagatccaaccgcattctgtgttcagtatcgggaaatatattgcgcgatggtggatgttgcaccaaaaccggagttaaccagtgaatag

SEQ ID NO: 380927 - DNA, 153 bp, Salmonella enterica
gtgctacggccacaaggtgttctgatcttcaaatggaatgaaacgcagattccggtaggccagattctggcgctgacggacgtaaaaccaattattggccagcgcaccggcaagaacgacaaaacccactggattatttttgtgaagggctaa

SEQ ID NO: 380928 - DNA, 351 bp, Salmonella enterica
gtgagcaacatcgacaaacaggcgcaggaagcaacggaaaagctggttcaggagcgtaatgcactggccgcggagaatgcggagctgaataagtttattgcagagagttgctttgttcgggctggagaagagccagactggcacccagccattaatcactcgccagaaactccagcgactaatcaattgagcatagaagaatctcagtttttaactgacgtgatgactgctgcaggacttttatcttgcggaaaaaaagataaaggattggcaagaaggatggctgatttctgtgttgcgaaaagagggaattttaatccagcacagcttcgcaagggggacgagcaatga

SEQ ID NO: 380929 - DNA, 411 bp, Salmonella enterica
atggggaaaaattacacaaaagcgaaaaaggatgagtttcagcagcgcataaagagtttagttcgtgcgcacgggaggatgacacagaacaagcttgagaggctgacaggggcgggaagtctcacggtacagcgttacgtcaaacagcttgtggatgcgggagaactgtacgaggcaccaggaagggcgggtatttttctgtcagaaaaggattttctggaccgaaaagaaaatctcgcagaggagaggtacacccgttacatgagcaggcccgttaagtcattttcgccatacgacagggataaaaacggcgtctgtgaggagtgccggggcagtgaggcgatgcagcgggtactggcattttatcggggatacggagcacgaagatcggaggtaaaaagtgaaaattga

SEQ ID NO: 380930 - DNA, 2205 bp, Salmonella enterica
atgaagaatattactcaactggtgtttaagccgaagaaaagtgccgctgcaaaaggtgtcgctaggcaaggaacaatctggcttgataacgacgatcctgacgagattgatgcactctcgacgctggctattaaggacgcgggatttaaaagaagcgacttctttaaacccgttcgagtggatcacctggtcgttgatgatatgcctccggaaggtgtttttgataccgcgttctgcgaccgatacaagctggcagaagatggtaaaagctggctgttgccagccgctaagcctgaatcggttgatgccagtgccggagtaaataccgacagcgtcagcgagcagcagaaagatgaacacgccaccgacaagatcgattccggcgataccaccagtgccgccagtaccggcgccacaaccgacactagtactgaaggcgtaggcactgaaacagtcactgatgaaacccccgcctatgaatttaacgtcaacggcgagcggatggcggatgttgaaaaagagatgcagcagccggttgttggaatggatgatcgccatcggatactctctcagttcatccttgaggataagttctcacacaacatcacgccggaacagcttgctgaggtaagccgcctggaactggatgtaagcgacaactatatccaggatatgttgctcgccaccaggaacgcaccggccatacacaagctcaatacgcctgacttgtggaaatataccgacagttttaaaaaggtttttgcgcgggataagcgccaccccctcagccggatgattaattttaaccaggcatacgctgacgcacaccccatcgatcgcggcctgctggtccaggaatggataaaaggcaattacatatcgagcgttgagaagtcaggagcaaccagtgtcagtgtcagcgctgcaccagagccacagaaaaccagcgcaactaaagcagatgtagcggcatcagataagccagccacaaaaacaacgtacaaagctattgatattcgtatcgggcgcgcactagctaaaggggcggtaacgtatccgatcacggcaagggatgttgagcaaggcaaggctattgttgaggctgacggcgaagaatttaaacgctggtccgcaacctaccgcattactgaaaacattcagttctatgacgaaaaaacgcacatagagatgattcgccaggctccccgcgaggtagttactggcagccctgagttgcgccgcgcgtatgtggataactatctgtcagcctacggaacgttagatcctgatcaaatggtgtatatgccgaagcgagcccctgtagatcataaagaaaatatggagcgtgtacgtaaggctggtaaaaatctgcgagatatagcggctgggagatttaactgtgatgaagaaaaaccgcaatcagaagacgtgctggcagataaaccgtcagcgcctgaaacagtggaaccggacgcaaatgaacatcatccggatacacggtcgatggcgactgaatcatctgtaactgctgacagcgataaaaccatgcacgaaaaagtcagtgaacaactagccgccgatcgaggtgattttgttcctggcatcagcgaccccagcgatccgaagtgggtacacaacgattacagcgcctcaagtgagggcgaaaaaacggaagtggatactgacagcgcgactgatattgctgattccgctgaccactcagaagaattttcgaaccagaccgagccggaagcgagccattctgaaccatccgcagaccagaacgaaccagaatcaccggaaaccgagctaaaaagcctacaacccgaaccagtaaccaaagttgccgatggtgtttttgatgtatccgcattcttcgcggatacatcaaatcagggtgaaaaaacagaagtcacaccgccgaataatgatgaccgttcgcatgaatgtgcagaagaaaaaacgacggatgcacctgcgacaactgaatcattactgcacgaaatagtacgtttgcagtcaataaataaccagttactggaagaagtcattagtgggcagcaacgggaagtccggtggaaggaagatgttatggattcgctgttcgcagggataaggggatttgcacgcacctttacagttcgggggatgagaacaaaggggagggataatggggaaaaattacacaaaagcgaaaaaggatga

SEQ ID NO: 380931 - DNA, 231 bp, Salmonella enterica
atgcaaataaaaaataaggtagatcttacaccgggtatagctgcaaacaaagtacaggcaacgccagagcagaggctgataatttatgcagatctggaaaacgtcttaaataaggcaggagcgaatacacgacataaccagaaaacacaggcgctggaatatctttggagctggttgcgagcaaataaaaaacaggcgctgaatgaaatagagtatcgtgaggggaaataa

SEQ ID NO: 380932 - DNA, 270 bp, Salmonella enterica
atgcgcaaatcccgcaaaagtcacacccaaaatcagatcaccaccctccaactcagctacgactgtcgccgcaaggttcagcgcgtcaaagatttttcattctggctacaccttaactttatcgacactacgccgatggttgccccgcattttatttatgccttttcctacatccacgatgatattaaggctatagacaaagaattaatttctcttggcctgtttgacgaggcgatgggaaaaagaccgagaaaacctgacgcgaaataa

SEQ ID NO: 380933 - DNA, 192 bp, Salmonella enterica
atgagcagcgcactgattggttttgttcttctgttcagtccgtgtggcaaagatgcctgcgagtgggtgccagtaactgaaagaatctacccaactaggcagagctgtcagcagctagctgacgaactggaaaagcgtcgcccacattacgaatttaattgcggtgaagtttatcgcggggaagagggctaa

SEQ ID NO: 380934 - DNA, 195 bp, Salmonella enterica
atggataagagtgaattaaagcggttacgaaaggacctcaaggaagtggcgcgtggagtccagttggctggcaagcagcttaacgaaggtagactctacaaaatgctggacacaatgcgaacgctgaccggaaacctgaataagctggtcgacgaactaagcaacatcatcgagcaacagagcagcaacgtatga

SEQ ID NO: 380935 - DNA, 474 bp, Salmonella enterica
atggcttaccaaaaaatcatttacgaacagctaaaagagcatctttatgcgctgtatggcgttacttatgaagatcatgactcactacagacccacactattcttaactttcgtgcaatatcactcactctttttcatacggcaataaatcggtacaggtccaggtatggtaattacgtggggctgactgactccgaaatcatttcccatctgttgtatgaagaagccggggaaataattcctgatctgaatcatatttccctgtcattggttatgaaaatcctggaaccgagtctgctggatgccctccccaacaccgatccacaatttcagaagtcatctgaaaatatgtatgaactatttgaaaagcttcttcaagaagcccctcaagcttactcaagattgccagttcttcgtgagctgaaatgggacgatctgccgaatgagttgttctcactgactcaagatagttaa

SEQ ID NO: 380936 - DNA, 339 bp, Salmonella enterica
atgatagagcacgaactgaataccaaacgattaagatccattaaattgcagttcccacaaaaccttatctttaatgagttaatcgattgcatgtttgccatgttaaatcctgaacaggctaaatatataaatgaaaaaattgcacttaccccagatacatggatatatcagacaaccattgatgctcttaactctctaatgaataaggaacaattttttttcatccacaaagagtttaagatgctctacgacgatgagttcgtatatcctgaactcccggagcaagggtatttattcagaaaagagatctatcgcatctttaacctcgaactaaaataa

SEQ ID NO: 380937 - DNA, 465 bp, Salmonella enterica
atgcagagtgctattgcagaggaagtgttatctggtagcgataaacccaccaatgaaaaagtgaagagtggaaaatcgcaggttcaaaaaaaagccgggttgcggattgatggtccgattgcatctgttgcgtttctggataaagcagccgcttatgtcgggttgaccagggaggcgctggcaacggcgcttcggcgcggtgaaatgcccggccataaaaaacgcaaaaatccagaatatgaaagttcaggtggtgactggatattcaatgtcaaagcatggaatgaacttgcggatgaattacctgaactggaaccgcctgaatggcatcactggaaagattattggacgtataacagaggtgacaaaaaattccagaaggtgaacaaagaagactgtttaaaggttgatggtcgccggatttataagccacgaaaatccaggctggaacaggcaggcagatag

SEQ ID NO: 380938 - DNA, 342 bp, Salmonella enterica
atgactacatcgtcaatagactattcaaaaaaattacgtcaaataagagaggctgaaggactcacgcaaaagcagtttgctgagttaacgggcttagcagttagcactgttagaagctacgagggagttggacagacagctagagcagccgtcgtagaaaaagtcattcaagtggatcgatttgaaaaatatatgttttggctcatgaaagataaaacgctaccttcagccggacaaatcgccccggctctctctcttgatgggtacgttcaatcggagggcgatcatgtttcgatcgaaacacctcaaaaattacgccgatcacgccgcaatgctggttga

SEQ ID NO: 380939 - DNA, 147 bp, Salmonella enterica
atggcgcctgttcagttcagactgcgcggcaactttttatacgtcccctctacaactgaatggcttacatcaggcaaaatgattttcaaagtgattttgagtaaaaactcaaaatatttgcatgctatttataccctgtctaattaa

SEQ ID NO: 380940 - DNA, 999 bp, Salmonella enterica
atgcacatcaattcagcgaaaacctatgccagggcgtttaccgcaaatacacaactgcatgaagctgcaggaaattatgaaaataaacttgccactaaaatcgccaaaggaatcgttggagcactcactctgggaattggatatggtattatccgactaattgaaaattattgcaacgttcgtgataaaattaatgattattgcgctaatgccgagaatattcataatgggattgcggtagctatagtgacggggaataacgttgccgagattaaactccaggacaatagaattttaacattagaacaaattaaccatgagcacgttagtgaatcctctgtaaggatatcagatggtgagcatacagaagaaatcccaggaacgtttagcgatatctgtatgaagctaggtcaggagtttaataatgcgcctggtctgtataacattagcagtcaatatcagccgctggacttctttttacagatgcgagcctgcacaattgcgccagtcattaacttttcgccggtcaccggacaatatgaaaatttatatgagaataatattctcaatatacataatgcacttagcaaggctatatccatggaaatgacaggggcaaaagtaacgttaatcggagggtcggaaattgaatttagtatctcgcaagaatcaggcgacgaacaaaaaaaatctcagataactaatgggttacaagttatggaagttgaaggtactttcaccgatctctgtcgggaatacgagttattactttatacaaaagaccagaatattgattttacaacgctggatgaaaggttagctgaggtaaaagcgaataaaaactcagctggggcaatccctgatctggaagactttactcttacagcacgctgtatggctgacgcagaaacggcgcatcttgcagaagccacccaacggtttaatgcagcgtatggtgatagcgcgccaccttcaagacccccactacgttttaagtaa

SEQ ID NO: 380941 - DNA, 1257 bp, Salmonella enterica
atgtctctcaacgatacaaaaatccgcagtcttaaaccttcatccagaccctttaaggtctccgattcccacggtctttatctcctggtcagtccgggcggctcccgtcactggtatctcaaataccgtatcaacggcagggaatcccgtattggtctgggcgcatatcccgctgtatccctctccgctgcgcgtcagcaacgtgaaggcattcgccggatgctggctcagaatatcaacccggcacaacaacgggcggctgaacggggtttacgctcgccggagaaagtgtttaaaaccgtcgcgcttgcctggcatcaaagtaacaaaaaatggtcgcagaataccgccgaccgcctgcttgccagcatgaacaatcatatcttcccggtgattggtcatctgtcagtcacggaacttaaaccccgtcatttcattgacctgctcaaagggattgaagcaaagggactgctggaagttgcgtcccgtacccggcagcatctttgtaacatcatgcgttacgccgtacatcatggattaaccgacagtaacccggcgacaaaccttgacggggtgacgatgccccccgttaaacgccattatcctgccctgccgctggaaaggctaccggaactgctggcgcgtattgacggttatcagcaggggcgtgaacttacccggcttgccgtcctgctgacgctgcatctgtttatccgctccagcgaactgcgctttgcccgctggagcgagattgatttcagaaataaggtctggacaatccccgccacccgcgaagctatcacgggagtacgttattcagggcgtggggctaaaatgcgcactgcgcatatcgtgccactgtcccgccaggccatcgccattctgaaacggattcaggatatatccggtcatcatgagctggtgtttcccggcgaccataacccgtttaagcccatgtgtgaaaacacggtcaacaaggcactgcggctgatgggctatgacacaaaacaggatatctgcggtcacggattccgtgcaatggcgtgcagcgccctgatggagtcaggattgtggtcacaggatgcggtggaacgccagatgagccaccaggagcgtaatactgtgcgactggcttatattcacaaagcggagcatctggaagcccgcaagcaaataatgcagtggtggtctgattatctggattcaaatcgtcaacagtatatagctccgtacttttatgctattgattataaataa

SEQ ID NO: 380942 - DNA, 1833 bp, Salmonella enterica
atgaatgattattatcaaaatgtaataattggtggtggtcctgccggaattaaccttgctcttgaattcatgaaaagagatatcagctatttattacttgagtcaaatgagagtgttggaggacaatgggataaacttcctgtatgtggacaacttatttcacttaataaaaagtatgttcccaaaaacgaccatacctatcgtatgagatatgactggcatactcttagttctgttagtgctgatgacgcagaaaaggacccaaaacttctttttactgaatggacgtcagaacactggccttctgctcgtatttataaaaaatatttgcagtacgttgctgagtctatgggaatacagtcatcaataaaaacgaactctcgtgtatataaaatttcaaaacgaaaaaatgatggtaaatttattatttatatagagaatggtaataatataatcgcagacagggtattttgtggaacaggaagaagtgaacctgttatcccatcaattaaaggactaactgaggacctgtatactctttatgaggattataaacctgaaaaagcttctgagtattataagaataaagtagtaattgtgttgggacgtggtaattcagcgtttgagattgcacataatctggtagatataacagcagagaccagagttgtaacccgatcacttcctaaattcgcccgacaaacacataatgtacatgatatacgaggacaagtatctgatattttcgatttaatgcaactgaaatcaaacaataatattgtaagtgatcgtatagtggaggtaaaaagaattgaagatggtataaataaaggaaggattttagttaaatatgatactccatgtgtacattggaatcctccaagatggatgcgccggacaggtattgtggatgacataataatatgttgtggttttaactatacgatgtctgatatttttgaccagtcaactgtcagaccagaatgtgatgaaaaaggtaaatattgtttgcttacctcaagctgggaatcaataaatacgcctgacttatattttattggtgctccaacacgtattaatgatcctgatgctgcatctggatttgttcatggattccgctgtaatatccaggcactggccactatcattgaagaaaaatattatggaaaacatttaattccactttttagttatactcgtttagcccatgaatttcctggtgatttaaattcactatctgattatatagttaatatggttagtaccagcatgccattatttgagttatatggatatttcagttgtataattacatttgaagaaaatagtaatggcaataccctcattcaagtctggcccccatttcccaggaagtataattacgagcgatggggaaatcataaaaactatattgaaatcatatttgaatatggtttttccaaatatagtgatggtaacttacccactcattattttacgttaccggcagaccatttcgatacatccaggagtgcatatattcatcctgtattccatgttttccgtaattgtatagaagttgatcagtttcatatgcaggaaagtttaattggccgatgggatctggatgattatgtggacgaagaaacaaattcagaacaatacaaaaatgttatatttaatgccatagcttgcgctatgggtataaaagaacgtcgcagcattttaccagtcaaagctgaatatctggataaatgttacccaataatgactgagtatgaaatagatgaagcccttagtattcagccaacattagcattactttccaataacttagataaaaagattatttaa

SEQ ID NO: 380943 - DNA, 657 bp, Salmonella enterica
atgacagatattggtataacaatgaccggtctatttggtctcgtaatcacttcctctattattattgctataccgggaccaagcattatgctttttattggccaggtaatgatggatggtaaggggcacgctttgcggggagtattaggaaacgcaattggtatggttattattgcactattactttctattggtcttggttctttaatttcagaatcggaagtggcattattattactgagaactacaggtggtattgcattattttttattggtttacaatatataaaaaaatcaatacctgccagtaaggacaagccatctcataaaaaaagaccattactcactggaattattgtcagtgtaacaaatccaaaatcattcattatgtttggaacaatagtaccaggattcctttctcaaaaagtggagaatcctaccgcagttcttttattttattcactgatacctattctccttgggttatttattgactacctgtgggtatcggttgctcactctttgcgaaacagggcgttatctgagtcaaaaaacatcagacgcataagtattattggtggtatgctgataataattacaggaataattttgatatatgagtctgcatctactttttttcatatattttatttttaa

SEQ ID NO: 380944 - DNA, 186 bp, Salmonella enterica
atgttgttctggccgccgtccggcaacgctaactcgggttttgcaacaatcaggcttggtgatttattcagttgccaaacccgcttgagtattgagataattttcagtctgactctcgcaatatcttatgaggtttcagttcatgtcctgctgcgctgggtgtctgtgaagcgggtttaccattaa

SEQ ID NO: 380945 - DNA, 123 bp, Salmonella enterica
atgctggtgagggtgtccggccaggcgcataagtgcataggccggacaagcataacgtttttcagcagtaaattaaccggcgtcaacctgcggtttacggctgtgtttacggatcaggcgtaa

SEQ ID NO: 380946 - DNA, 618 bp, Salmonella enterica
atgagccgataccatgtatccagcagtgaaggccagtatgagaaagactctggcgaacagattttggctaataagctggggatcgcgacttctgatgagatggatgaggctgaacttgtcctgttagaacaactctaccagtctgtttttgaagagcagttcccggaaggacagctcagcgtagccatgctaaaaagctggcatcgccgctggttaggtaacatctacgagtgggctggacaagaaagagcagttaatatcagcaaaggcggctttatgtttgccccctcagcgcagttgccaaaactgctgaacgaatttgataacaagtatctggctcaatacacaccgtgtagcggcatggacgaagaacaactcatcaccgctatcgccatcacccatgtcgagctgatacttatccatccattcagagagggaaacgggcgcctgtcgcgactgctagccgacgtgatggccgttcagggaggatacaaaccgctggattatcaaagctgggagcaaaacaaagccgaatacatttcggctatccacgcaggtatgtcaatggactacggtccaatgcgctattgggttggcgctgcgttgagacgtgattag

SEQ ID NO: 380947 - DNA, 171 bp, Salmonella enterica
atgagcaatgacaagaaaacgcaggtgtattacgttaaaccgtctcgcgccgatatcgttcgctcggtagcaacgtcaaccgccgttgagacggggcagtcctctgagaagatcgaagcttcgcttgaagcgacgcgcaaaaagttcgctcatctccgtcttgctgtctaa

SEQ ID NO: 380948 - DNA, 3492 bp, Salmonella enterica
atgataaagcttggagcaattgagtttgatgaatgccttcttgatgcaatccgtgaagagaaattagtcatttttgccggagcgggtgtctcaaaggggtccccctcaaaccttgacgattttgtcactctcgcgaataaaatagctgagggtacagggctaacggcttcggttccattagaccgttttttgggagaacttcatcaccaaggtgtttcagttcaccaaagaacagtacctcttttaacaccaccaaacagtagacccacatcacttcataaggatctgatccgtctttttaaaacaggtaaaaatgtccgggtagtgacaactaactttgatctacattttgagaatgcatttgaatcaatatttaccgatacatcattgcaccctcatgtttatcacgcaccagcattaccacgaggacaaagatttcatggaatcgtgcatgtacacggttctatcgaattccccgaggatatggtattaactgacgctgattttggtcgcgcttacttaacagagggctgggctagacagttccttgttgaagtattcagaagttatacagtcttatttgttggctatagtcatgacgatatggtcatgaactatcttgcgcgagcattaccatcagataacgtagcaggacgctttgcactaacagataaaaaagaaaactggcgtttgctaggtattactccccttttattcactaaagatgcattttcagaactaaataatagcgtaaaggctcttgctgattggactaatcgaggcgcactggcgtggcaaacccgcataactgatattgcccgtgaaattccgccaacagatatcgaaaatgatattatcggtgagataaggttaattcttagtgacccatccaaaacacgctgttttactgcccatgctcgccataataaatgggtttactggctggaacaatatggttatctaaagccattattcgaacagtctcaaatagatgaatgccacattctgttaatgaattggctaatcaagaatttcgtgattgaacaacctaatattatttacagacttattgctgcacaaggtgttagactaaaccctacattttggtctggacttatcaaggaaattagcctagctgaagataagatacctgaaccatcagcattaaaacgatgggtgacaatcttgctttcgcgcataccagagtatggtggtgaaacatacaatccattgatgtggttagccgagcaatgttccagacaaaaccaattatcttcagttgttagcatttttcaggtactgataaaaaacaatatagtgttgcgttctgagtcattcgttcctgagcatgagaacatttatattgattaccggttatctgcccctcactaccatttaaatgaaatttgggaaaaatatttagagccacatgtccagttaatccatgcatctttattaaccagtttagtatgttgttttgagaatatccaccaagatttctgtagctgggatcgagtatccacagattgggatcctatcagtgataggcgagctgctattgaaccccatgagcaagataggcacccggaagatattgatgcactcattgatattactcgtgatattttgcgttggctaattgtgaacaaccctactgagggagagttatggatagctaagctgtctctgtcagaagtagctgtactaagaagaatcgctattcacactatatcagagcgtcaggatttaacggcagagaaacgcttagaatggttattagatcactttgatctatatagtttagccgaaaagcatgaaatttatcatcttgcctttaagaactacccacatgtaaactcagatacacgtcaacgtataattgataacatactgacacatcagtctagtgctcacagcaactggacagaagagcaatcaacaaatcgagatcacttcaattggctttcgtggttggaaaaatgtaaaccagactgctcctacatccaaagcaaattatcgccaattaaaactcagtatccagaatggcagttggacaaatatccagattttaattcatggtctgagacttggacaggctcaaagagtccatgctctgtagatgaattgctaacatgggaacttcaggaaaaacttgagtatttgttaacctttgaaggtacatcttttcgtgggccagaacgagaggggcttattgatacggtttgcgcagcttgtcagaaaaatatttcatgggcattcaatttagccgatatattaattgagaaatcagaataccgcactgatttatggcctgcaattattaatggatgggccaaggcgaacctgtgtcgagataactggcataatattttattaaaactagaacactcccaactccattcacctcatgcctatcctattagcaatctgttcctttctatttttgaggatcaagtaaagccttatgcacttgaaattttggggcaagtaaataccctggcacattcagtatgggaggcaatcgaagataacgaggatgaacccgataattggctgaatgtggccctcaatgctcctgaaggaaaaattgttcacttctggcttcatggattatctcagagccagaaacctataccagccactgggcgaacactaattgagccatacattgggtggttaacagaagtcgttcaggcaccaggacgtaaaggtgcaacaggtcgtagcctactgacaagtcaactatcttggttatctcaattgaataaacaatgggtactacagcatcttatccccttatttaatgatgataacgacctcaactttactccggcctgggatggttttttatcccgaggatgtagcatacctgaattgcaggaacgattaatcccagcctaccttcctgcaatgcatcggtttgcagcaggctcatccagacgagagaaatttgttaaccgtttcaccgagctggttttattttatgttgatgatcctacatcaaccttgttcccacaatttttccaaaatgctgctgctgacgatcgtattgaatttgctcattgcataaggctttttctaggtacaatgcaatcagaagctgtagaacaactatgcaatcgctggctaactcgctactgggaactgcgccaacaaggtatcccgacaacactaaacgatagtgaatataagataatgctcgaatggctccccacactgggcgatgccttccctgatgttgttagtatcataataagtgcaagaccaattacgttggaaaataatgttgtcccctatttgctacgagaaagcgacttggtaactaaatttcctgatgctacagctcgcctattgatatatctgtcacaatcaatatcaactatgcacaacgcacgatatatggttgagatctcacatagactaacaacgttgtcttcagagcttaggaatcaactggatgaagaatttgcaaggaaaggatttacagtatga

SEQ ID NO: 380949 - DNA, 708 bp, Salmonella enterica
atggattggcctaaggagtacagcaagaccactcaagcggtaagagatgcggcgtataaactctactctgttgaagcaatcacccggtcggttctgctaccgggacaggtgaaaacggcttatcacgatggactactaacgacggattattaccttttcctgttcaccagcagggagaatccgaagcttacagggtattttacctgtggcttgtatgcagcaaaggggtggttcgagttgaacggacagcgaccggaggaaattccatcatacaacccccttacgggcgagtcctccggtgatagtaaaaagggtggctgcgggattacaaagccgctgaaagctgaatcagacccaagaatgaaacgtcttatcagggtactccaaacgttcatttctctgacggacgatgagaaaaggaaaatcaaaggcgaatcaaccacactgactgtcctacagaagctcataaaagcgtcaaaagatgcccccagcacgtcaaatatcagatcagtaaataccactctgtacaaagctctcaaggatggtcgtcatggtggtgctcgtacattcactcaactagttgctcattacgaggttcttcttggtgtgactttcaagaagatatctattgatgatttcaatcaggagatcgacgatacccgcaacaagtcagcgacatatccatatatccctttggcatcattctga

SEQ ID NO: 380950 - DNA, 210 bp, Salmonella enterica
atgcgccggaagctgctgtcgcacatattaaaggggctggaaagcttggctgtgtacgattacgttgccagtcataagggtgtttgcgcactggagcacgatgggtttgtttcttatgaagaggtaacggactggtcccatccataccttctgattgagaaaaagcattcaggggccattcaatcaattaacgcttatcccggttcataa

SEQ ID NO: 380951 - DNA, 1431 bp, Salmonella enterica
gtgggttatattattaagcgtggtattctggttacactcgatacttataataagttcattgaggatgtacataacatacctttcattgggaaagatggtcgccagtctccgtcatactatctggatattcaacggtttttgcagcatctgatttgtaataactttctttatgctaaaaaggccccggaggataatccatggacacgatattcgccaatatacaataagctggggaaaaaggaattaccgtttgtattcaaacaggataagtatctgtgttgtgaccgggcgttagagctgctgaaagaggccggaattattgatattaaaaaacactcttatgggaatgggaaaagccgtacttttgctttgtccagggcatacctaaaacgctggtttgaagtctcgcctgatgattacaagcagcgcgatggccgttacatttatctgtctgtgggtaagcgtgtttgtgacgtcaagatcatgacagaagagcaattgatccacaaagcgttatcgcactttaataagccccgccatgctacgcggcacgtatcccgtgaaacccagcaatatatgcgtcaggtgtatcacaacatgggggcgttgcgtatcaaccttgataagttacaggcctacattcctgaagacgagagggaggctgctctgaagtctcacttcctccagcatctggctgagcgtggttgcaggatggtttcaagcgttcctttggtggttgaatattttcctgaatacaaactggcagagcggggaacccgttcatttgagaagaatggtggctttcaggcgctaaaggctgcgatcaaatgggcagttgttgtgggtattaactacgatatcaaaagcagtcaactgactattctgaaacatgaactggagcgatacggcatcaaatgtaagcggctgggaaagatcaccaagaagaaggtcatgcgcaggttcaatgttgatcaaaaagctgctaagttgcttatctatactctgatttactcacttggagagtttcgtaagcacaaagacagcgctgcatttcgtaagctttgtgatttgtatggctacagcgaagcggtgaaaaaggccgatgagtggattgagtttgttcggccagtgagaagggcacttaacaagttggtggcgtgttatcttgatgagcatgttaattgccccggtcgtggctgggccatacgtaatgccgttcgtcagtcttttatggttaaacctgacaagatcactgcgagtgttcgtcggtgtttgttgtcccatatgattcagggtattgagagtaaggcggtgtatgaagcagtgctggctaatcccgatgtatgcagttcgattgagcatgatgggatggtgagtaactgtgagatatgctggaatcacccttatcttgaattgaagacaaaacattaa

SEQ ID NO: 380952 - DNA, 1113 bp, Salmonella enterica
atgacgcaacaatttaatcgtgaacgggtaacatccttacgtgacaaaacctcacttggtgtaaatggtgcaggccagtctacgtatggcagtatagacaaaatagcatgggtgacggacaagcatgactgggaagagaatcagatactcagacagcgattgtttggcctcgcttcagatgaatgctacctgatcaaagttcgccctgctggtaagtatgagtgtggcgggcactatcgctgggtggtggaaatccgactgaaagctaaatcgcgcaaacaccccatattgctggcaatccattttgacccaaccagtagtcagcgtggatttcagcgaatggaacttagtccccagcactattctgcgaaacagataacggacttgtttgtgtggctggggcggaagggacgcatcggcaagtatctatatcggggattacgtaatgcctggataacaactatccactacgcgctggacgtggtgggaatgaagctccacgactatttaatccggctggttggtgcaaggagcggtgactttaatgatttgcatggagagcaggaagggttacggctggggtctacgactatcgtcgcgtcgatatatgaaaaggccgatgctccggatgtggcaactgaaagaaggtatgatcaagctgtccttctgcttgatgaacaacagttccggcggtttctgcggctggagttgcgtttatcacccggcaagcaaaagctcatgctgaacaacctgctatacatggagaatttggtatctaaactcgcattttatgaccgtaacgcgctggtagattttgagcttgaacctgatttttctcgcctgctacgtgagtatattccttacccgattgccagagcggattaccagccgtcagcgaccctgaatggtaagcaggtcagcccagcgaaaaaagctgctgataagcgcgttgataaactcatggagcgctaccgtgttgaattattcgattcagaggctgtatgggctatgttaccgcttgtggtggaaaaacttgggattctcgcgcaaccgcaatactggcagtttaaacatcgccagaagtggcttcagttgcgactgacacatgggtaa

SEQ ID NO: 380953 - DNA, 201 bp, Salmonella enterica
atgaacaccaaccgtattcttcgtaaaaaagaagttcttcatcttaccgggatctcgtccgcgacgttgtaccgacttatagctaaaggagactttccagaatctaagaaactgactggtgatagcggtcgggctgtgggctggggatcaaatgaaattcaaaactggattcagtcgcgtgggattagcaatacgcagtga

SEQ ID NO: 380954 - DNA, 540 bp, Salmonella enterica
atgccagatgacgattcgattttgcagccactaatgcagcagaagacagaaagggaaagaagcctcaacagggcgagacaacaaaaaagaaaggggttagttgcagcgaggtttggaaagatcgtacccatccatatgctggaagagaccaaagcccgactggagatgatcgctgaaaaaacagctataagtcgtaaggaacaaaatgcagctgagaaacgaagtgctgtgatagcggaactggttaaccagtactacatagataatatcttgtctcgcaagcataaaaactcagtgctggtatacgacgtttataaccaaatatggcaagctaactttgacggcaaacccactgacatgatagccagggagctcaataatgcgggtatagatataccgtattttgacaaccaaagcggtaaaattgttgttgagtcagggaagtggaaaaaagtcgatatagaaacattttccgactcagctctcgttataaaaatgattgagtcaaacgagaaaaagatcaaaaaaaacgctaagtag

SEQ ID NO: 380955 - DNA, 930 bp, Salmonella enterica
atgagcagggctgcgttacgtcaggttgtgccggtggtacaaacaaccgtgttcgatgcgtatattagcggtctggcaccatcgggacggcggggcatcaccagcctgttaaaccgcagcgccagcatacttaaatgcggtacggatgcagcagactatccctgggaacaacttaactacgccgccgtcgctaaagtacgtgcagcactgctggatgatggttacgccgtgtcgtcggtcaacatggcgctgtcagcactccggggcgtggcgcagacggcctttaacctcaactgcatggatgccgaaacgctggcacgtatccgggcagtgaagcgcgtgagcggtgatatccagcgtaagggaagggcgctggacaagcaggaaatcagagcactgattcaggcagcaaaacaacatccgcaaccggtacgacgctaccgtgatgccgctattgtgctgacactttgcggaacgggcctgcgggccggggaactggtcaaacttgagcgccgggactatgacaacggcatcctgactgtgaggcaggggaaggggcgtaaataccgtgaaattcacgtagcggatgcagtggataaggccatccgcgcatggctgaaagttggcgcagatgaagctaacagcgcactgttcagccgtatccagcgcaacggcagggtcgccagcaagccgctgacaacaaccgggttaacgggtatcctggctgagttacagcaagcatcaggtactgcgcagtttactccacatgatatgcgacgtaccttcattacccgtttactggagcagggcgtggatatcaacaccgtacgccagttggcaggccacagcgacatatccacgactacacgctatgactgccgtggtgagactatgaaagtgaacgccagcaagcgaattagatgctggtaa

SEQ ID NO: 380956 - DNA, 453 bp, Salmonella enterica
atgactatgtttacgcaacgtgaaacccgtatcctcgatcaggcgcgtgacattatcagccggtactatcagcgtggggttcagctctgcttccctgatgatgttcgacggtgcgtaatggttgagctggcaccgcttgaacatgaagagtttggcatcatcctgctcgataatcagaatcatctgctgcacaaggaaatcctgttcaggggtacgttaaactcggtaagcgttcacccccgcgaagttatcaaactcgtactgaaacataacgctgccgccgtcatccttgtccacaaccatcccagcggcgagcctgagcccagtcgttgcgatatcaggttgaccaaaaagcttcaggaactgatggaaatgctggatgtgcggttacttgatcactttatcgtggcaggaactgaaacggtgtcgatggctgaacgggggctggtgtga

SEQ ID NO: 380957 - DNA, 540 bp, Salmonella enterica
gtgactgataacagagggatacgtgcgtctcaacagggcgaactggactgtctttgcggtgcttattgcgtggttaacatgctgagctggctgtatgacggcagagtgaaacgacgcccgttaatgaatcggcttattcaggcttatcagcagcgctggcctttgcataaatggctgactgaagggattgaagaagaccgtttagactggctgatggctcaggtgttgcagaaagggcattacagccgccagttcccggttcaaatcaccagacccttcgccgggaaacggggattaacagacgggcagcttttcagggaaatgcagcggtttcttgacgtcactgaccactcccgcctgattatgctcagcgaccagtttcactggtcccttctggtcaaaatagatgaagaaacgctctgtttcttcgacagcaacgggcgaaccactatgccccgtaaagctttctccctgcgtactggcgtaacccgccgccagctgtttcccgacgccatttacttcgttgaacgggagttctga

SEQ ID NO: 380958 - DNA, 423 bp, Salmonella enterica
atgagtgttatccatcaggaagggctagttatgcccgtcgatcaggaattaataaatatcataataaatgaaacgggaaatccaccgccgcataaagccaaaatcacagccgtcagtctgttatttaaagacctgacttacagcgccgaaaagggcggttatcatcccgtcgaaatacggcttatttctcgcaatgacgaatggtattttgattacattaccgacttcagttatatgggagtggtgtactccgaactggaaaaggaaattgatatcagctggagtcagcaatatgtctttcttgctcatgttggtgatctgcctgttaatgccggaagagagttgtttgaactctggcaatccaactttattcaataccacgccatgaacgcttactccattactgttctctgggaaagctaa

SEQ ID NO: 380959 - DNA, 378 bp, Salmonella enterica
atgatggttaaactgatggcagattcagctgataagctggtagggcagcgtattcagactagacgtaaagaagcagggcttactgctgccgatcttgcagagactatcgatatctctcaacaacaactttcccgctatgaacgcggaacgaataagatcaacattgctcatttagtcaaaattgccgttgctttaaaaactccaatcagttggttctttattgattgtatggaggatttaaatgtttctgatatcccgattaactatgccactgggcttgacgttgaattaaaacaacgtctcgagcaagtctggaataagctagataaccctaagaggaaaagcttaattatgtttttagatgagtttataaaataa

SEQ ID NO: 380960 - DNA, 549 bp, Salmonella enterica
atgggcaaaaaggagaacattgtggcaaccaccattactgagataacggattgctttgagtactttttcagctctctttaccggcgagaatttgtcaaaaccctgcgtctgaacgaatgtagcgagcgggaattactgcctctggtacgttgctatttgctgggttggtttgcagataacgtctcaccggaagtaaaaagcaagctgccaggaactgtatccgggcacggttacattgattttgtcattgatgatgtagccgttgagtttgcagtacgtaaaccaactgcggcacgttccaatatctccgcgacagtcaacagtacagaagtaaagaaattgatgaagcacgatggcaaagccttgcttgtgctgtttgatttctctgacacgccctactcagaagaacagatcgaatctttccgcaattggccctctcttggtcgagggaatcatcgcaagtctgcattcaacattgtttatttctttgtggagaaacgcagaccactggcactggggaaaatagccaaaaacatccgtatcacttaa

SEQ ID NO: 380961 - DNA, 360 bp, Salmonella enterica
atgaacagaaaactgttggccttattgatggcagccataacgctacctgtcgcagcagctcagtacgtaaaacccggagcggttctaaccctgaatctgggaaagggcaatgctgaattcaacattaatgcctcaacggggaatggttcgggcgtatgcaatatggagggtacagcacaacaaatagctgccggagaaagccagaagcgtcgctgggtctggaatgacaataccagccagtgtgttgcagtaattagtgaactgaaaaacgggaagaccagcattatgactcgtggttgcgagggatactgcggggcttctgcggcaggcgcaatggatggtctatttaataagaaataa

SEQ ID NO: 380962 - DNA, 336 bp, Salmonella enterica
atgaaaagagcaatacttctggtattaattgctgctggtttgctggctggctgcggcgagaaaacgccaaaatgcagtagtgatgatgcaaaaaatctggtcgtggatattgccaaaaagacaatagagaaaggcatgacactggataaggatgtgcggattacagtggaaaatgtcagaacaataagccatgaatcaggccttgatgtttatcagtgcgctgctgatttaacgttcacaaaacctgatctgcaaaactctttaccaataacttaccggatacagaaaactgatgataatagcggtcatttctatataaacgtatctggattataa

SEQ ID NO: 380963 - DNA, 246 bp, Salmonella enterica
atgaataagaacatcacatttaccattgtagctatgctcgtatttagtttgttagtcacacacaatacaactaagccagaaaaagatcctcctgctaatgcgccgttcattattaaatctaacctacctggtacatgcagagtcagtaccatgacagcttctacagataccaaacagaatatacctgtcgtagcgtgcaaaatcagcattacgactgcaatcactaccagtactacaagttactga

SEQ ID NO: 380964 - DNA, 276 bp, Salmonella enterica
atgcaggctgaagccgaagttttaaccggcatcccccgtactgagcgtaaacagaaacgcgaagccgtcaaattgaacggcgtaaacagccatgcccgccgtcagcaacagagcaaggaaaaatggacttctgaaacagaaagagcaagaacagatacgcgtatgtttgaccgcagaaaagttcaacatcccgacagtcaaaaccaatataggatcgcgggctacgaacaatgtgcacaggttggcaccctcattattctggggcgatggtggtga

SEQ ID NO: 380965 - DNA, 4011 bp, Salmonella enterica
atgactgcgacgccaagccataaaaccgatgcaaagcgcgatgctactgacagtattcgcggatacgtttaccagatttatcagagtgtccttgcatggatcaatctcaatgaaagcgaaattttgttccttgaatgcgcggaagactttgatatctgtttagggcagtccgttattggcactcaagtcaaagacttatccggcaatctaacgcttcgttcgcctgaaattgtcgagacgcttaacaacttctggtctttgcagcagaacaatccccatcacgatgttaccttacgatttttgacgacagcctcagctgtcgatgaaaaaggcgccccctttgggaaaaatcaaaaagggcttgaatactggcagaagtgccgcccaaacactgagcaggttgagccattgcgttcatttcttttaacgctcccgttgaaccccgcgcttatggaattcgtgaagtctgcgcccgtggatattctctgccacaaactcatcaatagaattgagtgggatttgggaaataagaaaaaagatgctttgcagttggtcattgaagataagctcaaattgcatggttcaaaactcggcattaatacgcattattcacgtcaagtgctaccgcatctccttaaacacgtcgcagatttactttctacaaaaggttcaaaaccactttttcaaacaggtttttgggatgcattcgagtcggctaccatggagtctgttcctaaaaatgagctggatagtctgcgaaggaacagcggcttgcagcagttcatggataatgcagaagttagcgaaatatcaagactgcttgcgcgcgtgcctacgattgggatgccactgccggttgtagagggtgcagtgcgtcgaactgtccttgtcgaaaagttagaacgacagcttttgtcttctcaagtgctttttttacacggcagcagcggaacgggtaaaacaaaccttgcggccttgctttctgacaaaataggtgggcgttggggatgggggagttttcggggacggtccactgatcaaataagggaaatgctttcccgtgcagcaatagaagtcaatacatccaccctgccaatccagttggtgctggacgatctggatttgagtgacattgcagactttgagagtgaacttatcacgctgattttcactgctatgcaaaataaaggcagggttgtcgtgacaggtcagaagcagccccccatgccgttattccctaagctgtggctttctcaggagagcgaacaagccattccctattttgacgagcaggagattggagcgttaattaaaatacacgggctccatgatccgaaaaaaatttctcaaactgggcgggggatttattactccacccgaggacacccacaactagtgcacgccagggtcagaacattaagcagtcgagggtggtctacaacgattgatgacatcttacgacctgaggatgtagagcgtataaaagaagaagcccgcagccgtcttgtcagggagttcccttctgatgctgccagggttttggcttataggcttagtctcgtttcaggatctttccggcgtaatattgttaccaccattgcgggagcaccgcctcccattcgattgcctggtgagatttttgatacactcgtcggtccctggattgaaaaggaaggtagcgacctttatcgagtatccccgttgttggccggagcagccaacgatactttgcctgaagacgagattaacgccgttcatataaaaattgcgcacagtattgttaatgaaaaagaactcaaccagtacgatgtggcgaatgcattcctgcacgcattcttggcgaaagaaaaaacgatacttatttctctagcgagtcagcttattcgagagagcgataaacatttgagttaccttcgtgattcaatgtcctggtttgcagaggtagccttgaatccgggccaaacgattattgatgatgaagcaatgcctgaattgctacttcgtttacttcaattcaagcttcttgtgtcttcgtcacaagaagcgaaggtattgacgagtattcttaaaatagaaggaatcgttgcttcaattacgcctgaagagcagaagaatctctcaaccttaatggcctatggtattatattagctaatataagtgtacatattccgtcattaactgtggtcagattactaagttctatgatggatgccctggacagtggtgtcgtagataatgtgtctttttctccttatcccggagaatattctattgatacaaacgatccggtaacacttctgttttctcatcaggcagttagaataaatgggctggatgatctccttgagcttattacttcgcttgacctccttgaggaagataaaagaaataggctgcttgctgtttgtgacattgatactgatttttcgaatgttttaattaaccaatcttgctggaaagaagaaaaaggcagttcactggacattcagaaagcgctgcatatactccgacttacagaaacaaaagcccgcgagtggggagcgagaagactctataaagcttgtttgtccaatatttcagtcatttatgatgaatatgagcactcagtcgatgaggctttatctgtgctggacaaagcggataaggaatttaaagatgatgcaactttgagcaaccagcgtgccaaggtactgtttcatgcagagcgttattcagatgcgatacactctttccagaaagccttgctcttgcctgattttggtaatgtggattatgtctttgcctgccggtatatgggcattgcttttgctaaattgaacgactggtcaaagtcagccgtttttttccaaaaaggtgcggaaattaccgggaaatcaaagatacaaataagaataagagttggtttaatggcggatgctgctgtttccttatggcgttcagataagaaaaaagaatctctgcttctcttttctgacgtgttggactgtctgccgtctattgaaaccaaggatgatatacgagcccaccacttacatgccacggttaggcactgtatcgcatgggttcattttgaaacgataggatattctgaacatgacttagtagtgcccctgccagggatgtgcagcaatcaggaaccccatgaaaaaattattgatcaccgactcattgatattagtggttcgtggggattgttggcagcgaccgaggattttttatccttgggagataaaattactaaacgtgctcatatggcaacaaaaggaaggatgccattaaattcggtactttacggtcggatgttggcgctggagtcactgttcagagaaaaaacatttgataagttgattccaactcttatcggggtgcatgaaggtatgtcctacatgaaaaccgttgaacaaaataatattgacacccatgagattggggagatacctccagttccaggggattactggaaggatgaagcatcatgggtgttaaatagccaaatagttcttgccgcctgtataacaagtttttcggaaagctctgtgttgccttcgcttttaaattcatggagcgatgcacttgagcatatcgctgaaccttctacggacttcaaaggacttattgctgttttgcatggagaagcgcctgggaataacatataccaacaggcagcatatgcactgctggcattacagagcaattcgttaacacctgttcagctatggaaaaattcatgccggttattagaggtgtcaaggctggtgaagaactatacggagacagcactggaagcgttgcttgtaaaacgatggctttttgcttctcagcagcagaagttcttgttcagcgcaccaaggatttcagcgactcaaattgaaagggcttgtcttggctgtgagtattcaggattagagaaagttgcctcaatattaatcattgctgaaccttatctggatatcagcgtatcgggcgaattaatgatgctgcttaaatgcattagagataaaaaacaatag

SEQ ID NO: 380966 - DNA, 207 bp, Salmonella enterica
atgaggccgctcgttgttatatgccatcagccagcgctcgataatttcctgtgtttcattcagtgttctgaacaggtaaaaatccagaatttctgtccggtatgcccggttgaaccgttcgataaaagcattctgtgttgttttaccctgcttgataaattcgagctgcacgccatgttcttcggcctattgtgccagcgccagtga

SEQ ID NO: 380967 - DNA, 519 bp, Salmonella enterica
atgcttagcgatttcaataccgaacagcaaactctaattgagaaattatcattagttgatgatctagaaacttgggcaacttataccagacatcttgaaaaagaagtcaagaaaagcatctatgagtgtgccagacgtttgtggataaaacgtaaaatacttgatggtagtttgcttttacatcctaatgttcgaaatgatttaattgagcgggagtataggccattatctattcacaagaaaatgatttgggctagtgtattagtctcttataagggggaagatagtaaggcgtattttaaaagaataaaagggaagataattaaaaaatatggtctcaaatggtggaaagatgttgatagtagaataaagccagcttatgcagcgcagcaacgtattttaaagcgtgttggtgctcttggtccgggagtcaaatactttgcctcacaaagttcgtttgtaggcagcatgttaaatgatgaacttgatgcagcattaagaatgattccagatgattaa

SEQ ID NO: 380968 - DNA, 1284 bp, Salmonella enterica
atggcaggaaaacaagagggaaagtcactttcgtttaaagcggtagaaatgatgaagcctggcgacaaagataaggctgatataggcgaaaatcgtggcttacgtgtctcctgcggtgcaactggggttaagtcttttttctaccgttacacaagccctctgactggcaagcttgctcaggttaaaattggtaacttcccgcagacttctctcgccgctgcacgtcttaaactccacgaattaaagcttctccgacaggaaggtcggtgtcctgcgactgaactcaaacaagataagctccagcgtgcgattgaagctgaacaggctaagattcctgaattgaccattcagggattagttgaactgtatcttaccgaacgtatcgaggatcgtaaaacgaaggacgggaaggtcattcccggtgctagaaagccgaaagggcaggctgaggttcgtcgtactctctatggtgacgctgttaaaagcttaggaacccgaaatgctgctgagattacgcgtcaggatgtcatcaatttaattaatggcattgtagcccgaggtgcaaccgtacaggctggtaatgttctgagggagctttcactcgcttatgaatttgcaattggccttgggcgctttgatgacagttttgcgaatccagcgttgttagcaaaatccagcttacgacagaccagaatcaagctcacaaatggacgtggaacacgagtactgagtgaggacgagcttgctaaattccttaagtggcttccgggttctgcttatacgccaacgatcaaaaacgtgttacgtctgactctctggaccgggtgtcgtactggtgaagtctgcaatatggcatggaaggatgttgatcttgaaaaaggcactattcatctgcgagaaactaaaacagggatagagcgctacgtacagttatctgatcaggcaatcgactttctcaaagtattacggcttacctccgataaatatctgtttccttcgcaagccactaagaagccaatccagcagaagtatctaactgaaaactcatggcgtttacgtgaaagcggtcaaatgcttgatatacctcattggacgccgcacgatctgcgtcgtacagtacgaactgggctatctcgtttgcagtgtccaaatgaggtagcagaggccatattggggcatacacgtggcggcgttgaagggatttataatttgtataagtatgatgcggagtgccggaaatggctgcaggtatgggcggattacttggatggcctgataaaataa

SEQ ID NO: 380969 - DNA, 135 bp, Salmonella enterica
atgcattataatattaatgccataaatatatttcgtgctaaagaaaacacgcctgaagcaggctataaaaaaatggatcgcgaacgagtgatgcagatctcaaatatagctcatgtgtcagaaccgctgttgtga

SEQ ID NO: 380970 - DNA, 162 bp, Salmonella enterica
atggtgtgctttttattctggagggcagatattaccgtctctgagactaaaaaagggaacggcaacaaaaaactacccattatggtgggcttacgccgcgttatcgctgtcattgtacatatcgttacatgccgataccaatcactcacggaagccctttga

SEQ ID NO: 380971 - DNA, 150 bp, Salmonella enterica
atgagtgattttcaccacgtcacgcaggtcatcgaaattaatgacggtacgcgcgtcacatccatggtatcgatcgaaatcgtcagtatggtctgtacgttcagctttgccgatatattgctcgcgtttatatcatgcgtttgcaaataa

SEQ ID NO: 380972 - DNA, 1839 bp, Salmonella enterica
atgttgatatctagtgatataacctttaagtcaattgatactgcgaatattacatttggggatgttgtatttattaaccctccggcatcagaaagcgttgttggggtttcccgatttgcgactgctgaagaggttgaggagggtctggaccctgctattgctgtctcggtgaagcgcctgaaaggtgagttggataagaaagcaaatttagatagcccaaaccttacaggaacgcctacagcgccaacgaccgctgaatctgataattcacaaaagatagcgactaccgcgtttataaaacaggttctgcttgcttacgctaagctggacagccctaatttcacagggaaacctacagctccaactgctgatcagagttctaatgacacccaacttgaaacaacggcatttgtcagatcggctattgcagctcttgtcgactcatctcctgaagcgctggatacgctggctgagttagctgaagctttaggcaatgaccccaactttgcaacgacaatgctcaataagctggcagggaagcaacctttacatgaggtattaacatctctttcaggactcaattctgcagcgaataaactggcattctttaacggccccaatagcatggcactggcaaatttaactgccgttggtcgtgtcttgattggtcaggaggctatagcgaaggttctcgcatatcctggtttaggcgaaacgataaatcgtgccgccgatgcgctacaaaaatcacagaatggcggggatattcctgacaaggggttatttgcacagaatatcggggcggcgctggcgttcagtggtggggttagtatcggtggcgacagtaatccgtggaccacagcggagtttatctcctggcttgagctgatgggcgcatttaatcacccgtactggatgtgtaggggctcatggtcttacgctttaaacaaaaccatcacagatactggctgcggaaatatctgtctggctggtgccgttgtagaggtaatggggtttcataacgcactgacaatacgcgtcacaacccccacaacaacgtcaggaggaggggttgccagcgctcagtttacctatatcaataacggtgatggatattctccgggctggcgacgagagtttagccgtactggcgacgagatgaccggcaacctctgccttaaaaatgatggccgtgtgaatttctgcattatgaatgaagacggaacgccccgtatgtggctcttcaaggataaaggcggcgacggtgttcatatcaacaatggtaatgatggcggcggggattttattttcggtaaagacggcagcttttatgcttccgcagtccgtgcaggcctcggaaaaaaactgtcaatgacgagtgataataattcgacaatgccagccacgtttaatttatggggcgacgcaaacaggcacacagtaattgaactggatgatgatcagggatggcacctgtacagccagcgaaatcctgacggttcaatcctgtttacggtcaatgacgatattatggctaaccgtaaactgaatgtgggtgacgctacgttctccagcgacggtaatgttaacggttcgctctggggtggctggctgaatgactggattaataacaccattatcaatcgttttgttaaggatatcaggctgggtgggattgagtatgcacaggcatggaacggtcccggattcaatgacacaccaggctatgtcatcacgggtgtcacgaacggcaatggcgacgaattaatcgatggggtacaccgacgtccgttgcaaaaactcattggcggtgtctggtataatgttgcgagtatttaa

SEQ ID NO: 380973 - DNA, 135 bp, Salmonella enterica
atggataaattaatattcacaataactgacgccgggcgtcaggaaataattaacgcatcgaatactggtacggaaaaggttgaaataaaatccgtaggaattggtgatatgtattatattactacaccagactaa

SEQ ID NO: 380974 - DNA, 582 bp, Salmonella enterica
atggttgatatctcagacattagtttgctggatgtattacctcagaatttagctcaaaaccctgatgtgatagccatgtcaaaagctatcgatgacgaactacatgcaattaataaattgatccctaaaaccactatatatgggctaattgatggtcttgaatctgcggttctcgaccatcttgcatggcagtggaactctgacacatggcgggataactggcctgtttctctcaaacgctctgtttttaaatccattatcaggactaagcgtataaaagggaccagagcggccgttgaagacgttgtcagcagtcttggcggtgtcgttgatatcaaggagtggttcgaacagtcgcctcgtggagaaccatacacggcttctattattgcttcaattaactcctttgatggtgctgtaccttcgaaggagatgcttgatgatgtaataaggaacataaaatacgctaagtcagccagaacattatattcattctcacaggcggctaatatttcaagcagtatcggtattgctggtggtcttcaatctgtctcgtatgttcggttgattggagagggttaa

SEQ ID NO: 380975 - DNA, 1029 bp, Salmonella enterica
atggggcgctatcaatgccacctgctatgcaggtggttttttactcagtcgctgtgctcagtgattgttcagcagcgcaagactattgattattcagcaaagcaaaacctgctgtcatatgctacagaaagtagtctcgatcatcttggttatatgacagatactccaaggcttgaggctcagtcggccctcactacgtttgaattcaggctatcaacagtattgacgggagcttataccatcccggcaggtacacagattacgaccgggaataatgttatttttcagactgatgttttaacagaaatcccgcctggttcactgagtgggacagtctcaggacatgctctggtgcctggtgtttcaggtaatggttttttacccggccagattaatgcactgataacgcctctcccctatgtggccagcgtcagtaatctgacggaatcgaattctggagctgatcaagaggatgatgataactatgctgagcgcattcagctgtcaccggaaaaactttcgacggcagggcccgaggattcctataaatactggacaagaaccgctaaccagaacatcaaagatgtgaatgtttatacgcctgcggccggaactgttgagattcgttgtctgcttaagaacggtgacattccatctgatgagcttctggaacagataggtaatgttctttccgccactaatatcagaccgtttactgatcatgtgatacccaaaaaaccagacaaggttgattatgatatttcgataaaatactggataagtacagatgataaaagcagggctactttaattcaaagtgaagtcaataaggcacttgaagaatataagttgtggcagcgttctgttatgggccgagatattaaccctgatgaaataatatcgagatttaaaaatgcaggggctaaacgccttgaaataaccagtccggtatttactgtaattagtgaaattcaggcggcaagagaaagaaatatagaatgtacatatgaagggttagaagatggttga

SEQ ID NO: 380976 - DNA, 438 bp, Salmonella enterica
atgagtagattccagaaagcatctcatgtgctctggtgttgtcaatatcatattgtatggacacccaagtaccgatttcgcatccttaggaacaatgttggcaaagaggtctacaagcagataaggatctcaagtgagcagctagggatagaagtggtagagctgaatgttcagatagatcatgtccatttactggtaaaagacccgccacgcctttctatttcacatgtgatcggtcatttgaaaggtaaaacagcccttaggctgttcagcaaatatccctacctgcggaagaacaagttgtggggaaatcacttttgggcacggggttactgcgtagataccgtaggtataaatgaagaaatgataagaaagtatgtgaagtatcaggaaaagcatgaagttgaagatagccagctttcactaaaagaggtgtga

SEQ ID NO: 380977 - DNA, 534 bp, Salmonella enterica
atgacagtctatacattgaagcaatgccgcccggaccaggaagaaactgagtatctctggaagctgtttcatgcggcacaacgtaatgatgctcgctggcacggtagtgaaatcagcattatcgccgatgagctatcccggacggatttagatcgtaaccaaaaactgttccttctccgctcctggcaagtgctggtagacgacaaaggtggattcgggcgctttatgggtgcctttgatacttacgtctacaacatgcaagacccggatgatgactgcgtagcgtggaaacctgaactggcccaaatactgaacgacggcaattgtttcgacgtactgctcgatgcgtaccaagaagcccagcagcgcatagcagaacttgaggcacggacggtcaatctaccaaaacgcagcgttggcgaagtcatgcacatgagcggattcagccgggattatgccgagggttggtgtgctggtaatgacaatgcgatacacgaaatacgtaccgctggcgtcaaggttaaggaggagtga

SEQ ID NO: 380978 - DNA, 936 bp, Salmonella enterica
atgaccactattaccagagaacagcaaaaacagattttaattgatacagcgaaccacgtaatcagtcgtgataacacgtcaccgtatagcgaaaacctgcgcgaacttgcccgtatcgcgctggcatcgctcgaatcggagcctgtagcgtacattttcaagcatccagcaggagaattattttggtcgcttactgacgaaagcaataaaggccaaaacgatgttatgccggtctacgccgccccgccagcgccagaacgcgaacgtattcgccgtgagcacgccgagtggtcctataagacattcggcgatgtcggtcccatcggtccactgaaacacctctcgaaagaagcgcttgaggctgccgcagaacctgacgacctgagcgaatgggctgacatgcaattcctgttatgggatgcgcagcgccgtgctggtattactgacaaacagattacccgggcgatggtggaaaagctggagataaacaagtcccgccagtggcctgagccgaaagatggtgagcctcgcttgcacatcaaaaaacacccagcgccggtagtgccggaggaaatcacggcggacggaattataggaatgcatgagtgcggatttgtggagggttggaacgcctgccgcaccgccatgcttaatggcgatatttttcgggaaaactcaatttcgtcaaccaataattttcgggaaatcgcggaaacgtcaaccaactcgccggtaattccggatggttggataatctgtagtgagcggatgcctgagaaaggtgcttacatttcagcagtgtcaaagcatggtgaatacgtagccgggcaagttattgacgactggctagacctgcatgatggaacatcattcggacttgatgaagtgtatctatggatgatgttgcctccactgccggaatcaccgcagcaataa

SEQ ID NO: 380979 - DNA, 246 bp, Salmonella enterica
atgcaaccaatcaatattcaaccggttcttataaaccgggagcgcgtacaggagatgctgggtggcatctccagaaccacattctaccgcaaacgtaaacagtgggagcaaacaggcaccccattcccaaaggaagtaacagaacttcaccctccaaaaggaggggctcttttccgttatgttgaggtcattcagttctgcaaagatagggggctgattgctgatgcgcaatcaagcaccttctga

SEQ ID NO: 380980 - DNA, 1212 bp, Salmonella enterica
atgccccttaacgacacgaaacttaaacgtattgacagaaagccctatgatgggcctgttgaaattcctgatggtggtggattgtctgtcaggattagtcccaaaggacttataacattccagtatcgctatcgcttcaatggaaagcctgtacgtctaaaattaggcgtctacggaagcatgtccattaaagaagcaagagatgcggtggaggtttgcaagaagtggttgagtgaaggcaagaatccagccgtctacagaaagctggacaagaaaaagaaaactgaatctcccgatatcgccactttggttaatgaatggctagatacaccatccgctaaggatttggtcaaatacgaatactggaagaggatgcttaaacttcatgtcaccgatctgtatggacaattgattgtcgacgacatggcccccacacactgggaaaagatttttctcgcaattacgaaatccggctctcctgtacaggcaggaaacgtactggtgaaaatgaaacaagtgataaggtatgcacttcgtagaaaacggattacatctaattcgctaatgcttctagaactgactgatgttggtaaattaccagaagacggggagcggtttctaaacgatgttgaaatagggaaattctggctagctatcgataaaaccagaatgtcatggcagaacaaaatggtaatgcgattgcttctgttaactggatgtcgtggagttgagttaaggcttgcgaggaaggtggatttcgatcttgagggtagggtatgggttatcccgaaagaaaactcaaagaccagaaagcggtttgtgcgtggcttgtctgagctatctgttgagtgtctgaagcaggtattcgaggtttatccaggcaattctatagtttttcctccagcgacactacaggaggacaggccgatggctgcgggaacaattatttcactggcagaacaggtagaaacaatgatggattgtccacactggtctgcacatgatcttcggcgtacctgtaaaactaaaatggctgaattgggcgttgcgccacatgtttctgaaaaaatacttgggcataaacttaccgggatgctggcagtctacgaccagtatgattacatcccggagcagcaggaggctgcagataaatgggctcagaaggtgcttgattgcgcatcagcaatcagccccctatctttgcagaactga

SEQ ID NO: 380981 - DNA, 177 bp, Salmonella enterica
atgaagcgtatcgtgaagttttttctggcaatgttactgggcatcatagtgaatatggtcgcagcgccagcgatggcatataactgtatttcgtctggagagtcaagtgaggactgtgaagcacaatgcaatatgttatggttatatggagagtttgcttactggacatgtttttag

SEQ ID NO: 380982 - DNA, 981 bp, Salmonella enterica
atggcctttgagcgccatgaaaaggaaaaggcacaagacaaaccgtggcttggcgaaaagaccgacaaacggcgcgtaagggatttagttacggcctggtacaacgcacatggcgtaacactagccgatggagaaaagcgaaaaagtgccatggagtttgcctgtctagccatgggcgatcccctagcaaccgaattcaacgctaaattattttctacgtatagagaacagcggttaagcgggaaaataacacgttctgaccgtgtgaagtctgtaacccctcgtacggtaaacctcgaactggcttactttcgggctatgttcaatgagctgaaaagacttgatgactggaccgcacccaacccgctggaaaacgtcagagaatttaagattgcagaaattgaactggcctggcttaccgtcgaggaggccacacgtctgcttgaggagtgcgagaaaagcaaagcaggtgatttaactactatcgttaaaatctgtcttgcgaccggcgcacgatggggagaggctgaaaatttaactggtaagcagattagccctggtaagatcactttcatcaaaacgaaaggtaagaaaaaccgtacggttccaatcagtgatgaactttatgaactgctacccaaaagcagaacctctaagccgctttttactggatgttattcagcattcaggagcgcaataaaacgcgctgaaatcgagcttccagatggtcaactttcacatgttctgcgccatacttttgccagccatttcatgatgggcggcggcaatattctggtcttacaacgcatcctcggacatacggatattaaggtgacaatgcggtatgctcacttcgcaccagaccacctaacagaagcggttcaactcaaccctttaaacctgataagtggcagcaaaatggcagcacagcgcaccactatgcaatacttttcgacaatatacgaaattctatgcacttga

SEQ ID NO: 380983 - DNA, 183 bp, Salmonella enterica
atgaaaaaattaatggcaatagtaacgctaggattagtgtttttggcaacacagccatcatatgctcgcaattatccatgctctgggaaaaagggtggcgtctcacactgcacatctgatggtaagtttgtttgcaatgatggcactatcagtaaatcaaaacgaatttgctctaaaaactga

SEQ ID NO: 380984 - DNA, 435 bp, Salmonella enterica
atgcgtagcttaacctttcttacaatatttttaatgttcacaggcttcattttgccagctatctcttatggggccgattcaaaccacgaaagatattacataccggacaatctatatgagcagttggagcgaattggttttaatgaaaatgaacttgaagaaattgctgtagataacgacattctatctattaaacttgactcagacagattaaatattcaaagagcatataaaataatatcattcatttgtgactatacaaaaaattatacaagtgaatggcaaggtattgaattcaaaaagattgaaattatggattttttacaatctaaaaaattagtttttactggaggcatcaaaaattgcttgcagctcccactcaatgctaataatgaacaaatcaaaccttatacggaaattaagagaggttattaa

SEQ ID NO: 380985 - DNA, 360 bp, Salmonella enterica
atgtatgaagacggtaaggatgaaagggccgtcacactttcgcataagaaaatctcaaatggggtactaacttcaccaaacgagatattatgtgacaaatcagaaattccaaccggattatcctcaccttttatcgtttctgttgataaaactcgctttttggtagatgtgtacgacggtgaaattactgacggtttttggttagtagagatagacggacttgttagcgttagagaaatttatcgctttccaggagggcgagtccggattgaaaatggaaaagcatcttttgaatgcaaggccacagatgtaaaagtacttgggaaggtcgttagtaaaacggaacttttgaatgcgtag

SEQ ID NO: 380986 - DNA, 237 bp, Salmonella enterica
atgaatcgtaatttttcaatgcgccccagcatcaaccttgtggtatctgagccattcatcacactggatgagttctgtcgccgtactggttacaagcctagttatgcccgtcaaatgatccgggaaaaccgtctgcccatcaggaaaaaagccggagttaaaagccttatcgaaatcaacatgttcgcgttgacgatggaagcggcccaaggctgcgaagtcgcaatgcaagcctga

SEQ ID NO: 380987 - DNA, 585 bp, Salmonella enterica
atgagcattattaataagacaattagccaacgtgcagcgcaatggcttgatgaaggatatttattcattgataccgaaaccaccgggctgggagatgatgcggaaatagtagaaatatgcattattgatagccatggatttattatgcttaatacccttattaagccaactaagcctattcctgatgaagcgatagccattcatgggattactaatgaaatggtggcttttgctcctgcctggactgatatatgtggggctgtggaggaactatttcggcggtttgggtttgttatctataacgccgattatgatatacggctaattaagcagacttacgcgataaatgggcgcggctcagatgcggcaccgtggatgctcgcctttaattctgtgtgcgctatgaaactatatgcagaatatcgtggtgaaccggggaaatatcacggttataagtggcataagttagttgatgccgccgcgcatgaaggtgttgtggtagaagggcaggcacaccgtgctttagctgattgcaaaatgacattaggtgtcatcaaagctttagcgcaaggcggtgccgtatga

SEQ ID NO: 380988 - DNA, 186 bp, Salmonella enterica
atgactatgagccgcataaccgatgaaagtttgaatcaacttatagctattgagtcactggcaagcgacaacgcaagttatgacaattgtcaggccgattctatttatcactcagatgtagtttcagcattagaggaactgcaacagcgtcgcaaagctgatacccagcaaggcggtgccgtatga

SEQ ID NO: 380989 - DNA, 240 bp, Salmonella enterica
atgagcgatgctgttaatcaattaacccaaatgctaagcgcggatggtgtccgctatcagcaactccctgactgtatcaccgatgcgaagttaaaaaagcgcgacggttatacggaaattacattcggaacaaaatgcgctgatgtaattgatgcagttgatggtcgcaatgttataggaatcattctgtgggttcctcgcaatgtctatgactcggtattgaagggaggtgctaaatga

SEQ ID NO: 380990 - DNA, 1023 bp, Salmonella enterica
atgactgttaaggtgatagaccttttttgtggcgctggcggattgactcatggcttgcaattggctggtttagatgtcgttgctggtattgatcttgagggggaatgtcgctttccttatgagagaaacaataaagcaaaattcattgaacaagacatagccaaagtgacaaaagaggtgctccttgagttgtatggtgatgcttccatcaaagttatggcgggatgcgctccttgccaacctttttcaaggtatacgcaaggtaaggataaggctcaggataaaaaatggcctcttctttatgaatttgagcgtttaatccgtgaagtctctccagagattgtgactatggaaaatgttccagatgtcacaaagcataaagtttatgatgatttttataactcattgataaaattaggttataacgtttgggcttcacgagttgattgtgttgaatatggtattcctcaaaatcgtgtgcgtcatgtcttactggcttcaaaattggggaatattgagttagtaaagcgtcaagacgtccagtttaaaacagttaaggacgttattggtgatttgcctccattgcaggatggcgaagctgacaagtcggatattttgcatcgggcaagcaagttaaatccgatcaacaaacagcgtatcatccattctgttccaggcggaacctggaaggactggcctgaagagcttatagctgcttgccatctgaaatctagtggtaaaggctatgctagcgtatacgggcgtatgtcatgggataagcctagcccaactattacaaccctttgttatggttttgggaatgggcgtttcggtcatccggagcagaatagggctatatctttgcgtgaagcggccttattacaaactttccctatggactatgcgttcgtggaggatgagtctaaattcattatgaggagtattggaaaaatgattggcaatgccgtgcctgtcgagttaggacgagttatcggtcaatctattaagcaacacttaatttaa

SEQ ID NO: 380991 - DNA, 684 bp, Salmonella enterica
atggacagttttcgtgaagattttgagattaggtcaggagaaatcttagcctatctagatcttttgagattcattgagcatgcaggcgctgaactgttatcctctgacgatcccgaaaataagttcgctattacagctcaatcacgtaagaccttaaaaggaacagtatatatactgctgtataatctaattgaatcaactatgagggaggctatttgctttattcatgagactatatatgacaggaatacacagtttgatcaactcaagaaaaacctaaaatgtgaaatcttaaaaagattgaaaaacgattcagttagcgttgaaaatcttattaatggtctcaaagaaaaagggatagcttgtggcatttcctatagtacttttaataagaagaaactgttttcaggtaatatagaccgagaggaaattaaagaaaaatcacaaatatatggtttttcaacacagtcagactacgcgcataccaaacatggtgaaaaattagcaacagtcaaacaacatcgtaatgatttggctcatggaaacgtttctttcgctgaactgggtaaaaacgtttcatatcaagacttagaaaatgtttcgctagaagttattgcatacctagactctatagcaaataacattgaacattacattaattgtaatggttaccttgcttcttaa

SEQ ID NO: 380992 - DNA, 1143 bp, Salmonella enterica
atggacattcttgagttgaaagcacaacttaaatccgaagaagatcccaagaagagagcggacctacttgctcagttggaagtttttaaacaaaatgccgaagagcaggttcgcgcagagcaaaaagatgtagattttgaaactaaagaatttaccgtcgagcttttggtcaacaagtatcacagtggtttggaagacgacactaatgaattgtttgttcccgattatcaaagggattttgtttggagtgaaaaaaggcagtctcgcttaattgagtctttgatactaggattcccaatcccatatatttttacagcagatgttctttctgaagatccagagttggatggccgtatagagatagttgacggttcacaacgtgtaagaacaatacatgcattcattcataataaattgaccctgcaagatttaaaatcattaagctccctaaatggatttaattttcaagacttacctttatcaagacaacgtcgctttatgagaattccagtacgagtaattgaattaagttcaaaatgtaatgaagaaactcgtcgagatctgtttgagagaataaactcaggaagtgacattctcaaggacatggaagtgcgtaaaggttccgaacttggttcaactactctatatacgcaagtaataaaaccgtgttcggccataccacagtttaaggagctggctccattatcagaagctaaagagaaacgtgatgaacgtcttgagtttacgttacgattctttgcttatttagataactaccaaaaatttgaccactcagttcgtgactttttgaacgattatatgagcgcgaatggaaatatcgatgctgctaaacaagaattgatgaaaacagaatttagcaatatgttgaattttgtcgaaaaatatttccctgctggctttagaaaaacagttacagcaaaatcaacacctcgcgttcgatttgaatcgattgctgttggtacagctttagcacttcgtttagacccgcatttagcgccaaaaaaccttgattggattagctctgataaattcaaagaattaacaacttcagatggtgcaaatagtcgcgttaaagtaattgagcgaatcgaatacgttagagatcaacttttagagggataa

SEQ ID NO: 380993 - DNA, 708 bp, Salmonella enterica
atgaaaccaactcttatcaacctgttttcagatgcctgctttagaaccggtgccgctccgtttgactatcaattttgctggaatgcggacgctcgcggcacacgcagggtgctgaccaaaatgcgccagtgtggcgctgactggtttttctcacttgaggctctgtctgatgcgttagcaaccgggcgaaaccaaattttcctagggtgcggtgacggttattcgcaggttaacaggggctacatcaatgcgctgctgatgaaagccgagccacaactgcaaatccatgtattgcgtatgacagactactacctggaactgaccaacggcgcattaatctactttatcgacccggacagccacagcgctgcgctccatggaaacgtctacgtgtcagagtatgcctgggcagactcgcccaaaaatgttattgcgcttgccaaaagtctttcaatgcacgcccgctaccacgcaacctactacaccaccccaagccacaacccggaagcatggcgggaataccaaaagctgctcgccaccaacaatacagccaaccttatttttaccgcagaggacgcagcagcatcagacgcacctctgtttgatgacgactgcctggagcaaatgaaaaaagagctgtcagcagaggactggaaaatgatgtttatgtgcgaatggccacaggctgacaaggagccggaagcatga

SEQ ID NO: 380994 - DNA, 1008 bp, Salmonella enterica
atgacaattaagaaactcgatgatggtcgttatgaagtggacatcagacctgcagggcgcaacggaaagcgcatccgcaggaaatttgacaagaaaagtgaggctgtagcttttgagaaacacactcaatacaaccatcacgataaagaatggctggctaaaccgacagataagcggcatctgtctgaattaacaaaagtctggtgggatctgaaaggtaagcatgaagaacacggaaaatccaatttgggtaagattgaaatctttacccggatcactgatgacccttgcgcattccagataaccaaagcgcttattagccagtacagcatgactcgcagagggcaaggcataaaaccggccagtatcaatcgcgaccttacctgcctaagtggcatgtttacagcactaattgatgcggaactgttttttggtgaacaccctttcagagggatgaaaaagctaaaggagcagaaaccagaaacaggctatctgacgcaggaagaaataacattgttgcttgccaatcttgacggggacaacaagaaaatcgcgattctctgtttaagtaccggcgctcgatggggtgaggccgcgaaactgaaagctgagaacgtaatacagaatcgggtgacgttcgttaaaacaaagacgaacaaaccacgtactgtccctatctctgagaaagtagctgtaatgattgcgggtaaggggtatctgttccctgatgcttcatacccgaagttcaggcgaacaatgaaagatgtaaaaccagatctaccggacgggcaagcaactcacgcattgcgtcacagttttgctacccactttatgattaacggcgggagtatcatcaccttgcagagaatactgggacattcacggatagagcagacaatggtctatgcgcactttgccccggagtatcttcaggatgctgtttcactcaatccgctacgtggtggtgttgactcccagagtgtccacactgtgtccacagtagggtag

SEQ ID NO: 380995 - DNA, 300 bp, Salmonella enterica
atgtcaaacgccttaaacgagaaaattgtactcatcagaaagtctgagtatctcagcagacagcaactagctgatttaacaggcattccctatggcactttaagttattacgaaagtggccgttctacaccacccacggacgtaatgatgaggattttgcaaatgccccagttcagcaaatacacgttgtggtttatgaccgatcaggttgctcccgaagccggtcagatagcaccggccctcgcacactttgggcaagatgtaacaacatcgcagcactcagaccaaaagattggttaa

SEQ ID NO: 380996 - DNA, 276 bp, Salmonella enterica
atggttaaacagatcgcgttaagcacagatgccgtcccatatcaggagttcgcaaaactcattggtaaaacaccggcagcggtgaaggggatgattgaaaaaggaaagctacccgtagttgagatgaccgatccgcaatcaacttctgggcgggcaggtgagtactgggtctacctcccagcctggaacaacggcatgaaaatggcttatgagagccgcccgaaggaaattagggaagggtggttaatgtggttgggtctgggcaatccatcataa

SEQ ID NO: 380997 - DNA, 348 bp, Salmonella enterica
atggacacggcaaaaatctttaaactctcagatagtcatacagcgttatcaaatgtatttatacggattaaggataaaagaacgccttgcggtaattactttttccgtttggataagttggactgcgtttcgttagcagataattcagggctaacaccgttaattgaggttgctggtgggtatgttgaacccagcgtcacttatgagcagttcatgagttttctttttcaggtatttgatgacgtatcaaaaggtgataacagcatcagagtttatgagttgatggttgatgaagaaaccgtgcgagatgtaccacctcgcacaagaaaaacgataacaccacagtga

SEQ ID NO: 380998 - DNA, 480 bp, Salmonella enterica
atgaaattcaatgtgttttttaaaaaaaaccacggatcacactgggtgctttccgatagttcccccctctttgaaagtccactatttgaaacaagacctaaagccattgatgaccttgagaactttgtaggccttatggaatcgccaatctttattaaggctggtgacgatattaattctggcgatacagaaaactgtccatctgtagttatttctttaaaacagcatgaatcgctatggggctgggagttatttatctcaaaaaatggacaactgtctaaagttaccgaaagttcaggtaatggctttgactcattagaattagcaaagcaaagtgcccagttttttcttaatgccattatcgacgctcctattctggatcaagccgatgtcgctatccccggcatgcacttctcaaaatctttcgaggaaacgcaccacattggtgacactcacccatccagtaaatggttcaaataa

SEQ ID NO: 380999 - DNA, 1050 bp, Salmonella enterica
atgattgatatagaagaagttattactaagaaaagaaattcattaaaggctgatcgtttagatatgtcttttggtgaattgatgaatatgtttgaagacggagatttattcatcactcctgaatatcaaagggcatttcgttggtctaactttcaacaaacaagatttattgagtctgttttattggggatacccattcctccgatttttgtagcagaagatgataagggaaaatgggaggttgttgatggcttacagcgtatatcaacaattttttcattttttggtgttcttacgaatctcccagaaaaaaacaacctgaaactatgcaaaggagaaatggttgctgagttagacaatataactattgacgctcttccaatcagattaaaaacaaccattaaaagagcagtttgtagagttgagattgttcgctgggatagtaacgaagatattagatatgagctatttaatcgactgaatacaggggctagcccgttatctgatcaagagataagaaattgtatttttagatcataccctgttgatttaaataaaatattgcgtgaaattgcagttatgccaaatttcattgagttgattaatccttcagcagctaaaaaagaagaaatgtttttagaagagttagtgcttcgctattttgcttttaaacattttgatggtgattttaatacaactgttcctaatttcctttcagacttcatgcgttccgtgtcgaaaggtgacattgcttttgatttagatggtgaaaaaaaatcatttgttgagttaattgatttcttaatcgctcatggtggtaaggagttatttaggcctaatggaccttttgccttacatctttttgattctatatcatacgctttgccaaaagtattcaatactgtcattggtaatgagcaaaaaattacagaagctataaatacattgcttactgacgaaaaatatcaaagtattagcgtgctcacgttttcaactgcacgtactcgtaatcggatggatcgagccttagagattttcaaaagtgcatag

SEQ ID NO: 381000 - DNA, 621 bp, Salmonella enterica
gtgcatagtttagtgactgaaatttatgaaacaaactcctggcgagatggggagtttgctaaatttagagtcaacccccatcaagtagaccctgttttatgggggcggatgtgtgtaccgatgatttatgcaaactgggagggttttgtagttagttcgttaaaaatgcttttaaagcatttaaataaattagaactaaccccattacaaatacctactagattagttgtagttggattaggtgatacctatagaagtttaagtgggaagcaatcatttgaacaacgatgtgagttcactgataaatttaatgagttattaaaaaataccattcaatttaagacgaaaattgaaactaaatcgaatttgcatagtggtgtattgaaagaactatgtcaaatgtttgcttttgattttgaaaagtttagtgatgtaactgttactctagaccgtcttgttcaagtgagaaactgtattgcacatggagaaaactcgattttaccaactcaggaaaatattgagtcatacatcaatgcagtgaaagcagcaattgatatcatgttagaagaaattgacttatttttaacgcaagaaagttatttatataaacagcaagcctaa

SEQ ID NO: 381001 - DNA, 2076 bp, Salmonella enterica
atgtcacaggccgttattacaaaagtattttcagaatggaaagcacagcaggcaattaataatcagcccgttacgctggatgaatttattttcgcgtatattccggggctggatactgataagccgattgataataccgagacaatacccgcagcagataaaattgttgatcgcctgccggtaagtaaaaccggcgttgtgaatgaaaattctgtcgtttattccgtcacgctgggggcggatgtgggagattatgatttcaactggatcggactggcaaataaagccaccggtacactggcgatgattattcacgccccgacccagcgcaaaatcaaaaatgcgaacggccagcagggaaacgttctggtccgttccatgctgatggaatacagcggagccagggaagcaacggaaatttccatcccggcagaaacatggcagattgattttactgcccgtctggcggcaatggatgaacgccagcgccgcgaaaatatcgatctttatggtgcggcggcattttttgattcgggctatctggtcgcaaagtccggtaatcagttctttgtcacaaaggggacgggatacgtcgccgggttacgcgctgaattgcccgcagacctgaacgtcaacgcatccgcgaagccgacaaaggtctggcttgatgtcagctggaccgggacgttaacgagcgaatgggcagtacagagcaaaatcacccttgctgcagatcttgccgattatgtgctgggcggtgtgcagcattatgtctttgcggtggcgagtattgatgctgccggaaatatcacagacctgcgcccgaaaggcacgcttaacgaccaggcggctagcgatgcgctgagtgagcatgaaaaatcgcgcaatcaccctgatgcatcaaccgatgaaaaaggatttgtgcagttaagcagtgcaatagacagcgattccgaaaagctggccgccacgccaaaggcagtaaaagcggctaatgacaacgcagataagcgactggttaaagaccagaacggcgatgacattccggacaaaaaacaatttgcaagaaacatcggcgctgtgacttcaactacaatttcacttggcgagtcaggctggttcaaaatcgccacggttgtaatgccgcagtccacgtcaacagcggtaattaatctttgcggaagttcggggtataacgttggatcatttgagcaaggggcaatcagtgaactgatactgcgtgccggtaatggttcacctgttggaataaccgccacattgtggaggcgctcgcctgccggtattcaggagtgtgcctggattaacacatcaggagacacttacgatatttatattaatatcggtcagtatgcgtactggttaattgcgcaatatgattacacccgtaatgcaaatgtcacgctgtacagtacacctgaatattcagaaacaaagcctgccagctctacgaacggtcagacatatacgctgtataacagcctgatgccacctccggattcgcatccagtaggggcggcgatagcttggccgtctgatgctactccggcaggttatgccctgatgcaggggcagtccttcgataaatctgcttacccgttgctggctatagcgtatccgtccggcgatatcccggatatgcggggctggacaatcaaggggacgcccgtcctcggtcgcacggtactgtctcgggagctggacggcaacaaatcgcacagtcacaccgcgcgggcgcaggataccgacttagggacaaaaactacctcatcctttgattacggcacgaagagttctaatacaacaggcggtcataaccattcggcgggcggcacatacggtggtgattcaatcggtggaaaaattcgcgtccagcgtgatggcaatgaccagttaacaagctggaatggcgatcacgcccataccacatggattggcccgcataaccacactgtatatatcggcccacacggacacgtcgttattgtggacgcagacggtaatgcggaaacaacggttaagaacattgcttttaattatatagtgaggcttgcataa

SEQ ID NO: 381002 - DNA, 966 bp, Salmonella enterica
atgaagctatacatcatcgggaatgggtttgatctgcatcacgaacttgacacgagctatttctcatttggggattatcttcggaagaaagaccaagacatttacgatcacttggttgattttatgggatttactgacttaccccctaaactttccgcagttgataagtcaaaacattttctttggtctgatttcgaaaacagcttagcgggtctggatacagagtcagtgctcgaagagttttgctatcttttaccccaaattagcagccctgattttcgtgacagggactggggctcattaagcattgaaatggaacgtatactaaaaattttaaccgaagggcttttaacacaattcaagtcatttatattgcaggttaactaccccgaacttaatttaaaaaaaagattgcgtatcgattctgattcgatctttatcagttttaattatactgagactcttcagaaatattatggtattgatgatagacaaattttatatatccatggaaaagcatcatcagatgaacagttgattttaggtcatggtattgaccctatcaactttgaagaaaaggaagcagtcccgcccgaaaatgcaaccgatgaagaacttgaagagtggcgtcagtgtatggctgataattacgatcactcttatgaaatgggaaagcagactattaataaatacttcacttgttcttttaagaatactgaaaaagtcattgctgacagcgctaattttttaaaaaatctcattaacgtagacgaaatcatcatcatcggccattcgttatcatctgtagatgttccctacttttcttttatacatagcattgttagtgaaaatacggaatggatagccacctattatcaggaaactgagcgtgaagcacatcatacaacattatgtgagattggcattaaatctcccaaactgatttcagtaagtaaacttctataa

SEQ ID NO: 381003 - DNA, 1074 bp, Salmonella enterica; identical to SEQ ID NO: 377355

SEQ ID NO: 381004 - DNA, 381 bp, Salmonella enterica
gtgagctggcaggatcttaaacaggcgccgctggtcttacaggattatgcttccggtagccgaccgctgattgatgcggcgcttgcccattttgctattgaggcggatatcgtgcaggagattggccatcccgccacgctctttccaatggtggaagcgggaatcggcatcagcgtactgcctgcgctggcgttaccgctcccgcaggacagccacttgctggttaaacggctgacgcccgtagttgaaagacagctcatgctggcgcggcgaaaaaaccgatcgctctccacggcggcgcaggcattatgggatgtagtacgcacccaggccagcgaattaaccgcagcgagggcgaaagatccgctgtatcagatatag

SEQ ID NO: 381005 - DNA, 324 bp, Salmonella enterica; identical to SEQ ID NO: 377637

SEQ ID NO: 381006 - DNA, 339 bp, Salmonella enterica
atgagaatatgctctgtgagtaaaattgttatttttgtaatactattattcatatggtttgttttttcacctgtagctttttttggcaagtttaactatatttatgaaaaagtaagccaagatggtcaatttaaaatagtcgcttacgacatattacccactacaccctatgcggcgtatcaaaacttcatatgtaatgacatatttcttgttttatatgataaaaatggaaaatatttagggcaaagttctccatttcatttttcagaatttgatggtgtatttgctgatgctgtttttttccaggggatattcttggagataactctttttcaataa

SEQ ID NO: 381007 - DNA, 687 bp, Salmonella enterica; identical to SEQ ID NO: 377347

SEQ ID NO: 381008 - DNA, 156 bp, Salmonella enterica
atgctgatggctatctcatcgcctgtggttgttgctgcggatgttgatgcctgtgggctgtcactcgtgacggttgagggcggcgacggacgtgatgtgcctctggatggcatctcactgtctgtcggtgccagatactttcttgcgcttatataa

SEQ ID NO: 381009 - DNA, 132 bp, Salmonella enterica
atgcagatggtttcactggtaccgagtattcgctctgcggtgaagttagcctgccgtcccggagatgccagcgccttcagtcttaaaaagtgcttcagcctgtccggtggggacattccttcatccggctga

SEQ ID NO: 381010 - DNA, 969 bp, Salmonella enterica; identical to SEQ ID NO: 377604

SEQ ID NO: 381011 - DNA, 135 bp, Salmonella enterica; identical to SEQ ID NO: 377603

SEQ ID NO: 381012 - DNA, 147 bp, Salmonella enterica
atgtgtgtagaagttataaataaatgtttggggggggctgtaacaaacaataacgctgttaatacttgtcagaaaaaacatataaaccaagccgttgagtggaatcctgaaaatatcgatacgtttcgctattcctggcatcaatga

SEQ ID NO: 381013 - DNA, 1209 bp, Salmonella enterica
atgccagtcctgctggataccatccctgaaaaggcggcgaaggttccacgacctgatacccgccgctggctgctgttcctggcatttgtcatgtcaggagggattgtgttaacgatctggaattggacgacagaacgcactggctttattttctggtttactgcgctggggttgcctttctgtctttggggactgcttttctccctgcgccggtttgcatacaaagcagagcaggtgggggccgagtcccggaatgtggagcgcgaagcgcttattgatcgcgaaacttgtcggggtcagcgctgtgcctggatactcgatacatgcgttcaacacttttcaggaaatagccccggtgcactggtgaaagccgttagtcgtaccgttccagctactgaggcctcaacgccacgtggttccaaatccgctatcaggtatgcagccttagccagttttcagacagatctggatacagagctcatctccgccacgtcaacactcgtcgcccatgtacaaaaaattaccgacaccctgccgaaggatattccctgcagcctgatgctggactgtgatgacgatatccgacccggagtggaggagtacttcagaaatgaactcactgccagaaccgggcgggtcttcaggctcctttcgggcaaaggtctggcggcttttgatgcctggctcgatcagcgctgggacactcctggcattcttacaggcgtgacgttttcactgccagcgcagcctcatgaaggcgacgccgacgccattacccttctggtgctcagcaaccgtaaggttgttggttatcctcatgcagtatgtctccaccgtcctgaaaggggccaggaaaaccgtcttgtaaaaacgctgcacagggcacttttatgggccgcaacagcccctgaagcactaaaaacagcctggtatacagggccaatcctttccagcggaagtggatggaacatggcttgtgaagataacggggtgacattcagcttgtcaaaagacaatcatggtattgatcccgctctgggatatgccgaacgcgccgccccctggcttgctattattcttgcctctgccgcatgtagcgataatggcccgcaggttatcgccgcacaacctgccgctgacaaagacgacgtctgggtcaccgtcatcaccaaagaagaagtttgcaagggaacgtccaggaatgtctaa

SEQ ID NO: 381014 - DNA, 264 bp, Salmonella enterica
atgttgcaaattattcgaaaaggcgacaaaaccactcatggtggttcagtaatatccggttctgacaccatgatatttggggaaattggcgtggcgcgtaaaggcgataaagtctcctgcccgatacctggacatggtccgacaactatcatcgaaggtaaccctgattatcttgataacgggctcccggttgcctttcacggtcataaatgtggttgtggctgcacattgatcagttcttttgatcctgcaaaggttgcctga

SEQ ID NO: 381015 - DNA, 369 bp, Salmonella enterica
gtgaaaaaatataccgataaagcttattttagtgtcgtggatatgaccaatggttgcattattaatgcctgggatggtgaggcatgtggttatagctgggtgagtaataaagatgtattagacagttcaggaggtgtaaatgcagataaatttgacttccagtcaatgcgtccgatgataaataaaacgatagatgatttttctggaatggatgtaagagaggtagcaaacatgcttcggtatgactcgctatctaaggaaaatataaacacatatcaaagaatggcaaaggaaaataaaaaagcgaaaggaattgtatcagaatctgtttctggatatctgagcggaattaccgaaaaaccaccgtaa

SEQ ID NO: 381016 - DNA, 957 bp, Salmonella enterica
atgaaacaatttgatagtgtgtggtttctgattttatttatatgctctttttatgtatatgcaaatgatgacttaggtgttattgactgttctttaagggaaaacacgtcttgcgatgtttttttaaaaatggaacggaatgttaatgaagtatcttacaaagttgaattggtagatactaaaaatgaaaaaatattcccttattttgatatgaacgaaacaacagaaaatgttactttgcaaaagtatggagagcaatacgttttttcgaaatattatcttgatagttccagggctatggagtttattgcgttcaagtatgatgacaaagccctttcacctgtaaggtattattatattgagagctcaatttatttcagtaacaatgtaaagacatggtctggcaaacaatgcgatacatcgacagggataattccagaaaaaaaagatggattattattacaggttgcttcggagttgtgtattaataaatttaaattagcgtataccccaaataaatatgtggggaatgatatcttatttaatttgtcggaaattactaatggcgttgaaaaaaaacaactccctgtaattgctctggatagtaaagatgctgatgctataaatttgaatgatatcggatgtttaagtaactgtgatacagacattgattcagttaattacatagggaagctgaacggaaaattcagaatagacatgcacctcaaatataataatgatagcacttctggtttttatttttatgagaaagtgaaaagaaaaataaatataaccggtcgtcgaaatggtatgagattgacgctgacagcctctgttcctgagggaatagagacgtttgatggtctgttagaaaatgggcagtttaaagggacatggtcaagtgccgcagggaataaaaaatatcccttcaccttttatatgaaacttatccagtaa

SEQ ID NO: 381017 - DNA, 2703 bp, Salmonella enterica
atgacagcaaagtcacccaaaatcagttatcccgtaccatcaaacaaaaatggccatgccttttccactgtggaagagttgttatcgacggtcggaggggaaagctcaggactgtatctggtgggaagtcagggaatgtggcatggcggtatccatattactgatgccaccatcccctggtgtgcacttagcacagatagtgaggccgaaagagaacattgtcgtgagctttataaaggagaacaatttattcgttgtatggcggatggtgagatagttgcctggcgcatttgtgaggattacgacaaatcagcaatcaagtggcgaggtgaagagctgttcttttcgacctcctttgtgctggtgaaacattatatccagccgggtgatacaacagagagcggactgacatttttcacgctttatatgaatctggcaccttatgttgcttataaacagcagggaaatcagcttgacagaaaagtggcaggtgtccagcactattacttcagtgtggatgatatgcaggcaggtcgggttgctggaaaactggataaagacacgcctgtcacgctgagtggcaatattgtgacccgtagtaatgaccggcgtcagtttaccgaagtgaccattaccagcgagaggaagaatgcagagggagacatgcttgcagccggaactaaagtctggacggtatcagaccaggggaatctgaaaacaacagaatcggtgcctattccgtcctggtgggcaaaatgtacaccggcttatactagccagtcagaaggcgtggtgaattgtacctcgcgtacggactgggcgtactatctgagcagtgaggatgtgctgcaatataaaaatgcaggcagactggtggcagatttccctctctcttatgaatctggtaatgccgcacagcaggtcacccgcccaggtaagaatcctggtgatgcagcaagaacattcagtttggttaccctgggtcgggataaggatttgatgaagaagggggagcgggtgtgggtggtgtcagacagtgacagcctgatgccggttgcaccggcagtatccggtagtgaggccatattgaatgatctgtatgtgcctccgacgcctgttcctgtcagtgccggagacagtctcgggcatatgggtttttatcagctaccggaagaaaacggcaaacgctcgcgctaccaggtacatatagaatgcctgagcatggatgatatggagaagttcatcaccaatcccgggcaggcaggagaggatgcgccggtttatctgacctggaaaactgatgtaccgttgtttgaaaagggtgagcggaaaatggttgtgggcagccgtaaaacaaaggctccggggatcctgacgcttgcaaacgtgcttggcactgatgttgaggggaacacgctgggtaataacaaggatgcggcatactatcagatacgcccggaaggtggctggctggccgctgccagtgtacagaaagtgtcgcagtatgcgcttggtgagctcggctttgtcacgctgaataaggcaccggagagttttgacctgattgatggtataaaacaaccgaataacgtggtgaagggtattctggagcagttgtataaagcagcacaggaggaaagccgtaccactcacgtgctgaacaagtacaactacaaacgcctgctggcgttgatagacagtaaccaggacgggcattactcggagcaggagtatcttcaggcggttcataatgtatcctaccgcgaccatctgtaccgtgtgattgcgaagcacgctagtgaatggtactacggcaaggatgctccgctgtggaagacatacctagatacgttaaccacggatgcgccgttgtggaaaacgtatctggaagagtttctggagaatatgacgtggatgaaggcggtgtcggaaaagggcgtggcagtggggccggaggtctggcatatgcatcctgtggtgtttttggaggcaataaacccttcatctaaatggtttgatatcgaaaaatttattcaaaagtacaaagaaaaacattcagtagtttttgggttttatgatcgtggaaaaaaaataaccatccctgcattgactcaggattctgaagagtcattgcgaacgcttttaattgaaatgaagaaacagtattataattattttgacgagtttaatgaaaaatttatttcctatatgcttgctacaataagaatagagtcttatgcctacaggcaaaaattgttctttaaaccaattagtgaggatatttcatatgataaggcggaagtagattatggctcagggccaacggcatctaaccgacaaagagctatactgaaccacaacaccaatattggtgatggctataaatatcgcggacgtggtttagttcagttaacatggaaaatttcctatgagaatttcaagtctataacaggtatagatatagttgctagtccggatctttgccttgaaatgagcactgctgtttcgattatgatgaaagggatgaaagatggtggttttagaactggatattcactagatacttatttgggagaaggtaaacatgattactttaatgcaagattaatcatcaatggttatcgagatggtattcctgataaagctaatgagtttaaagattatgctgagttatttgaggtgatcataaatgaaacaatttga

SEQ ID NO: 381018 - DNA, 2358 bp, Salmonella enterica
atgagcagttccctctccaacaagactaccagcctggtacatcagcttttagggcaatcacgctaccgggttgatgtgcatgaatgcgaccatttactggatgtgttacgttacagcgcggttgagtccctcagccagccctggcggtatgacgtggcggtcacctgctcctctgcggatattgcctgcgacacgctactgctgaaacccgcgtcattcaccttccagaccccgatgtttgacgggacgccggcattaccggtccggacggtatttggtgtagtggagtcgtttcgccgcgtgtccacctcgaatgatgatacccgttacgcactgacgatcgctccccgaatcgcccttctgggctatacgaaagggagcgggatctacctcaatcagtcagtcactgaagtggttgaacaggtactgcgtaaacacggtctggaagggcctgattttgcgttccggctctcccgcgaatacccctcccgggagctcatcacccagtggcgggaaactgaccttgagtttatccagcgcctgctggcggaggtgggcatttactggcgctatgaaatggacagccgccctgaacaggacgtggtgatattccaggacagccagcagcagtatgaatttggcgtcacgctgccattacgtaaccaggccgggatgagtgacagcggtcaggagagtatctgggatattcagaccgcatacaacgtggtgagcgggagtgtggccacccgggactacaattaccgtgaagcgctgacgcctcaggacagcgctgaaagccttcccggtaaggaagggatcaccaccggagaaacgtaccattatgctgaacccttcctgacagcaggtgacgctgaaagcgcggagaccggggcatacttcgcccgtctgcgccacgaacgcattctgaacgcgcaataccacgtcagcggacactcctccagccctcttctggccccgggccaggtactggaaacggacggaacgttacctgatgccgtgaaagaaggcatcgtcatcaccacggtacgcaccagcggttcacgcaaaagtagctttactctgaagtttgaaggcatcccctatagcgaaaccgtctgttatcgtccggcgttgctcagtcgtccggtgatatccggatcgctgcctgcccgggtggaaagcacgcagaaaggcgacatctattcctggctcgacccggagggacgctaccgggtgaaactggactttgaccgcagcagtcctgaacagggttatgcctatttgtggctgcggctggcgacaccgtatgccggagatacctgtggattccactcgccgcttctcgacggaactgaagtggccgttgcttttgacggcggagatccggatcgtccctacatcgcttatgccctgcatgactcagaacatccggaccctgtcaccagtgacaatcacacgcggaacgtgtggcgcacgccggcgaacaataaactgcggatggaggataagcgccaggaagagcatatcaagctcgcgacggaatatggcaaaacgcagctgaacatggggcatctggtcaacggccagcgtgaaaaacgcggggccggttttgaactgcgtactgacgagtttggcgcagtacgtgcggcaaaagggctgttcctgacggcggatgcccaggccaaagcgcagggcccggtgctggaaatggcccctgcgcttaaccagatgaaccaggccaacagccagatgcaggcgctgaacagcgccgcggaagccgccggagccctggtctgcgacatcaatacccggatgagtctggtgaccgacaaaatcagggatctccagtctgcggtgctgctggggagtgccccgcagggggtggcattgacctcaggtgaacaccttcagctcagcagcacccacaataccatgatcaatgccggtcagcatcttgatatcggggcaatgaaaaatctgtccgtatcggtagaaaaagccctggggatgtttgtgcataaagaaggggcgaagctgattgccagccagggagacatcgacattcaggctcagcacaacacaatggccctgttttctgaaaagcagctgacggtgaccagcagtgaagacgaaattattatcagtaccccagaaacgctgacgctgaacggtggcgggtcttacctgcggctgagtaagaacggcattgaacatggttccgaggggatgatggtgatgaaagtagcgagttatctggtgcctggaagtggtagcagtctgccactggaaacaccggattttaaaacgacggacgtgaagatcataacaaaaaattccgccaaatggacaagtgaataa

SEQ ID NO: 381019 - DNA, 879 bp, Salmonella enterica
atggaactgcgccatattcgctattttctcgccgtcgctgaagagcggcatttcacgcgggctgcgacaaaattaggcataggtcagccgccgctaagccaacagattaaggatctggaaagagagctgggagcgcagctattccgaagagtgcctcatggcgcggaattaaccgaggctggaaaagcattttatgatgttgttaaagggatgccagctaccgcgacaagagccgcgctggcggcgcagcgtgttgccaggggggagtcgggcgtgttaagggtgggttttactgcctctgcggcatttaacagtgtggtccccggcgcaatccgtactttcaagcgggcttatcctgacgttcgtttacagcttgaggaaggaaatacaacccaactggctgatgaattgaatgaaggatcgctggatgttgcctttctgagacccggttttacaggcaatgaacggttccagctcaggttactgtctgaagagccgatggttattgtgctggcagaaacgcatccagcagcggcgtgtaaacagattgcactctcgactctcaaagatgagttttttttactcttcccacgtgaaatcggcctgtcgctttatgacgcagtgatcgaggcctgcggtaaggcgggctttgaaccgaaaattggtcaacttgtgccgcaaatttcgtcagtcattaaccttgtgtcggcagagatgggcgtatcgatggttccagattcaatgagacaggttaaggtcaagggagtagtataccgccccgttgcagaccagatgcccgtcgcaaagctggctctggcataccggcgcggcgatacatcgccaacgctgagaaacttcatcctgaaagtcactggctga

SEQ ID NO: 381020 - DNA, 738 bp, Salmonella enterica
atggtgaataaattacgtatcgtacgcatcgtgagcggcattcttatttcaggggtatcctgcatggctcttgccgatgacagtggtgtcagtcttggtgcgacgcgggtgatttacccctttgacagtaaaggggtgacgttgtcagttgataataaggccggaaatccatttctgattaaatcagttgtactggatgaaagtactaaaaaagccgcgccttttgttgtcacgcctcccctgttcaggcttgatggcgggaaacgtaacgccataaaaatcacacgtaccggcggggattacccggctgaccgggagtcccttaactggctttgcgtgcagtccattccgccggagcctgacgcagcatgggctgaaggcaaaaaagagggcggcggggctaaggcttccgtgagtgttcagttgtcgctgaacagttgtatcaaactacttgttcgccctgatgccgtgcatggcaatccggtggatgtggcagataaagtgtcatggacaataaaaggaaaggacatcacagccagtaacccgacacccttttatatgaacgtgagcagggctactgtaaacgggagaaagcttaatatggaaagaagctatatccccccgttttctgatgaaaaatattcattgccggaaggggttatggcaaaagccacgattcagtggacggtggtgggtgattatggtgagcaaaaagaaaaaacagtcacggtgaactga

SEQ ID NO: 381021 - DNA, 2529 bp, Salmonella enterica
atgcaagggaataaaacgttgaaatattccgtactggctttatttgtcagcgctgcgttattgccgctgtcagcatctgcacgccattacacctttaattcagccctgattgatggtggtaaagggaatgtggatgtgtccctttttaatgaaggtctgcagttacccggcacttataacgtcactgttacggtgaacggtaataccgtggacagcgatgtggctgtaccgtttcgcctgtccggcgaaggaaagcaacgtaccctgcatccctgcctgacggcggaacaactgacccgttacggggtggatatcagcggatacccggcgctgtctgcggacgcgcagtgtgctgacccggaagtcatcccgcagtccacggctgattttgattttaaccgacagcagctttccctggtgtttcctccacaggcgatgctgccggtgctgaagggtatcgcaccggaaacgctgtgggacgacgggatacccgccctgatgctgggctgggatgcgagtacgcagcacagcgagtaccgggggccgtggacttaccgttcagattccagttatgtccgtcttcagcccggccttaacctcggcccgtggcggctgcgtaacgcctccacctggcagaaaaacagcagccagccgggaaaatggcagagtgcctggacgtatgccgaacggggcattaacagcctgaagagccgcctgacgctgggggaaagttacaccaccggtaatgtgtttgacagtgtgccgttccggggcgtgatgctggcttcggacgaaaacatggtgccttccgaccagcgggattttgccccggtggtgaggggtatcgccaggactcaggcacgggtggaagtgaagcagaatggttacacaatggccagcaccaccgtaccggccggtccctttgagattaatgacctgccttcagtgggctcgaacggtgacctgcaggtgacggtactggagagcgatggctcccgtcaggagtttaccgtgccgtataacgttcctgcggtggcgttgcgacggggttatctgaaatacagcgtggcgggtggtcagtaccgttcttcactggacaatgtggagacggccccggtgatgtctgctgaactggcatacggtctgccgtggaaccttaccggttacggcggtgtacagacggcagggcattatcaggcagggtcggcaggagtcggcctcatgctgggtgcatggggagccgtatcggtggatatgacgcaggcccgctcacagcggtatgcgcaggactggcagaacggacagcgctggcgtctgcgttacagtaacacactggatacgggaacctccctgagcatggccagtgaggaatatgccactgagggttacggcgggctgtcagaaacgctggatacctggtgtgacagccacagcgggtgtgaccgctacggctcttacagcagcctgcggcagcggaacagaaccagcgtctatatcagccagccgctgggcgggatgggcacgttaagtctgaacggctcccggcagacgtaccacaacgaccggaccagcaacagctcatggggagccagttacagcacgtcactgtgggggcgggccttcctgagtctgaactggtcgcgtaaccagcggacggacagaaatggtcgtcagtatgatgacagcctgaccagcctgtacctgagcctgccgctgaacggctggtcatcagagaaccctgtgtatgcgacataccagatgaacaaccgggtgcacggggatgcgtctcatgagctgggaatgtacggtgacacgctggaccgccgcctgcactgggatgtgcgtgagcgctaccgtgacggggccggaggcgataaggccagcagcgcattatatctggattaccggggagcttacggcgaaatgaccggtaactacaactacagcagccaccagcaactgtcgggagccggtctgaaaggccagatgctggtcaccggagacggggtgacatcgggtcagccacagggcgataccctggcgctggttgaagcgccgggcgtgtccggcgtaccggtgggaagctggccgggagtacgaacggacttccgggggtacacgacgctgggttacctgtcgccgtaccagaagaacgacatcagtattaacccgtcatcgataccggatgatgcggcggtgtcacagacttcggtgtcggtggtgccgacgaaaggggcggtggtcagggcatccttcagtacgtcggtgggtaaacgcgtgctgctgacgctgatacgtgaagacggaaagccggtgccgtttggttcggtggcgacggtggaagggagtgagaacagtaccggtataaccggagacggtggcgtggtgtatctgacgggtgtcccggaggacgggaaagtgacggttcgctggggccggggacagtcactgcactgtagcgccgggatacagataccggagaagcccggtccggcaggactgtatgtgtcacaggcacagtgtcgttag

SEQ ID NO: 381022 - DNA, 468 bp, Salmonella enterica
atgaaaacacagatagctatcgccgcgcttacaatcggactcgccagcgccgcatacgcaacgccgaacattacaacctctactggcagcctcggggaagcagtcgtcggacactacgacttcgactacacctcgaacgcaccaagcgtcgcaccagtgttcactaccaccgtgactagtgcagtggccggtgacgtaactgaaaacacaccactcgcatacacatcattcattgcgccgacgggtacgcaaagcatctataaactaacggccaactactccggcgctgctgagtcacaattgcaatcctacctaaacaccgctgcaacagtcggaacggccgggaacatctcagcaacaaatgtggcggctggcgaccagctattcatcgtgctcgcaacgtctggaactacacttgcggccgggaccacccatgttacttacaccgtaaacagctacgcatcataa

SEQ ID NO: 381023 - DNA, 363 bp, Salmonella enterica
atgttcttggaaatctacacgctgcttatcgccgttgatgaacttatggcgattatgctgaaacagccgtgtactcaccacgcgaaaatgataatcgaacgtataaccgcgctggtggagtatgttgatcacgtatacacagtgatgtggagacagcaggaacgggacaccctgtcagtatttgatgcacgcttcaccctgcctgttgtttctgaaatatggtgccaggtaaagcaagaactaaacgtaaacagcaggccgctatgtgagttagccggtagtattacggggctaatcaacctggtcagtttttatctttcccgcatcgagggcaataacgatacgaacagggtgctacattga

SEQ ID NO: 381024 - DNA, 489 bp, Salmonella enterica
atgaacaagacaactatcggacttgccgctgtagcactcttaacggcgtcctcgaccgcctccgcgctcaccgggccgatggctacgaaacctgacgggtacaacaccaccggagccaccgtacacgccaccggcaccgtcataaccacaacgcaagacgctccgctgaaggtcaccttcacaccgcagaccctcctttcgacgagcagcgtccgacaagtcgccgctatagtccaagtccaaaacgccaaagctgacacgtggtacgaagtggggaatctaaccgctaccggcgccgacgctggcggctacgagacggagtccaatgccgctgtcgctgtttatcaatcaggaaaggcggctaacacagtgaacaaggggatactatcagatggcactacattttttgtgaatatatatcacagggctatactaccggagcccggggagactacgctagacttgccaataacctcatacactaaatag

SEQ ID NO: 381025 - DNA, 174 bp, Salmonella enterica
atgaaaagacaaaagctccctttcaaataccgccccgttgcattcgtgacggggttttttgtttccggtagcgctcaacgtttccgctttatggcattcctgatcacccattcccatttttcggggcgagagatttcccggactgtttccggctggtggctttccgtatggtag

SEQ ID NO: 381026 - DNA, 405 bp, Salmonella enterica
atgagactaaccagccgtaagaaagagatattgagctacttcgatccagataaccgcgcctgggtaacgagtgagattggcgcaccgccttttgatgtgtccggggttgcctggctgattcatgggctgaaatctcacgataagcttcattgtctggaatcaacgcgccgcacacttgaagcgatggtaaaagacgggctgcttgagaaatctaccagctatgagcgccgtcagaacagaaagcaatcaggcaacggcgacgattacggggtatggtgttacgtgtcccgctatggtttgccagggcaatgtactgtaatgcgtgacgatggggaggacagaaacgggatcgccatcgatggcgaatgtgtgcgactgtctgaagctgaaggggctgcgctgtga

SEQ ID NO: 381027 - DNA, 186 bp, Salmonella enterica
atgaaaccggatgaactggaaaggctgtatagcgtatcggcgcaactgaaaaaagggattgagcatatcaaaacaggacgggttgatgtgggcagaacatgggttgaagaagcagccagatcgttaaatatccttctacgaattgcggaggctgaaattggtaaggagcaatcaggtaatgagtaa

SEQ ID NO: 381028 - DNA, 531 bp, Salmonella enterica
atgagtaaggctgaacataaaaagcgaatcagaaagctgatgatccacgccatcaatgaggcggtaaggtctggcgttattcctttgatgttcagatacagaagaatgacagccgagggatacgcaaatataaccgtatgtggcaggcctacagtaataaactggtgtgataccggacatgatgaattaagggttagtgtctggtgggactatcaacctgaagcgcaacccgggcaaggaaaatataaatcaaaagatcttgccttattgtttcctgatgttaatcgggactgcttgcggttcgtggttggcgcttgtgcaagttgttattttgactattggcacaaaggcatattatcggacagaggcaaagagttttttgctctttatgttcgcgagtctacagccagctatatagacgaactggaagacgtggaacctttcatttattccatatcagagctatcacgaccactgcaaagaataatcaaatcaccaacaggcgggaagcatgggaaatatttcaaatga

SEQ ID NO: 381029 - DNA, 336 bp, Salmonella enterica
atgacaagactagataaaatacaattcttagttcaggatatacaaaatacaagaccgggaaaaagtaagagggataaaataacttcgcttattgagtatgtggaactattaaacgaagatgtaaaaaatatacgcgaaaaccttaaacatccttacctgaatgaaaataaaatcattcatgcattacttgaaattcagatacagacaaggctaatgcaaatcggggaggccaagagctttcacgagctggccgtgtatctctttaatattcgtatgctgatagataacgcgataaatcaaccccgaaccctttacagggtaatactcaatcagtag

SEQ ID NO: 381030 - DNA, 210 bp, Salmonella enterica
atgcttgaacacattaaagatagcctcttactcgcctcacggcaaggagaaaaggctatggagccacaaaagctagcgctactggcgctgatcgttgttagtgcggtgtgcttaggtgcgctgttacttagcaataaaaatctttgtgatgtcagctttcgcagtggcaaaaccgagatagtggctcatatggcctacgaatccaggtaa

SEQ ID NO: 381031 - DNA, 423 bp, Salmonella enterica
gtgttctgtaatcatgttattcccccgttattactgagcgtgttgttgctgtccttgtctgcccgggcgggaatggtggtgtacaccgaccatgcccacccgccatccggggtgaccggtgatacccgcgtggtctggctggatgcgccggaacaattacagcagtcgctgtttggctctctgacgtcagaccccagagaagcagaacgccgggcgcaggcggtgatccactctgccggctggcagcagaaacaggctgaactggctcaggcttaccggggggtgctgcaggcgtggtcgctggggctgcaaaaatatccggccgtggtgtctgacgaccagtacgtggtttatggtactgccgatgtggtggtggccgaaggactgctccacagtcacaggacgcgggagggggggcgatga

SEQ ID NO: 381032 - DNA, 993 bp, Salmonella enterica
atgatacgcctgagtctgtcatcccgtctgaagccggttgcgctggtcctgatgctggtcaccggttctcctgctgtggctggtgcggcagtgaacaccgccaccctgatagccggcagcgcctcaccctcatgtatcagctggcgggtgaagggtatctgctactggctgttctgcacgccctttggctgcacggtgaaaacgtcggtaaaggtggagcactttattccggaagccgtgatttccgtctatcaggataagggagaaaacccctggactgagatgaagacggtcagcagtctgtcgggcggaattgagaacgccgtcagttcaggcctggccgggctaaatgccggaggcggacagtccacagcaaaacggccgcagggcagggagagtctgctgagcacccgcttcaaatatgccgatgccctcggtcatcctgccacctcacttatcggcgggcagataccgggggattcctgcaaaagtgccgccaccccgctggttccctatttcctgagtacgctggacagcctggtctggcgcacgggcctgccggaagccctgtatccggaggcgctgatacccggtaagcgtgaaatcggcagtactgccggcagtaacatgtggggcaatgtttatccgcgcagtggttttgtcacccagcaggatgactataaggccggagccgttattgcccagcgggtggccgatatcatcacccgcagcggacaggtacatgtttaccagcagctgacgggccaccggcgcccgggttactggccaccggacccggtcacggaaaataccggcacaaaaaaccacaaatggcagcgtctggcacctgcggcatcacagtcctgtgcggtgtttcctgatacaggcggaaaggtggcggaagacggcaactacgcctggacgctgtggcagccgtacagctgctgcaaatcacgcggacagacattcctttacagtactgatttcagctga

SEQ ID NO: 381033 - DNA, 282 bp, Salmonella enterica
atggcattaccctgggcaaagcgcgtagtcctggaaagaaaaatagcccgttgggtgtgggaggagaaacgagcgattacgctccctgatattgcagaacatttcggcattgatgtaccttctacccagaaaattgtgcgttcaattttgcgcagaactgacgggataaagtgttccctggaagctcggcagaacgttgacaatagtggaaataaggtaatatttgagtgtctggaggttcatgaatttcctgacagctatcagccattcataagctcttaa

SEQ ID NO: 381034 - DNA, 2082 bp, Salmonella enterica
atgaaaattagattttttacctatccattatcaattttttttggtggggtattatgttcacacgcagaaacggtgaaaaatcaaaatattgcaaaagacactgatgctgatgtcattacggtaacggcaccagtaacctcacctcttgaaattatcacatcgcctaaagaaccacgccagccagtgcctgccagtgatggttctgattatttaaaaacaatccccggtttttcacaaatacgtaatggtggtacaaacggggaccctgtttttagagggatgtttggttctcgtctgaagatactgactgatggtgcagaaatgttaggagcatgccccagcaggatggatgctcctacatcctatattgctccggaggattttgatcttctttcactgataaaaggaccggagactgttctctggggcccgggtaactcagccggaacaatacgttttgaccgggaaaccccatctttcgaaactaatgcagtcaaagggactgcatctgttttggctggctcaagagatcgttatgatagtaacgctgatatttcattaggcggtaaaaaaggctatttacgtctcacgggtaacaagtctcgctcttcggattataaagatggaaacgggaaaaatgttcattcaggatgggataaatggaattcagatatcactgtcgggataacacctgaagccgatcgtttgatagagttttctgctggtacaggtaatgctcaggcggcttatgccgggcgtgctatggatggcacagagtttaaacgacaaagcctcggtatgcgctttgtgttcaacgacctgggccccgttttcgacaaactcgaggggcaaataaattacaattacgcccgtcatgttatggataactattcattacgccgattaccccaaaataccggaggccatggcatgcatatgatgcatgcagattcaggacctatgcaccacatgcaaggcatgaagatggggggcaaaatgatcatgccttatgacagaaggactgtttcaggacgattaatgggaacctgggactgggaagatgtcaaacttgaagccggtacggacacccagatgtacacacaccgttcagtcaaaatgtataacccggatacatcaggtgctggtccctggaacaaagacgctcggtttcacgactacggtatttttgctcagacaacatggaatgttaacaatgattatgacctcataacaggtgcgcgtatagatcatgcacagatgaaaagtttcaaaaatgcggaacgtaagagagatgcttatctaccagcaggctttgtcagaacagaacataccttctctgacaagaaaggaatgatgtatgccgggctgggctatgttaaaagatttccggattactgggagttattttcctcaacaaattctaaatatggacttgaggacgcattcacatctgtccgcccggaagaaacaacacaattagatataggtactcagtataatataggtgatgttacaacatgggtttcattctatacagcttatataaataactacatcatatttcagtatgatccatcagataaaaaaggtaaaaccagcaaagcttataatgtaagggcaagaacacttggggctgaaagcggattgagctggcagtttattccggactggaaattcgatacctcactggcatggtcatgggggcaaaacattactgaagaccagccgcttcctcagatgcccccccttgaaggacgttttgctttgacatgggataaaaacgactggagtaccacagttctctggcgtgtggttagtcaacagaatcgaattgctcttaatgaaggtaatgttgtaggaaaagacattatcaaaagccccgggttcactgtactgtctgctaatgcagcttataaatttacgaaggatattaaattaagcattggagccgataatctacttaacaagagttatgcagaacatttaaatctggcaggaaactccggatttggatattcaacagacactatatttaatgagccgggcagaacatactgggctaaattgaacgtggtcttttag

SEQ ID NO: 381035 - DNA, 177 bp, Salmonella enterica
atgccggcgcaagcgccttatctggcctacggcaacagcgcgtgcgggcctgatagcgcagcgccatcaggctatccggtttttaacgcgatatcactcttccagcgagtaggggagcgggacgatatgcagggtgttggcatcgtcgcgaacgcggaagacgctttcggcctctaa

SEQ ID NO: 381036 - DNA, 375 bp, Salmonella enterica
gtgcaatacagtatagacgatcacccatatcttaacagtggggcactgagaacgctgtttgatgccctgcgcaaggcggttctggagttggatccatgcattcacgaagaatatctcaaactctatattgcctacaaagcagagaccaactttgtcgatgttgttcctcaggctaaacgcttgcgcttgtcgctaaatatgccattcagcgagattgatgatcctaaagggctctgtaccgatgttacaaaccttggtcggtgggggaatggcgatgtggaaattggattatccagtttagagcagcttccctatgtcatgggattgattcgtcaatcctttgatcgtcagatgggaaggccagaggatgcttga

SEQ ID NO: 381037 - DNA, 771 bp, Salmonella enterica
atgcttgagcctaaaattacaaaattatctgagaattactctatgactatgaaaaaaatcgatattaatgatccagaggctcagtctactgatttggtggctggcaatattgaacaactgaagaatttgttccctgagctgattaccgagggggttaacggtgtatcagtaaatgtggatgtgcttagagcattagtgggcgacaaaagtgttacagaggcagatgagaaatacggcctcaattggcatggtaaacgccgcgcccggcaattggcgctgacaccaagtacaggcactttgctaccatgccctgaagagagtgtggattgggatactactcagaacctgatgatcgaaggtgataacctcgaggttctgaaactgatgcaaaaaagctattccggtaagatcaagttaatttacatcgacccgccctataacacaggtaaggactttgtgtacccggataacttccaagacaatattaataattatctagaattaactgggcaggtagaaggcggtcagaaaattagtagtaatactgaatcaagtgggaggtttcatactgactggttgaatatgatgtacccgagattgagattagctcgtaatcttattaaggatgatggttttataatggtttccatagatgatgcggagttgcataatctacgttttcttatggatgctatttatggagctgaaaattttgaagggatttttgtgtgggaaggcgggagaaaaaacattcacgtcgtatttctgtag

SEQ ID NO: 381038 - DNA, 1317 bp, Salmonella enterica
gtgggaaggcgggagaaaaaacattcacgtcgtatttctgtaggccatgattacgtcgtcgtatatgctaaaaacgcttcgcgattaaaagaattagatattagatggcgtgatagaaaagaaggtcttgaagacgtatacaccaaagctgctgagctgagagaacagttcggagaagacttttccgcagcgtcaaaagagttacaagcttggttcaaaagcttacctgatggtaatgcatcaaaagagcattctcattataaaatgttagactcttcaggagtttggtacggtgacaacatttctagcccaaacccgcggcccaatcttgtttttgattggaagggctaccaacctccttctaatggttggagatatgacagagaggctatgaaaaaacttgatgaggcagggcttttactctaccccgactccaaagataaacgtattcaatataaacgttatttacatcatactgaaacttggtcgccatcatcaatcttttacagagatagaagggctgcatcaaaggcgcttaataccttaatgggggaaaatgtatttgattttcctaaagatgtagatgttattgctaggttgatgcgtttagccacatcccgagacgatattgttttagatttttttgcaggctctggttccactggcgaggctgtgtataaacaaaacattaccgatgatgcaggtagacgatttatattggtgcaactaccagaatgtttacatcttgataacaaagaacaaaagaaagccgcagaatactgtgatctacttggtaaaccgcgcactatagctgagttaaccaaagaacgcttacgtcgcaccgctagcaagactaaagctgataatccagagtggcacggcgatactggtttccgcgtatttaaattaaatcgttctaatattcgagcttggaatcctaaaccggaaaatcttgaagctacattgcttgactttgaagctcatctccttgaaggacgtagtgaaactgatatcctttatgagttgttgcttaaactgggcctcgatctctgtgtacctattgaaaaacgtattattgctgaacgtgtggtgtactctgtcggaggtggtgtgttggtagcctgcttggctgagcagattaataacggtcacatagaatctcttgcattagggattattgcttggcgcaaagaattagcaactgtaggtgatactacttgtgtattccgcgatagtgctttttccgatgatgtagcaaaaactaaccttgcagcgatcctggaacagcatggcatccagaatgtgcgtagtttgtga

SEQ ID NO: 381039 - DNA, 3051 bp, Salmonella enterica
atgaaacttcattttgaacctaatcttgactatcagatgcaggcaattgaatctgtatgcgatctatttcgtggtcaagaagtttgtcgcacggagtttactgtgacgatgaaagctccgtcgcagagttcagaccagtttaacgtgacacagcctgagcagttaactttaggaatggccgaatccgatcttggtgttggtaatcgtctgactctacttgacgatgaactacgccagaatttggttgatgtccaatttcgtgaaggattgccgccatccgaaacattaacctccggcgactttacggttgagatggagacggggacgggtaagacttacgtttacctccgcacaatattcgaactaaacaagcgatacggttttagtaagttcgtaatagtagttccttcggtggcgattaaggaaggagtctataagactctgcaaatgacagaagaacatataaaaggactctatgcaggtgttccttttgattactttctgtatgactccagtaaacctggtccggtacgtaattttgccaccagttcaaatgttcagatcatggtggtcacggtgggggctattaacaaaaaagatgtaaataacctctacaaagagaatgaaaaaactggtggcgaaaaaccaattgatctgatcaaggcaactcgaccagttgtcattgttgatgaaccccaaagcgtggatgggggtcttgaaggacgtggtaaagaagcactggatgccatgaacccgctgtgtacgctgcgttactccgccacccatgtgaataaacaccatatggtctttcgtcttgatgcggtggatgcctatgaacgcaaactggtcaaacagattgaggtggcctcagcaaccgtggaagatgctcataataaagcatttgtacgcctgatctcaattgccaataaacgaggaactattagtgccagaattgagttggacatcaataccgccagtggtgtgaggaggcaagaacataccgtatctgatggtgacgatcttgaacagctcaccaagcgcccaatttatgcggattttcgtgtcggcgaaatcaatactgcaaagggtgaagaatttatggagctgcgctatcccagtggtgagatatttttgaagctagggcaagcatatggtgatgtagatgcgttagctgtgcagcgcgagatgatacgacgcacaattcgcgaacatttagataaggaaaaacggttacgtccgttaggcattaaagtattgagtctgttctttgtcgatgctgtagaaaagtatcgccagtacgatgcggacggcaatccagtcaaaggcgattatgcgcgaattttcgaagaagaatatcgccgtgctgcaaagttgcctgcttatcagagtttgttctccgaaattgatttgaattctaccgcggaagaagttcataacggctatttttctcgggacaagaaaggtcgctggaccgatacggcagagaacaatgcgggtaatagagagaatgctgagcgtgcatacaatctgatcatgaaggaaaaggaaaagctactttcctttgatacaccacttaaatttatcttttcccattcagctcttaaagaaggctgggataacccaaacgtttttcagatttgcacgttgcgtgacatccaaagtgagcgcgaacgtcgtcaaactattggccgtgggctacgtttatgcgttaatcagcatggggagcgtgtacgcggttttgaggttaatactctaactgttatagctaccgaaaactatgaacagtttgctgaaaatcttcagaaagaaattgaggcggaaacaggcatacgtttcggtattgtcgagaaacaccaatttgctcttatagctgttgttacgcctaatggacaaacatcccctatggggcttgaacaatccaaagtgttatgggaatacctgaaagcggcgggacatattgatgcaaaaggaaaagttcaggactccttgaaacaagctctaaaggaaggttctttagccttacctgccgagtttgaagtgcaaaggggacaaattgcagaagtattgcgcaaagtgtcaggccgtcttgagattaaaaatgccgatgaccgtcaaccagtatccctacgtaaaggatcggatggtaaagctatatatcttagcgatgagtttaaagcgctatgggatcgcatcaagtataaaaccacctatcgtgtgcaatttgataacgctaagctgataactgactgcattaatttcttgcaaaaagcgcctgccattgccaaagcgcgtttgcaatggcgaaaggctgatattgctattggtaaggctggagttcaagctacggagaaagcaggagcctcgacggttgtattagatgaaacagaccttgaactgccagatattttaacggagttacaggatcgtactcaactgacccgtcgtacaatcatcagcatcttgactggaagtgggcgtctggatgattttaagcgtaatccacagcaatttatcgaattagcagctgaaataatcaatcgttgtaaacggctagccttagtggacggcattaaatatcggatgttaggtgaacagcatgtttacgcacaggaactattcgaaaaagaggaacttaccggttatctccagaatatgttaatggacacccacaagtcgatttatgaacatgtagtctacgactcaactacagaacgggactttgctgatgcgctggagaagaatgatgcaattaaactttatgccaaattacctggctggtttaaagttcctactccgctaggtagttataacccagactgggctgtacttgtcgaggaagataatgagcagcgcctttattttgtggtagaaaccaaaagcagcctctttgcggacgacttgcgtgataaggaaagtgctaagatcctatgtggcaaggctcatttccaggcccttgctatggaaagtgcaggacttaatgggaatccggctcgttatatagtggcaagttccgttggtgacctcatggttgaagcctctaaggataactag

SEQ ID NO: 381040 - DNA, 1245 bp, Salmonella enterica
atggataaatatcataaagtagatcttgcattcgattttttagtcaaaaaagaaaacaatcaagagttatttacaatacaagacttagcagatgctactggctggacaataccaacttgtaaaacctatccagtaaaaaaatggaataaatatgtttcccgcgatggggaacattatactgcatctggcattaaatatttaagcaaagaggatttcagaaacgttcatagtcagaaaaatgttgaagtagtcaaaagtgaacgtagtcttaatctaaagaaggccagggagtttgctctacttgcggttgcaacttataacaatccgttcactgaatttaaaacccatggcttcattgtcaatattactattgcatttacagctttgtttcatgcaatttatgctaagaaaggtataaaatatttctatctaaatgatgatggaacaccaaaaactattgatggagaagaaaaggcttgggaacttaagacttgctgtgaaaaatattggccgggcgaatccaaaccagaaaagcttaatattcaattattaattgaattaagaaatataatagaacacagaggattaccagaaattgatgcacttactttcggggagtgtcaggctgctattaacaatttcgaagatatccttgaaaaagagtttggtgataataatgccctgatgataaatttgtctcttgccatgcaacttacccggatgtcacagcaagcccaagctgatgcactgaaaagattacaatcgaaaaacttcagcattgtgaaaaaatttattgatgactttaaaaaagacctttctgatgaaatcattgaaagccaacaattcagactcagagcactattggttcctcttgttggaaagaaagcgtcaaattcagatatagccatagaatttatcaatgttagtaatctttctgaagaggagttagagaaactagattcaggcatagctttcataaaaggtgtagagaatcaattcaaacttaaacctagtaaagtagtcgaaatggttcaaagaaaacataaggaattcaatctgagtactcatgctaaattctggaaattttatgacgcgaggcctattgatatagataagagctttaaaggtaactattgtggatatgttgagggattcgatgggtatttatacaaccaggaatggattaaaaaaatactatcaacctatgctgacaatgaagaatttcaacatgttaaaggaagctag

SEQ ID NO: 381041 - DNA, 1296 bp, Salmonella enterica
atgtcaggtatcaatccacgcgatgccttaccccaggatcgggaaacgctctaccatcttgtctggagggagcctgcggagcgcatagccgcgcaatatggcatcagtacaacgttactggcaaaacgatgtacagaaatgcggatacccaggccgcttgctggttactggaaagcgctggcgaaaggggctgcacctgcggtgccagcattgcctgatttgaagaagggcaaggtagataaagcttcaagcaaagtcagtttggccgttccgtcacccacaaaagtaccatctaaagtagcagtgccagcaccgcgaaagcgatcaaggagagcgggtagtggctatgcactgatcgatgatctcaaaacttaccttcccgtctcttccgtcacaaaagatggttactacaagccaacgaaaaagaagctactcgatctgaatgtttcagaaacgggattcaacagtgctatcgattttctgagtcggttctttgctgcactgggaaagcaagggtattgggtacgattggctgaaagcggtgagggacttcattgtcagggcatcgatatcaaagaagatccaaaagagggaggtttgcgctatgacagtttatggcgcccttgttcagccagcattatttgcattgaagataagctgttcggctttagtttggctgaaatgacggaatatgttccagcaaaagaaattaatggtcgatacattcgcgatgaaacgatgatccgctggatgaggggaaagtatgacaagccatttcgctacgtcattaggcatgccttacctacagggcgatttctgctacagctctactcgccgtattcgtcaacaaactggcaggtgcaatttcgacagacaaagcaatgtggccttataagccagatcccgaagctcatttcagcgatgcgtaatgctgttccgttgattaagaagcaacaggaggaggccagagtcaaagctgaaaaacggcggattcagtgggaacttgatgagaagagatatcgggagcaggatcggatcagaagggagaaagaggcatacaacgccagcttggccgagctaaaagctattatggtgcagtgggcagaagataagcgtatagagcagttttttcgtgaggcggagctggatgtggcaatgttggatgggcaaaagaaggcactggtaatggagcgtttgcaactggcccgtcagctcttatcagtggatacggcagttgaacgattgctgaaatgggaaacgccgcaggaacggttggtgaaaaggtatgcttgctaa

SEQ ID NO: 381042 - DNA, 135 bp, Salmonella enterica
atgcatccagatatcaaaaattatattaccaaaggaagtaataccccctacttatttatcattatatatttcaatatttttcctcaaccaaaaacgctgctggcaaaaattaaagaaatttttttgtctgggtaa

SEQ ID NO: 381043 - DNA, 1137 bp, Salmonella enterica
atggatttattcataccccaagtggctgacgaacgtttacacccgcttgttaaacagatcatagctgaacctgtctatcacccaacaataaagactatcaatagttggggaaaaggaattttagaacggcgaggagagggagataaattcattaaagaattccagaccacatttaactcaagcttttgggagttataccttaacaaagcatttatcgacttaggttttaacattgactatagttacgaatctccagacttccatcttattcattcatccggcgtgcatctaaacgctgaagcagtaacatcaaataatataaataatgaaaatgaagaatattattcacccaactcactccatgaagccgcacagattgaacttgatgagttcatggataactcatctatcaggcttattggaaagataagggataagaagaatttatttatcgataacgggaagaaaaaacatccttattcaaaactaccacatgtaatgggaaatccgtttattctcgcaatagcaccttttgataatctattatcatctggacaaaataatagagcaataaataggatcctttacggtattgatacactccctgatggaacagtaaaaagaataccttctataagaacaaaagctggcaatactatcgaacttggaatatttacaaatgacagttataaagaaatcagcgcgataattttttcaactgtcggcatgttcagcaaggctataatagaagccaaaatcccctgcaaggttagagcaactaagtaccgccaattcaccattcatgagtttaaaaaactttcagatatgggtatcgaaaagcttgggaaaaatttcaaggaatttgaaaatcaagatatagttttgacatttagatatccatccgggaatcatatcgttggatgcgatatgtattttgttgactcaacccgttataaagaaacacatgttgatggattacacatatattacaacccattcgcatcgattccattagaacaaaatatattcagctctgattttttgtcatgcaataattatgatattcataacaatcgtatgctcacggaccataatgatggttcccttgtttcaagaaatacatatgttacattctga

SEQ ID NO: 381044 - DNA, 906 bp, Salmonella enterica
atgagcaacagaagagatttggttgaaatatttggatatagtcctgtagatctttctcctgaagtaagatctttgtggaacttaggcgcttgccctttcctgaataaagaatgtataaaaatcaaccatgaccaaactattatttatggtacttgtagcgtaacatctccatacggggatgttattatttgcccgaatagattatatgcaaataactatgaaagcttattaaaggtcagtcatgatgcttttggctctgacatcccttttttaacatatggccaatttatagcacaaagggctaatcatcaagattgtataattgcgcttggtaaaaactcaggaaaagaggttcaggttggaagagctctctctatggactgggttttagttagaatgactaatgggcaaataaatgaatatgtaggaatagaaatacaaagtattgatattactggaaattatcgcgacgcttggcatgcatataaaaatttcaagccaacagatgagcgcattgatttacccacatctcaacatggtttgaactgggctaatgttcataaacgactaataccacagcttattagaaagggggttgtttattctcgatccaactatgtcaagaaagggttgtattttatactacctgatattgtgtataagaaatttgaagatgttattggcgatgatattccattgttagattatcaaaataacaaaacaataactgtttatacttacggattaggtgataatgtacctgaaggtcaacaaagaacattattacaaaatagaaaaataacattcgaccttgatgaattttctaaacgttttaccactggacctaatttgccaagcggtgaagaactcgacgttgtgataaaaaaagcactaggtgtactttag

SEQ ID NO: 381045 - DNA, 1203 bp, Salmonella enterica
atgaatagtaaattgatttctttggatttattcgctggagcaggaggtcttacctgtggcctggacatggctggttttcaaccaattctagcaaatgaattggttccggctcatgctgaaacttacgctttcaatcatcctcagacagaggttgtggttgatgatgtaagggcaattgctgaaagtaatctgatgaaacaactatcattaaaaccgggcgagttagatttattggctggtggacctccatgccaaggcttttctatcaatgcaccgatcagatccttagatgatgaaagaaatcatttgtttaaagatttccttagaatcgcttcagctttaaaacctaaagcgattctaatcgaaaatgttcctggtattgtttcattaggcaaaggtactgttgttgagcaaatttacaaggaactagagtcattagggtatagcgtggatcaccgtattctttttgcgggccattatggcgttccacaaatgagattcagaactgtttttatctctatttatggcaaaaataaaaaaatcaacttccctgatcctaaatacaatgccaaagcagttgctaatttttctggagccaaagagctatgcctgccaatatcgccattgttttcaagtgaattaaaacctcatacaacagtttgggatgcaatatcagatttaccgcagatcgctggtggagtagataataatggactcccttatgcttcagaacctacttgtgattaccaaaaaattctacgaggagattcgaaattagcaataaatcacgtcgctgctaatcttggggctatcaaccttgaacgcttgaaacatataccgcaaggtggaagctggagggatattccttttgatttattaccggctggcttgaagagagcgagaagaagcgatcatacaaaacgctatggtcgtttacatccagatggattatgctccacgatactcacaaaatgcgatcctcattggggaagttttttccatccaactcaaaatcgcgtaatttctgttagggaagccgcccgtattcagtcattccctgaccattatgttttcaaaggtaatcttacccagcaatatgagcaggttggtaacgcagtgccaccattgatggcaaaggcgattggggaagaaatcattaatatgattggatatggacatgagcaacagaagagatttggttga

SEQ ID NO: 381046 - DNA, 609 bp, Salmonella enterica
atgcttaaacgtctggcttacctgactaccggcgctgctcttctgctgctggcggcggcggtgttctggtgtttcaaccgcctgaacaccctgacgctgacgcagcaacagacacaacgccagataacacagtggcgcgaacagccgcagccagacagcgattatcacgaactgaaggttaccgtaaaaaacattaccgcgcacacggaagcccttgccagacagcttaacgatgccacccgcgctcaggccaaacgacttcaacccataaccgaacagctcagagtactggaaggacaagtccgaaccctcagcgccagttaccaacatctgcaacaacagaccgccacgcgcagccgcgcaaaggcaaaacgtcccgtcacaactccgctttgggccgcaaaggcccctttttctcttatcagcagcgagttccgcgccgggcggcagttcgccgttattgccccatccggctatcactcgctctcacagcttcagcttgtggcccccggcgacaacgtgcagggctggcaactgctgcaactggacggtagtcatgccactttccgtaaaggcgggcagcggctgacactgaacgccggaggataa

SEQ ID NO: 381047 - DNA, 1317 bp, Salmonella enterica
atgaataaattaacacttatgatgtccggcctttgcttcgcctgttctactggcgtgccggtaacggtaattgccgccagtcataatctggtgctggataaagttgtaaccatgacgcgtcacggcgttcgttcacaaagtaatactgccagcgtacagcaaaactcaccaacgcctatcccggtatttaatgcaaaagacggcgagctcacaccgcacggctatgcggcaatcaccctgatgggagattatcttcaccgccagtttgttagccaaaattttattgatgaaaatacctgccctgatgcaaaaaatatttttatccgctccagtgcatttcagcgaaccagaatgacggcaagagcgctggcagacaccttatttccgggctgcgccgttgccgttcactctccagaaaagaaaactgacgatactctgtttgaacccatcgtcagtggaatggcaccactgaacgtagagaaagccacacaaagcgttatgacttcgctcggcggtgatttcgatactgcccgccaacgatatgcctcacagatcatggcgatgcaaaaagtcgtcgatccgacatgccagttaccggaatgtactttcgttaatcacaaatgggagatcaaagccgacaagcaaaatatcaatatttccctgaaagggccaatcgcaaagggaagtgagcttggcgaaacctttcgcctgcaatatacagaaggtatgccaattaaagatgtcgcttttgggcatgtaaaccgcgcaaccgatcttgctccactgatgcagctaaaagaaatcaagtttgatctgattgaacacaacccttatatcgccgcacggggtggttcacaattaatgagccagatattgtacgcgctggaaaaaggctccggatataaagatcctgatgccagcccgcaaatccgcgattctgcgccagacgccagggtggttatgtacgttgcccatgatactaaccttggctacctgcaacctctacttaacgtctcctggaacctgcaaggttatccaaaagatgatatcccgccgggtagcacgctgctgtttgaacgttatcgggacacaaagtctcataaagtctatgttggcgtcagctttatgacacagacactggagcaaatgcgtcgccttgaaacactgagcagcaaaaatccaccactgcaacaaaagctaaacctgaactgcaaaaacagcccggacggctggctgtgcccgatagatgagtttgccgcgcaggttaacagccgtctcgataagactgcgatgattgcgcagaactacgcggaatag

SEQ ID NO: 381048 - DNA, 1146 bp, Salmonella enterica
atggcctcatgggacagtaaaatgaaaaaaataattactccggttatcctgtcatcattattttatgccgggtgcgccagcgccactgtgctttatgacaaagatgacaataaagtcgagatcaaaggttctctgcgcctgatgatggatggcagcagcgccagagcacgtgaagaaggcacgaacaaatacaagctggaagatgaatcctcacgtattggcttccgttttgagaggcaaatagacgagaaacttaaggcgctggtctactatgaatggggaaacgatacccaagccaccgagaaaaaagacgacttcaattttactaaccgtcaggcttatggcggcatccactacaaaggtattggcgaatttgactttggccgtgttaccgttccttttgaatcagtacatcagtcagactacacctatgaatttggcaataatggtgcgctttattatggcggcaagaaaaccaaacgtgttggcggcggagacaacaactatataaagagaatatccaatacactgaaatacatgagcgataaatatgatggtttccgctttggcgcatcatatacgttgcaagatgaaaccaatattaatgatattgactacgcctggtctactgcagtctattatgacaccaccttcaatcttcacctgagagcgggctatgcgcaacaaaaagcgaatggttctaccgattcgaacgctgattccgggtattacgacatcacaccagcgaaagaaagtatctggggcgtaagcgcaaaatatgatatcccgttgtgggggttatcatttgccgttgattatggtggtgaaactatcgaggatggtaacttcggagatactaaaggctatacgccttatggcgacaccactcatgccaaactctttggtgtgggcacaaaatggacattcaatgataaacagtccgtttatgccacctgggctatcagagatggcgatgatgcggcagataattatcaggaaacacgcacagtattaggtacggattacaaattcaataaatcctttatcgtctggctggaatatagcagtcagaataaccgttcagattacgcgtccgataccaaatcggatgacaagtctgccttaggggtccgttattacttctga

SEQ ID NO: 381049 - DNA, 1116 bp, Salmonella enterica
atgaacagaaaaaaactcttttttctgctgcctgtccttttgctcgcttttcagcaatcagcgcaggccgcccatgctaactacgaggataaagattttccgttatccgattgccagcagtattcttcatctgtacaaaaagcagattgcttcacggattatgccgtcagccatcatattttttactggggtaataccgtctatggcgtaaacgccaacggtcctatcgaagagggttttgcggccgcttaccagatatcaccggataacatcaacattgccaattcttatgccgcatcgttggtcagaaatggtcatgcacctcagggaatcgatcagtacaaagcaaacttcaccaaattcggcgacttccattccggctttaccgcatggtcactgatccgtgcggcggctaaaacgccagatgagcatgacaatgccgcgccggagctttatcaacaattaaagaaacgctacccggatcaaacccggaaatatacagccatactcaattcggcggataagctactgcaagacgagtcgctgattaacttcgatattccagcggtgaaaaaccccggacgttatcacgccatcgtggttctcggtttccagctcgataaaaacggtaatccacaggaacctctggtaggcatcatgaataaagcactggccgtcgccaatgcctaccccacctcaaaaattatcgttaccggcggcgttccgcgtaataatcgcgttgaggcggaagttatgtctgatttctttacctctcacggtatcgataaatcgcggattattcccgaagttctttcttatgacaccgtacagaatgctaactacgtcgccatgattatgcgtagctttaatatccgtgaggccacaattgttacccgtgcgggtcatattcgtcgcggcaccgcacttatgcagaatgcgacaaaactttatgtcccatggaaagtcgccattaactcggtagcctggaaagatactaaatacaaaaccgaagaagatgcaaagaaagtccccaaactgggtagcggtgattacaaagccacctatcgggatgttctacgtatttatcagcaagagtatccaggatttattaattaa

SEQ ID NO: 381050 - DNA, 519 bp, Salmonella enterica
atgatgaataacccgacaaccggctaccagcctctggctgatgacgactataaaatgcaggtttacgtctcctcactaaaaggccttttaaagccttttaagagtaagggggagcttgagctgctggaaagcaacgccagagccgcccgtgagatgatggaaccgctgatgcgacgtttaatccagagcgcccggcgctaccccgtgcgccagcttccgctggtctttaccatcggcccggccccctccggcgcaaattttctgcgctggcgtaaccagcagaataataaaaccggtactccggcattctgtcacctgatcggcgacccgaaggtgccgcaacgcgccagagataccctgctggaaatcgagaaagatcgcatcgtgttcaacatgcagatgtcagtgctgacttttatcatccgccaggcgcgggagtgccaggaaaaagtcgagcaggcggaaaggctgcacatgggattgctcaccctgccggaaaataatgaacgcgggagataa

SEQ ID NO: 381051 - DNA, 705 bp, Salmonella enterica
atgtcggactacaccttcaacatgggtcccctgcgcagtgcgatccatattcagcttcacacccataacgccacccgactgtggaccgggcgacgggcgaccgagaacgggcctgcgccgattatcggcatgccacgctttatcgaaatcctcaaccagatacgcatcgcatcagaacatgacgatccctacgccgacctgtggatgctgcgtatagaggaaaagctcgcgcagtcgcgcaaaataatgcaaatgatgctggagcaggcgaaagcgctgttcagcgaattgccggaaggcatcgatattgaaagctgcctcaacgtacaacctgcccgtttcccgctatttatcaacgcaccgctggcataccagggcgtctatctgctgaccgattttgaccagctcgcccgccagcttctgctggcttcgcatatcgccgtgctgtcgcgccgggatatgcaccactggctgaaccggggcgcatcggtgatccgcagtgccttcagcctggcgcagaaatatcagatttccggtctgaagcgcagggattttatcgacgatacgccgcaggccagggcagtcattacccgctgcggcccgctgccggaggcggtactgagcggcaaactgcgctcctcatactcaccgccgttatcctctgccgcccagaacaccacaccgggagcctcccatgatgaataa

SEQ ID NO: 381052 - DNA, 2313 bp, Salmonella enterica
atgaaactcgccccttacctgataacactggcactgccgtttatctcgttatctgcccgagcggattaccatactcagattaatgccggaaataccgtctctggcgagatcgtggatggttcaaaaggtgaccagcatgtctatggcacgctggctgactccatcattacaggcccctatgcctggagctatgttggcgatggcggacaaaccaataacatcatggttaccgatcgcggtgaactgtttctggaacccggcggtagcgcttatggcactcagatagccaccgacggcgaattacaggtgaatggatacgccgaaaatacctatgtcggcaatggcggacaggtttacgtcaacgccgggagaaatggtgttgaagatccctctcagggcggtctgatcgtgaacacgactattggcgctggcggcctgatggttaatcgctacggcatcgacacaaatacggtcgttgaagctggcggcgaactggataccggctggaattacccttatgaaatccgcaacaccgcgatttcccgtaatgcagttatacaaaacggcggcattcagcaggtcagcaacggcgggacaagcgaagatagtcagatagaagatggcggtacattaatcgtcaccggtacatggcactacgatgtcgtcaccgacactcagccctctgcttggtatcgcggcaccgctgatgacacggctgtttatggcgcaatgcaaaatcagggcggactcgacgaaaacaccacggtacagtccggaggacaatatacgctgggcggctacggcctctcccaccagctcaccgtagcacagggcggaagcgcccaaataaatgatggtgctctggatagcttctggctctatggaattatggatgtcagcagccaggcaacgctgacaggcacaggcacagtgggtagcagcggcgaactggtacttaacgaaggcgcaaaaacttccggcctgagcttagcgctggatggcgtactttccctgcaaaacggcagtgatgctggcccacatcattatcagattgcaggtctggagatggacggcggtacggtactgtttgacccaacctccttcgccacactggatatggaaacgctctctggcagcggcaatttctggatgaataccaatatcgccgcacaacagggcgatatgattaacgtctccggggaagctaacggcgattatgggatctggataaacgacattggcgaatcccccgctgatccacaatcgctacaggtcgtacaaaccggaggtggagacgcgcagtttacgctgttgaacccaaaccagcaggtagatatcggcacctgggaatatggcctgacacccgacgggcagggcaactggtcgctgacgccgcaggcaacccccacgccatcgactgaagccgtactggcgatggcaaacgtaactcccaccatttttcaggccgaagccagtgtgctgcaaacccgtctggatgttactcgctcccgtccgcatcagggagagctatgggtgcaggcgctgagtaatcgctttgacgttaaccgcacagctaatgcagcttatcaccagcggctcgatgggatgatgatgggctatgacagaaatcttcctcgccagactggcctgcttacactcggcattgctggcggctacagccgttccgatcttgatctcgccaacaacagcgacggctcagtagacagctacagcgccgcgttatacaccagctattatgatcaaagtcgtttctggctggacggaatgctgaaaggcaatctgtttaaccagcaccttaatgcccgcatgagttccggcggccatgccgacggcagttacaccatccccggtctgggtggcggcctagttgccgggtatgacgccagattcgccggggccaccctatccccctttatcggtttcaccggcttcatttcacaaagtgataattactggctatcgaacggtatgcaggcacatcccggcacggctaaatctgcgctggggcaagtcgggtttcggctgcgtcaaaatatgacgactcgtcatggaatacagttcgttccgtggctgaaagtcgcgctggagcaggagtttgtgcataacaacccggtcagagttaatgacgataatttcaataacgatatcaccggaacaagaggaagctaccaggctggcatcagcgccgctctcacgccgcacatgcatatttacgccagtatcaattacgagaaaggtgatgggatggaatcgccgtggaccgggaatgcgggttttagctaccgcttctaa

SEQ ID NO: 381053 - DNA, 723 bp, Salmonella enterica
atgagcattcagaaacaagtcgtaagagatattgacaggattgagccgggtaaaatgtttacctaccaggcgctgccagcctggcggtcgtcgccggagagcactgcgaaggccatgagtctcttggtgagccgcggtcaggttcgccgtttttcaaaaggcgttttttatcgtcctaagcagggagttttgggggaggttcgtccttcggacaatgaaaaaatccgcctttatctctttgcgggtgaagaacgaatcggctatataacgggcctcagcctgtataaccgcatgggactgacaactcaggtgccgaaaacggtcactattgctactgaaaaagcgcggcagaaaaagagtttgggtaatatcgatattcgcctggtccccagtaaagcgcctgttaatgaacaaaacaaggaataccttgaagtcctggatgctctgacggatattaaaaatattcctgacagtcagccgtttgaagtgcttgatgtgttgagtcagaaaataaaaaacatggatgaaggtgcgttaaactcactggtgcaactggcaaaaggatattatccacctgcgaccaaagcgttgctgggtctcattctggataccaatggttatgctatcagccgccttctggctgaagagcttaaccctacaacacgttataacattgggttgaaagggtactggtctcaggctaaaaaatggaaaatcatatga

SEQ ID NO: 381054 - DNA, 978 bp, Salmonella enterica
atggaaaatcatatgaatattcatgagaatgccgatagttttgtcgagattattcaggccacggcagaccatctttctataccggcggtatacgttgagaaagattattgggtaacatatattttaagaaatctcagccgttctgattataaagagcggcttatttttaaaggtgggacggcgctttctaaagcctataaattgattcgtcgtttttctgaagatatcgatcttgccgctcatttgcctgacttttctggaaatcagatcaaaaattatatcagagacgccgaagctcggcttaccgaggggctgacatatctaccgggacatcccggtgagtcaaaacatggttcatttcggaaaacatggtttgagtatcccagacaagttgacggtgagtttgctcaggcatctccgtttcttttactggaaataaacgcatttaccacgccagaaccctattctttaatgccagtgtatacattgattgcagagtctctgaatatgatggggcggcctgatctggttcagaaatttgggttgatggcatttgaagtcaaggtcctgaatattgagcgaaccgtggctgaaaagataatggggctggttcgggcttcccgtgaagaaaatgccgaggaacagttgaaggctaaaatccgccatatttatgatttatgccttattcgacgagatgctcaatatgccgggttgtttactgatgatgcgctgcttcccatgctgaaggtggtcgaggatgctgacaggcaacagttcaggcacgccgtaagctggcttgattcccctttatccgaggccgtcattttttctgatgcggcatctgtctggcagaagatacgactggagtttcatacccgttttgctcctctagtctatgatagtgatattcccggagatggcgaagtgattagtatgctggatgctatccatgttcaacttaggaactatgtacggtag

SEQ ID NO: 381055 - DNA, 750 bp, Salmonella enterica
atgactcagagatatacccctgaacaagctgaacgtatgaaaaaacgtcgctattggttttatgttgatggacagcgttttagtagtgccaaagcagtaaatgattatcttggcgagagtttatgtcacgcagcatggcgagctgatcttatagcagcttctggcggtgagaatatgcaaattggggatcgtacagtaccagtaaaacgcggagggcacacaattgttctggagcgccgtgaagacttaattgataagtcttttcgtgactataacgcagctcggaaaaagcttctcagcgtaggctggagtgcagaagagatcgataacttaggtaatggacagttgtattcagagtataaggctgagcttgcacgtcaacgcctgggtatacctcattttgaaaaacaggaaataaaatatacccgagtgaaaattcgtccagctcaaggggtctttcgcgctcgggttatgactaactgggacaatcgttgtgctattacagggacagggttagcgctggaagcggcacatattatcagccatgcaagtggaggaactccgaccgttgaaaatggcttgtgcctggcagctgatttacacactctgatggaccggggtcatttattgattgatggaaatgtagtgcgattgtccgatgaagcaaaagaagaaccgcgttattcaggcctcgatggcacagtgttgcgtaagcctcgccaaccggtagtttttccggattcacaatga

SEQ ID NO: 381056 - DNA, 1356 bp, Salmonella enterica
atgaataagcgcaaacggccacaaccgccccactccgtcgaagcggaacaatcggtgctcggcggcctgatgctggataacgatcgctgggatgacgtcgccacgcagatttccgtgcaggacttctttatctccgcgcaccgcactatctatagccatatgcaaaccctggtcgaacaagggaaccctatcgacctgatcaccctgagcgaatcgctggaacagcaggaacggctcgaacaggtaggtggcttcgcctatctggcggagctgtcaaaaaacacacccagcgccgccaatatcattccctacgcgcaatacatcgccagctacggtgaactgcgccagcttctgttattaggcaatgaactgagcgatatggcaggccagccgcgcaacaatgtggccgacgtactggcctttgccgaacaaaagctgtttgccattgcccagtcgcatcaggacggcggcctgaccgatatcagcgcctgctttgacaacgtgctggcaggcatcgctcaacgctatgaggctgaacgcggtagcctcagcggcacaccgtccgggctggaacagctcgacgccctgacctgcggcttccagcctgccgatctgattatcgccgccgctcgcccctccgtcggcaaaaccgccttcgccctgactctgtgcgtcaacgcgctgatacggctccccacgcagccggtacaaatctacagcatggaaatgtcggctgaacagctgctactccggctggtttctctgctcgggcgcgtctcgcaaacccggctacgcagcggcgatctgagtgatgatgactggcagcagatcggcatcagcgccaacatcctgatggcagaatggaaagatcgtctgctgatcgacgactccgggatcctcaccccttccattctgcgcagtcgcgccagacgatcgctgcgccagtatgggcttccatcactgatcgtcattgattacctgcaactgatgcgcagcggcggcgcggaaaaccgcaatcaggagatctcgacgatctcccgttcgcttaaagcactggcgaaagagctgagttgcccggtactggcgctgtcgcagcttaaccgggcgctggaatcacgccttaataaacgcccctgcaatgccgatctgcgtgattccggctctatcgaacaggatgccgacgtgatcttattcctctaccgcgatgagctgtacgaccccaacacgctggatcggggcattgctgaagtcatcgtcagtaaacaacgcaacggcccggttggcacggtacgcacgcgatttatcagcgatcagacccgcttcgaatcgcttgcccagcggggaggcgcgtcatga

SEQ ID NO: 381057 - DNA, 642 bp, Salmonella enterica
atggtaataggtgaacagtctgcccctctaaaccagaagtctgttcgggataaaattagctgggaggagatcgtcactgctgccagacggctacagattgagccctgtgcgctacaggcagtttgtaccgtggagtcgtcagggcagggctttctcccttccgggaggccaaagatcttatttgagggacatattttctggcgtgagctggcaaaacgccgctatcaacccgagattcttgctgccagctttccctccattatttatcggcaatggacggcgcagcactatctgggaggagagaaagagcatgcgcgtctggagacggcaatgagcctccaccgtgaagccgcgctctgctctacgtcatggggtgcattccagatcatgggatttaattttgccttatgtggatttcactcggttgaagattttgtcgcggcgcaaagccgcggcaatcacgagcagttggaggctttttgccaattcatggcgacgaataatctcaatttttatttgcaaaataaagactgggtcagcttcgccaagcgctacaacggcccgggatatgcacaaaatcgctatgatttaaaaataacagacgcctatcagagatgcttgcaaactcagttaacgagctga

SEQ ID NO: 381058 - DNA, 219 bp, Salmonella enterica
atgatgaattgtccgaaatgtggacatgcggcgcatactcgtagcagctttcgggtatctgataacactaaggagcgttactgccagtgccagaatattaattgtggcaccacctttgtcacacatgaaacagtggtgcgctttattgtcacccctggactaatcgatcacgctccgccacacccattaaacagtggtcaaggccacatgaatttctaa

SEQ ID NO: 381059 - DNA, 300 bp, Salmonella enterica; identical to SEQ ID NO: 378543

SEQ ID NO: 381060 - DNA, 1218 bp, Salmonella enterica
atgaaaactaattttatcatcatggggtgcctgttttttagcccattagctttggctggtcaggacactttacactatgcagattttattaatgagatgtataaagaatcagatatgatcaaggctaaggccctggagcttgaatcagaattgttacgtgcgaaacaaactgacctctattttatgcctaaagtttccgcagaaagcaagtataaatcagatgcctctcgcggtgacataactgattcaaaaataactgctagctctttgatttttagtacaactattgttgaccgttttaaagagaagaatagtcgaattcatagtgctgaactgtcgcttctgaaggaaaaagaaagcttgtataagtcactggtagagaatttaattggtataaaatattataataatcttgaggtaaaggcgactaaattagaacagacagccattgatttataccgtcaaattgaggggcgatatctatctggtatcgctaaagcaagcgatgttgagcaggctcgccttttgatccagaaaataaagactgagtcagagagtattaataaagagattgaactacttaagtctaatatagaattagctaccggcattgcttttcctgagcggggtgttaacttacccgatagtataattaataaaattaacggctataatattaatgagaaagaaatttataataatattgattataaattattgaacgaacaggctaatgctgcaaaatttaacgcctggcagcaagattcattagttcaggttagtctggtcgcagaggagagatataataatagtcaaaggattgataaagattcatgggggggcattcaggtttcggtaaacctatttgattatgataaaaagattgctagtcaaaccggtataaaatcatatcaggtattaaagacaaggatggattttaaatataaagaattgttggcaaaaatgaaatcattacaactgacgataaattctaatcaaaaggaacttaaaggattagaagagcaaagcagaactacagaagtgattttagctaatcagaaaagagaatataatatctcacaatcatcttattatgaaatgttaaacacgcaatacgactattttgcattagagcggaaaatggttgaaatgaaaattagtgatgctatcaacaagatatctttgctacaggtatctggcgaactgttaagtttgtga

SEQ ID NO: 381061 - DNA, 807 bp, Salmonella enterica
atgacatgtcttgacgcgcaaaccgttattcaggcactggagcttcctgacagctgtcaggtgggtcaacgcgtccccaagaaaatattgctggaaaatattgcggctacggcagctgataagcgtttgatcactgataacattgctgaaatccagtggttggcggcacttaagcccaatacaataggggtgccagactatcgggatacgaagcgtgagtatcttgagattacgattttatctgtgactttacgaggtgttgtgaaaccagcaaaccgtgtccgtttggctgagctgctacatcgtgctgttccctatcctgttttattacaactggttgaaggtcaaattcagactctatttttggcccacaaacgatgggctcagaacgagtttggtaaagtagtacttgatggtggcttggtatatgcctcattttttcataccatggttgaagctccagagactgcctgtctgacatctccggaagtagggcatgcttttttgcaatctttgtcaatctcgcgccaacctcaggccacactctatagtctttaccaagggtggatcgattgcgtacaaacactgttggctgcgcgtttgacagggatctatcgtattgtacccacccaagagcaggctgaggcgcgccggcaggcattgaacgattacgaaaggcttgaaatcgagattaaccgtttgcgtggattggcgctaaaagaaaaacaaatggcgcgccaggttgagctgaatctccaattgcaagcactgctggcagagcgtcaacggatcgtgcttaatctctaa

SEQ ID NO: 381062 - DNA, 3234 bp, Salmonella enterica
atgaagttaatccataactccggtaaagatcgtgttattgacttgattcgacctcatttcaaatctggtaaccaactggggtgtgtgaccccatctttctctttatatgcttttgctgaaatgcgtgaagagttgtctgtgattgatcaggttcaattgatcttaccatcagcagaaaacctactcgactacctaggagatgaaggtgaccgtagtgcgcgaaattgcttacagacacgatggttagctaaccaatgtgctaaatggataagtgaaaaagtggagcttcgtcgggcgcttgggccagtgccacaaggtactgttgttatacgtaaacctgatgctacacccgagcaagtcgttttggggtcgttcgcatttagcacctctggtcttggattaacacctggtaacccgctgagcttaattcaggcttcagaatcacccagtgaagccgccatattatcccaatggttcgatatgcaatggctgagtttaaatagagatggaaatagtatttcagcatctgatgataatgatcgcgatgcaatgattgcagctttgaagtccataggtgaacaccgtgatccatctactgtttactcgctcatattgcacagcctatttcgtgatagtgagggggaaatggatgaggagcggatcgttaaatccgcaactggtatccgaaacactgtggtatggaaaaaacttttcaaattccagcgtgatggagtagtcggggcgattgataaacttaatcgttttggtggatgtatcatcgcggatagtgttggtctaggtaaaacgtttgaagcgctggcaattatcaaatatcacgaattacgtaatgatcgtgttttagtgttagcgccaaagcggctacgtgacaactggactttataccaaactaacgacaagcgtaacattcttgcagctgatcgctttaactatgatgttctgaatcatactgatctgtcacgcgacagagggagttctggtgatatcgacttgtctcacatcaactggggtaactacgatttagtggtgattgatgagtctcacaatttccgcaataaaattacccataaaggtagggagtctcgatataaccgcttgatgcgcagaatcattaaggaaggagtcaagactcgagttctcatgttatcagctacgccggtcaataatcgtctttcagacttgcgcaatcagattgcctttgtgactgaaggtgatgataccgctttgctggagcatggtataaccagtattgagacaactactcgcaaagctcaagctcaattcaaccgttggttgacaatggatgagcttgaaaaaacaccgtccagattgattgaaatgttaggctttgattatttcacattgctagatcatttaactatcgctcgatctcgacgacatgtggagaaatactacggcactagtgagactggtcgttttcctgagcgcttacctccaataaacattaaggcggacgttgatcttgcaggtgagttccgtgctattcgtgacattaatctggaaatccgccggcttacgttggctagttatgcaccgcttcgttatgttttgccacacaagcaagcagcatatgatgcaaagtacagcacccagattcgtggcggagaaagtttttttcgccaggtagaccgtgaagaaagtttaattaacttactgcgtgtgaatgtactaaagcgtatggaaagttctgtgaagtcattcgccctgacagtgcaaaggcaacttagggatgtggagtcaactttggctcgcattgaattgcataccggagagcttgaagaaatagacatcactgatgttgatattgatgatcctgcttttgaagctcttctggttggtcggaaagtcaaagtactacttggtgatgtagacctgattcgttggagacaagatctgatcgaggatcgtaatcgtttagctacattgttgtcggctgctaaacaagttgatgttgatcgtgatgctaaactggctgctctacgcaagatgattgaagacaaatgtcaacatcccatcaatagcggtaatcgaaaaatcattgtatttacagcgttctctgacaccgcaaactatctttatgagcagcttgcccaatgggcgaaagggaagttgggaattgatgctgcactggtaactggtagttcaggtatacagaccactttgcctggcttgcgtaagagcatgaatgatgtgttgtccgcgtttgctccaaaagctaaagagcgtccggaggaacttactgctgaaggtgaagttgatctacttatagcgacagactgtatttctgagggacaaaaccttcaggactgtgattggctgatcaactatgacatccactggaatccggtccgcataattcagcgttttggccgtattgaccgtattggctcaccaaatcaatgcattcagcttgtaaacttctggcctaacatggagttagaggaatacataaatctggagcagcgggttagtggtcgtatggttctgcttgatatttctgcgacaggtgaagagaatttgatcgagcagcaatccggtaactctatgaatgatcttgagtatcgacgtaaacaactgctcaaattgcaggataccgtgatcgatttggaggacctttcaactggggtatcgatcactgatcttacactcaacgacttccgtattgatctggcaaagtatttaaagacttatcctgacaagcttgaggctcaaccactcggcgtatacgcagttaccactagcctggatgcggaaataccaccaggtatgattttttgtctgcaggcttgtgagacgaaagggcataaagtactcgttgaacaagcatcttcagattaccctcttgcaccacactacttggttcacatcggagatgatggtgcggtgttattgccttactcacaggctaaacgcatcctcgatagcctgaaacgtctggcgcttgggcgtgaagttcccgacgatacagcgtgtgccagttttgataaaaaaaccagatatggtgaagatatgagccacgcacaaaaacttcttaccgcagcggttgcatcaatagcgggtaaaaatgaagaacgtgctgttgccagtcttttcactccaggtggaacccacgccatcaagggggagtttgctgggagtaatgattttgaagtgatagcatttatggtcatcttgccagagagtgagtcaatatga

SEQ ID NO: 381063 - DNA, 873 bp, Salmonella enterica
atgatatctctcgaaacgctgcaatcagccatctccaacgtttccgtgtggcgtcagggtgatgtatgcgcgccgcataagccgttgctgctgctgtatgtgttgtcacagtacaaagcaggccacccgcgcctgtttaactacggtctggagatccacgaaccgcttactcgcctgctgaaagagtttggccccaagcgacgcactgactatcccaatatgcctttctggcgactcagaactgacggcttctgggagatcaccaacgcggaagactgcaaaccccgtaaaggtaacacccagccgaccaagaaagagctgattgataaccaggtagcgggcggctttgatgaagcagcttaccaacagttacttgcacaccctgaagtaatcgaccaactggcccagcaaatcctgatggatcgcttccccgaaagtattcagcggatcctcgccaaccaactgggtctggattttatcgaccattcaaagaaccgcgatccgcgcttcagagatatcgttctccgagcttaccattcgcgatgtgctttctgcggttacgacctacgattggatggcgcgctggttggtattgaagcagcccatatccactggaaaacctatggcgggccgtgtgtggtaaacaacggtctggcgctgtgttcgctgcaccatgatgcttttgatatgggcgcattcgggctggatgaaagcctgactatccgcatctccggaggcgtcagccgtagcccggtggtggataacctgttctggcaacggaacggccagcagttgcatcttcctcatgacaaatcactatggcctaccgaacaatacgtcggctggcatcgtaagcagatcttcaaagcctga

SEQ ID NO: 381064 - DNA, 327 bp, Salmonella enterica
atgaacagaagcaacgatctttaccagaaagtcaccgatgaaattatcgccgcgctggagaaaggcgtgatcccctgggttcgcccgtggcgggaaggggaaccggtggtgccgatgaatgccttatccgggcggttttatcatggcatcaacattcctctgctctggaacagcgctgagctacagggatatgaaagcgatcgctggctgaccttcactcagattcgcaatgcgggcggtaacgttcgtaaaggcgaaaaatctacactggccgtgttctatctgccccaacagcgtgaggttgttgacagcaacgggaacgcctga

SEQ ID NO: 381065 - DNA, 207 bp, Salmonella enterica
atgcaggctcacttcttaccgccgccatctgccgaagaactggtgatccgctgccagatactggttcgggaaattattgccgcgaaacagcccggagtgcgggatgtactgacgtttatcctttccgaccagcttgatctgctcaaaggtgcgatggatgtggggtatatcaataacgaggaagggcaggggagaacggcagagtag

SEQ ID NO: 381066 - DNA, 273 bp, Salmonella enterica
atgaaaccaaaggatgactggcatcgggcggatatcattgcagaactgcacaaacgtggcaccagccttgctgcactctcccgcagtgccgggttgagttcttccaccctctccaacacgctcgacagaccctggccgaagggcgaatggctgattgcatcgcgccttggtaaacatccagcggagatttggcccagccggtactttgatgaacgcggacgatggattgaacgctttgtccgggggcagaaattaccggtgcccggacgctga

SEQ ID NO: 381067 - DNA, 255 bp, Salmonella enterica
atgctgccacatcgtctgaaagaggcgcgactcagggcgaagctgtcgcaagaacggctggggatccttgcgggcattgatgaagcaacggccagcgcccgaatgaaccagtatgagcgcggcacccactctcccgatttttctctggcgtgtaagtttgctgaagtactaaaaatccctgcttgttacctttacaccgtcgaagacgatctggcagaaatcatcctgaattatgcggaacagcaccgcccttaa

SEQ ID NO: 381068 - DNA, 246 bp, Salmonella enterica
atgacttcagtttattcagatgattaccagtctgtgatttcggctctgaaacaagccagagtcaggcaaaacatcactcaaacagccatagcgaccgcattagggcggccacagtcatttattgcgaaggttgaaagcggggaaaggcgtctggatgtggtggagtttatccgtctggcacagcttctggggatggactggcaaaacgagctacaaagcatagcctgcaaatatgaccctttgtaa

SEQ ID NO: 381069 - DNA, 1113 bp, Salmonella enterica
atgaacgcccactctgaacgccttgaactgcgcggttcgcagcgcctgctgctggaactgatccgccgccacgccccggtgacgcgggccgagctggcgcggctgtccgggctgacggcgggggcgatcacccagcagtgtcgggagctgatgttctccggcctggtagttgaaggggagcgcaataccggacagcgcgggcagccgtcgctgccgctgcgccttaaccccggcggtggctgcgctatcgggctgtcgttcagtcccggctttatcgatatgacggtcgtcgatctcagcggtcgccagctactgtcactttctgaagcgcatcaggaaaatcagccgctggtggcgacgctcacgcagatcaaaaccctggtggagcagacgctgaaaaagcgccagctccagcacgcgcgtatcctcggcattggctatgcggtgccgggctttctgaaagcggacgggcgcaagcgccacagtgtgccgtggctggagagctggcgtgaggcggatttacagcaggcgtttgccgacaacctgccgtggccgacgtgggtggagaacaacgccaacgcctcggcggtaggcgagctgtacagcggcgaatggaatgcctacagcgatctgacctttatcgatctcggttacggtattggcgcggggattatctccgggcataaaatggtgcgcggcgggttctgcaatgctggtgaagtcgggatggcgttcccgtccggtacgccgcgcccgtcgtataaggatctgcttgccacgctggagcgtgaaggtttcagtgaaactcagctaccagagctgatcgccgggcagcatccgctgctggaaagctggtttgaacgctgtcgtggtcaggtggagcagacggtgctcggctgcgtgcagtgggtggatccgcaaatcatcgtactcggcggcgcgatgccgaaaccgattatcagccgtctggtgcaggagctgaatcaacggctggaaacccggctcgacgcaaatcgcccgaaagtgaagctggccgcgtcttcgatgggggcgcagagcgcgtcacgcggtgcggcgatgatcccgttgtatcaggtgattaatgaggattga

SEQ ID NO: 381070 - DNA, 831 bp, Salmonella enterica
atggcgtttaactttcaccgggcggcagaggggattgtgctggccaacagccaccggggttattcaagctgcgcgccggaaaacacctttccggcctttgacgccgcccgcctggcgggaacccactgtatcgaaatcgatatccacctgacggcggacaaccagctggtcgtcacgcacgatcaccgtatcgaccgggtgtccaccggacacggatttgtggagcagatgacgtacccgcagctgctggcgtgcgactttggcgtgaaataccatccgtcgtttgccggaacgcgcatccccttgctggcggacgtgctgcgctgggcggtggaaaacggtatggggctgattgttgaggtcaaacagcgcaaccgtcatgacgagtttgtggcggcgctggtcgcgctactgcgtgagcagccggaggccctcggtcatatccagctactgggcttcaatcacgtgctgattaaccgggtgaaggcgcagattccgcaactggcgttacaggtggtgacgctggagcgctacaataaccagctcgcggcggtgcagcagtccaatgccggatgcgtctgctttgagttcgagttcgcccatatcgacgacctgcgggcctacaaaaacgccgggctgggcgtgcggatgtatctgcacgaaatgaaaaacggcatgacgccgctggagcagtacgactataaattcggctgcgacagccgtccggtgattatcggctggatgcaggcagggctgattgatatgctcagccatgatgatattccgtatctgcaggggctgattgaagaggccggactgcgctgggattag

SEQ ID NO: 381071 - DNA, 1068 bp, Salmonella enterica
atgtcaaaactggttctggagcaggtgaccaaaacgttcggcgaattctacgctgccagggaaatctcgttctgcgctgaagagggggagttcgtcaccctgctcgggccgagcggctgcggtaaaaccaccctgctgaaaatgatcggcggttttcaccagccggacagcggacgcattctgattggcgataaagcggtcaacgccctgccgccggaaaagcgcaacaccgccatgtgtttccagtcctatgcgctgttcccgcacctcaacgtggcgcacaacatctgttttggcctgaagcagaaaaaggtcgccatcggcgaacagcagacccggctggcggaggcgctgaagcaggtggggctggagagccagcgcctgaagatgcccgcccagctctccggcggacagcagcagcgcgtggcgctggcgcgggcgatgatcacccgcccggacgtgatcctgttcgacgaaccgctctccaacctcgacgccaagctgcgcgaaagcgtgcgttttgaaatcaaagagttgcagcggcagtaccagctcacctcgatctacgtcacccacgaccaggcagaagcgctggcgatgtcggacaaaatcgtggtgctgaacgccggtaacgtcgagcagatcggcaaaccggaagagatttactaccgtccgaccaaccgctttgtggcggactttatcggcgcggccaatatcgacagcgcacaggtcacgcccgcagagcagccgggttattaccgggtacgctgcgccctcggcgaattttacgtgttctcagaccagccgccgcgcgctgagcactgctacatctgctggcgaccggaagacgcacagtatgtcagccagccgcaggcgggcgacaaccacttcactctgacgctcgacaaaatggcctttatgggcaacctcaccgaagcctggggccacaacgacgccgggctgtcggtccgtttacagctaatcaaaaagccgcccgtcgcaccgggtgaacgcgcctgcttccgtctggcggaaaacgccatccattttctggagccggtatcatga

SEQ ID NO: 381072 - DNA, 867 bp, Salmonella enterica
atgaaaaactggcgcaacgatgcggtcgcctggctgctgatgctcagcgggctgggcacgatcctgctgctgatgggatccaccttttatgtggtgattgtccagagcctgggctggttcaacctcgaaggcgacagccatttctcgctggagtactggcgcaatatgttgcaggacgaggtgctgcaaagcgccctgttctactcggtaaaagtgtcgctgctgggagcgttcggctcggtgattttcgcctatccgctggcgctgtggctgcgtaaaccgatggccggtaaagagggtattatcgcggtgctgcgcgcgccgatgtttatccccggtctggtggcggcgttcctgttcgtcaatatcgtcgcttaccacggcatcatcaacgaactgctgctggcgctggggattatcagtgagccgctgcggatgcagaacgacgatttcggctggggcgtcgttatcctgcaaatctggaaaaacctgcccttcgccctgatcctggtcggcggcgcggtcaacgccattcgtaacgacgtgctggacgccgccagcaacctcggcgccagccgctggcgcagctttaccggcgtggtggtgccgctgacgctgcccgccgtgcaggtgacgctgattctggtatttatcggcgcgctgggcgacttcgccttcttctcggtggccgggccacgcaacacctattcgctggcgcgcctgatgcaggccaccgccatggagtacggcgagtggaataacgcggcggtgattgcggtgatcattatggtcacggcggctatctgcacgctgctgatcgccctgcttatcaccccgttcgccacccgcaaaggagagatcaaatga

SEQ ID NO: 381073 - DNA, 837 bp, Salmonella enterica
atgagccacactaccaacggtcgccgggtggtaacgatttcgctgatcttcttcatggtcgccaacctggtctggctgggcatgccgttcggcatggcgatcctctggtcgctggttgacccggcccatccgtggagctacccggatatcttcccgccagtgctgtcgttcagccgctggctgctggtctgggagaaaacctcactttccgaggcgctgttcaacagctacaccatcgcgcctgcggtcgcggtcgccagcctgctgctgtcgctgcccacggcgtatgccttcggacgcatgacctttcgcggcaaggcggtggcggagatgctgacgctgatcccgctggtgatgccggggatgctgatcggcattttcttcagcgccatgctgatcaacctcaatatcgacaacgcgtttatcagcattgtgatcggccatacggtactgacgctgccctattcgatccgcattatgtcggcagggtttaaggcggtaccgcaggacctgatcgacgccagccgcgacttaggctccggcgcgtggggcaccttctgcaatgcctatctgccgctgctgaaaccaagcttcctggcggcgctgattttttgtctggtgcgaagtctggaggagttcagcatctcatacgtgctgggcgcgccggactttatcaccgtcccgaccattctttactctttcctcggctactccttcgtccgcccggatgcggcggtggtgtcgatgattctggtgatccccaacgtcatcctgatggtcatcatcgagaagttgctgaaggggaactatctgtcgcaatccacggggaaagcctga

SEQ ID NO: 381074 - DNA, 1074 bp, Salmonella enterica
atgaaaaaagcagtgatgattctggcgggcggcctgctgtgcagctcgctggcaatggcggcggataacccggacctgatcgcccgggcgaaaaaagagggcagcgtgacctttaacgtctggtatttacagccgcagtggcgcagcttcgtgaaggattttgagcagcagtacggcgttaaggtgcgcattccggaaggcagtatcgacggcaatatgaacaagctgctggcggaagcgggcaaagcgaagggcaaaatcgacgttatcgccctgtcggtagcgcaactgccggtaacaacgggggcgaaagcgctggcgaaggtggacgatctgcctagctatggcgacgccattcaccagattcagaacgtcgatacccggggctatgccgtggcgttctggggcaatcagaccggatttgcttacgatccagagcagatgggcgatcgggcgctgccgcaaacgctggagcaattgcagagctttatcgacgccaacccgaagaagtttggttataacgacccgaacaacggtggtgcaggagaagcctttattcagcgtatcgtcaccactcagggtggcacgtttaacagcgaagcggagagcgttgacccggcggtggtgaaaaactggcacaaaggctggcagtggtttgccgccaataacgacaaaatcacccgcaccgcttctggcgctgacagcctgacgcgcctgaatgacggcgagctgatgctgacgcccgcctgggaagatcatctggctggcctgcaaaaaaccggagccatcacctcgcggctgaaattttacgtaccagagtttggtatgcctggtggcggcaatatcgcggccattgccgccaacagcccgcacccggcggcatcacggctgttccttaactggctgattcagcccgaaacgcaacaggcgctgagtaaagccttcggctccacgccgatgaacaaacaggtcagcccggacgtgaagcgcccggatgcagcagtgcaattttacggcaaagcctacagtacacagctcaggaaagagtttgtgcgtgaagtcatgatgcagtaa

SEQ ID NO: 381075 - DNA, 927 bp, Salmonella enterica
atgacctttgaagaactcctggatgagtacttttttgcccgcctgctgcgaccggcgacccaggattgttatcgcacggcggtggagcagtttacccactggcgcaacgtactgcccgctgaagtcactccgcatatggcgctggaatggcgcggctatctgctcaacgagcgcgatatcaagccggtgagctggaatcactacatgcgccacctgcgggcgctgtataacttcgccatccgccaggggctgctgacgcagttcatcaatccgtttatgaacgtcacgctgcgcgaatcgcgccgccggaagaaaaccctgactcatgagcagattgttctctcacgcgaagtactgcatcactacatcgaacaagagaaaacgcagtacggctaccgttcgccgttttatcccgcctggttctggctggcggcgatagagacgttcaactacaccgccatccggctgaaccagcttctgcatctgcgtagccgcgatatcgatctgctgcataacaccctgtttatccagagcgagggcagtaaaagccacgatgagcatgtggtgcctatctcctcccgcctgcggccacacctggaaaccttactgtatgaggcgcacaaacggaggatcgcttccggcgagcagttatttaatatcaactgcttcaaccagcggacgctgcgccagggtaaaccgatgacagaaaatcaggtcagctacttctttgccaaactgagcgacgcctgccatagtcgtttttcctcacaccgctaccgccacaccgtggcgaccgaactgatgaagaaaccggagcaaaatttatacgtcacacagaagctgctggggcacagggatattaaagtcacgctcagctatatcgaacataatgtcgagatgctcagaagttgcgtggagagagattga

SEQ ID NO: 381076 - DNA, 1233 bp, Salmonella enterica
atgccgaaggtagcaacaaaactcactgacacagagatcaaaaaggccaagcccacagagaaagagttcacgctatgggatggagatggcttgttcctgcgtatcaaaccaagtggcaaaaaaatctggcacctcggctataccgttcctctaaccaagaaacgggccaaaatgagtcttgggttctatccctacctgacacttgctcaagcaagagcgctacgggatgaatacctctctttgcttgcacagggtatcgatccccaatcccacaatgagcaaaaagctcaagcgctcaaagatgccactgaacacacattccaaacagtggcgaaaaagtggcttgatgaaaaaattaaaacatcaggcatatcgcaagatcatgctaaggatatctggcgtagccttgaacgaaacatctttccaacattgggggatattcctattaaagagatccgccctaagatgttgaaacaacatcttgaccctatcgagcaaagaggtgttcttgaaactctacgccggataatttcccgactgaacgaaattttccgttatgcggccacagaagagcttattgagttcaaccccgcagataacctcacacagcgtttcagcaagccaaagaaacaaaacatgccagccctgccccccagcgagttaccaaggttcatagtggctttagcaaacgcatctatacgcttagaaacacgcctgctgattgaatggcaacttcttacatgggttcgccccggagaggctgtccgtgctcgttggactgacatcgatgaagagaaccgattctggaacatccccgctgagttcatgaagatgaaacggccccacaaggttccattgagtaaggaagctatgcgtattcttgaatccatgaaaccaatcagcggtcatcgtgagtgggttttcccaagcatcaaagctcctcttagccatatgcacgagcaaacagctaacgcagcgatcatccgcatgggttttggcggtgaactggtggcacatggtatgcgttctattgccagaacagccgccgaggaatccagtaagttcagaacagaagttcttgaagcagctctcgctcactctaaaaaagatgaaattattgctgcttataaccgtgcagaatatttaaccgagcgtgtcgagttaatgcaatggtggagtaatttcattcaagaaaaaaatacacgacaatatcagcataataaatattattaa

SEQ ID NO: 381077 - DNA, 471 bp, Salmonella enterica
atgaacaagctgaaagaggatgttcgaccgatcgttagcatcattgctgatattatggttaataatccacggacatttccatcttgtgcattggtattaagtaatgtactaaaatttttagaagatgatgatgagaaagtagagttaattgaactgattaaatataaatttgaacctatcttggggactgggattttagatatctggctacaacgtatctcttatcacattgatagcgatatagaatataaagagaccctttgttctatcgtatctggcgcacacgataaaccacatgagcatgtttggaattcggagtggattactgacaataattttaagaacatagtgatggctaccacttttattgattctgaaaagcttgaagactgcgagccagtaatacctgaagatgaaattgtgctatatccttatgatagtgactatgattatgaggaagaagaagagtag

SEQ ID NO: 381078 - DNA, 129 bp, Salmonella enterica
atgttccccctgaaagatatcaacagtttttatgctttatgcgaactatgtattgatgaaagccatcagcatgctattggcgtacagatactggtagtactggataacatcatgatttacagacaataa

SEQ ID NO: 381079 - DNA, 282 bp, Salmonella enterica
atgattcacgacgaaaaagcagaaaagctcgagcaggccggattttaccgccgtgcggctgtccgctggcttaccgttctggataactgccgggacgctctttcccgggaatgggttacccggcgccggttgtggtgtctgcagcaggctgaaacccggcgccctttaacagatactttcggcgatgtccgcaaggccgccacggaactgcagaaaagcatggggatctggcagcctgacggtgatgcattcagaaaaataaaaaagcattcctcaaagtag

SEQ ID NO: 381080 - DNA, 486 bp, Salmonella enterica
atgagttcaatgacaactgaagtgaaagctgcggcttctgttatcccgatggtggtgacggaaccggtgaaagagcctgaagtgtttcagcgcacccgcagtgagtttaaccggtggctgcaggcgcagtttgacaaccactaccacaccatgcgtaacgggggataccggagttttctcgcccgtaatcacccggccgagctggaacgttacgatgcggcctgtgaagccatgcggagggaagaatttacccgctttgcggaactgcagacgctggggctgtacctgcatctgcaggtacagcagaaggaggcgtatttccgccgggtgcgtaaccggctgctggcagcgatggcggtgaccggtgtggtgacaggcgtggtgctgtacggatattttcatccggaacaggcgctgcaggccggccatgaactgctggcgctgccgggaaaactggcggcactggccggcagactgctgaactga

SEQ ID NO: 381081 - DNA, 2667 bp, Salmonella enterica
atgacaacctctcccctggggccgaaaccctgctcacactgccagatatccggcccggcgatattgccggtacgttatgccgtggtgcctgccgggctgtcggccagcgttccggcctgggcgaagccggacacgccgttccccaccggcgacggctatgactacctgctgcgcgccctgcgtcagggctttgtgtatgtgtattacgaaagtaaccgtcagtgggaaggctggtcggtagcggaagacggcagcctgtggaaacagccctccgctgcgtatgcacggtcgcagaaaaaatctgactgcaccatgccgtaccacaacccaaccaatctggagatgctcatcctcagtcctgttgccctgaagggcaactgctggattgcattcacatcggccaaatggcggaccggtacgctggagcgctacggctctgatgcgaacgcccgtaagaaacggatgcagtgcgtggaatactggcagtggaccacgcctgctaacgaacagcgtgtcgcccaggcaagcgttgaggtgctcaatgaaatagctgactacatgacgccgggccctgcctgccccgtactgacgctgccgtataacccgccggtacggcgtatcagccgcacggacagcgcatcaccgtggttttattttgatgaaggcgaagtgcgggctcagggcaccctgacgccgtggagccgccgccgctgtgagcaggcgcagcggacaatagacgcgatgcagaaacagggggccggggttaaccgctacgacaaacccattacccaactggtggtggcgctggatgatgcggcgggtattgctcatgagctggcgggattcagtgatgatatgaccgccctgcacgcgggctggctggacgagctgtcgattgagtttatgagtgtgcagtcactggctggtgcccgcaaccaaatccagcagatggaaaaagcgctggcagaaaagcacacactggatgccttcagcagtactgcaaattacggcatggataaggtttctggtggtgtcatcgcgatggtgccgggcgctgacacgcagcgtcagtcggcactgaatgatctgttgcaacgggcgcagttgtcatcagaacaggcgggtgatgaggcgctggcgaccagttgggcgaagtacgatgcggagctgaatcacgacaagataaatgccttcaacgcctgttatgaacagttttgtaaggtgatagccacccggatggaagccctgcacggtttgcgtatcgactggcttaagtctgcgccgtttattacctgtagccaggatttttactccacgagtgtggaggacaacctgagctatcgagaaattgtggattatgcgctggcctcgctgaacctgaccgataccggcgcacagtggctggacagcctgataaaccagtattctgcgaaatccgaaagtaacctggtctggcgctcgctgctgctcaataaccccgatgtgatagccgatatgaccgcctatctggaaagcctggcaaagagccacggcaaaacagagaaagcggacgaagcatccttcctggcggcggtggccccgctggcaggcaagctgaatgaagcatatgccggtgccaatgaagcactggagcgacccgccacgccgtcttcatcgttctcgcggatgatgctgtactgtgaccgtcgcctgagcacatttggcgatcgcttctttaacatcagccgcgccggtaagtttctggacgggttaaacgggttgctgacgaaaacactgttccaggtggtatccggtgtgtcatttgataatgcggtgcaactgtctctcgggcagttacaggacggtgatacgttcagaagtcagctcctggaggatatgaagtattcgggcgcggctgaacggcggaaactcagaacccgctatcaaagtgattttgacaaatttgcccagggtgctgaaggcgaaagcgccctgaaaggggcccgaatcaaattgctggcgctgttcttcaacgggctggaattcaaaaatcagctgcaggagagcaaaggggattcgaaaagtcatgcgcagatagcgtctgcgttccttgggactcttagcacaaccacagagattattgaaccggcggttaaacacggtattcagaatggagcaggaaccacaagcgtgaagtttgtggggacaagtgctgggatgtcggctgcggtgattaatctggtgctggattcggaagacttctcttcagagtggaattctgaccacagacgatgggcttttgttgggctgaactttggaaaaattgggggtgatactggcgtagcgctgaagtcgttaggagggcttcttgagatattggcgaaaagccctgcactgaaaagtggggttcttgatacgatcgcatcggcacttactgtgggtggttttgctgaacttcttggctttatcgctagttgggaggtcatggtagggatggtattgattgaacaactcatcacttactactttggcaatgagttgcagcagtggtgccgtgaaggtgtatttggtcttgagccggatgaaaaactgaagagtacctggcaactggggccaaagaagcctcgcgataaagaatgtgataaccagcaggaagcatttcagaaagcagtgggagcagtgctatga

SEQ ID NO: 381082 - DNA, 990 bp, Salmonella enterica
atgactgataacaggaaagcgtcggaagagtttattgatttcgatgagacccgacgtaaaaagagccattgtgagacgatcattgaggtgaacaacaaatggatggttgagcatcccggtgaatctgatcctataaaggacagtcgtgaaaatgttcaggcagcagcagagatctctgagtttgaagcaatccttgcaacggagccaccaccaccggagcttccaccacgccaacctttatttaaggttagcggtgtgctggaagagttcagcgtgcagaaagtgatcggttatttcaccgagcgagagtatgaccctgaagcatttgcacacaaggacgcgagtgaccaggttggtagtctgatacttgcgatggtggggaatgctgccggatcagctgtaaccggacagagcaagattcgtcaaaatgatctttgcaattttgttcgtgggaagattaacggtgttcctttctacggttggttggggaaaaccaatgtccaagtcgatgattatgttgaaatggcagtaatgggacaaggagattgttatgtggtgtatgccatagcgctaccaaaattacgcactatctcgatgactccccgttgtcaccgcggccgtgaagcggaaattcgcgtccttactactcgtgggttccccgcgttctacagtccatttttgattttctttctcataatgcattttaagggtgtcgaatggcgggatactgcaatcggtgcagctataggcgcgggtgtgctacttcctgcgctcttggcgacgatttacaaaataaggaataagacgagccctgtgattttgcttgctgaagatattttcgccgcattaggttttgccgatcccaaaaaggttgatctccgaaagctcactagaaggcggttaaaacaggaggtaacagatacatccacgtccgctggccgggagatgccttcccgccgtagcactttgcgctacttctattactactga

SEQ ID NO: 381083 - DNA, 252 bp, Salmonella enterica
atggaatctcaatcctggcgaaaagaatcccgtaaaatttactcgaacgacttcaaacttcgtatagttgaacttgcttcccgccctgatgcctgcattgcgcagattgcccgtgaaaacggcatcaacgacaacgttatcttcaaattgctacgactctggcagaaggaaggtcgcgtatcacgtcgtcttcccgcaaccataaacacttcaacatcaccgacgttgcttcctgttgaggtgatatggtaa

SEQ ID NO: 381084 - DNA, 195 bp, Salmonella enterica
atggtaaaggtgctctgggccgataacgacggcatgaacctgtatgtaaaacgacttgaggaagggcacttcatctggcctgctgccagagatggaaagatcgtcctgacccgttcacaactcaccctgctgcttgacaagctggactggcgtcagccaaaaacttcccgccgcaatatcctgaaaatgttgtaa

SEQ ID NO: 381085 - DNA, 282 bp, Salmonella enterica
atgaataaaccacttcccgcccgtcttgctgaacttgagagactgctcatccagcaggctgaggagctacgtcagaaagatactcagctccgtcttatcgaagagacggaggccttcctgcgtacagcgctcgcccgtgccgaagaaaaagttgaagaaggtgaacgcgaaatcgagcgtcttcgtgcccagttggaaaaactgcgccggatgctgttcggtaaccgcgttacacaaccgcatcacgctatacaaagtgctgggaggtggctggaatgctaa

SEQ ID NO: 381086 - DNA, 129 bp, Salmonella enterica
atgtccaattggcacaaactgaacctcaacaaagttcctgccgcattgccgtcaacttgtgtagatacctatggactgtccctgcaacggtctgaatttattaaccttatgttaaataagggtaaataa

SEQ ID NO: 381087 - DNA, 141 bp, Salmonella enterica
atgcacatgaatgatttcaatttcctgcacacaaaaaaaataatgccaatagattttattttattttatttacctgtgttatcagtggttcagcatttactgcaaaaaaaacatattccgggacggttaatgttcatgtaa

SEQ ID NO: 381088 - DNA, 216 bp, Salmonella enterica
atgtctgtgcaacgtaaatgtcaggctgagttgttttactccatccattctcagggcgatatacatgaggtaaacagaacctttttacatacaggcctgagagtgttcacccgctacccatatagcttttccacgccagtactaacggtggcagggagcatcggtactggctctcactgccactatcgcacggaaaagaatttccgggttcactga

SEQ ID NO: 381089 - DNA, 909 bp, Salmonella enterica
atgaaacgcaatgctttatctgtactgctgatgattatcagtccggtggtgtgggctgataatcatgatgtgacggtaaacctgggtaacctgacactacaggcgtcacagccggttaacagcgtgtttgctgagaaagaggtaaacattcccgcgctgtgtacggctgactgtgatgacgtcaccgtcacatggaccccgctggctaagtatctgagcagtccggagaagggcgtctatcagtttgagagtggaataaaaggtattgcaatacaaatacgcacaaaaaacatggaaatgcagccatctgtcggacagccggtatcatttacggccggactggtaagaacgtccctggttgttggagggggcatgacaacattgcccccgctgttacagtggacgttgaaaaaagacggtcagcctgttccgggtaagcaggggaacgttattgtcggcgggagcctgacgacgggcagttgcgttcttatgcagaagaacctcgtgttcaggctgaatcccgtggataccagtaagattaagaataccacgccgggggaaccggttaccggctccggtaaccggcagtcaattaacgtggactgtactcccggtattgcttacccgattgatataagttttaaggcaaaaatgacgaagggtaataaaaatattattcaggccacccgtggcagtggcctggatgccggggttggttttataattaaaggaggagatgatgaaaaggacactatttcctgggatggtatcccgataaacgtaagtgtaccggcggatagcggtcagctcaggtacccgctgacggcatacctcacgccgctcgctggcggggccattgaggcgggtgattttaccggcagcgcaagctttgatattaattatcattaa

SEQ ID NO: 381090 - DNA, 2568 bp, Salmonella enterica
gtgaaaccgaataaaaagcataaacatgaccatcggcgagatgagtggagggtaaactcactggggcttttattgctggcgtgctcatcttcatatgccgcccaggagccggttcagaaattacatttcagtcccgagttttttaaaatacccggcgttcccggcaatgcagataaggaaagtaccgacctgtccctgtttgaagaaaaaggtggtcagttacccggtgattattctgtggacgtgttgcttaatggtcaggtagtggaaagaatgacgttaaaattccaggtgtctcccgggaagcccggactgtctgcctgcctgacccccggggatttaacccgctggggtatccgtcagccggttcatccggaaaatttatgccgactgaatattgcagatgtgttccctgaagcaacggaaaaactggatttcaacaaaatgcagtttctgttaagcatccctcagcgggaccttctgcctccgggctggctccgggttccggcagcattgtggaatgaaggtattcccgccgcactgctcaactatgactattccggaagtcagcaaagcaatgaaagtagtcactcttccagccagtatctgggactgaacggaagccttaacctgatggggtggcgcctgagaaaccagagcaactggactgagcaacgcagccgtcggggtgacagctcttcccgctggtcttccctgaacacatatattcagcatgattattccttcggacagggggggatgctcactctggggcagacatacaccgccggtgatttattcgacagctttgcattcgagggcattaaagccgaatctgatgacggcatgctcaatgcaacgctggccacatattcacctgttatcaggggagtggccaccacgcaggcccgggttattatccgccagaatggtacggttatttatcagaaaaacgtggcacccggcccgtttgagcttcgtgatgtcagcgccttcagttcaggcgatgtacaggttgaggttcatgaagcggatggcagcgtccgccgctttacccaggcatcaggaagcctcccggttctgcaacgcgagggacgggtgcgttacagccttgcggccggacgttaccggcaggatgtcgcggagcagggacagaagagacgtccggattttctccagggaacagttgcctggggactgccgtctgaatttaccgtttacggaggcgtgcaggccagcgaacattacacggcggcaatgctgggtggcggtcgtcttttccctgtactgggggcgctttctgtggatgtgacacaggcaagggcgcagtttgacccggaccgttcacacctggggaaccagcaggggcaggcgtttcgtttttcctgggcccgtggatttgatgccaccgggacttctctgacgctggcgggttaccggtatgccacatccggattttacacgttcagcgagatgcagcagtttctgcaggaggacggtaacaacccggactggcagaaaacacatctgcgctcaagggttcagctaaccctgtcccagcccctgggatggaacagcgagtttggacagatgtccctgtccgggagtcaggacagctactggaatgaaagtggcacgggccagaactggacgacaacgtacagtacttcgattgcccgggcaacagtggggttgtcctttggttacagtcagaccccacgttatggccgggccgataaaacggcgatgcttaatttctctgttccgctttccggatggctgccgggaggctatttaaacagcaacatcagtactcataacggcagaacgaccctgcagaccggattcagcggctcttcgctgaacaaccagttgagttattccgtttctcagggatggcagaacaagggacagggcgcaaccggcagcgcaaacgctgcctggctgggaggcttcggacaggcttccggaggatattcatattaccggaacgggcatcagtggctctatggcctgagcggcggtctggccgtacatcagcacggtgtcacgttatcgcagaaactgtctcttgacggcggcaacgccctggtggttgcccccggcgcgaaaggcgtgaaggtaaacaacggcaacggtatctccaccgactggtttggttatgcgctggttccgaacttaagcagctaccagcacaataatgtggcgctggatatcaacagtcttccggatgatgtcgatgcgaaaaatacggacaccgacgtggttcccacccgcggtgcgctggtcagcaccccgtttaacgtgtctgtcgggtaccgcgccctgataacgcttaactattcgcccggcgtgataccgctcggtgcctctgtggtggtgaaacagggtaaggacgtggtctctcagggggtggtggacagcggccaggtttacctgagcggactgccggaaacggggacgctggaggtcagctggaaaaatggcacagaacatcactgccaggctgatttccatctgacaccatcagaaacaggcctgaatcagataacggcagtctgccggtaa

SEQ ID NO: 381091 - DNA, 705 bp, Salmonella enterica
atgaaaacgttgcttcttcttctttttttgcctttcctggtactggctgatgaacagggtggtatttctctgggcgccacccgcgtgatttttccttcagatgcaaaaagtgtttctcttccggtaaacaattccagcaggagttctgtgtttttattgcgctcatgggtgagtccgtatcatgagaatgacaaaacctctgcgccatttattattacgcctccgctttaccgactggacagtgagaatactattcagctacgtattaatgccacccggaacgatacgctgcctcaggaccgggaatccgtattcatggttaatgtgatggcgataccccccgaaaaaaaggataaccttccttctgaaggtagtcttatccggattgcagttaataacaggattaaattattttatcgcccacaaagcctgaataatcagcaacaggttaatgatgcttacagtacgcttcaggttgttaagtcctccggatttatcaccgtgaaaaacccctcgccgtattatatcactctggggaaagtcttcattaacggaaaggaaaacagggataaaggggctgatttgatgatgcctcccatgggcggggaggtgaaacttcccgtaagtgacaaaaccggcagatttacttaccaggttattaatgatttcggcggcatgtcgccggaaataacgctgaatttttga

SEQ ID NO: 381092 - DNA, 585 bp, Salmonella enterica
atgaaaggtgtatttaaatatacaacattggctatggtttttggcttaatgggaagttctgccgcaatggccgccacgggtgacccgattggtcatggcgacatcacaattactgctaatgtgacagctactacctgttctgtaaactggaatactactaataacactgtaaatcttgatccagccatggtaaaagcagcaagtgttagtgattcattgggtaaagtggaacagcagtttactttagcaaattgcaacggtaccccaacccatctggcgtttaccgcaggtaaccctgagttaggttttgatgctgctattcctactggcaccactgacaaggatgcccccatttatctgcagccttctatcacgactaactcaggaattcagtgggatactggtaaaccttatacagcaaatgccaacatatccatgaatcctggtaaatatgtgatcattacgcctgcttcggattcatctgtatacactgtaaccaacgacatcaaggctggtgtcggtcgtgcttcgattgaagtcaaaccatataatattacatacacttataacgtaacttacggttaa

SEQ ID NO: 381093 - DNA, 339 bp, Salmonella enterica
atggaatctcaatcctggcgaaaagaatcccgtaaaatttactcgaacgacttcaaacttcgtatagttgaacttgcttcccgccctgatgcctgcattgcgcagattgcccgtgaaaacggcatcaacgacaacgttatcttcaaattgctacgactctggcagaaggaaggtcgcgtatcacgtcgtcttcccgcaaccatacctgcggcatattctgtcgcttcttccagagtggccagccaatcgggtcagcgaactgttgccctggagcgtagatctgacaacgaaataatcgtcaatacggcactcaatgatcgtttacctataacacattga

SEQ ID NO: 381094 - DNA, 369 bp, Salmonella enterica
atgataaggctcattgaaatctattcccgacttgaggctgttgatggttttttagcgcttatgctgcagcaacctgaaaattaccgcgagcgtttaatacacgatcgtattgtcggattcgttgagtacgttgatagcgttaactccgcggtatgggggcagcagagacagggtaagctttgtgattttgacacccgatacatattgccagccatttctgaaatatggttgcaggtaaatcgggaactcacagggaataacaggccactctatgaactagccaggtgcattacagagctaattagcctggtcagtttttacctttcccgcattgagggtaacaacgataaaaacagaatactacattga

SEQ ID NO: 381095 - DNA, 243 bp, Salmonella enterica
atgaaaatacattacttcagccttcttccactatgtgtggctgcggtttttccagcttatgcatttaaatcaacggtacagcaaaccgcctcagacctgcgtctgcacgaggaccaactgctgagcaaattttacagcgccacgcacgaagatatgcaaaatttgcctgtcggaacctgcggtgtcacaccggtacctggctgtcagtgtgcgtggtgtagcgctttacgaaacgcgggataa

SEQ ID NO: 381096 - DNA, 396 bp, Salmonella enterica
atgaagccacaatacctcagtttcaccattctgaccattttgctttatatcttcacttcccccggcgcgatggccgattatgaaggatgcgagtacaagcgtcagcaactggaacatcagctggagtatgcgctggcatataataacgctcaccgggtggctggtctgcagaatgcactccgccggattaatgaatactgtactgacaaacggttgctggcgcgaaaagaaactaaagtcactgaaaaacaacgaaaggtcacgaagtaccagcgagaactggaacaagcccgggcgtcaggaaaacggaaacaaatcacgaataagcaggcaaaactggatgaagcccgggaagaactggtaaaggcccgcagtgaacttcccaacgtccagtag

SEQ ID NO: 381097 - DNA, 726 bp, Salmonella enterica
atgaaaaaaataatggtggttgcacttgttagctccacactggttctttcagggtgcggtgcaatgagcacggcaataaagaaacgtaatatggaagtgaaaactcagatgagtcagaccatctggcttgatccttccagtgagcgaactgtctatctgcaggtgaaaaacacctccgataaggatatgaacgagttacaaagcctgatagcaagagatattcaggcaaaaggttataccgtagtgacgtcaccggataaggcttactactggattcaggctaacgtgctgaaggccgacaagatggatctgcgcgagtctcagggctggctaaaccgtggctatgaaggcgctctttccggggcggcgctcggggcaggtataacagcttataactcgaactccgcaggagctactttaggtgttggactggcggccggactggttggtatggctgctgatgctatggtggaggacattaactatacaatgatcaccgacgtacagattgctgagcgaacaaaagcgaccgtcacaacagaaaatgtcgcggcacttcgacagggaacctccggtgccaaaatccagaccagcacgggatcaggtaaccagcataaataccagacccgtgtggtatcaaatgcgaataaggtcaatctgaagtttgaagaagctaaaccagtactggaagagcagctggccaaatcaatcgcgaacatcctctga

SEQ ID NO: 381098 - DNA, 381 bp, Salmonella enterica; identical to SEQ ID NO: 377887

SEQ ID NO: 381099 - DNA, 834 bp, Salmonella enterica
atggctgatacagatacccttttctggtcattgcggtatgacgaaagaggactcccattaactgatgtcataattgacggaaaaatgcatacgttaatgcttgatacaggcagcagtacagggttgcattttcatgaacgtggattgaacgaactggtttcagtgtcggggctgggaaccacaaggctggaagatcgtcgatttattgatatttccggtaatgaaatccggcttcctgtatggaacctgaatcatttgattatttcaggaatacgttttaataatattgaaattgtcccctttaagccctggggtttgagtattggtaacaaaaaacctgtcaatgaggttatgggacttggtctcttccatgaccgttgtttcatggttgatttcagaaaaaacagactgtggccgacctataatccgtctgtatctgatatagataaatcatacagatggtcatcatatccggcagagaaaacaaaatccggattgctcattactgctattgttggcgggataaaattacttcttgatacggctaccagtcattcaatgttgtttgctgatcgcattccatcagatacgcttttttcagaatgtaaaacagtggagcctgaagcatctgatcaggattgtagggtgacaacatttagtctgaaagacaatcaaggaactagtcgtaatgagtttgccattgtcatcagcgggaacagaccgaaagtactggattttgatggtatcctgggcatgaatgttatgcgggatcatcttgtaattatcgatattcccggggacattttccgcctcagtgatcagcaaggcaggtaa

SEQ ID NO: 381100 - DNA, 603 bp, Salmonella enterica
atgaaaaatacaattttagcttctgttttggctttaactgcggtgtccggctctgcaatggcagcagtcaccacgggtcagttaacgtttaactggcagggtgttattcctaccgctcctgcgacaagcactgcatgggcatttgttgacagccgggatattccttatattccgggcaccgaacaattgaatatatcaaggactgcaacaggaattaaggctgtttccggaaaagcctatgacttctttattgttcccattacaggggctgcaacaccgggaacgccagtcacacgggatacagcaaaaacgctaaattctgttaatgccttcctgggtagcgatcctgtatcaggcggtctgactggtaacaagcagcttaccctgagcaccacccaggacgccgctgacggacagattgccgttaatattaacggaacgccactgaaagttggcagcactgctgcagttacggttggtaaagcaggtggcaaagaagagcatgttgctattgatatgaatgccagcatagtgactgcggatgtcaaggatggcgcttcgctcacctttacggctcctgtcgtatttgcggtggatatctga

SEQ ID NO: 381101 - DNA, 678 bp, Salmonella enterica
atgaaattgatttattttttcctgttcttaccctttactgtgaatgcctttaccgtggattcaatgataaaggtgtccggaaaggaaaattattttttggtcagtggcaacaacaatgacagggaatacctgtatatcacactgtctgaattaatcagcgataaaaataaccggtcccacgagatggtttttgatgcaagtaatgcaacgacctggccggttgtggcggagcctgctgatgtcattgtttcagccggagagcaggtaaagattaaaattattaacaattacgcttcctccggtaatgaccgtatttttggcatcacgtttactccggatgtactggatgagaatagcggcaaaaaatataaccttccccttgggtataaatcctggtttattgttcccggaactgaccctgtaaccgggattccggaggtcagaaaaggagagcgtacgggggattaccttatcagtaacaacaccaacaaggtgatgaatgttaaaattaactactgcagccatccgggtgaaaaagactgtacggcacagattatcaccagaccgtattcagataaaaaagtgtctctgggaaataatgtgacgtcagcggaaattgacttttatacggtttctggtgagcagaatacaacaccggtcaaaaaaataaaactatga

SEQ ID NO: 381102 - DNA, 1119 bp, Salmonella enterica
atgaaatcaggattactgtgcgtgattttatattttttgctgtcaggtgccgtttttgcagaaaccacggtgacgtcagattttgttatcacaaacagaaaaatagagagttataaattttcaagtacggagccaattgccacttttactgacaccggcaatggattatttcagatgcatgataactttactgatgcgaatatcaatataatgttatacgggaaccatcagttggggttaataagagataacagcctgtttaaaatcagaatgactggacagcggctgggacacagttttatggtgtcaggtaaatatgctaattccagttttcggataaacgtgaataatacaggtaacttctggacgctacacaagaattcaggctgttctgttatatcatctgacatgagcaacaatatttttactatcaactccagcagtaatgtggatgctgactgcaaaggcagaaccgacgatattgcttatccatacccgcaggatggtgttcttactgccagtggcatatcgcgtgatgtttacctggatatggggcgtttacagaatgataaagcttaccgggatgcgccgcctgatgtttataccgggcagggtactttttcaggggaaaatattagaaacagggtgcccaaaggtgacggatatcggatattgtataccaacaaaataaccattactaaaaacccttattttgaaggggtcaccttaccggcaggggataatgtgtttgatgtcagaaccacaggaagtgagattcgtggaaacctggttataccttatgttataaacgggtattttacgccctataataaaatcatcctgaacgtgacctcactgaacggatttaagctgaaagacatcagttcgccggataaaaaagaaataccttattccctcagtacaactacaggcagtcagagggtatatccggtggccataaatggcgtgaaccaggggaccgtcattatcagtaacctgcctggtgaaagttatgcccttcagggaagatttaatgcggatttttcagttgataaatcttcggctcagaccggggactacagtgacacgctgacggctgtttttcagatttcattatag

SEQ ID NO: 381103 - DNA, 231 bp, Salmonella enterica
atgaaagcgcggagaggacttaactttttgaatcagaacgtacggtcatacccggcgtttttttcgccatattccatgaaagcgcccggcgttacttgcggtgtatcttacggtgtgctggatattcctgtgtcccagatagtcctgtatgagtcgtgtatcaatccctttgtcagcaagggcgtagccgcaggcatgtcgcagcatatgaggatgtggcgctatcgttaa

SEQ ID NO: 381104 - DNA, 912 bp, Salmonella enterica
atgcaaaagaataatactttgcctcataaaaaacctgtatttaactggcagacggtcagtgaagccgttaaaataataaatcagtcaacaggaatttttttaactgaaagtgatatttatcgtcatgcgttggatggtgatattttcctttctgtctactttcagtctccggttgttttacgcaaaacatccagggtaaataataaaataaagctcagggatgccggttctcacctgataaaaagattatgttatcttgaaactgactgctttatacatgatttaaatcttatggcaggtacggagggtgacttcttccttccaaagtgcagtattatcgatacactactgacaggatatgaatatgtggcggtacagcgtttacttgcgcgtgagctttctctcccgttgcctgaaaaaggaaaaatttatcagaatctgggtgtttctgtttttatctccggggagatatttcagacatttgaaaagattacctggcaggaaagaataaaacaccagacggtaaaattaccgacaaatatggctgaagaaattaatgagtatatggccggaataaataacagtattctttatcagcgtgaatatttcccgcttcacgatttacccggcgatgcctgttttgtcatccggcgtactgaaattgagaaattactcgcactgtatacttccgttcccgcttccacacgtacctcttccgctctcgcccggttcttctggctggcctgctggcataatgaagccatccgttcattaatcggtcagccctataaactcttgtccattttcgaacagtgggccagggaggatgagatcaccgataaactcagcggcgacacgcttaaagccgcgctggagcgggggtgtcccttcccggacggtcagcgcaggtga

SEQ ID NO: 381105 - DNA, 204 bp, Salmonella enterica
atggcacatcatcagctattacggcttaaacaggttgaagccaaaaccggaataaagcgcgcacagatctatctgtatatgcaacagggcttttttccccgctccattaaaatcggtcctgccagcgtcgcatggcttgaatcagaaattgatgagtggattaaccggagactggctgaacgaaaccagaaacattcttattaa

SEQ ID NO: 381106 - DNA, 573 bp, Salmonella enterica
atgcttccgtcaattaactatatgacactgatttttgcattacaggctgtcagggaggggaatattaaatactgtaacaccatcgggctgacgctggatgaaatgagagaaattaataaactgtcgctggatgaactgttttttatcagcaaaacatccctgatgtttattgatgtatccgttaatcatgaacgtttaaaaaatatccttatccgctcacgtcaggaattacagtatcagcagcaaataaaccgggcggttcgcctcggtgcttcacatgaaattctttatacatattttggtctcaatacggttgacgttgccgcaaggcgaagattacttggcattaccatccccaacggacgtaaagttatcccggacgaaaatacagatgccagaatatggttattatggaagaaaaaacaccagaaaaacactgagtcactccaggccctggatgccatgatgcaaatcacggaggaattatatgacgaaggttatacattttcactgaccgttatcagaagtcgtataaaactttttgaaaataatatactgaaaggaggtggttaa

SEQ ID NO: 381107 - DNA, 210 bp, Salmonella enterica
atggctgatgagatcgaccgtgatcaggagcattatgacagttatcttgaatcactgattgaaaagaaacgttttcgccctgtatcatctgaatctttatattactgtcggctttgtggtgaacccataccggaagaaagaagaaaaattctgccgggcgtggatacctgttttgattgccagtctgaaaatgaacgccgccagcgttga

SEQ ID NO: 381108 - DNA, 885 bp, Salmonella enterica
atgaataaactgaactatgaactgaaaaacctgtgcaaacgtaaccatgacggggcgtttgtcacacaaaagaaccgtcataacggcctgcaactgatagccagccagctagagaccgtgggttttcatacgcgcgtcatgtccgtccatgacctgaaaggaaggcatgttaaccgcctggtgtcattatggaaacagcaggcgttatctgatgccacaatgaaaaaccgcctcgccatgttgcggtggtgggctgaaaaaatcggtaatccgggagcggtgaaaaccagtgaagaatacggtattagcagacgccaactggtgacgaatgagaacaaggcagagacgctggcggggaaagacctgtcgatgatttcaccgtgggtggcgctttcgcttcgcctccaggaggctttcggattacggcgtgaggagtcaatgaagttccgggtgtcatgggcgctgaaaggccagtcaccggacagcatcagcgtcatcagccttaaagcctcatggacaaaagggggacgtccccgctcgatccctgtactgacacaggagcaacgccagctactcgcagaagtacgccagcttgcgggaagtggcagtcttatccccccggatcgcagctaccgggagcacctgcgggtgtttgaacgagaaacagcatcagttggtactggtcatactcacggtctgagacacgcttatgcacagcgccgttatgaagaactgagcggacgaaagccgcccgttcttggtggaagcccccggcgagccatgcgacgggaagaacgccggaaggatgacgggataaggagacagatttcagaggaactgggacactcccgcatttctgttacagccatatatcttgggagttga

SEQ ID NO: 381109 - DNA, 3549 bp, Salmonella enterica
atgggaaaaggctctcctggtgataccattgatttttttaattatagagataataaatatactactaccgttaatgatgatggcacttggtctattgaaacagatgcagatgcctttggtgctatcccctctcaaggagcatattatacatggaaactaaatgtaactgacaactacggtatctcaacaagctatactactcgattaatttacgattccgtgccaccaacattaactgccactttagacagtagtagcaacaccggggtcgccaatgacgacattacatgtaaaaaacaacctatgttaagtggcacaacagatgccaatcaaacaattacgctcacattatacgataaagattatacaatcagatccgatgacactgggaaatggtcctttactgttccagacgaattacatgatggtatgtacgattatacggtgaaagccacagataaagcaggtaacaatacaactgtttcagggagctttactgttaataccaccccggtcagtgtggatggttccgttgatacgttagcagacccgaatatgaacaatggctggagtaacattcatcatcaaatactaaagggcacatctacgccttcttcaacagtagttatcaccattaatggtgataactataatcctgttatccaagaaaacggtgattggattcttgaactaaccaatctggctaatgggaactataactatgtcgtcacagctatgaatattgcagggaaccagtcaagtataactggagggtttaatattgatgacacaatacccactacaacagtaagtttgagcacagcaacggactctggtactctgggcgatttcattacaaacaatctgcatcctgtttttgttggtaaaactaagtccggcgctatggttacattggtaattaataacgagacttacacggttacagctgacagttcgggtaactggacgatccctgttagccaggagttgattcatggctcgtataattacaccgtcagtattgttgaccttgctaaaaacagcagcgatcctttcaatggcagtgtaaaaattgaaacagtactacctacagggacaataacggccgcactggatcctgatagtgattctgggatcaaaggcgacgctattacaagcactcaaacacctaatattactggtaacgcacctgcaggttctattgtcgtcttatcagtaggtgctcatacctacaaaactgtcgcatctgcaactggctcatggaaaatggcaatcactgatcctttaagcgaaggaatgcataattataacgtgtatatagaggatatcgccgggaatcagtctgctgcaatcacaggtagtgtaacaattgattgtaatatcattttggatattagtggccttagcctaacaactgactcgggggtaaaaggagattatacgacaaacgtcgcgatgccaacattaacaggcacagccgaaccgggatctgcaatacaactgataattaaggctgatatttatacaacaacagcaaatgctgagggccagtggagtgttactctctcagactcgttgccagatggcaattacttgtacagtgtctcagcaacagatattgctggaaacgtcattactgataccaatgaattaattattgatacgatagccccagctcaacttaccggatctctgagcgcagatagcgaaactggcagggctggtagcaatataacaaacgagcagtgtcctacgtttacaggtacgacagaaaatggggcaaccgttactctgactataaacagtaaatcctataccggaacggcgggaagtgatggacaatggacgattgtaattcctgactcggatccactgagcgatggcctccactcttataccatcaagactcaggatgccagtggtaatgtttgtggaatcgttgtttccgggaatgtaacggttaagcatactcccccatcagctcaggcggacttacaagcagggagcgatacaggaatcattggaaatcatttaaccagtgatactcaaccgctattatcaggtaagactgcaactggagccgctatagtgatagtttttgcaggtgtaaattaccctgtcactgtcaatgctgcaggagattggtcattcagaattcccacggtactcgctcagggaaattataattatcaggtcattgctacagataatgccggtaatacttctgccttcaatggagaattttctattgatacaactccgccagtagcgccggacgcttctttagctgaaaattcagattcgggctctgtaggtgactgtttgacaaacgataatacaccaaccctcacgggttcctgtgaggctggtgcaacagtaacactcatgattaatagtaaaacgtatatcaccactgcaaagactgatggtacgtggagtattacgcttcctgacgcggataccctgcaggataagacctacgactatacggttactgccacagatggagccggtaacatctccccccctttaacgggatcagtaactatcgataccacatcgccatcgtccccgaccggggggctggctcctgcctcaaacagtggtgatactactgataatattactaacgaaagtaagcccacatttatggggcacaccgaggctggtgcaacagtaacactcatgattaatagtaaaacgtatatcaccactgcaaagactgatggtacgtggagtattacgcttcctgacgcggataccctgcaggataagacctacgactatacggttactgccacagatggagccggtaacatctccccccctttaacgggatcagtgactatcgataccacaccgccatcatccccgaccgggtggctggctcctgcctcaaacagtggtgatactactgataatattactaacgcaagtaagcccacatttatgggaacagctgaagcacatgccgagattaagatgagtattaatcatcacgaatactctactaaagccgataatagtggtaactggagtattaaggttacggacgctcttgagaacaaaacgtacgactatactattactgcaaccgattcagcaggtaatattaaagaaatcaaaaatagcctaattatagatactcaggtaccacaagagccagtatttataagtggagtagataatacagatagcaatacatatacactctatgggaaaatggacggagatacaggaatacaagtaaaagttgagataaataatgaagtattcactgcaaatgtggataccagcactggtacatggtcagttaatgtacctcacgataaaattattgcgggtgaaaataactacatcataactgcaacagacattgcaggtaattcatcctctcatactggaacattttccgggagctcttctgatagttcagtaaccccgccaagagatagcatttcccctatctccaactcagtagatgagcatttaattagcgaaacagaattcacggtaacaacagaagatgagccacatcattatctgtaa

SEQ ID NO: 381110 - DNA, 510 bp, Salmonella enterica
gtgctgaaccagagctggtctgtcgattttatgaatgatgctttggtctgtggccgtcgttttcgcacgttcaatgttgttgatgactttaaccgcgaggcgttgtcgattgaaatcgatctgaatctgccagccccacgagtggtccgggtgctcgacaggatcgcggcaaaccgcggctatctggccatgcttcgcatggataatggaccggaatttatttcgctggcactggctgaatgggcagcgaaacatgcagtaaaactggagtttatccggccgggtaagccaacgcagaacgctttcattgagcgttttaaccggacataccgtacagaaatactcgatttttatctgttcagaacactgaatgaagtgcgggaaatcacagagaaatggttatcagaatataactgtgaacgcccgcatgaatcgctgaacaatatgacgccggaggaataccgacaacaccattatctggccgggatctcaaaaaatgcatggaactaa

SEQ ID NO: 381111 - DNA, 744 bp, Salmonella enterica
gtgaaaaacagcagaataagccgtgtgattttactcgcactggtggcagcatggagccagtgcagcccggcggccgtcaacgtcgaccggacccgtattatcatggatgcgccgcagaaaacggtggccatcacgctgaataacgatgacaaaaccacgccgttcctggcgcagtcctgggtgacggacgctgacggggtgagaaccgatgcgctgatggcgctgccaccgctgcagcgtattgatgccggacagaaatcccaggtccgtatcacccaggttcgcgggctgacagacaagctccctcaggacagggaaacgctgttctggtttaacgtgcggggcgttcccccgaagtcagaagacgacaacgtcctgcaactggccatgcagagccaactgaaactgttttaccgtccgaaagccattatcagaagcagcagtgaccagccggaaagaaagctgactgctgagcggaatgcgggacatctgaccctcagaaacccgacgccgtactacatcactgtggcgtggctgggagcagaccgcagccacaggctcagcggtttccgcgagggcgtgatggtgccgcccctggggagcctgcctttaaaggctgttctgccggcagaaacccggacgctgtgggtggggtatattgatgattacggtggactgcagatgaaccgctacgcctgtgatgccctgaactgcgcgtttaaggacgcaggggcgacatcatga

SEQ ID NO: 381112 - DNA, 342 bp, Salmonella enterica
  misc_feature (303)..(312): n is a, c, g, or t
gtgattattatcccaatggctgggctcagcagccgtttttttaaagcagggtacactaaacccaaatatgaattaaaagcacacgataaaaccttatttgagtgggcagtcaaaacttttgaacagtactatcagtcagaaaaatttatttttatctgccgtgatgtgtacgatacaccactgtttgttaaagctgaactgcaacatatgggaattaaagactacgaagtcgttgttctgactgctgaaacccgcggtcaggcagaaacggttttcctggccttggataaggtgcctaataannnnnnnnnnataatgaacctatcgttatctttaatatag

SEQ ID NO: 381113 - DNA, 768 bp, Salmonella enterica
gtgtcagtgtccaactctgactcagttgctgattttcccacctatccggatggcagtaagctgtacagctatggatatctgtttgttgagaaaatcggggaagtctggtttcagcactattacgcgcatatgggcgcgaacgcaaagcgccaggactggggaactgtaccgaataccagccgcccgtgggttattgactacaacaccgcaaataaaccttcagccggtgatgtgggtgcattgccgattaccggggggcagcttaacggtccgctaagcattggtactgataatgcgctgggcggcaattcgatcgttcttggtgacaatgacactggttttaaacagaacggcgacggggtgcttgatgtttactcgaactacacacatgtattccgtttcatcggtaatcttgtggagagcatggtttccctgaaagtaaacggaaacgctgtagccacaagcgaagtacaggcaggaaatggctcatcgcgcatgactagtaacggcgacatctttggttctgtctggggaaatagctggctgagtctttggattaataacaatttcgtcgcagatgttcagttaggggctggcacatcagtgtctacctggaacaatgcaggctcatggcctaacactcccggatatgttgtcacttccgtctggaaagatgcacaaggcgaaaacattgatggtattacttacgcgcctttgcaaaaacgagtcgggagtcagtggtataccgtgcaagggggaacgacataa

SEQ ID NO: 381114 - DNA, 231 bp, Salmonella enterica; identical to SEQ ID NO: 381103

SEQ ID NO: 381115 - DNA, 405 bp, Salmonella enterica
ttgcgtgaaaatttcaatctaaatggcatttatagtggtgaagatatattaaaaattcttgaatcctgctgcaataatattaatgtttctaaagaattaattgatgaaaaatatgtggatgaactgaatctttcaaatggtgagaaacaaaaattgtcgttgatgatgttgctctataaaaaacctgatcttattttcatggatgaatctacttcatttctttcatctgaggatgctattatttttctgagtactcttagaccatattataaaaatagcattctattttttgctacgcatgatcattcgttgtcgaggttttttacgcatactattgatttatcaaataaaaataacattggtcttgccaacaaaacagtcaatatacctacgataaatatttaa

SEQ ID NO: 381116 - DNA, 849 bp, Salmonella enterica
atgttacaaatattcacgtccaatgcagtcaaatataataaactactatttgaaaataaaaccaaagcgcagcatataaaaaatgtgcatgtgttaaggtcaacactactaaaactcactcatggaaaaattgttattactaacgcatttggtcatgctttttctgaagtgggtcctgccatgttatttataggtaaaaaccaagagattaatatagaattacagcatgtagattccaagttgctattcagtattgtagagatcgattcatgtagtatgaagacagcatgcgatgtatttatgaaaaatcgaactagtcatttcatagagagtgacaattgtaacttgagaataatgagtgcaccaatacctccaggtggtgaagatgtatttgaaagtctgattaacaatcatagcaataacagcagtaatgtaaatttcttttctttaatttttatattatcatcatttttggaatgcgtgggagttgtagagttattttatggttcaatgagggatttgtggaatgaaaaagtatataacattatttcaactgatgttagtcgtagatggacgttgaaagatatttctgaaattttgtatgtaagtacaacaacactaaaaaggaaattagcaggtgaagattcctctttcagtagtatatatcttaatgcaaggatgaattatgccgcaaggctgttaagagtagaggggaaaaatattactcaggtatccctgttatgtgggtatgacagtccatcttactttgcaagcacttttaaaaaatattttaaaataacgccatcagaattcgttcggatagttaaaaatacatataaacagaattag

SEQ ID NO: 381117 - DNA, 1005 bp, Salmonella enterica
gtggccggccggacgttccgttttaatcccgaccaggcgctgcgtctgtggctcgtattcgtacgtggtcaccacgccgttgccgtgctccccgcgcagcttctgcccggcggcggaatacgtcagggacttcacgataacctgttccgtaccatccttcagcgtcagccatctgcccgagagcaggcctgccacatcgtatgccacccgctgcctgttaccctgtgcatccgtcgtggtcagcaccgccccggtggcgtcagtggtggtcagggtggtgacccccccgtcaccgggcagcgtgttccggacggaggcatccgtaccctgccagtcggccacgatatcggggttgtccgcatccttcagcagacggcgggtgacggagagcggtacgccggtcagggccacgctgtcagtctgcatcaggcctgcggtgtcgtaatggctgacacactggcccgccagattcagcgccttctcctcaggagagttgccggcccagacgaagcgctccgtgatacgcgcggcttcgccggagacctgctccgtaatgcccaccgggcggcccggcagagacacaccttcatactgccaggtgcgggtcattgcctgactggcgtcttccgtgccgtcgtcagcagtgccgatattactgacggtcataaacggccggcctgcggcgtcgttcagcgccacagtgataccgttatccaccccgtgcgtgcgcaggacgttgccggccaggtccgtgaggaaactgaagtttaccagcccggcctcattcaggcgcgggtcggcgctctgcgtcagaaagccgcgggcgtcgtactgatggcgggtgatgcgctcactggtcacatgcggggagtcggggtggcggtaatacgcgttgttgcgcacggtcagtccgcggttgtcgaggaccgtgaccgtcggggtgttactgaacaacgaagtgctcatggtattctcctgtttaggttatgttgccagtcagactga

SEQ ID NO: 381118 - DNA, 1176 bp, Salmonella enterica
ttgagctcatctgagaataatgttgatgaaggcagttctgacttaactgacaataatattcactaccgagaggatttgagttcatctgagaataatgctccaggaaacaatcatagttcagctaacaataataatcggcaactaattgatagtattaacaatgcttctactaaagataaagttgaactcaatgcaacgcctgtgcaagaggcgaaacaaaaacacacgcaccgaatatctgataactcacttttctccattattggcatagcgacgctgcttcttggggtaggtattgatgtgctaggtttcacgttacgaggggagagttctactgccgacacggcggaagcagatcaacttgttgatattccagccgacttacaggatgagattaccagcctggaaaatagtatggagcttgaagatcagattagcagtatgctgaacgatattgctacacaatgtgaagacaacgtcacacaaataactgaagttgcagagtggctttcttcagcacaagatcaaatcctttcagacatcgaaaggaaagcttatgatacagcgctggtacaaacagaggcaactgctttcgctgatccaaataaccaacagatgacagtcgacgattatggtaacttggttccaactggtcaattgaccactgctgcaaaagaggaatgcgaagaacaagccactcaaattgcgcagcaagcaaaaaatatggcgagcacagcgttaagctctacaattgaccggattaatgcaaaggcgacggatataagcaaagtcagtgatactctggctaacgccagcagcactgccaacgatattagtcaatcaacacagaccgttataaacaaactggggaacattgaacaaaccgtcgaaaattacgtgaatagtcaaccatctgcaatacaggatgatataactgcatctgacaatgccggctcgtcacctgaggagggaggaaatgatatgtatgcggcggccactgatgcccgatctgatcttagtagcaacggatcgttagccgcgagagacggatcgttagccgggagaatagacaatcttgcggaagatatagaatctgacagcagtgattcgtcgtcagtctatacggaggatacatcagattctgtcgatatcggaacgttagtaacgttagtctag

SEQ ID NO: 381119 - DNA, 486 bp, Salmonella enterica; identical to SEQ ID NO: 377953

SEQ ID NO: 381120 - DNA, 201 bp, Salmonella enterica
gtgaccggacttctgcagacccgatataacagactgaatttcaccgtacaatgcgcaggaaatatccccccagcagtgcaaaaccaatcggtcactgaacaacagctcatcgctgataaccagaaccggatggtccagaagcagatttttcagagcgtagaaaaggtaaatatgttcgcgtggccggagacacagtattaa

SEQ ID NO: 381121 - DNA, 834 bp, Salmonella enterica
atgtacatatcacttcctaaagcaattactagcctttcagtcttaaattgcatattaaatcaagtcagcaaaccaaatggtatatttgataactcgaaggatagttctattggtaaattcttagaacaatttatctgggagcaaatggcccaacataacataaaatgctatagaggtgatttcaaatctaaagataaaaaaacaaaaggagattgtgacttacttataaaaaatgataattacattttcctttttgaaattaagaaaaaatcactcacaagaaaggccatgtcaggaactgacttccaaataataaaagatctagctgatagcgttatgcgctctcaatcacaatgtgccaaaattgagcatgttttactttctgacaaagaactaacattaacaatagataataataaagaaactatatattataacaatgaacgtatttttaaagtgtcgttaagtttacatgattttggtgccttacaggacacaaatattctttcaacaattttaaaactttctatgcaggtaaattttaacgccgaagacgaaacgataaacaatatgctttcaagctggaggcaatatgtcaataccttcacagaatacactattaaaaatagaaaactgatggaggttgaagatgataactttagaaataacattttcatgagcatacctcaactattaacaatacttgatgatagcaatagcacaaatgaatttatagaaatttgtaaaggtgcgcaacatatgacttattccactcgctgtttctacaaagaatacagtttaagaaaagggttgtataaaggtaggagtaattaa

SEQ ID NO: 381122 - DNA, 852 bp, Salmonella enterica
atgaaggataacgatgggcgtgttacagaatggcttgacctggcatatccacacaagtcatttaacgttgtagcgcttatgtataaaaataatcctatgctaaagttatatcatcgaatctttacgcaagaaacaaagaaaatacttgacgaagctgaaataaatgaatccagccttaaaaaactaaaacctaataaaagacaaaaaacatcgagagacatgaaatatactaaaacaaaattaaagaactatgcagcacatgccggatttttaaatgtacccagcggcagcggtgaaactccgagatttaaatctggatttgtaaatttacccggaagcctgagcaataaaaacacattcccgggagtccgtctgatagatgaaaaaatcaaaagaaggtttgaggattactctccagaaaagctaaaagaatcaacaaaatggagacctgaaacgagccttggttattatcgtgtggaaaatgttgacattttcatttctgaaatcaagaaattatatgcagcgtcaggttcggagcttcatgaggttgttgaacgtaggatcagaaatcatctggcgagcaataataatatattaccaagaatggctgggattgcagggcttcacgctgaggtacaggcgctgaaccatatcatatccatgactgatactgaggctagtgtagctagtaaactcagttccagttacatatatacccaacgtctggttggagccagaaatgaggatttccctgcatgccataactgctcaggaattattaatgggcttgaaaacatcatgacagggagagttgaaggtcacacaagattaataagaaggaaatccatctga

SEQ ID NO: 381123 - DNA, 201 bp, Salmonella enterica
gtgaccgtacttctgcagacccgatatgatggtctgaatttcacagtacggggcgcagggaatgtctccccagcagcgcagaaccagccggtcactgaacaacagctcatcactgatgaccagtaccggatggtccagaagcagacttttcagggcatagaaaaggtagatatgctcccgtggccgcaggcacaggattaa

SEQ ID NO: 381124 - DNA, 585 bp, Salmonella enterica
atgggagttatagttgctgtggtttttcagggagcaaatattactggtattttcgatattatgagtaatggatacagagttgctgatggacctggaataattaaaataatgttagaccaggggggtgtccaacccatgatgtggactttttcgttatcctttatcggcttcagtcttggaggagttctcgacaaagtcggatatcttaatgctgttttatcaagagccaccgcaagggcacaaggatgccgtaaattatcgctgataacatatgttaccgggtggttgggctgtgctgttacctcagaggtttatgtcgcccaaatgctaaatggtagaatctacaaggatgtctatgaacgcgagggaatagataacgccatgttaagccgatatattgaagagagtacaacagtatttgatatgtttttaccctggactacaggaggggcttttatggctacagtgctcggcgtagcaaatttacattatttaccattttcctttttctgtttgcttacacctgtggtatcaatggtgctgacaatcttcggtattggtataataagaaaacggagtatttga

SEQ ID NO: 381125 - DNA, 354 bp, Salmonella enterica
atgggtaaataccggactgttaagcaggctgaggagatttccctgcgggaagccggatacaatgcgttcctggcttcgcgtggcaaaataataattaccggcttccttcccatattctttttcgtattcacaccgtaccttttcactgtccagcaggcggccggagtaggggcccagtacggtaaacgccgccagatcggttcgcgcgtagactgtgcgccccctgtaaccgtcgctgtcatcaaggggaatagcgacggacatcatggcattcattcgcgcatcatgctttccttcattttgcagaaaccagcgaatatcctgattaattctggcttttatctgccggggtaa

SEQ ID NO: 381126 - DNA, 312 bp, Salmonella enterica
atgatagattttgataatgacatgcaagaaatgaaaagaaaaaaagattttcacccgctccagcttttaaataagcacgatagaacaagtttagatttagagatattaaatattattagaatatcacttgctagcaaaatgttagatattcaaagtgaagaactattgagtgctgatttatattttaataaaaaagatgagttagacatgggggaggatgctagaataataggttttgtgtttagagactttgtaaaacaaagaatagaaacagcgattaaaactattgaagaagagagaagtatatggtaa

SEQ ID NO: 381127 - DNA, 204 bp, Salmonella enterica; identical to SEQ ID NO: 186315

SEQ ID NO: 381128 - DNA, 204 bp, Salmonella enterica
atgttgctccctgccatcagcctcagtgagcgtcacatccaaatcatttccgaacccggagggggtaatatctgttatttcaaatgggccaggcggtacagtgacctgttttatgatattaccattctgtttaacggtgaccttagcattggtgttagctacccctttgatagtcggagcataaccagactcagctccagttaa

SEQ ID NO: 381129 - DNA, 351 bp, Salmonella enterica
atggcatttaatattgataaatataacaaattgaaaaaagaacttgaacaaaaagaaaacttattcaataggttggagcaagaaatgaaagctgaaaaaagaaaagaagatacagcgcgtaaaataaaaattggtgctgagttaataaggatagttagagaaaatagcaaagaggtatctgacgagttagattttactaatgatttatcgctattggtcggggctttaactaatcatatggtattaaaaagaatatacgatcagcgcgagtttttgagagcggaaggggataagaagcttaacgaatggaaactaaaaaataataaaaaaaggagtaaaacggatgaataa

SEQ ID NO: 381130 - DNA, 1017 bp, Salmonella enterica
atgattgaaatagaaaaagtctgcgtcgattttaccgccgggcgcggtacctccacgcgcgcggtggatgatgtgagcctgcatattgccgcgggcgagatttttggcattgtcggtaccagcggcgcaggaaaaagcacgctgctgcgtaccctgaacgccttaacgcgtcccagccaggggcgcgtcaacgtcaacggcgtggaaatttcggcgctggacggaaaagcgttacgccaggcgcggcagcgtattggtataattttccagcattttaacttaatgcatacccggacagtggcgcaaaacgttgcgtttagcctgaaagcggctggctgggaacgcagcaaaatcgcgccacgggtggcggaaattttaacgctggtgggccttgccgataaagcgaaccgttttccggtacagctcagcggcgggcaaaaacagcgggtggggatagcgcgcgctatcgctaaccatccggatgtgttgttgtgtgacgaaccaacttccgctctggatctggaaacttccgccacgattctggctctgctcagacagatcaacgcacagctcgggattactattgtgctgatcacccatgaaatgaacgtgatcaaatctatttgcgatcgcgtggcggtgatgtcgggcggtaaggttgtggaatcgggcgaggtgtttgatgtgtttgcccacccgcaacacgctttcacacagcaactggtgtctcatacccttaatttgaccctgccggaacgtttacgggaacacctgcccgggcagttgctgaaaattttgtttatcggcgattcggcggagcagccggtactgtcggaggtggcgatcaagtttggcgtcgcggtcaatatcctgcatggcaagattgaatatatcggcgaacgcgcgttgggcattctggtggtgcaattaaccgcgccgcataatccaacggcggtggccgccgccgtggagcatatccgtcaacgtaccgcacaggtggaggtgatccgtggatga

SEQ ID NO: 381131 - DNA, 528 bp, Salmonella enterica
atggaacaggcgatcaacgcgccgcgcggcgatatctctgaatttgcgccgcgtatccataccatcaagatcagcacggacaagatcaaagacgtgatcggtaaaggcggttctgtgatccgcgcgctgactgaagagaccggcaccaccatcgaaattgaagatgacggtactgtgaagatcgcggcgaccgacggtgaaaaagcgaaatacgctatccgtcgtatcgaagagatcaccgcagagatcgaagtcggccgtatctacaatggtaaagtgacccgtatcgttgactttggcgcgtttgttgccatcggcggcggtaaagaaggtctggttcacatctctcaaatcgcggataagcgtgtagagaaagtgaccgattatctgcagatgggtcaggaagtcccggttaaggttctggaagttgaccgccagggccgtgtacgtctgagcattaaagaagcaaccgagcagtctcaacctgcggctgcgccggaagctccggcgagcgaacaggccgagtaa

SEQ ID NO: 381132 - DNA, 492 bp, Salmonella enterica
atggaagtaaaaactcaatcctgcgttgttgcgggtaagcgtgctgttgccgttacggaacaaaatattgaatggaataataaaggaacactcgtacaaattacccgtggcggcatttgtgggtctgacttacattattatcaggaaggcaaagtcggcaattttacagtaaaagcgccaatgattttagggcatgaagtgattggcaaaatcgttcgtagcgactcagatttattacgagaaggacaaccggtagcgattaatccatcgaagccttgcggtcattgcaaatactgtctgcagcatgaagaaaaccactgtattgaaatgcgcttctttggcagcgccatgtattttccgcatgtcgatggcggttttacccgatttaaagctgtcgataccgctcagtgcattccctggccggaacaggcggacagaaaaagccatggcctttgccgaaccgctggcggttgccattcatgcggctcatga

SEQ ID NO: 381133 - DNA, 1371 bp, Salmonella enterica
atgaaaaaatatgaccgaggctgggcatcgctggaaactggcgcggctttactgattgttatgctcctgattgcctggggagcgggcatatggcaggactatattcaaacaaaaggatggcaaactgaagcacgtcttgtcagcaactggaccagtgcggcccgctcttatatagggaaaaactacacgactctccagggcagtagtaccacaacaactcctgccgttatcacgacaaccatgctgaaaaataccggctttttgtccagcgggtttactgagacaaacagcgaggggcagcggttacaggcatatgtggttcgaaacgcccaaaacccggaattactacaggcaatggttgtatccagtggtggcacaccttatccagtgaaagcacttatccagatggctaaggatattaccactggtcttggtggatatatccaggacggcaaaacagccacaggtgcattacgttcctggtcagtagctttaagtaattatggtgccaaaagcggtaacgggcatattgccgtattgttatcgacagatgaacttagtggtgcagctgaggacactgatcgtctttacagattccaggtcaatggtcgccctgacttaaacaaaatgcacacggccattgatatgggatcaaataacctgaataacgttggggcagtaaatgcccagacaggtaatttcagcggcaatgtgaatggtgtaaatggcactttcagcggtcaggtaaaaggcaatagcggaaactttgacgtaaatgtcaccgctggcggtgatatcagaagtaataatggttggttaattactcgtaacagtaaaggctggctcaatgaaactcacggtggcggattttatatgtccgatggatcatgggttcgaagtgtaaacaacaagggcatctataccggcggtcaggtgaaaggcggtactgttcgggctgatggtcgcctttatactggtgaatacttacaactggaaagaactgccgttgctggcgcatcatgttcgcctaacggccttgtaggccgcgataatacaggggcaatactttcgtgccaatccggtacttggcgtaaaagcaattctggtagtacggtgataactggtcgtatagcaaatggtcagcaaataccgctgccaacaggattttctgccagtcagtgctcatggagtgtgagcaatgcagaaaaccctcaaggttggaagccgaattactttgcaggatcagttgcaacttatgatgcaaatcgaattgttaaatgtggtttttatgatgaatacaatttccataaagggacatttagagctgatttaaccggaaaatgtagttatgtcgtcgcgtgtcagaactga

SEQ ID NO: 381134 - DNA, 657 bp, Salmonella enterica; identical to SEQ ID NO: 79122

SEQ ID NO: 381135 - DNA, 561 bp, Salmonella enterica; identical to SEQ ID NO: 79123

SEQ ID NO: 381136 - DNA, 615 bp, Salmonella enterica; identical to SEQ ID NO: 79124

SEQ ID NO: 381137 - DNA, 1098 bp, Salmonella enterica; identical to SEQ ID NO: 79125

SEQ ID NO: 381138 - DNA, 1554 bp, Salmonella enterica; identical to SEQ ID NO: 79126

SEQ ID NO: 381139 - DNA, 453 bp, Salmonella enterica; identical to SEQ ID NO: 79127

SEQ ID NO: 381140 - DNA, 1296 bp, Salmonella enterica; identical to SEQ ID NO: 79128

SEQ ID NO: 381141 - DNA, 1683 bp, Salmonella enterica; identical to SEQ ID NO: 8476

SEQ ID NO: 381142 - DNA, 438 bp, Salmonella enterica; identical to SEQ ID NO: 79130

SEQ ID NO: 381143 - DNA, 1068 bp, Salmonella enterica; identical to SEQ ID NO: 79131

SEQ ID NO: 381144 - DNA, 591 bp, Salmonella enterica; identical to SEQ ID NO: 19457

SEQ ID NO: 381145 - DNA, 453 bp, Salmonella enterica; identical to SEQ ID NO: 79133

SEQ ID NO: 381146 - DNA, 255 bp, Salmonella enterica; identical to SEQ ID NO: 79134

SEQ ID NO: 381147 - DNA, 567 bp, Salmonella enterica; identical to SEQ ID NO: 19456

SEQ ID NO: 381148 - DNA, 684 bp, Salmonella enterica; identical to SEQ ID NO: 79136

SEQ ID NO: 381149 - DNA, 534 bp, Salmonella enterica; identical to SEQ ID NO: 79137

SEQ ID NO: 381150 - DNA, 288 bp, Salmonella enterica; identical to SEQ ID NO: 79138

SEQ ID NO: 381151 - DNA, 1077 bp, Salmonella enterica
gtgtataaatacacggcacaatcgctccgccataagcgacagcttgtggcaggtctgaagaatactccatataacgcagtacactggagtcagttagcacccgaagagcagatccgtttctgggaagactatgaagcgggaagggcgatcactttcctggttgaaccggaaaggaagcgcacgaagcgtcgtcgtggtgagcactccaccaaacccaaatgcgaaaatccgtcctggtatcgtcctgagcgctataaggcgctgagcgggcagctcgggcacgcctacaaccgtctggtgaaaaaggacccggtgaccggcgagcagagcctgcgcatgcacatgtctctgcatcctttttacgtgcagaaacgaacgtatgccggtcgcaaatatgctttccgtccggaaaaacaacgcctcctcgatgccatctggccggttctggtcagcttcagtgatgcgggcacacataccgtaggcatgagtgtttcccgtctggccagagaaatcagcccgaaagacagcaaggggaaggttattccggaactggaagtgacggtctcccgcctttcccgtttgctggccgaacaggtacgttttggtgtactgggtgtttcagaggaaaccctgtgggaccgtgaaacccgccagcgtctgccacgttacgtctggataacaccggcaggctggcagatgctgggcgtcgacatggtaaaacttcacgaacagcagcagaaacgactgcgtgaaagtgaaatccgccagcagctcattcgggaaggtgttctgcgtgaggatgaagatatctccgtacatgcggccagaaaacgctggtatctgcagcgcagccaggatgcactgaaacaccgtcgtgcaaaagcggcagccagtaagcgcgccagacgcctgaagaaactgcctgccgaccagcagattcatgagatggcagagtatctcaggaagcgtctgccgccggatgaagcctatttttgttccgatgaccatctgaagcgactggccatcagggagttgcgtcagcttgaactgacgctggctgccccgccaccgcactag

SEQ ID NO: 381152 - DNA, 504 bp, Salmonella enterica
atgagtaaatcaggtgcagaaaaaattcaattcatcctgaataatcatgaacaggcatacagacgcctgaagcctgtatatacttttttagaactggcatcctggatttcagttgttctgctgattatatacctatcaggcaagaatcacgtgcttacagcagcttttctctgctttgcatggacagcattctgggttcttttccttttacattatttcccaaaagttttctctattctcgatcgtcagagtctgctcaacctcatggaggccaccaaagactcaccagatgtaaagcaggagctgcttaaccgccttttttccggaaaaagaatgaccgggcgggatgaaatggatatctgccgtcttctgagaaaaaatgaagaagaaaaaatccgtcagagtgaactgaatatcatcatgaattttattgatgaacagcagttaacgaatagtgatattccgaagaaaagtacggtcccaaatgaagataaaaaggcataa

SEQ ID NO: 381153 - DNA, 597 bp, Salmonella enterica
atggaaaaaaatcaggaagaaaggaaaatccccgtcattgtagtgaaaaaacgtcgtaccttttcgttaccttccttatccgaaaaaacagatattatcgaatctgcatttactgaacaggcagcagaatcagcccacgccggaataaattcatctgccgtcgaaacacatatccccgaagcaccagccaggaagaagaaaaaacgccgtttcccacgtccctcccactggaccagagagtatactcacgagtgcgtggaaaaaataaagatcctgtttcctcatcttcgtgctgaaggtggtggatttattcccctgaaaattggcataaacaatgatatttcagcatttctggcagaacacccggagacagaactgaccatggacgaatggctctgtgcagtgtcctgcatcacctcacgccgtgtatatctgcagcggacagctgtcgccggcgtcccacgttatggtctggatggtcacccaaaagggcaggtctcagcatctgaagcacagagtgcaggtcgcagactggtgacattagaacaaaagtggctcaggatgcaggcacagcaggagaatatttctgggcaataa

SEQ ID NO: 381154 - DNA, 1347 bp, Salmonella enterica
atgccaatgatacttgtaaagaagaatccccggggcaaagtgattcgggagcttagcagtgaggaagagactgcagtaaagacggtctgtggactgaaaaagccagcaaccatggcacaacataacctggccaatgatcttctccgggaaatgcgtgagtatgatgcatggttacagtgtgactgtattccgggagattcgccggccatgaattttgctgctcttaaaaacaatacgggtactctttatctgtccagttttaatcatgagcatgcacctgaatgccccatgtatcgtcagttatccggaaatgaagaggaaacatccttcggagcaagccggcatcccgttagcacccgtataaattacagaaactttttaccacctgatgacagtaattctgttatcagactgcagacccgctctgcttaccataatggtgagcgctcctccgttcgcaagaaacgtccgcgccttggccgtttactcctgtcgcttattgaagatgcagggctgaataaactggattccctggctaatccccgtatccggactaattatcgtgagtgtcttgatgccatacggcaggttacactacagcaggagtatattcggggaagatccttatctgaaattatccatttccgtccaggaatgtctgaaaggtctcaggagcggttaatggaaacgctggagaattcagaacgacactggcctgccagaagaaaacatatgttctttcagatttttatggcgcagcacatctgtcgtgatgctgtggaaattcactgggcgaacggtaatattcaggtcatcaggcctatgcgggggatcagtattaatggtgaagcgcagggcggaatacgtcccccttactgggttattcttgctttttgccggagtgccgatggcagaatcatctgcagtgaagggtatgctcatgctctttatcaactgacatgtccggtgcctgtggacagcaaactggaacgaaacacgctcactgctcttctgaatgtggccagctggcttaaaagaaagccaggtacgccggaattaagtctggaaaggcccctgtttgatacagaagtttatgttaatggtgaaaagaaatatgtactgccggatttcattgtcacagcaagggctcctgacggaaagacggccagagtggtcatcgaaacgatgggatatgaagacagtgattactgcgcgagaaaatccaggcagcataccggcatgaagcagattggtgttctgcataccgatccaccgaaatggctggataacgatcatcccccttttaagaaacatatgtacggtgtttttatgcatctcaggtactga

SEQ ID NO: 381155 - DNA, 1881 bp, Salmonella enterica
atgtctgaccctgtacgtattacaaatcccggtgcagaatcgctgggatatgattcagatggccatgaaattatggccgttgatatttatgtaaaccctccacgtgtcgatgtctttcatggtaccccgcctgcatggagttccttcgggaacaaaaccatctggggtggaaacgagtgggtcgatgattccccaacccgaagtgatatcgaaaaaagggacaaggaaatcacagcgtacaaaaacacgctcagcgcgcagcagaaagagaatgagaataagcgtactgaagctggaaaacgcctttctgcggcaattgctgcaagggaaaaagatgaaaacacactgaaaacactccgtgccggaaacgcagatgccgctgatattacacgacaggagttcagactcctgcaggcagagctgagagaatacggattccgtactgaaatcgccggatatgatgccctccggctgcatacagagagccggatgctgtttgctgatgctgattctcttcgtatatctccccgcgaggccaggtcgttaatcgaacaggctgaaaaacggcagaaggatgcgcagaacgcagacaagaaggccgctgatatgcttgctgaatacgagcgcagaaaaggtattctggacacgcggttgtcagagctggaaaaaaatggcggggcagcccttgccgttcttgatgcacaacaggcccgtctgctcgggcagcagacacggaatgacagggccatttcagaggcccggaataaactcagttcggtgacggaatcgcttaagacggcccgtaatgcattaaccagagctgaacaacagctgacgcaacagaaaaacacgcctgacggcaaaacgatagtttcccctgaaaaattcccggggcgttcatcaacaaatcattctattgttgtgagtggtgatccgaggtttgccggtacgataaaaatcacaaccagcgcggtcatcgataaccgtgcaaacctgaattatcttctgacccattccggtctggactataaacgcaatattctgaatgaccggaatccggtggtgacagaggatgtggaaggtgacaagaaaatttataatgctgaagttgctgaatgggataagttacggcaacgattgcttgatgccagaaataaaatcacctctgctgaatctgcgataaattcggcgagaaataacgtcagtgccagaacaaatgaacaaaagcatgcaaatgacgctcttaatgccctgttgaaggaaaaagagaatatccgtagccagcttgctgacatcaatcagaaaatagctgaagagaaaagaaaaagggatgaaataaatatggtaaaggatgccataaaactcacctctgatttctacagaacgatatatgatgagttcggtaaacaagcatccgaacttgctaaggagctggcttctgtatctcaagggaaacagattaagagtgtggatgatgcactgaacgcttttgataaattccgtaataatctgaacaagaaatataacatacaagatcgcatggccatttctaaagccctggaagctattaatcaggtccatatggcggagaattttaagctgttcagtaaggcatttggttttaccggaaaagttattgatcgttatgatgttgctgtggagttacaaaaggctgtaaaaacggacaactggcgtccattttttgtaaaacttgaatcactggcagcaggaagagctgcttcagcagttacagcatgggcgttttccgtcatgctgggaacccctgtaggtattctgggttttgcaattattatggcggctgtgagtgcgcttgttaatgataagtttattgagcaggtcaataaacttattggtatctga

SEQ ID NO: 381156 - DNA, 348 bp, Salmonella enterica
atgaaactggatatatctgtaaagtatttactgaaaagcctgataccaatcctcattattcttacagttttttatctgggatggaaagataaccaggaaaatgcaagaatgttttatgcgttcatcggatgcattatcagtgccattacttttcctttttcaatgaggataatacagaaaatggtaataaggtttacagggaaagaattctggcaaaaagacttctttacaaatccagttggcggaagcttaactgcaatatttgaattattctgtttcgttatatcagttcctgtggttgccatttacttaatttttatactctgcaaagccctttcaggaaaatga

SEQ ID NO: 381157 - DNA, 258 bp, Salmonella enterica
atggatcaggaaatgacgttttcactcagctatgaacaactgacccggtttgcggaacgacgcatccgggaatgcaatctggacagccagggcgcgatttatctctgcgagtcagccaaagccggagccgtgctgatcttctggcatgaactggccataaatggctatgcctcaatgaatgccataaagagacaggagctcattgacgccgactttcagcgcctcagaaacctcatctggccggaggatgacaggtaa

SEQ ID NO: 381158 - DNA, 255 bp, Salmonella enterica; identical to SEQ ID NO: 36034

SEQ ID NO: 381159 - DNA, 927 bp, Salmonella enterica; identical to SEQ ID NO: 36033

SEQ ID NO: 381160 - DNA, 414 bp, Salmonella enterica
atgttttttattgagaatgaaggtcagactgtcgccggaacggattactggcagtctgtacaggcgcaggccggatatgtctacctcagctggaatgccggcgcagccaggctgcttgtcccggatgcggcaaaacatttactcagggagatgcggggagctgagtacgtcatcatcagtaagggaacgctccatggccgcgatgcgctggaactggtatttgaagacggcagcgatgcgccgttcgtgatccacatgctgagtgagcagtgcgatcgcctgctccccgaaaacaaccagggagggggttttgttgtcaccgtctggacgcgtggcggtaaccagctccgttatccgggaaagtaccgggttgtggaaaacctgcccgatgtttccccgtggagtgaacactga

SEQ ID NO: 381161 - DNA, 645 bp, Salmonella enterica; identical to SEQ ID NO: 113258

SEQ ID NO: 381162 - DNA, 309 bp, Salmonella enterica; identical to SEQ ID NO: 8541

SEQ ID NO: 381163 - DNA, 981 bp, Salmonella enterica; identical to SEQ ID NO: 8542

SEQ ID NO: 381164 - DNA, 417 bp, Salmonella enterica; identical to SEQ ID NO: 8543

SEQ ID NO: 381165 - DNA, 438 bp, Salmonella enterica
atgagtaccgtttatcaccgtccggctgacccttcaggcgatgacagttacgtgcgaccgttgtttgccgatcgttgccaggccggttttccttcgcctgccactgattatgctgagcaggaactggatctgaacagctattgcatcagcagacctgcagccaccttctttctgcgcgccagcggtgaatcgatgaaccaggctggcgtgcagaatggtgatctgctggtagtggacagggccgaaaaaccacaacacggggacatcgttatcgctgagatcgacggtgagttcaccgtcaaacgactgctgttgcgcccacgcccggcactggagccggtttcagacagcccggagttccgcacactgtatccggaaaacatctgtatttttggtgttgtcactcacgtgatacacaggacgcgggagttacgctga

SEQ ID NO: 381166 - DNA, 249 bp, Salmonella enterica
atgatccgcattgaaattcttttcgaccgccagagcacaaaaaacctcaaatcaggcacacttcaggcgctacagaatgaaatcgaacaacgtctgaaaccacactacccggaaatctggctgcgtatagaccagggcagcgccccgtctgtatctgtcacaggagcccgcaacgacaaggataaagaacgtatcctgtctctgctggaagaaatctggcaggacgacagctggctgcctgcagcatga

SEQ ID NO: 381167 - DNA, 927 bp, Salmonella enterica
atgccaaactggtgctcgaatcgtatgtatttttctggtgaaccggcacagatcgctgagattaaacgactggccagcggtgcagttacaccgctttatcgccgcgccacaaatgaaggtattcagctgtttctggccggaagtgccggacttctgcagatcactgaaaatatccgctctgaacagtgccccggagtgacggctgccggacgtggtgctgtatcgacggaaaatatcgcgttcacccgctggctgacacacctgcagaacggtgtactgctggatgagcaaaactgcctgatgctgcatgaactctggctgcagagcggtactggacagcgtcgctgggaaggattaccggatgatgtcagggaaaccatcactgtgcatttcaccgcaaaaagaggtgactggtgtgacatctggggtagcgaggatgtatcggtgtggtggaaccgtctgtgtgacaacgtagtgccggaaaaaaccatgccgtttgacctgctgacggttctgccgacccgcctggatgttgaagtgaatggctttaatggtggtgttctgaacggtgttccttctgcatatcactggtatacagaacggtatggcgtgaagtggccttgtgggtatgacctgaatatcagtagtcagggagacaactgcattcaggtggatttcgacacgccgtggtgtcagccggaaagcgacgttgttgcagcattaagccgccgtttcggctgcacgctggagcactggtacgccgaacagggctgcaatttctgtggctggcagttgtatgagcgcggagagctcgttgatgtgctctggggggaactggaatggtcttccccgacagatgacgatgagctgccggaagtcaccggacctgcgtggatagtcgacaaggtggcgcattacgggggatga

SEQ ID NO: 381168 - DNA, 528 bp, Salmonella enterica
atgagtgcacgtggtatcaacaaggtcatcctcgtcgggcgtctgggcaatgatccggaggtccgttacatccccaacggtggcgcagtggcaaacctgcaggtggccacgtcagaaagctggcgcgacaaacagacgggggagatgcgggagcagacggaatggcaccgtgttgtgctgttcggcaagctcgcggaagtggcaggtgaatatctgcgcaagggcgcgcaggtctacatcgaggggcaactccgtacccgtagctgggacgacaacggcatcacccgctacatcactgaaattcttgttaagaccacgggcaccatgcagatgctggggagtgcaccacagcagaacgctcaggcgcaaccgaagcctcagcagaatgggcagccacagagtgctgacgcgacgaaaaaaggtggcgcgaaaacgaaaggccgtggacgtaaggccgcgcagcccgagcctcagccgcaaacgccggagggggaggattacgggttttcagacgacatcccgttctga

SEQ ID NO: 381169 - DNA, 234 bp, Salmonella enterica
atgagcgaatatttcagaatacttcagggactgccggacggctcctttacccgcgaacaggcggaagccgttgccgcacagtaccggaacgtctttatcgaggatgaccacggagaacattttcgcctggttgtccgtaataacggaacaatggtctggcgtacctggaattttgaggacggtgccgggtactggatgaaccatgccatccgtgatttcgggattcttaagtaa

SEQ ID NO: 381170 - DNA, 2049 bp, Salmonella enterica
atgccatccgtgatttcgggattcttaagtaagagaggtgccggacgcgcgaacgtccggcaggacataagcaattataaggggatgattatgcctgtaacgaagtgtgaaccagaaaccacccgcaaagcaagccgtaaatctgcaaaaacgcaggaaactgccctgtctgccctgctggcgcagacggaggaagtgagcgtgccgctggcctcactgattaaatcaccgctgaatgtgcgcacggtgccgtattctgtggagtccgtcagcgaactggctgggtccattaagggcgttggcctgttgcagaatctggtcgtgcataccctgcctggtgaccgttacggtgtcgccgcaggtggtcgccgactggctgcactcaacatgctggcagagcgcaacatccttccggctgactggcctgtccgtgtgaaggtcatcccgcaggaactggcgactgccgcatcgatgaccgagaacggtcatcgtcgggatatgcaccctgccgaacagattgccggattccgcgcattggcgcaggaaggcaaaacacctgcacagactggcgacctgctgggctattcaccccgccacgttcagcgaatgctgaaactggcagaccttgcgcctgtcatcctcgatgcgctggcagaggaccgcatcaccaccgagcactgtcaggcgctggcgctggagagcgacaccgcgcgtcaggtgcaggtgtttgaagcggcctgccagtcaggatggggcggtaaaccggatgtgcgggttatccgcaacctgattacggaaagtgaagtggcagtgaaggacaacactaaattccgctttgtgggggctgatgccttctcgccagacgaattgcgcaccgatttgttcagcgatgacggggacggttatgtcgaccgcgtggcgctcgatgccgccctgctggaaaaactccaggctgttgcagagttccttcgggaagccgaaggctgggaatggtgcgccggacgtatggagcctgtcggtgagtgccgtgaggatgccggaacataccgctgtctgccggagccggaagcggtgctgacggaggcggaagacgaacgcctgaacgaactgatgacgcgttacgacgcgctggaaaaccagtgtgaggaatccgacctgctggaagcagaaatgaagctgatgcgctgcatggcgaaggtcagagcgtggacgccggagatgcgtgccggaagcggtgtggtggtgtcctggcgttacggtaatgtgtgtgtccagcgtggtgtgcagttgcgcagtgaggatgatgcggctgacgacgctgaccgcacggaacaggtgcaggaaaaagcgtcagtggaggaaatcagcctgccgttgctgacgaaaatgtcttccgaacgcacgctggcagtccaggcggcactgatgcagcagccggacaaatctctggcactgttggcatggacgctctgcctgaatgtgtttggcagcggagcgtacagtaaaccagtacaaatcagtctggaatgtaaacattattcgctgaccagcgatgcgccgtcagggaaggaaggtgccgcattcctggtgctgatggcagaaaaagcccgtcttgcggccctgttaccggagggatggtcacgggacatgacgacgttcctgtcactcagtcaggaggtgctgttatccctgctcagtttctgcaccgcatgtagccttaacggtgtccagacccgcgagtgtggtcacacgtcacgcagtccgctggattcgctggagagcgccatcggttttcacatgcgcgactggtggcagccgacgaaagcaaacttcttcggacacctgaaaaagccgcagattatcgcagccctgaatgatgccggactgtccggtgccgcacgggacgcggagaagatgaagaaaggtgatgcggctgaacatgcagagcaccatatgaaagacaaccgctgggttccaggctggatgtgtgcaccacatccacagacggataccactgaacgcaccgataacctggctgatgccgcctga

SEQ ID NO: 381171 - DNA, 435 bp, Salmonella enterica
atgaaaactgaactgaccctgaatgccctgcagtccatgaacgcacaggaatatgaagatatccgtgctgcgggaagcgatatgcgccgtaatctcactcacgaggtgatgcgtgaagtggacgcaccggctaactggatgatgaatggcgagtatggcagtgagttcgggggctttttccccgtccaggttcgtttcacgccagcccacgaacgtttccacctggcattatgttcgccgggagacgtctctcagctctggatgctggttctggtgaattgtggtggacagcctttcgccgtcgttcaggtgcaacatatcttcactcctgtcgctatcagtcacacgctggcgcttgccgcgacacttgatgcgcaggggtacagtgttaacgacatcatccatatcctgatggcagaaggaggtcaggcatga

SEQ ID NO: 381172 - DNA, 720 bp, Salmonella enterica; identical to SEQ ID NO: 84896

SEQ ID NO: 381173 - DNA, 597 bp, Salmonella enterica
atgatgaaatcagacgaacaatatcaggttcccgtgtggatgcgacctctgttgccgttgctctgcaataccggtggtaatgatccggaggaactgctgaatgatacagaaaccaccgccagtgcgaatattgtccgttatgtactgatagttgcagtgcggtcgcagattgatctgctgcagctactgtacaggaaaggactgttgcgcacagagataccaggtggcttttcaccggaagaagcgcaggaactcctggataatctggtgcgcagccatatcagcaaggcgttgtcgggtgagcgaatggcagcccgtgacagaaatgccgatctgacctggattcgccagcaactggtcgatgccgcctggtttgtccgtgccacactggaagcgcatgggatgggcgtcggaaatgagagtccctctgctccgccggagacaatgccggacatacagacacgggaactggttatgttgatcaagcgactggcatcatcgctgaaagcggtgaaacccgacagtagcgtggtgcgtgaagcgcaggactggctgtgcgacagaaaacttgtggatatcacagatattctccggtga

SEQ ID NO: 381174 - DNA, 501 bp, Salmonella enterica
atgtctgttgttgcacctgctgtatacgttggaacctggcacaaatacaactgtggaagcatcgctggccgctggtttgacctggccacgtttgatgatgaacgcgactttttcgccgcctgccgctctcttcaccaggatgaagccgatcctgaactgatgtttcaggattatgagggattcccggggaatatggcctcagaatgccatatcaactgggcctatgttgaaggcttccgccaggcgcgggatgaaggctgcgaagaggcttatcgtctctgggtggatgataccggtgagacggattttgacaccttccgcgatgcctggtggggcgaggctgacagtgaggaggcttttgcggttgagttcgccagtgataccggcctgctggctgacgtgccggagacggtggcgctctattttgactatgaggcgtatgcgcgggatttattcctggactccttcacctttattgacggtcatgtgttccgtcggtga

SEQ ID NO: 381175 - DNA, 435 bp, Salmonella enterica
atgacagtcagcagcacgatttccgttttttgccgcgacggggtgttccgtaccgtttactgccacctgcacggggagccgacctggaacggtcgcatcctgcatactcactatgccaccggtcagcaggccgaagccctggttgaacacggtgatatccgttgcctcggtccccgttgtgacaaacccgccgggcatacgcttcagaacccggtggacggtgtgacggcttattacggacgtgacagtggtttccggatggacagtgaggcgcgtgagtaccgttctttcagggaggctattgccactgaaagcactgaagaggtgcgcttccattatgtgttcatcgacggctactggaaggtgatgtaccgcacgccggaaggctggaagatgaaagcgctcgcgctggcactgcgtcgctgtccgaaatga

SEQ ID NO: 381176 - DNA, 267 bp, Salmonella enterica
gtgagaccatcaattatcttcgcaaccgccgagtatgtaaagcgtctgcgtgaagagtgcctgcgggagaataaacccctgcaccgccatacccgcttcagacgtcaggagctggcacaggatgagattaacccggacgtcctggcgatgagcggccatatcgccagacgctgcagtgagcagaagcgggtgcgtatccccgctatgaaagtcagcgaatggggccacctgctccgcgcgcttgaaattgagcgggtctgccactga

SEQ ID NO: 381177 - DNA, 942 bp, Salmonella enterica; identical to SEQ ID NO: 113261

SEQ ID NO: 381178 - DNA, 171 bp, Salmonella enterica; identical to SEQ ID NO: 113262

SEQ ID NO: 381179 - DNA, 252 bp, Salmonella enterica
atgaccggctgggaactgcgaatctggcgaaaaagcatgctctggtcacgcgaaaaagcggccagagaatttggcgtgacacagagaacatggcacgcctgggaaaatgcggaacaggtggatgtcaccgtctggaggaccacccaggcactttcagtccgtgacctgctgcctcacatgcaggggatgcgcaaggcagatatcatcaggcgtctggaaaatgaactgggggaaacggcagaggatgtgtga

SEQ ID NO: 381180 - DNA, 849 bp, Salmonella enterica
atgaatcagactttacccactgctgacctgaatactgccggcacgacagatgttattccgtctgtggccatcgaccgcatcatcgcgcagcgtaacgaaggtattgcactgttcatgcaggcgatggaatgcctggcgacagcgcgcaggattctgcttgatgcgtcaggtgatatttttctttacggttttgaagactgcgtgaccgactccgttcggtgcatggataaaccggaagaagcgaaaaggaatatcacccgtcttgccgaccggaaaatctgggaccgcctgatgacggatacggggatgtacaccttcatgagttcatgtcagcgtgatgagtggaacagccagctgatgagcgacacctgtcctgaaatcaccctggacaatgtactggcaacttttcgccatctgaatgccagtaagatgcagacatttgaacagggactgattgatgtctaccggaaattgtcatgggattacagaaccaataatccctgccgtctgggcaagagaatcattattgaaaacctgctgtaccgctggagtaacgggcgtgttacgctggactgcagcggacgggaggcactggatgacctggtacgtccgttttatctgctggaggggcgcaacgttcctgacttccggagcagcatcggggcgcagtacggtgaatttatcgggaacggcgacaatgtcggtaagctgttagaaggggaatattttacggtgcgtggctaccagaaagggaccgtacacattgtctttaagcgtcctgaccttgttgaaaaactgaatgatattattgcacggcattatcctggttcattgccgccacgagtctga

SEQ ID NO: 381181 - DNA, 336 bp, Salmonella enterica
atggcttctaaaaaattttactcagatgatgacatccagctggcaaaagctgctttatcggaattgccagatctcaccgctcaacggaaaacattgcgtgattttcttgatgccattcgtgatgacattattgttctggtaaggacaaagggttatacactggcagatgttcgtgacacgctcaaaaatgcagggtatgaagtaggagagaaggcacttcgtgacattattcgggaagcagaatcgaaaaagccatcccgccgttcttcctctaaaacagcatctaaaaagacagattcagccaggaaagatggcatcgatatgaacaacaattga

SEQ ID NO: 381182 - DNA, 132 bp, Salmonella enterica; identical to SEQ ID NO: 79086

SEQ ID NO: 381183 - DNA, 2700 bp, Salmonella enterica; identical to SEQ ID NO: 8517

SEQ ID NO: 381184 - DNA, 2292 bp, Salmonella enterica; identical to SEQ ID NO: 79088

SEQ ID NO: 381185 - DNA, 1071 bp, Salmonella enterica; identical to SEQ ID NO: 8515

SEQ ID NO: 381186 - DNA, 1209 bp, Salmonella enterica; identical to SEQ ID NO: 8514

SEQ ID NO: 381187 - DNA, 156 bp, Salmonella enterica; identical to SEQ ID NO: 8513

SEQ ID NO: 381188 - DNA, 252 bp, Salmonella enterica; identical to SEQ ID NO: 8512

SEQ ID NO: 381189 - DNA, 177 bp, Salmonella enterica; identical to SEQ ID NO: 79093

SEQ ID NO: 381190 - DNA, 210 bp, Salmonella enterica; identical to SEQ ID NO: 8510

SEQ ID NO: 381191 - DNA, 651 bp, Salmonella enterica; identical to SEQ ID NO: 8509

SEQ ID NO: 381192 - DNA, 2169 bp, Salmonella enterica; identical to SEQ ID NO: 8508

SEQ ID NO: 381193 - DNA, 585 bp, Salmonella enterica; identical to SEQ ID NO: 8507

SEQ ID NO: 381194 - DNA, 1203 bp, Salmonella enterica; identical to SEQ ID NO: 8506

SEQ ID NO: 381195 - DNA, 615 bp, Salmonella enterica; identical to SEQ ID NO: 8505

SEQ ID NO: 381196 - DNA, 3045 bp, Salmonella enterica; identical to SEQ ID NO: 8504

SEQ ID NO: 381197 - DNA, 801 bp, Salmonella enterica; identical to SEQ ID NO: 8503

SEQ ID NO: 381198 - DNA, 189 bp, Salmonella enterica; identical to SEQ ID NO: 8502

SEQ ID NO: 381199 - DNA, 405 bp, Salmonella enterica; identical to SEQ ID NO: 8501

SEQ ID NO: 381200 - DNA, 528 bp, Salmonella enterica; identical to SEQ ID NO: 8500

SEQ ID NO: 381201 - DNA, 705 bp, Salmonella enterica; identical to SEQ ID NO: 8499

SEQ ID NO: 381202 - DNA, 1290 bp, Salmonella enterica; identical to SEQ ID NO: 8498

SEQ ID NO: 381203 - DNA, 984 bp, Salmonella enterica; identical to SEQ ID NO: 8497

SEQ ID NO: 381204 - DNA, 693 bp, Salmonella enterica
atgaccgaaaataccgagccatcctcgccatcacatccggcacctgacccggaaatactgaagagcacaatcagggctatgaagcagtcagaacagcgggcaaataatgtccctgcgctgataaaagcgcttttatgtacgggcacatgtcttcttatcagtattactggtaacgccattcagtactggcactcaacgaatgtggagcgcgaatatttcgctacagacaatggtcgtctggtcaggctggcaccaacaagtcagccagcatggagtcagaatgatgcaatggcctttggcagccaggcactggcgaccgcattcaacctggattttgtgcactatcgttcacagatctcctctctgtctccgcgtttttctgacgaaggttttgccggatatgtgaatgcattacaggcatctaacattctggagacgatcaagaaagagaagatgaatctgaccgccacgacaggcgctggcgttctggttcgacagggacaaatgtccgacggcgtatggttctggacatttcagtatcctgtccgtatgcgtctggtcggccagacaaccagcaagccagaacagtcttttgttttcgaaatcaccatccagcgtgttgaccccagactgaaaccatccggtatggaaatccggcagatgatctcccgtaacgccggaccgaactcctga

SEQ ID NO: 381205 - DNA, 348 bp, Salmonella enterica; identical to SEQ ID NO: 8495

SEQ ID NO: 381206 - DNA, 3768 bp, Salmonella enterica
atgccgtctgtatcccgctaccgcacctggcttgccgtgcctgcagatgaaatagaagatctcaaaaaagcacatcccccgatgaacgggcacacgcccgtcctctgggataaagagcacaaactctggtttgcccgcccgggggcggacctgtccatgctggaccgctggctgccccgaccgcaggaagtctccatgaacggcagtgatccggtcaccgagtttgcccaggtactggaaaatgccggactggttctgaaagaactgccggccatggacggtaaaatccaccgggttccgaccaccgatgacaaaaacgggcaaaaaagtggcgcatatcgcggcttcctggacggcagacctgccggctggtacagggattatcgcagcgcggatgattcgccggtcaactggaccttctccggcggagagcagacagatccccgcgcaaggcttcacctgaaagcgcattcgctgcaacgcagggaggacgctgagcgggaactgaaagcacagtacaaccgacaggctgcttatgcccgccgctatgtcaacaaatggccgcaggccacggcacatgaatacctgacccggaaaggcattcaggctgcgccgggggtgcgaataaacgacaaaaatgagctcgttattcctttccgcaaccgtaacggcgcaatacgctcctaccagcgcattccggtcaccggcgggaaggatgcccgcatcctgaaagattccgagaaaaccggtaactggtttgcgctgggtacaccgcgcaacggccagccggtgctgtttgccgagggctatgccactgccgcctccctgcacgaagccaccggccttccggtgctgatgacagtggatgcgggcaacatgattgccgtggccgaagatgcccggcaaaaatggaagcaaagcccctttatcttctgtgccgacaacgatcatgcacgccaggttaacaaaggtatcgtcagtgcaacaaaagccgcagaactgacaggaggatcggtcatctttcctgcgttcaccgatgccgaaaaagcgcagggactgaccgatttcaatgacctggacgccagccggggacgggccgcttttcagcatgtcatcaacgcccagttagaacatatcggggtttccacccccaacagtaacaccccggaaatccgggaggcactggtgatcggcaacctcgtttttacaccggtccacactgaggaaaaaaccatgactccgacagaatatcctgaaacatcacccgatacagggcacagccatgaccagggaccttctctgccgtccgccacgcagcaggaacaaccaactgcttccagcagtaacattgctgatgaaacactgtcatttaccagtcacgccactgaaaataacggcaaagatgagcggcaccctgataacgttcaggcgcaaacggaaagctctgtagttcaggactcccctgcagaatcaccggcatccccggaaagtacaacggcgtctgcccctgatgaacccgctcatccggcggaacctccggaaaaagttgtctctgtggccacagataaagactggcgtgaatttgaagccgaactgtcacaaccggaaaaaaacgagttacaacaggagtccggcacttcaccagaaataccggcccctgctgctgcccccgccgcccctgaagacagcccctcatctgaaaccatgaatgaatcagccgaaccatcaccttcccctgatgcagtcaaagaggaaatgaccgtgatgacggagcctgatgacaaacaaagcaccggaatatccccggatactccccgggaagaggcggtcagccatgtaactgaagacattccccttcagccagagccgttccttcctgagtcagatggccctgaagaatacgaagactacagcgcatatcaggagctgatgaacaatgaaaatcctgagcatctgcaggaaaacagtgatatgccgtcgcaaccggacacaggccccgttcaggcagatgagtcagaacttcaggccacaacagccactatagaaccggctgtccgggatgaacccactccgcagcaacctgttcagagcacatcaccttctgataatacttcatcgtttctcgacaaagcgcgtggcctttttacgcgtaaaaaaacggattcacaggcgcatgagaacagtgatcccacgccctcagcggaaaccacgacgactccaccgatacctgacagtattgtctacgccccggaacgttctgatgcaccgatatcgctcaacatggacgaaattcttaaagagcttgactgggaaaaacgagcagacagaaccgtcctgtacaaactggatggcaaacctgccttcattgaccgggtaaaccggctggaaatggtcaacggtgccagcaatgacgatcgcagcgttctggccgcacttgctgtggccaccaaattttatgggggcgtcatagagctgacgggcagtgatgcctttaagcaaaaagcaatgcagttgattatcgagcacaacatcgatgtccggatgaaattgccagatcaacgggctgaactagaaaaattacgcaaggaaatggctgtcagtaaggatgcagttgtcacccatcagccaacaccggaacttaaccggaataccccagaacaaccggctgtccctgaccccgttcaggaaaaagaagccacacaatccccggcgtccccagtagcccctgaagcatcaaccgtcagcaccgcctctgcaccatcaccggctgaaccaggcaaaacggcagatgtggcaccagacgaagaaccaccaggaaaacttcgcccgggagagagcgtgactgccgtactgcacaattttggtcgtgctgaatatgcacccggcaaaggagagagtttctttgttgagcttaaaaaccgcagtggcagcaaactctactggggggaacaactggaaagtctggtcaaaaaccatcagaaaggtgacgtggtgacactgacacttcagaaccgcgaacaattcatcctcccgggagagcaaaaagcacgtttccggaataagtggtccatggagtcagttaccaacgggatctcggtatcacatgataatccggataaaggtcagcgtattcaggcgattccggtcgaaacctttatgaaagtggctgcgcaaatcagccaggggtggcccgaagagatgaaagcgttacgtatgccagaaaacgtcggctcacatctgtttatcggtgaagaccgacatccggtctccgcgccacagaacgcaaatcaggtaacagaaataaccagcgcagcccctgacaagctgacacctgttctgggatcagtggataaggatacgcgtgaactcaacctgctacttgtccagagtgccgatgaacatctgcagggtgtggtccggctgaacggcacattgtatccggcactggccaccccatcagccgacaacagtcagctggttatcaatgcgctgaccgacaaaggtttacgctttgcaggttatggtgaagcggtaaaccacgatgctgacagcacgaatcgccctgcaccggagcttatgcagtttcatctgaaaacccgggaagaaccgctttttgctgctgtctacacgccggaaaaacaacctgatgcgttgtaccggaacctgggcttcgagcagtcatggcagcagtggtccaacagccaaaagccggaggacaggcaggaaaaaactctgcatcaggatctctcccacagccccggccgatga

SEQ ID NO: 381207 - DNA, 552 bp, Salmonella enterica
atgtcaggtaaaaaaactatcgttactctgctccgggtatcgctactggcatgcccgttactgttcacgacaccatcgtttgcaatgatcgacacgccatccgtgaaggtcggcttttctcctgaaggaagcgcatccgctctggtgcttgacacaatcaacagtgcggaaagttccatcaggatgatggcatattccttcaccgacccggatgtaatgcatgcgctggcaaaagcgaaaaaacgcggagtggacgtccgtattgttgttgatgacaaggggaatacgaaccgggcaagtcaggaagcgatgaaatatatcaacctgctggacattcctctccggactgtagatgccttccccatccatcacgacaaagtcatcattgttgacggaaacacggttgaaactggctcctataacttctctcgtgctgctgcacgcaagaattcagagaatgtcgttgtgctcaagaatatgccggatgtagccgcacaatatcttgaacactggcaggatcgctggaataagggtacagactggaaaccctga

SEQ ID NO: 381208 - DNA, 291 bp, Salmonella enterica; identical to SEQ ID NO: 79112

SEQ ID NO: 381209 - DNA, 1149 bp, Salmonella enterica; identical to SEQ ID NO: 79113

SEQ ID NO: 381210 - DNA, 819 bp, Salmonella enterica; identical to SEQ ID NO: 79114

SEQ ID NO: 381211 - DNA, 459 bp, Salmonella enterica; identical to SEQ ID NO: 79115

SEQ ID NO: 381212 - DNA, 585 bp, Salmonella enterica
atgatgaaaccacgttcttcttattcaaaaacagcattcattcttttattttctgttttcctggtagcggcagtgacaaaagcaaaaagctcgcttcccgatatcaccctggaacaggcaaaagaaattaatgctgataacaccgttattttccttttccgccatggagaacgttgcgaccgttcagatatgccatgctattcggataaaagcggaatcactattaccggtacagagaaagcacagcaggaaggtattaagttcgcaacaatcttcagtgaatatgatatttactccagcaatgcggtaagaaccatacaaactgcaaaattcttctccggtaaagaacccgtcgttatggacagtttatcagactgcaataatgatctttataagacgcttgaatcaatcgcaagagaatctcataaaaggaacatagtaataatgacacataatcattgtttatcatttctggccagagataggctcggcaagaaattcaaaccggcgtaccttgatgctctgatcatgcattacgatggtacccggctcatacttgacggaaaatacaacaaagaggcatag

SEQ ID NO: 381213 - DNA, 1203 bp, Salmonella enterica; identical to SEQ ID NO: 191956

SEQ ID NO: 381214 - DNA, 825 bp, Salmonella enterica; identical to SEQ ID NO: 79118

SEQ ID NO: 381215 - DNA, 1155 bp, Salmonella enterica; identical to SEQ ID NO: 79119

SEQ ID NO: 381216 - DNA, 567 bp, Salmonella enterica; identical to SEQ ID NO: 380624

SEQ ID NO: 381217 - DNA, 234 bp, Salmonella enterica
atggaaatgctcgaagagcaccgatgttttggcggctggcagcagcgctggcgtcatcatgccgccacgctaaactgcgccatgacattcagcatttttcttccgccgactcaggataatgaaccgcctccggtactgtactggttgtccgggttgacctgcaatgatgagaattttaccaccaaagcaggcgcgcgcagcgtatcgcagcagaactgggcattgtattggtga

SEQ ID NO: 381218 - DNA, 1023 bp, Salmonella enterica
atgatcaccattcgtgatgtagcgcgccaggctggcgtgtctgtagcgaccgtttcccgcgtactgaataacagcgcgttggtcagtcccgacacccgtgacgccgttatgcaggccgtcaccctgctgggatatcggccaaatgcgaatgcgcaagcgctggccacccaggtgagcgataccatcggcgtcgtggtcatggatgtttccgatgcctttttcggcgctctggtgaaagccgtagatctggtcgcgcagcagcaccagaaatatgttctcattggcaacagttatcatgaggcggaaaaagagcgccatgcgattgaagtcttgatccgtcagcgttgtaacgcattgattgttcactcaaaagccttaaccgatcgcgagctgagcgactttatggatcagatccccggtatggtgctgattaaccgtatcgtgccgggttatgcgcatcgttgtgtttgtctcgacaatgtgagcggcgccagaatggctacccgaatgttgctgaataatggacatcaacgcatcggctacctggcctccagccaccgtattgaagatgacgcgatgcgcagagaagggtggttacacgcgctgcaagagcaggggattgctgcgtcggagagctggataggcaccggcacgccggacatgcagggcggcgagtcggcaatggttgagttgctgggacgcaatctgcaactgacggcggtatttgcctataacgataacatggcggcgggcgcgctgacggcgttaaaagataacggcatcgccattcccttgcatctgtctgtcatcggtttcgacgatatccctattgctcgttataccgatcctcagttgactaccgtgcgctatcctattgcttctatggcgaaaatcgcgaccgagctggcgttacagggggctgcaggcacgctggatatcacggcgacgcactgctttatgccgaccttggtgcggcgccattcggtggcgtggcgacagaatgcggtactgatcactaactga

SEQ ID NO: 381219 - DNA, 582 bp, Salmonella enterica
atgagtaacatcctgattatcaacggggcgaaaaaattcgcgcactccaacggccagttgaatgacaccctgaccgaagttgccgatgggctgctgcgcgatctgggtcatcaggttaagatcgtccgcgccgacagcgactatgacattaaagaagaggtgcagaatttcgtctgggctgacgtggtgatttggcagatgcctggctggtggatgggcgcgccatggaccgtaaaaaaatatatggatgatgtctttaccgaaggtcacggcacgctctatgccagcgatggccgcacgcgttccgatgccgctaaaaagtacggttccggcggtctggcgcaggggaaaaaatatatgctgtcactgacgtggaatgcgccgatggaagcatttaccgaaaaagatcagtttttccacggcgtaggcgtagatggcgtctatctgccattccataaagccaaccagttcctgggcatggacgcgctgccaacgtttattgccaacgacgtgattaaaatgccggatgttccgcgctataccgcagaatatcgcaagcatctgagcgaaatttttgcttaa

SEQ ID NO: 381220 - DNA, 294 bp, Salmonella enterica
ttggaaagcctgttaaccctacctctggctggtgaggcccgagtcaggattttacaaattacagatactcacctgtttgccgaaaagcatgaaacgctgttaggcgtcaatacctgggaaagttaccaggccgtgctggaggctattcgggcgcaacagtatgaatatgatctgatcgtggccaccggcgatctggcgcaggatcaatccgctgcggcttatcagcattttgctgagggtatcgcaagctttcgcgcgccttgcgtttggctaccgggcaatcatgatttttag

SEQ ID NO: 381221 - DNA, 717 bp, Salmonella enterica
atggaagacacgcctgacgggaagataagccagttcctggtggcggcggatcgcattgcttatattaacccggcaaacggaaacgagacgcccggattcgtcatgcagggcgaccagataatcatgaatgaggcgttcctgaaatacctgagcgcgccgaccattaccagtggcgggaatcctccggcattttccctgacgcaggatggaaagctgactgcgaaaaatgcggatatcagcggccatatcaacgctgtatctggctcgtttacgggagaaatcaatgccacctccggtaagttttctggcgtgatagaagcaagagagtttgtcggtgatatctgcggctcaaaagtcatgcagggcgtgagcatcagggcgacgaacgacgaacgcagcacctcaacacggtataccgacagcgccacctatcagatagggaaaaccatcacggtgatggctaactgtgagcgtaacggtggcaccggtgccatcacagtcacgataaatattaacggccaggtgaaaacgggggaggttatgccgtataccgcagggcttccggccatgtatcagaccgttgtcttttcggtctacaccacttcacctgtcgtggatatcagcgtctctctgagggtccgtgggcagtacaccacgtctgcttccgtctggccgctggtgatggtttcccggtcggggagcaacttcacaaactga

SEQ ID NO: 381222 - DNA, 243 bp, Salmonella enterica
atgactatgtcgcgcgtaatttctctggcggcagggctttccctgtccgttttattttccactgctgccgttgccgataacggaagaggaagcggcaacagcaatattgaaaaccagacccggatttataccggcaccgaccgtgggcagaaacagcaccgcgaggcaaagggaaaaacaatcacgcggagcgtccagtgttcgctgccggcatatttacgtgacccggataatcagtgctga

SEQ ID NO: 381223 - DNA, 333 bp, Salmonella enterica
  misc_feature (285)..(294): n is a, c, g, or t
atgctcaaacctatctgccatagtggaagtataaaggttccggaatatctggaaacaaataaggaaaaaaatgccggacgtactccactgtcttcagacattcagcaagttagaaatgttgttgaagatgttccgccatttccagaaagcagaacggcgagaggttctgtaagcgcagcgtacaggctttcttttgacgaagtgttttgcggtctcagcaatgaagagcgtaaaaaggtgtatggtcgcctttttggaaaacaagtacttgcgcatattcattcnnnnnnnnnncataataagagaaaaagcgctcaggcggataagccgtga

SEQ ID NO: 381224 - DNA, 180 bp, Salmonella enterica
atggctaagggcgaaaaatttttagctcattctaattatggtacaggctatgaagggaattatatagaggctcatattcatggtgatgtatgtttattcagagatataaagcacgtttatttgtctttgcaagaaaactcttactcggaaagtcaactatatgattatgaaaacaaataa

SEQ ID NO: 381225 - DNA, 222 bp, Salmonella enterica
atgagcagccccatcacgaaacactgcaatgaagaagttagcattgacccgttaagtcgccttaagagtgtttttgggattgatgggatggatttctatcttcatcgcttcagtgatgacttggtgctttgcggggcgtttaagaattgggattttaagttgtttcagcagacgataaatcgtatcaaggtaaggtatggtttccatccatctgaatgctga

SEQ ID NO: 381226 - DNA, 753 bp, Salmonella enterica
atgttctccttatgggtaaaatggcctgaaaaggcggtgtcagaatccagccgtgggctggcgcagttgagttttctggtgcaggtcgaaagggctgcgtgcgtcactttcccgctttgcgcggttaaagtgacgcacaggactggtgcaggatctgaaaatttatcgttggtgcagttttatgaccacgcagcagtaaagccgctgtctttgcaggccgcagcccgtaaggtaaaaggcgctgagggtgtcagcagatataaattagccgggatcattccggcgcaatgcagattcagaccagcaggctggcgcagtaaaaggacgtatcgtgttaaaactcaggcctccgtcgcgatgttctgcgacccgatgtttgcagaggtctgcaccggtaaacggaccaaccgtcctgataacaggcgcttctttcaggttgcgaagcgttgggcgctgtcaacgacagcatggagcaggagggagactatgccagtaccgctggcgcagaaaggaaaaactgtttttgcgtcaaagaggttatttgcgaacacgtactgccgcgcttcgctttgccttctcccgagcttccgcctgcaaatgcaggcagaagatcgggagtgtcgattttgctttagtggtgtttgtagtagagtttatacgtattacttaccatcagtggaaccagaaagtacaactaatatattatcagagataatattttcccaaattatagaaaacagtaacacgcgataa

SEQ ID NO: 381227 - DNA, 1020 bp, Salmonella enterica
atggcttcttatgcattctggaataacaaaggtggtactggaaaaacaagcttagcatttcaagtgattactcgttttgctgaacttcatcctgaacaacgaattttagcaattgacctctgcccacaagctaatttatcagagttattgctaggtgggatgaataatagtggtagtgacaaattattaattcgccaaggattaactccccgttgtagtattggtgggtattttcaacttcgtttacctgcaccatactcccctccagcatttagctctacagattatataactcacccatccggatacaattctgatatccccaataatattgatttaatatgtggagatccattgctagaattacaagcaaatgcagtaaacactcttgctaaccaaaacataccaggaactaacgcatggattgctgttattgattggttaaaggatctgttagatcagttgagagatacttacgacactatttttttagactgcaatcctagtttttcattttatactcaaatcgccttggcaaatgcagaatgtatcgtccttcctgttatggcggatgattcatcacgcagagcaatattaaacgcaatctcgttggtatatggtttaaagctcccctcagagatatatacagcccatatgttttctacaaagttaaaggacgccggacgtaacttacctcaggtgcaccaaattgtaaaaaaccgcctcacacaatatatgggggatgcctcagcttatgctgctgtactcgatgcaatcaaatgtgatgtcgaagaactgttgagaaatcatcctcatttatttaccttttcaaatgtagatgacggtttttcaagcattcgtgacttccaaaccacaggagtcatagctcatgctaaaggtcagccattctctaaggtcagggctggtaagcaaagcattaatggacatcgagttcaagttaaagctgattatctcgaaaattgtagggatgcaatcaattctctagttgcaaaattctga

SEQ ID NO: 381228 - DNA, 240 bp, Salmonella enterica
atgatgcagcaggactggcatcccgccgacatcatcgccggactgagaaaacggggcacctcgctggcggcgctgtctcgtcagtcggggctggcgtcctcaacgctggcaaatgcgcttacccgccactggcccaaaggtgaaaggttgattgcggatgcgctggatgttgcgcctgagcaaatttggccttcccgttaccgagaatatgaatgccactcaatgagcagggaaatctaa

SEQ ID NO: 381229 - DNA, 462 bp, Salmonella enterica
atggctactacccccatccagacacacccgttacttgccgtttccttcaacgccgccacggatttcaccgtactggccgatcactgcgaaaactttgccgaaactctgatcgaaagcgacgatccggcgttacgtctggcgctttgcggacggcttgccgccggtctcgcgctgctgcgccccacgctgaacgatcccatcccgccccacttggttgaaagcctgaccaccgacacccttcccgccagttacacctgctttgaccccggttccgaattactttgcgactactcactcacactggcgcggcttctgacgggacgggcgctactgccggaaatggaacagacgttgaccggattactgtgtgagctggtctggtgctttgccgctgaactcaaggctccgcgctggctacgcaccgccgacggcgtgaagtttattgacgaggtgacagcatga

SEQ ID NO: 381230 - DNA, 156 bp, Salmonella enterica
atgcctgtgagttttaactctatgctttataccagaaaaatgagtctggccagccttatcaaatcaatatctgtgatttttaccgtaagcatggatatgttttgcgtactgtggaagaggagtgataccagttttaatgaactggctgagacatag

SEQ ID NO: 381231 - DNA, 1914 bp, Salmonella enterica
atgaatgacaatattgttcaaaatatcgctcataagctttttttggcaagatccgatatgctggagcatgaactcaccgaacaggaactatcttttttactcaaagagaaatcagaaggttactgtttaaagggcaataaattaatcttttcatcttatgaagacagagatcattatgttgtccgtcattatttttcagaaatagacagtgatcgcaccgatgcagagaaaactataatactaaccgctgttagcatatggaaaaaatctttgcgcggcgatcgttcaaccgctggcttatttctcagcttatatgaagataagatcaacgtatggcaggcgctgcttacatctgaatgtagccaatatgaagcgacatttctggccgatcagttcataaagcactccagaaatatagatataaattccctgtttcattttttctccactatctacaataaatataacaaatacgttggcacatttatattactgggagaacgattagccaatagccctcagaaatgtcatgagataattaatagattttattcagatataaaacaagaaactcttcacctctataatattgccttgttttcactaaaaaaagaaaactacacatctgctattgatattttgctcgatgatatagaaaaaaatgacagtttactctctccacaatcattatggatccttggcagaatcatagaaataagcagcgatactgaatacaaagctgatgaaataaagaaaataatcatgaataaaatttcatccgctatacaagcgatatcgtattcagcaatacaggctgccgtagatacagtagaaaaaataccggaaatgcggagtatcattagcgctctactcaaagaaaataatacagaagcaataaaaacactcgcccataaaatatatacatcggagcaattaacatcccacactgattttccttcttggatgccccgtatttgtgaatctgccataaacaatccagaactgagcgctttaatttttcatatattttcttacctagctaaagatgaatcaaaacatagtttattaactaattgtctttttataataataaaaaacaattcagtatcacagaaccatcaggcagttgaagactttatttatgatattgtaaaatacccttacttacttaataaattattcacattaacgttaattgatgagaatccagaaaccaccattttttcgcgtttgatatgcacatacctgtttgtgcatagaagcacacatctgttagaatgtagccctgatgttacaaacaacttcagtaagaaagattttatctttctggtacgaagaattctgggttttatctcaaatgaagcacagttaatgtcattgatattatctttattaaaagtcaaaaatgcagaaaaaagaacatatgatcttgtgaaggcagtgattgtaaatgaaatggcaatggactatcccggctatgtggttgatgaaataaaatgctatcggaatgcactaaaaagcaaacgaagtaatattaaaaaactatatgatgaaatactgtcagttattgaaaaccatataacatctttttccacgcttccgagaataaaggaattagaaccatcttcaatgttcgcacatgcttttcaaaaggaaaagcataaagtcatggcgaaaaaacaagatctcaacaaagaggactctttagcatttaaaatagctactcatattccattgaaagcgggcgtaggttctttccattataatgattataataactctggttacagtgaaccatcctatctgcacgaatattcaagcagttattccctgcccagacgttatattatggataatgtcggttatgacatcaggcttgctcagttcagatgtgtaaaaaaggatacggtatga

SEQ ID NO: 381232 - DNA, 1701 bp, Salmonella enterica
atgaaggttttaatctcacaatatattagaacgctgaaagaaagaaatgaacttgatctgctgctgcctaatttgttgctatcgatggatattgttcctctttttactacgcaaacaggcacccggcaatatggagtcgatattgctgcaatcggtaaagatcctgaagatggtgtaagaaagatttttctctttgtgatcaaacagaaaaatctgggcatggccgaatgggattcaggaagaaattctatcagacaaagtttaaacgaaatttttgatgtttacataaaaaataatattttaccaaaacataaaaaattaccaaagaagataatactatctaccagcggagatatgaaagaagagctaagtcaaagctgggccggttacattgatgagcaccagccccacgagtttgatttctggggagcagctcaactagcaacacgtatagaaaaatatatgctaaacgagcatatattcactgacagtgaccgaactgatttgaggaaatcgttatcattaatttgtgaaaatgattattcaagagaagatttccaccgcttattacttcgtacactacaactcaataataaaggagaaaaagtaaaacaggtcaaaaaatctgaacttgagaaatcaatccgtacagcctatcttgccacaaatatactagcctattgggcaatacaagatggtaatgcaaaacaagccctctatgtatcggagcgttgcctgctatgggtatggcaccgtattcaccttgaaaaaagtccacaacaatacttctctgccattaatattatatggcaaaactatattaatatctccgcagaatacttttccaaacttcaaccctattttcacgaaaaatatcttctgtcgtcatactctgccgatagcgcattaattaatcttactatatttgaacaaataggtatactctctactatcgggctaaataatctcctcacgggtctacgatgtaatggtgatgagcagacagccagatttaataatgcaactatcattgccgagagtttatgcgcacttatcagcaataacccagcatcaggctcacctcgttttgatgaaaatgcaatagatattacactggcttttatttttctttctttaacaggggaaaaggatcgtgctggagaatggctcgaaacattgatcgtcaggctggactttgtacttaaaattggacgaaatcaccctatatcgacagattccattgatgatcttatctgtctggattgcaataatgatgacacgtatctcagagaaaaaacaacaagtacatcatggataattcctactctgatgggatgggctgtcattctggagaaagaaaaggaatataatattttactgagaggaataaaagaattctatccaaaaatctgctcccagctatggcatccaacgaacgatctttatcatcatctctactttcatcaggcgcaatacgtcacaggcgaaacagaagcgccaataacatttccggacaatatgaataattaccaggccaggatgaatgagttgaaagaaaaggatagatataatattttcacggaatcaagtgcaagaaaggccgatttaaccattctggattttatagcctgcaggcatttcaggacaccagttccacctgccctttggtataatatgcagaaaaaacagaatgacagttaa

SEQ ID NO: 381233 - DNA, 699 bp, Salmonella enterica
atgttgtatcgagttgatgaaatactgggatatttaaatcgttgtgagcgtaccacatcaaatcagtcagatccgctagagattctggctaagaggctctccttacgcgggctgatcgtgagctttattttgttgttgttaatgctacttccattcgggatttatgcccattttcctgagggcgtgcttattcgggtgagccaaattttcttcatattgctgatgttgagttgcatattcacgttattggttgagccagcattgatgctattaggtttatttaagtggaaaacgatgacgttaacccgatttctgaaagaagtccgagaggatgaagggcatgtggcaacattagaacgctatgcagaaaaagagcttcagtatgcagaatatcaattagtcaagaaaatcacggcgaatgaaaatagaatcaaatttttctttggcgagaaaacagcaatatttgcattgctggcgttttcggttccgtttatgaaggatctttttggaagggaacttaatctgtcagcttttcgttgggaggatggtttttctggctccgttgacattttattaggatttgtttgggcattgatttttggcatgtctctgggggctgttgcattaaagttagtgactgaacgatataaatatcagttatctttactaaaacagacactatggattaaaaaaatttaa

SEQ ID NO: 381234 - DNA, 630 bp, Salmonella enterica
atgaaaaataatattgaagagacaataggtaagtacttgcctattttaatgatattacctctggcgggtttggcagagttagcttctttatattcaatccaggctttattaccaaagttaagtgaggtttataatatcccattgaatcaggtagggatgattttgtctgctgaggtggggtttctggcattagccatgttatttagcggcacgttatctgaccgttttgggcgaaagccaatcattttttattcgttgctggcaggaggtattttaactctattgtgcgcaactgcatcatcatggccgatgctggtggtataccgcgctttgctcggcattgcagtaagtggtattacggcggctgttacagtctatatcagtgaagaagtctctcctgctttggcagggattgttactggatattttatttttggcaattcgctagggagtatgtctggtcgtgtgtttgcaactttgatgatggagcatgtatctatagatacgattttctttatcttcggtggtgttctgattgctatggcactcgcggtgaagttgtttctcccgacatcccgacatcccgacagtttgttcctacaccttcactacagcttggtgcagtgttga

SEQ ID NO: 381235 - DNA, 507 bp, Salmonella enterica
atgttcaaaatagaagttgatgatacttacgaaaaaggacttatggatgaagaggatactagtttgtcggaagctatattttccacatatcccatatcatccggatatttttctataaactggaatggcatttatatcccgctaacacttaatagcctgagtgatatcattgatgatattattaaaatgcttgatagtatcatctccgggtttgactttgaatgcagttttttatgtgagtctttttcggtgatattgaattttaaaatatataaaaagaatgttataattacttcaaaatggatttccataaacacagatgaaatttttaatttaaattcaagcaagagtgtattgcttataaataaggataaatatatctgtgaatgggtgagattattatctgtcattagtaatgatctaaaattagttgggtatagctttttatttttagataaaaaattatctttttataatgaatttttgaaacagaaagacaatatgtga

SEQ ID NO: 381236 - DNA, 1197 bp, Salmonella enterica
gtgacggattatttttacgacacgacggggcgcatcacggcgtgccggaatgaggcatacctggacagctggcagtacgacgcggcggcgaacctgctggacaggcggcagggagagaccgcgcaggcgggtgcaggcagcgtggtgccgttcaaccggataacgtcataccgtgggctgcattaccgttacgatgaatatggccgggtggtggaaaagcggggccgcaacggtacgcagcactatcgctgggatgcggagcaccggctgacggaagtggcggtcatccgggggagcaccgtacggcgttacgggtacgtgtacgacgcgccgggcaggcgggtggagaagcacgaactggacgcggaaggaaagccgtataaccggacgacgtttttatgggacggaatgcggctggcgcaggagtgcaggctgggaagaagcagcagcctgtatatctacagcgaccaggggagccacgagccgctggcgcgggtggacagggcggcgccgggcgaagcggatgaggtgctgtattaccatacggacgtaaacggcgcgccggaggagatgacggacggcgggggcaatattgtctgggaagcgggctatcaggtatgggggaacctgacgcatgaaaaagaaacccggcccgtacagcagaacctgcgtttccaggggcaatatctggacagggaaacggggctgcattacaatttatacagattttatgatccggatatcgggaagtttatatcgggcgaccctatttcgatccggggcgggataaatctctatcagtatgcgcctaatcctctctcttggatcgatcctcttggattaagtaccacttgtttaaaagccgagaatgggtactcaagagggaaaagacatgggatgaagttacatcctaatgcagctcaagcaattgcggataaagaaaacaaacctcatggagtttggagaagtaaggatgatctgaagtatgctggagaacaagctgccacactaaaaccgggggagatgaaagattttcctataaatccaaatagtaagagtgaagtttatattcccggaggcaatggagtccctattaaaccggataaaattagagtcagaaataatggcgatgggacttttcacggttttccaattgactcaacgacggcaggacccatttttgaaaagggcaaatga

SEQ ID NO: 381237 - DNA, 243 bp, Salmonella enterica
atgaatactaaagaaataaatactagagaagattttattaaatttcttgaaattttatcttcaaatgccagaaataatctaaatgagtgggagaataaagacttgccctcatattttgaatcgatggcatcttgggttgaagatatggatggatattatttaaatcaaaaattacctgctccagaaaatgttaactggacatttattgcggatattttaatggctgcaagagtttatgaataa

SEQ ID NO: 381238 - DNA, 4695 bp, Salmonella enterica
atgggagaagcattctgggcggcaagggaaggcgacgcgctgctgcatacgtcctttctggcagatctggtgggcagtgcgctggaattcgccatcaatgcggttattgattttgcggcactggctgttgtggcgctggcgacgggggctacggtggcaacgctgggatgcagcgccgtattacttgtggggaccgtggtcggcgcgacgatgttgctgagtggcgccggggagaaaatcagtaaagcctgtgaagacatagccaacagcctttttccgccgaaaattgagggatatatcctgaccggctcaggcgacacccggattaacagcaaacgggcggcgcgggcggcggcaacggcattatcacgccatgatgtggaaaccctggatgcgcaggcgcaggcagaggcagaagaagaaaaacgcaggcaggacgccaaatcaatgtgggatgtggccggggaatatctggatgcagtaaaaggccgggcagagaatatggctaagggcgtcgtttccgtggtgagccggatgggatcagcggaaggatgggcctcgctgggaaatgatgctctggcagaggcgggcgatatgctttccgacacgggccactttatttcagagatgtggcagcccacggtagcaacggcatatccggggtctgacccgaaacaggatgataaaatcgactgccacaaacatccctcttcattcacccagtttatggcgcagaaactgcaggcgctgacggatgacccggtggggacggtactgggggcgatgaacactttcgatgtgctggaaaccggttttcaggcggcaagcgcgcttatcggcagcgtgtcgaacctgttcaaaggcgacgatgagccgcccgcagcagaatatatcgccgaagggacgcgggatgtgcgtatcaacagccagcctgcggcgcgcagcggggtacgctgtacctgcgaggcaaaagtggtggatgagcctgagaacggcgtacatgtatccggtgatgtacgtatcggcgggccgcttctggtggtacgggatatcaaaagcggtaagtcacaaataaccctggtgaccaccattgcgctgacgttcatgcagcccggacgggcgttagctaaaagtgcctgctttatgatgggattgggcattaacatgatggttcagaaggcggggagtgcgctgaaccgcccggtaaacgccgccaccggagccaagtacctggcaggcgatgatgacgttgatttcagtctgcccggccacttcccgctggagtggcagcggacctacagcagccgtgatgaacggacggaggggatgttcgggcggggctggagcgtgctgtatgaagtgtgcctggagcgtacgccggacaacccggatgaaaactgcatgacgtatgtatccccaatgggacggcgaattgacctgcaggcggtggagctggggagcggtttttacagccccggcgaggggctggcggtacggcgcagcgaacagggccactggcttatcagcagtgatgacggcgtgtacaggctgtttgaagcggacccgtccagcccacagcgccggcggctgaaaatgctgggcgaccgcaacagtaactgccagcacctgacctacgacaaccacgggcgtctggtggaaatcagcggcgaccggcagcgcccctgcatccggctgcactatgagctggcagcgcacccgcagcgcgtgacgcgcatcttccgccattacccggaaggggagccggagctgctgcggtgttaccgttacgatgaggcggggcggctgaacggggtggtggacaacgcaggtcagtatcagcgtgagtttgcgtatgacgacaacgactgcatgacgatgcaccgggagccgggcggcgaacggtattactacacctgggcgtggtttgaaggcccggacgatgcggcgtggagggtgacgggccatcatacggacagcggcgagcagtaccgtctggactggaatctggcagaacgttcgctgtgcgtgacggatagtctggggcgtacgcgctgccactggtggaatgcgcagggcctggtgacggcgtaccgggacgaggccgggcagatgaccactttccgctggagcgatgaagagcggttactgctggggatgatggacgcgcagggcggcaaatggcgttatgtctatgaccgtctcggccacctgacggagacgcatgacccgctgggccgggttgagcagacgcagtggcacccggtgtggcaccagccggaaacggaggtggatgccgcgggggcggcgtggcgttatgagtatgatgagcggggcaacctgcaggcggtcagcgacccgctgcaccagcgcacggtatacgggtacgaccgacacggtcaggtggtgcggataaccgacgcgcggggcggagataaatacctgcagtggaacgaagacgggcagcttatgcgccacacggactgttctggctcgcagacggcatggttttatgatgaacgcacgcggctggaaagggtgacggacgcggagagtaacagtacgcgttacagctatgacggcaacggacatctgacggaggtcatgttcgcggacgggcgtacggagcgttaccagccggatgcggcgggacggctggtgaaatacaccagcccggcggggcagataacacgctggcagcgggacggccaggggcgggtgcgcaggcagacggatgcgacgggtcgcaggacggcgtatgagtacgacgcttacgggcggctgaccacgctcacgaacgagaacggggaaagctaccggttccggtacgatgttctggaccgggtgacggaacagacggaccccggcggcagccgccgggcatacgggtataacgcgctgaatgcggtgacggcggtgatatacggcggggagcgcgggggagaaatccgtcacggtctggagcgtgatgcggcggggaggctgacggcgaaaatcacgccggagacgtgcacggaataccggtacgacgcggcggaccgtctgctggaaatccgccgcaggcggcatgatgcggcggaaggcggagagccggaagttatccggttcagctacgacagtgcgggtaacctgctgagcgaggagacggcgcagggcgtgctgcagaaccggtacgatgttcagggcaaccgcacagaaacgcagatgccggatgggcggacgctgcggtacctgtactacgggagcggccatctccagcaaatcaacctggggcgtgatgtcatcagcgagttcacgcgcgaccacctgcaccgtgaggtgcagcggagccaggggcggctggacacgcggcggatgtacgaccggacgggccggttaacgcggaaactgacctgtaaaggaatgcgcggtgtggtgccggagacgtttatcgaccgggaatatgcgtacagcggccaggatgagctgctgaaaaagcggcacagccggcagggggtgacggattatttttacgacacgacggggcgtatcacggcgtgccggaatgaggcatacctggacagctggcagtacgacgcggcggcgaacctgctggacaggcggcagggagagaccgcgcaggcgggtgcaggcagcgtggtgccgttcaaccggataacgtcataccgtgggctgcattaccgttacgatgaatatggccgggtggttgaaaagcggggccgcaacggtacgcagcactatcgctgggacgcggagcaccggctgacggaagtggcggtcatccgggggagcaccgtacggcgttacgggtacgtgtacgacgcgccgggcaggcgggtggagaagcacgaactggacgcggaaggaaagccgtataaccggacgacgtttttatgggacggaatgcggctggcgcaggagtgcaggctgggaagaagcagcagcctgtatatctacagcgaccaggggagccacgagccgctggcgcgggtggacagggcggcgccgggcgaagcggatgaggtgctgtattaccacacggacgtaaacggcgcgccggaggagatgacggacggcaggggcaatattgtctgggaagcgggctatcaggtatgggggaacctgacgcatgaaaaagaaacccggcccgtacagcagaacctgcgtttccaggggcaatatctggacagggaaacggggctgcattacaatttgtacagattttatgatccggatatcgggaagtttatatcgggcgaccctatttcgatccggggcgggataaatctttatcagtatgcgcctaatccgataagctggatcgatccacttgggcttacaccttgtgggaaacctgacgggaatattaatccaaaagatgttcgatatatgcaaagttctataaaaaaccaaacgggggaatatactgtgttaggtaatgcagaggctttgcttaatggtactttgaaaccatctgctctaccgccaattaaaatatggaaggataatcttggtaaaatatggacgctggatcatcgtagattagctgcattcaaattagcagggcttgatagtgttccatttaaatgggcctctcctaatgaagttgctaatcagatgtggaaaatgacaacaaaaacagatggtaagtcgattattctcaaattgggtgatggaataaaaaaagtactggagtaa

SEQ ID NO: 381239 - DNA, 1014 bp, Salmonella enterica
atgacgcagccattggtcggaaaacagattcttattgttgaagacgagcctgtatttcgctcgcttctggattcgtggttttcctctttgggagcgacaacggcattggcaggcgacggggtggatgccctggagttgatggggcgttttacccctgatctcatgatatgtgatatcgcgatgccgagaatgaacggtctcaaactggtagaaaacttacgtaatcgcggagaccagacgcctattctggttatttccgcaacagaaaatatggcggatatcgccaaagcgttacgccttggggttgaagatgtcttgctgaagccggtaaaagatctcaaccgcttgcgggaaaccgtattcgcttgcttataccctaatatgtttaactcgcgggttgaagaagaagaacgcctgtttcgtgactgggatgcaatggtgagtaatccgaccgccgcagcgcaattgttgcaggaattgcagcccccggtacagcaggtgatttcccattgccgcattaattaccggcagctcgtctccgccgatcagcctggactggtgctggatattgcgccgctatctgataacgaactggcattttattgcctggatgtcacccgggcgggcgataacggcgtgttagccgcattgttgctgcgggcgctatttaacggcttattgcaggatcagctcggccaacaaaagcaccgtttaccggagttaggcgcgctattaaaacaggtaaatcatctgctcagacaagccaatttacctgggcaattcccgctatttgtcggctactatcacagtgagctcaaaaatttgattctcgtctccgccggattgaacgccaccttaaatacgggcgctcatcaggttcaaattagcagcggcgtgccgctaggaacattgggtaacgcctaccttaaccaattaagccagcgttgcgactcgtggcagtgtcaaatatggggcgcaggagggcgtctgcgattgatgttgtctgcggaatga

SEQ ID NO: 381240 - DNA, 897 bp, Salmonella enterica
atgaaaatagggctggcgctgggatctggcgcagcgagaggatggtctcatattggggtcatcaaagccctcaagcaaacaggcattgatattgatatcgttgcaggatgctcaataggttcgctggtcggcgccgcgtatgcctgtaataaattatcggcgcttgaacagtgggtatgttcattccgctactgggatgttttacgcctgatggatgtatcctggggcagaggagggttgcttcgcggcgaacgcgtatttaatcactatcgggatattatgcccgtcacggattttgaccactgttcaagacgttttggcgcggtcgcgacgaatcttagcacgggacgagagctatggtttactgaaggcgatctacaccttgccgtacgcgcgtcgtgcagtatgccagggctgatgtctccggttgaacataacggttactggctggtagatggcgcagtcgttaatccggtacctgtttcgttaaccagggcgctgggggctgatatcgttattgcggtagacctgcaacatgatgcccacctcatgcagcaagatttgctctctgtaaatgtcgggaatatcaatgaagagagcgatgatgcgctgccctggcataagcgtttaaaagaacgtttcagtagcctgacttcacgccgtggcgtgagttcgcctggggcaatggaaatcatgacaacctccatccaggtgttggaaaatcgtcttaaacgtaaccgtatggctggcgatccgcctgatattctcattcaaccattctgtccgcaaatctctacgctggattttcatcgcgcccatgccgctattgcggcgggtcagttagccgtagagaaaaagatggacgaacttatacccttggtgcgtaccgacgtttaa

SEQ ID NO: 381241 - DNA, 459 bp, Salmonella enterica; identical to SEQ ID NO: 368381

SEQ ID NO: 381242 - DNA, 843 bp, Salmonella enterica
atgcaatcactacaacgtaaagttctgcgtactatttgtcccgatcaaaaaggccttatcgcgcggattaccaacatttgctataagcacgagcttaatattgtgcaaaacaatgaatttgtggaccatcgcaccggacgcttttttatgcggaccgagctggaaggcatcttcaatgattccactctcctggccgatctggacagcgccttaccggaaggctctgttcgtgaactcaatcccgccggacgccgtcgggtagtgattctggttaccaaagaggcgcattgtctgggcgacctgctgatgaaagccaactatggcgggctggatgttgaaatcgccgcggtcattggcaaccatgaaacgttacgctcgctggttgaacgttttgagatccctttcgaactggtcagccatgagggattaacgcgtgaagagcatgacacgaagatggcggacgccattgatgcccatcaaccggactatgtagtgctggccaagtatatgcgtgttttgacgccaggttttgtggcgcgcttcccgaacaaaattatcaatatccaccactcattcctgccggcgtttatcggcgcgcgtccttatcatcaggcctatgagcgcggcgtgaaaatcatcggcgctaccgcgcactatgtgaatgataatctggatgaaggcccaatcattatgcaggacgtgattcatgtcgatcacacctacaccgcagaagatatgatgcgtgccgggcgcgacgttgagaaaaacgtattaagccgcgcgctgtatcaggttctggcgcagcgggtctttgtttacggcaatcggacgattattctttaa

SEQ ID NO: 381243 - DNA, 1035 bp, Salmonella enterica
atggcgatgattgatttacatagaagaaatgttgatcgtaaaagaaatgaaatcgcgcgattgattgaccaaaaggccaaagaatatgcaaaaataacaagcttaaataataaaattcagtcggcaacaaagcaaatgaactcatcgaagtcattaacaacgattagcaataagcaaaaggaaatatacaaacaccaagcagatatatctaaagttgaaaagaaaatttcagagtttgaatccaaaatatccagaaaaaataaagaattacaagctgagcaaagaaaaatggataatgaggaagttaaagaatacaaaaaacgccaacaacttcaagataaattccagcgcgaacaaactagggcattcagcactgtcaataaaacattgtcggagcactctgatatgataaagaatttgagtgagttacctgaagaaattacagtattgtttcttgcatcaaatccacaagatcaaggacagttaaggttagatgaagaagttcgttctataaaagaaatgattacaaaatcacgtcaccgtgatgcagtaaaattggaatcatgttgggcggttagacctggtgacattctgcagtatatgaatgaatatatgccaacaattgtacattttagtggtcacggaagttccaatgatgaattagtccttatggataacaactccaatactaaattagtgtcgatggaatctctcgttcaggcaatgagtgttgcaaatgacaacttaagactagtatttttcaacacatgtcactcaaaaaaccaagctaataaagtagttgaccacattgaatgtgccattggaatgagcgactcaattacagatgatgctgcgagagccttttctgcgcaattttattcatctttaacttttggcctttctattgagaaatcatttaatcaagcgaaagcagctttaatgctagagggtatttcagaacagaatacaccaacactttttatgaaatctggttgcgatgcagctaatacatacattattgcacagtcagattaa

SEQ ID NO: 381244 - DNA, 660 bp, Salmonella enterica
atgtattcgataaaaccatcagcgctttttcctgacagcgccgtcagggtttcgtccagcggctgcttgcccgccagtttattcagtaccgtgatggcaaagttcggatcgtttcccagcgcgtcagccagttcctgcagggtgtccagcgcttccggcgcagaaccaaccaactgcgccactttcgcaaccacaaacgctgccgtggcaatttcaatacctgcagctgtggtttccggcattggtgccgttggcgtaccggtcagtgccggactgtccagcggggctttggtctgtacctcccccataccccaccatgttttccatcgctggctggaaccagtcgccgcagtgtggacagggccagtaccaccgacggcgatcgccccggttataaagagaaagaatgcctgtcgtgggtggggcctcgtgcggcgaagaacgccgccatttcacatcggtgatttcccgaccagacgaactctctgccagtgtcatccccgcagacataaaggtggtggtacgtttggatgccagggaaaaaccatctccctcgccatcgatatcttcagggaaacggtcatagtcggtcagcgccacccgcttgtaatccgacgaagaaaaaacggttatggacggccagccaatttgcaggaatga

SEQ ID NO: 381245 - DNA, 1122 bp, Salmonella enterica
atggcaggtgccgaaataattggtgctatcgaggttgatagttgggcaactgaaacatttaaatttaatcacccagagtcattggtaatcaaaaaggacatatcacagtttagtgatgaagagatattagaaacttttaaaaataacaagcctgacattatactaggtgggccaccatgccaaggtttttcaatagctaataaaaagaatggtgatcataaagatccgcgaaattcattatttgaagagtttctccgcattggaagaatattatcaccaatggtaatgataatggagaatgttccgaatataattaaagcaaaaacaaaagatggaatatttgtcgtcgatattataaaagaggagctgtcatcgttaggatatcatgtttatcacaatattttggagtcaacagactttggggtaccgcaaataagaaagcgtttgtttattatagcatccagaaaagaattaaaaaatccatttccaaaaccaacacataacataactggtagtgatgggttgaaaaaaacacccacattatgggatgctatttcagatcttcctcaaattaatgccagagagggaagcgaagagatggattatgataaacaagctttaactgattatcaaaaacaactcagggaaaatagtcataaaatatctaatcataaggcaatgaatcattcaaaaagactagttgaacgtttttcttccatgacttgggggcaatctacttctgatgttcctgaacatttgaaaccgtataaaagaaatagcaaagaaatttctgaaaaggtatatgatcagaataataggcgtatgcatcctaataaaccatgtcatacgattgcggcttcattttatgcaaacttcgttcatccttatttaaaccgaaactttactgcgagagagggggctagaattcagtcatttccagactggtatgtgtttaagggaaaacctactgtagtaagccataaattgctacagagagaaggtcgtgaagatgaaaaatacttatgtcaatacaatcaaataggtaatgccgttccaccattaatggcaaaggaaattgcattaaatatctttaatgaggtattttataatgataaaaaataa

SEQ ID NO: 381246 - DNA, 888 bp, Salmonella enterica
atgataaaaaataatgtttttgtgcatgggaataatatattacaaaagcttaatagtaaagtaaaatatacagatagagaatcagttttatttttagaagagataagtcgaaggtatgaagtttggaagaaagataatctagaacttaaagggccatttaagagttcctctttagaggaaatacaagaaataatctgtgaaagagttaagttattaaatagctacaaggattttcttgatatccaaaaatatgcagaacattttgactcaagatcaaatctacattcatctgttcttgaagagtttatgtattatttatttaaagatatagttgaagaaataagtccaaatgctctaataggtaaatcacattcgtttaaagatatattttttaggtcaagctcatatggtaatatggtggaaaggccttacgctgttattgagaaaaaagatcatgatttttcgatcggaatcagtgtaaatgctgagatgaattgcaatggatctcaacaaaatgaggttcatatttgggatattcctgctatagcaattgaatgtaaaacgtatcttgataaaacaatgctacaggatgtttcaacggcggctgaagaaataaaactcaagaatccaaatgcaatgtatattgtagtagcggaatggataaagttaaccgaaaatataaatttaaaaaaatataaggttgatcaaatttatgtgctacgcaagcaaaagaacaccgatagagaatacaggtttttagatggttatgtaaaaaatccaatttacgaagatgcagtgatgcatttgtttattcttgtaaaagattttctaacgtctgattgggagggtggtgtaaattatggattgcaaaacggctatcttctttga

SEQ ID NO: 381247 - DNA, 192 bp, Salmonella enterica
atggctaaaatcgatgaatcaggtcagttatatacacgagtgtcttcaaattttggtatggatactggttgggctaaaggtactctcaacgtatttgttgactttaaggggatttctataactggcagcacacctgagaataataatcaatcaggtactacagactgcagcgcaaactgggtttggggttga

SEQ ID NO: 381248 - DNA, 279 bp, Salmonella enterica
atgagcggtaagcgttatcctgaagagtttaaaattgaagcagtcaaacaggttgttgatcgtggtcattctgtttccagtattgcaacacgtctcgatatcaccactcacagtctttacgcatggataaagaagtacggtccggattcttccactcataatgaacagtcagatgctcaggccgagatccgccgtcttcagaaagagttgaagcgggttacggacgaatgggacatattaaaaaaagccgcggcgtacttcgcaaagctgtccgactga

SEQ ID NO: 381249 - DNA, 921 bp, Salmonella enterica
atgggacatattaaaaaaagccgcggcgtacttcgcaaagctgtccgactgaggtacgcctttatccgcgacaacagccgttgctggcctgttcgtttgctctgtagggttctggatgtccatccgagtggattttatttctggcttaagcagccacattcacagcgtcaccagacagaccagatgctgaccgggcagatcaaacagttctggcttgagtctggctgcgtctatggttatcgcaagatccatctcgatctgcgtgataccggacagcagtgcggagtgaaccgggtctggcggctgatgaagcgtgccggaataaaagctcaggttgggtaccgcagcccacgtgcacgtaaaggagaagccagcatcgtgacacccaacaggctccagcggcagttcaatccggactcaccggatgagcgttgggtgacggacataacctacatccgaacccacgaaggctggctgtatctggccgtggtggttgacctgttctcccgaaaagttatcggctggtcaatgcaaccccgcatgacaaaagagattgtcctgaacgcattacttatggcggtgtggaggcgtaatcctcaaaagcaggtactggttcactctgatcagggcagtcagtacaagagccatgagtggcagtcgttcctgaaatcacacggtctggaaggcagcatgagtcgtcgcggtaactgccatgacaacgcggttgcggaaagctttttccaactactgaaacgcgaacggattaagaaaaggatctacggaacgagagacgaagccagaagcgatatttttgattataccgaaatgttttataacagtaagcgtcggcatggttcgagcgagcagatgccaccagctgaatatgaaaacctatattatcaacggctcagaagtgtctag

SEQ ID NO: 381250 - DNA, 1746 bp, Salmonella enterica
atggcggtggaaaaactgattgtcgaccatatcgacacctggaccacggcgctgcaaacccgctccacggcggggcgcggcagctcggggaagattgagctgtacggcattaagaagctgcgcgagctgattcttgagctggcggtgcgcggcaagctggtgccgcaggatccgaacgacgaaccggcatcagagctgctaaaacacattgcggcggaaaaagccgagctggtgaagcaggggaaaattaaaaagcccaagccgctaccggagattagcgaggaagagaaaccgtttgagctgccggcggggtgggagtggataaagattagtgaaattggtcatgattggggacaaaaaacgcctgatgaagatttcacttacattgatgtcggctcgataaataaagagtatggcattattgaagagccatctattctttcagcaaaagatgcaccatcccgagcaagaaaaattgttcaaaaaggaaccgtcatatattcaactgtgcgcccatatttattgaatatagcgatcattgagagcgccttctccccagagccgatcgctagcacagcctttgctattattcatccttacaccgcgatgaatgctaatttcatatattattatctacgctctcctgtatttattaattatgttgaaagttgtcagacaggagttgcctatccggcaatcaatgacaagcagttcttttctgggataatcgcagttccgccgtcatccgaacaggctcgcataactaaaaaaattaaagaacttatgtccctctgcgaccaactggaacagcactcactgaccagtctggacgcccatcaacagctggttgaaaccctgctaaccacgctaaccgacagccagaacgccgatgaactggccgaaaactgggcgcgtatcagcaagcatttcgacacgctgtttaccaccgaagccagcattgacgccttaaaacagaccattctgcaactggcggtgatgggcaaactggtgccgcaggatccgaacgacgaacctgtagaaaaattgctctcccgtgcaaaaactcatcaacaaaaacgtatcgaaaataaagagattcaaaagaataaaaaaattgatggagttccttatcctgatatacaaattccaaaaacctcatcattcatcttgttaaatgagctggcattcattactaagttggcagggtttgaatatactaactacttttctctagaagatgctggagaggttcccgttgtgagggcccagaacgtaaaagcattcaacctgaaaaaagacaatcttaaattcatatcatatgatgtgtcaaagaaattaaatagaagtgcattatcaaccgaatgtcttttaatgacttttattggagccgggatcggtgacacttgcatttttgaagaaaacaaaagatggcacctagctccgaacgtagcaaaaatagaacctttctccgatatcgacagccattatttaaacatatatctaaatagttttactgggcgtaatgagatatttaagtcgttgaaagctaccgcacaaccaagtttatcaatgagcactattcgcgaaataatggttatacttccaccattgcaagaacagaaaagaatagtaaaaaaaaccaacgagttattagccctatgcgataaaataaatcattatatccaatccgcccaacaaacccagctccacctggccgacgccctcaccgacgccgccataaattaa

SEQ ID NO: 381251 - DNA, 699 bp, Salmonella enterica
atgcaaaaacgactgctatttctcggccttctcttggtcaacctgcccgttttggcacaagacgaaattccaaccgctttaacgtcatattaccaaccttctttggatgaattgcaaagccgtatatggttgagaaaagatcaacccgatctgcaatactctgcttgtctggataaacaggtatcaactgagcagcggattgttgtgatgtgtggttatcttaccggagcatcggagcctgataccgccccatttgatatctggtatctgaacggggacgccataaccgcacgtataacgacggaaggttatggtcgtatgggaacatctggtggtgcgaaagcggtaaaaattggcgacaggtggggcgtggtgctgaagtccagttatatgatgcagggctttgaacaaacctttcagcagttttatgttgcgcaagggaagaatattcaactgattgccagtctgccaacttattccagtagtgaagatttcggtgccgaaaaggaaggttattcgatagataagctggatactcaggtggcatttgcacagaaatatactggcacctatccgaatatgcttttacatgccaccggagtattagagggcgagaaaatcgataagcagtggtcggtgccgtttgactcaaaaactaataagtatcttatcccggaagagattgatattggttattga

SEQ ID NO: 381252 - DNA, 1419 bp, Salmonella enterica
atgcctgaccatgatccgctaacgctaaaactaagcttgagagaaaaactcgcttacggtgcgggtgatattggctctaatctaatgctaagcattggcacattatatttgctcaagttttacacagatgagctaggaatgcctgcatattatggcggggttattttcctcatagcaaaattctttactgcatttacagatatgctaaccggatttcttctcgattctcaaaaaaacattggaatcagagggaaatttagacctttcattctgtatgcagcagtaccatcagcaattattgcgacagttcagtttattgctacaacatttagtctgccgataaagaccgctattgctaccggtctatttatgttattcggactgttttacagtctaatgaactgttcatatggcgctatgatcccagcaataacaaaaaatccaaatgaacgcgcacaactggcagctttccggcagggaggggcaacaataggattattaatctgtacggttgcttttattccacttcaatctttattctctacaactaccattggttatggttatgcagccttaactttctctatctttggtttcatttttattatgttatgttataaaggaaccaaagaacattacattgaacccccatcgccgggacataaggcaagcatcatcaaatcattttgtgcaatttttcacaacccaccactattagttctatgcattgcaaatttgtgtacactagcagcatttaatatcaagctcgctattcaggtttattatacccaatatgtactaaatgacattaacctattatcatggatgggtttttttagtatgggctgtgtaattattggtgttttgttagttccctggaccgtaaaatgctttggcaagaaacgcgtgtatttagcaggtatgcttttatgggccgcgggcgatgttttaaattatttttggggttataactccttttattttgtcattttttcttgtatcgccttcttcggtaccgctttcgtcaacagcctgaactgggcgctggttccggatacggttgactacggtgaatggaaaacgggtattcgcgctgaaggctcggtgtatacgggttataccttttcccgcaaaatttccgctgcgcttgctggctttttgccaggtattatgctgacgcaaatcggttatatccccaacatagctcaaagtgacaccacgttgcttggtttgcgtcagctcatttttttatggccttgcggtcttgccattatcgcagcactaacgatgggctttttttataagctcaatgaacaacgtttcgcttttattatcgaggaaattgcccaacgaaagaaaacaggtaatcaaattgtcgcgactaataataaacaaagtatttctactgtaaataattaa

SEQ ID NO: 381253 - DNA, 1383 bp, Salmonella enterica
atgagtcagacctctgctgatccggcaacgctacgcctgccgcttaaagaaaaaatagcttatggcataggcgatctgggttccaatattctgctggatattggcacactctatttgttgaaattctacacagatgtcctcggtcttccgggaacctatggtgggattattttcttaatcgctaaattctttaccgcatttgccgatatgggcactggtattgtgctcgactcgcggcgaaaaataggaccgaaaggtaaatttcgcccgttcgttctgtatggctcattcccagtagcactgctggctacagccaactttataggaacaccgttagaaattacgggcaaaacggtcgtcgcaacgctgctgtttatgctgtatggattatgctacagcctaatgaactgctcttatggcgcgatggtgccagctataaccaaaaatccaaatgaacgtgcctcgctggcagcctggcgccagggcggatccaccttaggccttctcattggcaccgttgcttttgtaccagtaatgaatttgattgaaggcaatcaacaattgcaatatggcgtaaccgctgctcttttctcgttatgcgggctgctatttatgtggctttgctatgcgggtgtcaaagagcgttatgtcgaggtcaaacaggctgattccgcaaaaaaagcaggaattttgcaatcctttcgcgccatcgccggtaaccgcccgttgtttattctgtgcgtcgccaacctttgcacccttgcggcatttaatgtcaaactggcgattcaggtctactacacccagtacgtgctgaacgatccgattctgttgtcctatatgggattcttcagtatgggttgtatcttcatcggcgtatttttaatgcctaccgctgtacgccgttttggtaagaaaaaagtctatatcggcggactgctaatttgggccgtgggtgatttgcttaactacagcttcggcgacagttcggtgagcttcgtggccttctcctgtctggcattctttggttcagcattcgtcaacagcctgaactgggcgctagtctcggacacagtggaatatggtgaatggcgtacaggtgttcgttccgaagggaccgtttataccgggctcaccttctttcgcaaaatgtcccaagcgttggctggattttttcccggatggatgcttactcaaattggctacatacccaacgtggtgcaatcaaccagcactgttgaaggattacgtcagttgatcttcatatatccttgtgccctcgcagtgttggccatgattacaatgggctgtttttacaacctcaacgagaaaatgtacatacgtatcgttgaggaaatagaagcacgtaaacgtactgcttaa

SEQ ID NO: 381254 - DNA, 888 bp, Salmonella enterica
atgcatagtggtgggaatacgatattactcgctgcaggtgattaccgggcgcaaatagtttcagtgggtgccggtcttgccgaattaacctggcagggcaagcatctggttatacctcataaaccagaagagatgcctcttgctcatctgggtaaggtattaatcccttggccaaatcgtattgccaatggtatctatcagcatgatgggcatgagtatcagttgccgattaatgaacatggctctaacgccgctattcacggcttgcttgcatggagagactggcaagttgatgaattaacagccacaaaagcctcgttctccatatttttaccgccaagctatggctacccattcgcattgatttcgcaggttatttactcactggacgcaacaacagggctgtccgttgaaataattagccaaaatatcggcgataaaccagcaccttatggcgtcggtgttcacccctacttaacctgtgacttagcacctgttgatgattatacgctgcaacttcctgcaaaagaggtttttgctttcgatacacagtctaactcatcaacgttactacgcgtcgatgagctgaatctggactattccatccaacaaaaaattggtgataaacggattgatcatactttcaaaacttacagcgagcgatgggaggcgaaaattattaaccatcaacaggaactggctgttagtttatgttccgatcaaccgtggcttcaggtctatagtggcgaaaagttgaatcgccggggattagctatcgaaccgatgagttgtccgccgaatgcctttaattctgggatcgacttactattacttaaaccaaaacaacagcatatattgttttttaatatttgtggtgaatgcatatag

SEQ ID NO: 381255 - DNA, 801 bp, Salmonella enterica
gtgcccgagggatatgaccagcgtaataccggggtttacctgacaggattacaacagttgggtgacttcactctggaagcggcggcgcgcagtgatgacaactcccagtttggccgtcatggtacatggcaaaccagcgcgggatgggagtttatagaaggttatcgctttattgcctcctacggaacctcctacaaagcgcctaatttgggccaactgtatggttattacggtaatccgaacctgaatcctgaaaagagtaaacagtgggaaggcgcatttgaagggctaaccgctggcgtcagctggcgtatttcaggttatcgtaacgatattaatgacatgatcgattatgacgatcatctgcaaaaatattacaacgaaggtaaggcgcgcattaaaggtattgaggcgacggcgaatttcgataccggaccgttaacgcatacggtcagttatgattacgttgatgcgcgtaatgcgattaccgatacgccattaccgcggcgttccaaacagatggcaaaatatcaacttgactgggacgtttacgattttgactggggggtgacatatcaataccttggttcccgctatgattcggattactccgcttacccataccggacagtaaaaatgggcggcgtcagtttatgggatcttacggttgcatatccggtcacctcacatctgacagttcgtggtaaaatagccaacctgttcgacaaagattacgagacagtttatggctaccaaactgcaggacgagaatacaccttgtctggcagctacaccttctga

SEQ ID NO: 381256 - DNA, 3081 bp, Salmonella enterica
atgcgctttttcgcccttttcatctaccgcccggtcgccaccattttgattgccgccgccattacgctgtgcggcattctgggctttcgtctgctgccggtcgccccgctgccgcaggtcgatttcccggtgattatggttagcgcctcgctaccgggcgcctcgccggaaaccatggcttcgtcggtggcgacgccgttggaacgttctttgggacgcattgcaggcgtcaatgaaatgacctccagcagctcgctcggtagtacgcgcattattctcgaatttaatttcgatcgtgatattaacggcgcggcgcgcgacgtgcaggccgccattaacgccgcgcaaagcttgttgccaggcggaatgcccagccgcccgacttatcgcaaggccaacccgtccgacgcgccgattatgattttaacgctcacctcggagagctggtcacagggcaaactgtatgatttcgcctctacccaactggcgcaaaccatcgcgcaaattgacggcgtcggcgatgttgacgtcggcggcagctccctgcccgcagtacgtgtaggcttaaacccgcaggcgctctttaaccagggcgtctcgctggatgaggtccgcgaagcgatcgacagcgccaacgtacgccgaccgcaaggcgcaattgaagatagcgtccaccgctggcaaatccagaccaacgacgaactgaaaaccgccgccgaatatcagccgctgattattcactataacaacggcgcggcggtacgcctgggcgacgtcgccagcgtcaccgactcggtgcaggatgtccgtaacgccgggatgacgaacgctaaacccgctattttgttgatgatccgcaagctgccggaggccaacattattcagacggtcgatggcatccgggcaaaactgccggaactgcgggcaatgatccccgccgctatcgatttacaaatcgcccaggatcgttcgccgacgattcgcgcatcgctgcaagaggtagaagagacgctggctatctctgtcgcgctggtgatcctggtggtgtttttattcctgcgttccgggcgcgccacgctaatccccgccgtcgccgttcccgtttcgctcatcggcaccttcgccgccatgtatctgtgcggcttcagcctcaacaatctgtcgctgatggcgctgactatcgcgaccggatttgtcgttgatgatgccattgtggtgctggaaaatatcgcccgccatctggaggcgggaatgaaacctttgcaggcggcattacagggtacgcgggaagtcgggtttacggtcatctccatgagtctgtcgctggtggcggtatttctgccgctgctgttaatgggcggcctgccaggacgattattacgggaattcgccgttaccctctcggtggcgattggcatttcgctggtggtctcgctcacgctgacgccgatgatgtgcggctggatgcttaaatcaagcaaaccgcgcacccaaccgcgtaaacggggcgttggccgtttgctggtcgccttgcaacagggttacggcacgtcattaaaatgggtgcttaaccatacgcgtcttgtcggtgtggtttttcttggcaccattgcgctgaacatctggctttatatcgccatccctaaaacattctttccggagcaggacaccggcgtgttgatgggcggtattcaggctgaccagagcatctctttccaggccatgcgcggcaagctgcaggattttatgaaaattattcgcgacgatccggcggtgaataatgtcactggttttaccggcggctcgcgggtgaatagcggcatgatgtttattacgctgaagccgcgcggcgaacgcaaagagacggcgcagcaagtcattgatcgactgcgggtcaaactggcaaaagaacccggagccaggctgtttctgatggcggtacaggatattcgcgtcggcgggcggcaggctaacgccagttatcaatacacattgctgtctgactccctggcggcgctgcgcgagtgggagccgaaaatacgcaaagcgctctcggccctgccgcaactggcggacgtaaactccgaccagcaggataacggcgcggagatgaaccttatctacgaccgcgacaccatgtcacgactgggcattgatgttcaggccgcaaacagtctgttaaataatgctttcggccagcggcaaatttccaccatttatcagccgatgaaccagtataaagtggtgatggaagtcgatccgcgctatagccaggatatcagcgcgctggagaaaatgttcgttatcaaccgtgacggaaaagcgattcccctctcttatttcgcccaatggcggcccgccaatgcgccgctgtcggtgaaccatcagggactttccgcggcgtccacgattgcctttaacctgccgaccggcacatcgttatcgcaggcgacagaggccattaatcgcaccatgacgcagcttggcgtcccctcgacggtacgcggcagtttttccggaacggcgcaagtcttccagcagaccatgaattcacagcttattttgatagtggcggcgatcgctaccgtctacattgtgctggggatactgtacgaaagctacgtccatccactgaccattctctctactctaccatcggcgggcgttggggcgcttctggcgctggaactcttcaatgcccctttcagcctaatcgccctgatagggatcatgctattaattggcattgtgaagaaaaacgccattatgatggtcgattttgcgcttgaagcgcaacgaagcggcggcctgacgccggaacaagccattttccaggcctgcttgttacgcttccgtccaataatgatgaccacgctggcggcgctgttcggcgcactgccattggtgttatctggcggagacggttcggaattacggcagccgctggggataaccattgtcggcggtttgctcatgagccagctcctgacgctctataccacgccggtggtgtacctctttttcgatcgtctgcggctacgtttttcgcgtaaaaatagcaaaccggtagtagagatatga

SEQ ID NO: 381257 - DNA, 768 bp, Salmonella enterica
gtgctcgacggcctgctgtaccacgaatccgacctgcggatcgaggagcactacaccgacacggcgggcttcaccgatcacgtcttcgccctgatgcacctcttgggcttccgcttcgcgccgcgcatccgcgacctgggcgacaccaagctctacatcccgaagggcgatgccgcctatgacgcgctcaagccgatgatcggcggcacgctcaacatcaagcacgtccgcgcccattgggacgaaatcctgcggctggccacctcgatcaagcagggcacggtgacggcctcgctgatgctcaggaaactcggcagctacccgcgccagaacggcttggccgtcgcgctgcgcgagttgggccgcatcgagcgcacgctgttcatcctcgactggctgcaaagcgtcgagctacgccgccgcgtgcatgccgggctgaacaagggcgaggcgcgcaatgcgctggcccgtgccgtgttcttcaaccgccttggtgaaatccgtgaccgcagtttcgagcagcagcgctaccgggccagcggcctcaacctggtgacggcggccatcgtgctgtggaacacggtctacctggagcgtgcggcgcatgcgttgcgcggcaatggtcatgccgtcgatgactcgctattgcagtacctgtcgccactcggctgggagcacatcaacctgaccggtgattacctatggcgcagcagcgccaagatcggcgcggggaagttcaggccgctacggcctctgcaaccggcttag

SEQ ID NO: 381258 - DNA, 297 bp, Salmonella enterica; identical to SEQ ID NO: 191890

SEQ ID NO: 381259 - DNA, 234 bp, Salmonella enterica; identical to SEQ ID NO: 79140

SEQ ID NO: 381260 - DNA, 267 bp, Salmonella enterica; identical to SEQ ID NO: 80745

SEQ ID NO: 381261 - DNA, 495 bp, Salmonella enterica; identical to SEQ ID NO: 191891

SEQ ID NO: 381262 - DNA, 633 bp, Salmonella enterica; identical to SEQ ID NO: 80740

SEQ ID NO: 381263 - DNA, 375 bp, Salmonella enterica; identical to SEQ ID NO: 80739

SEQ ID NO: 381264 - DNA, 975 bp, Salmonella enterica; identical to SEQ ID NO: 80738

SEQ ID NO: 381265 - DNA, 393 bp, Salmonella enterica; identical to SEQ ID NO: 80737

SEQ ID NO: 381266 - DNA, 180 bp, Salmonella enterica; identical to SEQ ID NO: 80736

SEQ ID NO: 381267 - DNA, 234 bp, Salmonella enterica; identical to SEQ ID NO: 8563

SEQ ID NO: 381268 - DNA, 597 bp, Salmonella enterica
atgatgaaatcagacgaaaaataccaggttcccgcgtggatgcgacctctgttgccgttgctctgcaacaccggggggaacgatccggaagaactgctgaatgatacagaaaccactgccagtgcgaatgttgtccgttatgtactgatagttgctgtgcggtcgcaggttgatctgctgcagcttctgtacaggaaagggctgttgcgcacagagataccaggtggcttttcaccggaagaagcgcaggcactcctggataatctggtgcgcagccatatcagcaaggcgctgtcgggcgagcgaatggcagcccgtgacagaaatgccgatctggcctggattggacagcaactggtcgatgacgcctggtttgtccgtgccacactggaagcgcatgggatgagcgtcggaaatgagagtccccctgctccgccggagacaatgccggacatacagacacgggaactggtgatgttgatcaagcgactggcatcatcgctgaaagcggtgaaaccggacagttgtgtggtgcgtgaagcgcaggactggctgcgcgacagaaaacttgtggatatcacagatattctccggtga

SEQ ID NO: 381269 - DNA, 1536 bp, Salmonella enterica; identical to SEQ ID NO: 235092

SEQ ID NO: 381270 - DNA, 756 bp, Salmonella enterica
atgagtgataacctgttaaacaaactgacccaactgaaactcccggcgatggccgggagcctgatacggcagcgggaaacgcctcagacttacgacgaactgtcgttcgaggaaaggctgacgcagctggttgatgacgagcttctgagcagggaaaccagtcgtgtggcacggttgagaaaaaatgccggcctgaaataccaggcaacaccggaagggctgcgctatccggcctcaagaggtctgcgggctgaacagatgagagaactgctgaacggccactacataacccacaggaaaaacctgctgataaccggtccgacaggatgtggcaagagctggatagccaatgcgctgggcgaacaggcatgtcgacagaaacacagcgtccggtactgtagaaccgggcgattactggaacaactggctcagggacgtgttgatggcagctggctgaaatatctgaaacagttgcaaaaaatacaggttctaatcctggacgatctggggctggaacagttaagtaacgcccagtgtaatgaccttctggagctcatagaggatcgttacggacaaagcagcacgatagtggtaagccagttcccggtagataaatggcatggtctgatggagaacccaacaacagcagatgccatcctggacagactggtacataactcacaccgggtggtccttcagggagagtcactgaggaaaaatcccccggtagtggaaagcagcgaaaaaacgcgttaa

SEQ ID NO: 381271 - DNA, 267 bp, Salmonella enterica
atgagaccatcaattatcttcgcaaccgccgagtatgtaaagcgtctgcgtgaagagtgcctgcgggagaataaacccctgcaccgccatacccgcttcagacgtcaggagctggcacaggatgagattaacccggacgtcctggcgatgagcggccatatcgccagacgctgcagtgagcagaagcgggtgcgtatccccgctatgaaagtcagcgaatggggccacctgctccgcgcgcttgaaattgagcgggtctgccactga

SEQ ID NO: 381272 - DNA, 939 bp, Salmonella enterica
gtgagtcagaagaaaaccaccacgacgcccacgccgcatgatgccgcgttccggtcgttcctggcgaatcccgacgtcgccagagattttctggaactgcatcttccggcggagtaccggcagttgtgcgacctgtccacgctgaagctggaacccgccacctttgttgagccggacctgcatcagtacgccagcgatatcctctggagtgtgaaaaccaccgggggtgaagatggctatgtttatacgctcatcgagcaccagagcaccgaaaatctgtacatgcctttccgcatgttacgttacagtgtggcggcgatgcagagacatctggagcagcacaaaacgttgccactggtgattcctgtactgttctatcatggtgagcgcagcccgtacccgtacagcatgaactggctggactgttttgagaatccggcacttgcggctaaaatatacacaaagccgtttccgctggttgatatcactgtcgttgatgacaatgaaatcatgaaccatcgccggatggccgcactgacgctgctgatgaagcatatccgccatcgtgacatgatggagctgctggacaaactcccgcaggtcatggtggaaatttcagacgagcaggtgcgtgttctgattcattacatcgttaacgcaggggactctgtatcaccggaatttatgcgggcgctggctgagcgtctgccgcagcatgaggataaactgatgactatcgcagaacgtcttgagcaaaaaggtcgccaggagggcaggatggaaggacgcatggaaggacgcatggaaggacgcatggaaggagcgcttgaaaaagccctggctattgcgtgccagcttcagaaaatggggatgacgccggagcagattaagcaggctaccggactttccgatgacgaactgaagaaaatcactcactga

SEQ ID NO: 381273 - DNA, 663 bp, Salmonella enterica; identical to SEQ ID NO: 19459

SEQ ID NO: 381274 - DNA, 135 bp, Salmonella enterica; identical to SEQ ID NO: 10665

SEQ ID NO: 381275 - DNA, 849 bp, Salmonella enterica; identical to SEQ ID NO: 191885

SEQ ID NO: 381276 - DNA, 1650 bp, Salmonella enterica
atggcaggcgcacacgagttcagacagcacggtttccatgcgcgccgtcgtgcggagatcatcagtccgttggcgcagtcggagacggtcgggcacgaagcggccgatatggcggctcaggcgctgggcttgtctcggcgccaggtatacgttctgatccggcgtgcccggcaaggcagcggcctcgtgacggatctggtgcccggccagtccggtggaggtaaaggtaaggggcgcttgccggaaccggtcgagcgcgtcatccacgagctactgcaaaagcggttcctgaccaagcagaagcgcagcctagcggcctttcaccgcgaagtcactcaggtgtgcaaggctcaaaaactgcgagtgccggcgcgcaataccgtggccttacggatcgctagccttgacccgcgcaaggtcatccgccggcgggaaggccaggatgccgctcgtgacctacaaggtgtgggcggcgagcctcctgccgtgaccgcgccgctggagcaggtgcagatagaccatacggtcatcgacctgatcgtggtcgatgaccgcgaccggcaacctattggccgcccgtacctgaccctcgccatcgacgtgttcacccgctgcgtgctcggcatggtcgtcacgctggaagcgccgtctgccgtttcggttggcctgtgcctcgtgcatgtcgcctgcgacaagcgcccttggctggaaggactgaacgtggaaatggattggcagatgagcggcaagcccttgctgctctacctagacaacgcggccgagttcaagagcgaggccctgcgccggggttgcgagcagcatggcatccggctggactatcgcccgctgggacagccgcactatggcggcatcgtggaacggatcatcggcacggcgatgcagatgattcacgacgaactgccgggaacgaccttctccaaccctgaccagcgcggcgactacgattccgaaaacaaggccgccctgacgctgcgcgagctagagcgctggctcacattggcggtcggcacctaccacggttcggtgcacaacggcctgctccaaccgccggccgcgcgctgggccgaggccgtggcgcgtgtcggcgtaccggccgtcgtcacacgcgctacttcgttcctggtcgattttctgccgatcctccggcgcacgctgacccgcaccggctttgtcatcgaccacatccactactacgccgatgcgctcaagccgtggattgcgcggcgtgaacgctggccgtcctttctgatccggcgcgatccgcgcgacatcagccgtatctgggtcctggaaccggagggacagcattacctggaaattccctaccgtaccttgtcgcatccggctgtcaccctctgggaacaacggcaggcgctggcgaaactgcggcagcaagggcgcgaacaggtggatgagtcggcgctgttccgcatgatcggccagatgcgtgagattgtgaccagcgcgcagaaggccacacgcaaggcgcggcgtgacgcggatcgccgccagcacctcaagacatcagctcggccggacaagcccgttccgccggatacggatattgccgacccgcaggcagacaacttgccacccgccaaaccgttcgaccagattgaggagtggtag

SEQ ID NO: 381277 - DNA, 1236 bp, Salmonella enterica; identical to SEQ ID NO: 28546

SEQ ID NO: 381278 - DNA, 1530 bp, Salmonella enterica; identical to SEQ ID NO: 28545

SEQ ID NO: 381279 - DNA, 1638 bp, Salmonella enterica
atggctgccaaggatattcgtttcggtgaagacgcccgcgcccgcatggtccgcggcgtgaacgtgctcgccaacgccgtcaaggcgaccctgggcccgaagggccgcaacgtcgtgctcgagaagagcttcggcgccccgacgatcaccaaggacggcgtgtccgtcgccaaggagatcgaactggccgacaagttcgagaacatgggcgcgcagatggtcaaggaagtcgcttccaagacctccgacaacgccggcgacggcaccaccaccgccaccgtgctggcccaggccctgatccgcgagggcatgaaggccgtggccgccggcatgaacccgatggacctcaagcgcggcatcgacaaggccgtcacctcggccgtcgaggagctgaagaagatctccaagccctgctcgaccagcaaggagatcgcccaggtcggttcgatctcggccaactccgacaccgacatcggcgagctgatcgccaaggccatggacaaggtcggcaaggaaggcgtgatcaccgtcgaggagggctcgggcctggagaacgagctcgacgtcgtcgagggcatgcagttcgaccgcggctacctgtcgccgtacttcatcaacaacccgcagtcgatgcaggccgagctggaggatccgttcatcctgctgcacgacaagaagatctcgaacgtccgcgacctgctgccgatcctcgagggcgtggccaaggccggcaagccgctgctgatcgtcgccgaggacgtcgagggcgaggcgctggccacgctggtggtcaacaccatccgcggcatcgtgaaggtctgcgcggtcaaggccccgggcttcggcgaccgccgcaaggcgatgctggaggacatggccatcctcaccggtggcaccgtgatctccgaggaagtcggcctctcgctcgagaaggcgaccatcaacgacctcggccgcgcgaagaaggtgcaggtctcgaaggagaacaccaccatcatcgacggcgccggcgacaccgcggacatcgaagcccgcatcaagcagatcaaggcgcagatcgaggagaccacctcggactacgaccgcgagaagctgcaggagcgcgtggccaagctggccgggggcgttgcggtgatcaaggtcggcgccgccaccgaagtcgagatgaaggaaaagaaggcgcgcgtcgaagacgccctgcatgccacccgtgcggcggtcgaggaaggcatcgtcccgggcggcggcgtcgccctgatccgtgccaaggccgcgatcgccgagctgaagggcgccaacgaggaccagaaccacggcatcgcgatcgccctgcgcgcgatggaagccccgctgcgcgagatcgtcaccaacgccggcgacgagccgagcgtggtgctgaaccgcgtcgccgaaggcaccggcgcgttcggctacaacgccgccaacggcgagttcggcgacatgatcgagttcggcatcctggacccgaccaaggtcacgcgctccgcgctgcagaacgcggcgtccatcgccggcctgatgatcaccaccgaagcgatggtggccgaagcgccgaagaaggaagagccggccgctccgggcggcggcatgggcggcatgggcggcatggatttctaa

SEQ ID NO: 381280 - DNA, 393 bp, Salmonella enterica; identical to SEQ ID NO: 28543

SEQ ID NO: 381281 - DNA, 903 bp, Salmonella enterica; identical to SEQ ID NO: 28542

SEQ ID NO: 381282 - DNA, 780 bp, Salmonella enterica; identical to SEQ ID NO: 16904

SEQ ID NO: 381283 - DNA, 288 bp, Salmonella enterica
atgattctggcagaagtaagcacgcgtcatgttgcagaatttcttgagctatggatcgcggaaggtaaaaacacgatggcgggggcgacgaggtctgtactatctgacatgttttgtgaagctgttgtagaaggaagaataacactgaatccggttgaaaaagccaaggtaccaaaaattgaagttgcaagggagcgcttgcgaatagaggtttataatgctacacgagcatatgccctcatggttccctctcgcgatggatttagcactcgttacaggtcaacgtag

SEQ ID NO: 381284 - DNA, 1536 bp, Salmonella enterica
atgaaaattcgttcacaagtcggcatggtgctgaatctcgataagtgcatcggctgtcatacctgttcagtcacctgtaaaaacgtctggaccagtcgcgaaggtatggaatacgcgtggttcaacaacgtagaaagtaagcctggcgttggttttccgaatgactgggaaaatcaggaaaaatggaaaggcggctggatccgcaaaatcaacggcaaactacagccgcgcatgggcaaccgggcgctgctgctgggtaaaatcttcgctaacccgcatctgccgggcatcgacgactactacgagccgtttgattacgactaccagaacctgcataccgcgccggaaagcaaacatcagccgatcgcgcgtccgcgctcgctgattaccggccagcggatggacaaaattaccagcgggccaaactgggaagagattctgggcggcgagttcgaaaaacgcgccaaagatcagaatttcgaaaacatgcagaaggcgatgtacggccagttcgaaaacaccttcatgatgtacctgccgcgcctgtgcgagcactgtctcaacccagcgtgcgtggcgacctgcccgagcggcgcgatttataagcgtgaagaagatggcatcgtactgatcgaccaggacaagtgccgcggctggcggatgtgcatcaccggttgcccgtacaagaaaatttacttcaactggaagagcggcaagtccgagaagtgcatcttctgctacccgcgtatcgaagctggtcagccgaccgtttgctccgaaacctgcgtgggtcgtatccgttatcttggcgtactgctgtatgacgccgatgccattgaaagcgccgccagtacggaaaacgaaaaagatctgtaccagcgtcaactggacgtgttcctcgatccaaacgatccggctgtcattgagcaggcgctgaaggacggcgtgccgcagagcgtgatcgatgcggcgcagcaatcgccagtgtacaaaatggcgatggactggaagctggcgctaccgctgcatccggaataccgcacgctaccgatggtctggtacgtaccgcctttgtcaccgattcagtctgcagccgatgcgggcgaacttggcagcaacggtattctgccggatgtagacagtctgcgtatcccggtgcagtacctggcgaacctgttgaccgctggcgacacccagccggtactgttggcgctgaaacggatgctggcgatgcgtcactacaaacgtgcggaaaccgtagacggtaaagtggatacccgcgcgctggaagaggtgggtttaagcgaagcccaggcgcaggaaatgtatcgttacctggcaattgctaattatgaagatcgctttgtggtgccgagcagccatcgtgaactggcgcgtgacgcattcccggagaaaagcggttgtggctttacctttggcgatggttgtcacgggtctgataccaaattcaatctgttcaacagccgccgcatcgacgctgttgatgtgaccagcaaaacggagccgcacgcatga

SEQ ID NO: 381285 - DNA, 1530 bp, Salmonella enterica
atgcgtttttcattaattttaaaaataataatattaaatatatttatttcaaaaatggctcacgctgctgtctgcgaggagcgctatccccccgactcggaagaatgccagtacgttcaggaattagagcaaaaagcggaacaaggagatgaaagcgcacagttttcgcttggaagctggtatgcggaggggcgatatgttaagcctgattataagctagccattaaatggctggagaaagcgggtaaacaaggttctgatctttcctatttcatccttggctatcattacaactatggtgaaaattttccacttagtcgacaaaaagcgctggagtggtatcgcaaggcggcagagctaggggatagtagtacgcaagaaattctcggtgacgcctatatgtatggcgatgggtttccccaaaatacccagctagcgctggagtggtatcgaaaagccgcctctccaaccaatgatgcgggcgttgtccgcggacagggttcagcttcgtcagcacaatttaagcttggagtaatgtacgcccacggtcagggcgttcctcaggattatcagcaaacggcgatcttgatgcgtaaagcggcggaaaatatgtactaccccgcgcaactttatcttggcgttgcctatttttatggtgaaggcgtgcctcaggattatcgtcaggcagtttactggcttaatgaaggtatatcaggcagctatacgccaggccacattccgctgaatgcgctctatgataaagcgcatcccgctgaccgggttcactctcagacgtggtatcgaaaaacagcgcaacgcgtgatggcaaaggtacagtacaattttggcgtatggtattacaacggttatcacttattgaaagatcacaacctggcgctggagtggtatcgcagagctgcagcgcaaggattggccgaggcgcaggatgcgatcggcgtgatgtttatgcagggtgagggcgtttctcaggactaccaacaggcgctggcgtggtatcgcaaagccgctcgccaggggctgcctgctgcgcaaacgcatctgggcatcatgtctgcatttggtcgcggcgtcgcgcaaagcgacagacaggctatcgcatggtatcgaaaagcagcaaaacaggattttgcgaaagcgcaatatcagcttggcgtagcatatagcacgggaagaggcgtgcctgaaaatagccggaatgcgctgaagtggtacctcaaagcggcagagcaggggtttactccggcacaatcagcgcttggggaaatttatgctcatgggcgccagggtgtgcctaaagataataagcaggcctatatttggtattacatggcaagtatatatacggaaaaatctaaggatgattgttcagcgctcattgccgaaagaaaccgactcaagggaacgctcaccccagatcaacttagcgagacatatgccgcctttgatctcatcaggcgaaaaatcaaccaatcaaaggaggcgaaaaagattgccaggaagaagtattga

SEQ ID NO: 381286 - DNA, 3096 bp, Salmonella enterica
atggaccagatagcgaacctggtcattgatttaagtatcgacagcgcagagttccgaaacgaagttccgcgcattaaaaaattgctgaacgatgcggctggtgactcagaacgttcagcggcccggatgcagcgttttctggataagcagacggaggcgacgcgccggacgtccgccagtctggagcaagtgactgccagcagtaccgcgtacagttccgctgtggagaaaagcgcagcggccagtacgcgtctggcggcggatgtggatcagacgcgacagcgggtggaggcactgggaaggaaactgcgtgaggaacaggcgcagtcagcggctgtggcggcagcacaggacaggacaagtgctgctttttaccgccagattgacagtgtaaaacagttaagcggtggtctgcaggagctgcagcgtatccaggcgcaggtacgacaggcgaaaggacgcggagatatctcacagggcgattatctggcgctggtgtctgaaaccgccaggaagacccgtgagcttaccgatgccgaagcgctggccacgcagaaaaaagcacagtttatacgccgcctgaaagagcagacgacggtacagggcctctcccgtaccgagctgctgcgggtgaaggcggctgaactgggtgtcagcagcgccgcagatatttatatccgtaaactggagcgtaccggaactgccacccatacgctaggactgaaaagcgctgctgcccgtcgtgaactgggcgtgctggctagtgagctggcccgtgggaatttcggggcactgcggggaagtggtattacgctcgctaaccgcgccgggtggatcgagcaactgatgtctccgaagggcatgatgctcggcgggctggctggcggcgtggctgctgctgtttacgggctgggcaaggcctactatgaaggcgctaaggaaagcgagacgttcaataaacagcttattctgaccgggagttatgccggaaaaaccacaggccagcttaatgcgatggcgaagtcgctcgccggaaatggcgtcacgcagcacgacgctgcaggcgtgctggcacaggtggtcggtagcggagcgtttaccgggcaggcagtggcaatggtatcccgtaccgcgaccagaatgcaggaaaacgttggacaatcagtggatgaaaccatccgccagtttaaacgcctgcgggatgatccggtgaatgcggcgaaagaactggacaggacactgcattttctgacctccacccagcttgaacaaatcagggtactgggcgagcagggaagagtggctgatgccgcgaaaattgccatgtccgcgtattcggaagaaatgaataagcggatgggagacgtacacgacaatctgggctggattgaaagagcatggaatgctgtcggtgatgcggcgaagtgggcatgggatcggatgctggatatcgggcgggaagatacgctcgatgaaaagatcgcgacactgcaggaaaaaatcgcgcgcggcagaaaaacgccctggacggtgtcttcctcccagactgaatacgatcagcagcagctgaacgaacttaaggaacagaaacgccagaaggacctgctggatgcgaaggcgcaggcagagcgtaattatcaggaaacgcagaaacgtcggaacgagcagaatgccgcgctgaaccgggataatgaaactgaatccctgcggcaccaacgggaggtggcgcgcattaccgccatgcagtatgccgatgctgctgtacgcaatgccgcactggagcgcgaaaatgaacgtcataaaaaggcgttgtcacaacaggcgaaaaagccaaagacttaccacaacgacgaggccaggcgactgcttttgcagtacagccagcaacaggcgcagactgaagggcagcttgccgccgcgaagctttccacgaccgaaaaaatgacggaagcgcataagcagcttttgtcatttcagcagcgcatcgctgatttgtccggtaaaaaactgacggcggatgaacaaagcgtactggcacataaggatgaaatcgcgcttgcgctacagaagctggatatctcacaacaggatttgcaacaccagaatgcccttaatgaactgaagaaaaagacgctcacattgaccagccagctcgctgacgaagaatcccgcgtcaggcaacagcacgcaatggcgctggccacaatgggtatgggcgatcagcaacgtggccgatacgaagagcgtctgaaaattcagcagcactaccaggaacaactggagcagcttaaacgcgacagcaaggcaaaagggacatacggttctgacgaatatcgtcaggcggagcaggcgctgaagggcagtctcgatcgccggctggctgagtgggcggattacaatgcgaaagttgacgctgcgcagggagactggacgctgggggcgtcgcgggcgctggataactttctggcgcagggcggcaatgtggcaggcatgacggagaacgttttcacaaacgcatttaacggcatggcggacagtatcgcgaattttgccgtgaccggaaagggcagtttccggagcctgacggtctccatcctggctgaccttgcaaaaatggaggcacgtattgcggcttctaaactgttgggttcagtgctggcaatgttcggctttggcacatcggcaggcggcagtacaccatcaggggcatacagttctgcggcgctgtcggttattccgaatgcggacggcggcgtgtaccgttcggcaggactcagccagtacagcggcagcattgttaatcgcccgacattttttgcttttgccaaaggtgccggggtgatgggcgaggcaggaccggaggcaatattaccacttcgtcgtggtgctgacggtaagctgggtgtcgtggcagccggttcaggagggatggcgatgtttgcgcctgagtacaacattgaaatccacaacgacgccggcaacggacagattggtccgcaggcattacaggccgtatataacattggaaaaaaagccgccattgatttctggcaacagcagtcgcgtgacgggggtattgctggaggagggcgataa

SEQ ID NO: 381287 - DNA, 1932 bp, Salmonella enterica
atgatttccggagagcgcagggcgaataatgccaacagagccataactaacgggctgatagcgcttcatattcccgtaccgcttaccaccgtgcagtgggctgataagtattactatctgccaaaagagtcctcctacacccccggcaaatgggaaacgctgccgtttcaggtagcgataatgaacgcgatggggtatgaactgatccgcgttgtaaacctcattaagtctgcccgcgtgggctataccaaaatgttgctgggggtggaaggctatttcatagagcacaagtcgcgcaacagcctgctgttccagccgaccgactcatccgctgaggattttatgaaatcccacgtggagccgactatcagggatgttcctgtattgctggagctggccccctggttcgggcgtaaacatcgtgataacacgctcaccctgaaacgcttttcttccggtgtcgggttctggtgcctcggcggtgcagcagccaaaaactaccgtgaaaaatcggtggatgtggtctgctatgacgaattgtcatcttttgagccggatgtcgagaaagaaggttcgccgacgctgctgggggataaacgtattgaaggttctgtctggcctaaatccattcggggctccacaccaaaagtcaaagggtcatgccagattgaaaaggcggcaaatgaatcggcgcattttatgcgttttcatgtaccgtgtccgcactgtggcgaagaacagtaccttaaattcggtgatggcagtacgccgttcggtctgaaatgggagaaaagcaagccggagacggtgtattacctttgtgaacataatggatgcgtgatccgtcaatcggaacttgatcagaaagcaggccgctggatttgcgataacacaggcatgtggacacgcgatggactggcttatttcagcgcgtccggtgaggaggttccgccgccacgatccattacctttcatatctggacggcttacagtccctttaccacctggatacagattatttatgactggctggatgcgctgaaagatccaaatggtgtgaaaacctttataaacaccacgttgggcgagccttatgaagaggcggtggccgaaaaactcagccatgagcttttgctggaaaaagtgattcattatgcggcgccggttccggagcgggtggtgtatctgaccgctggtatcgactcccagcgtaaccgttatgaaatgtatgtctggggctgggcgccgggcgaagaggctttccttattgataagcaaattatcatgggacggcatgatgatgaagataccctgcagcgtgtggatgccgtcattaataaaaaatatcgtcatgctgacgggacggatatttccatttcccgtatctgctgggatatcggcggtatcgatgcagaaatcgtctataaacgctcaaaaaaacacggcattttccgcgtgctgcctgtcaaaggggcctccgtttacggaaaacccgttattaccatgcctaaaaaacgcaaccagagcggggtattcctgtgcgaaatcggtactgatactgccaaagaaatgctttacgccagaatgggggcggttactgcgcctgccgacgaagccacgccttatgcgatccgctttccggataatccggatgtttttacggaggtggaagcgaagcaactggtagccgaagagctggtggagaaactggttaacggaaaattccggctgttatgggatgccaaaggacgtcgtaacgaagcgctggattgtcttgtctatgccagtgcagcgttacgggtgtctgtgcagcgctggcaactggatctggaggcgctggcgacatcaaggaaaagcgaagagcaggataccccgacacttgaacaactggccgcaatgctggcaggaggagttaatggcaacaatcactga

SEQ ID NO: 381288 - DNA, 690 bp, Salmonella enterica
atgaacactcaatacctccagtatgtacgtgagcagctaatggtagcgacagccgatttaagcggggagactaaagggcagcttttggcctggctggagaacgcgcaattcgacacgaaaaactatccccgaaaaaaacagcgtatatgggacgaggaaacagaaagctggataacgttaaataacccgccaatccccggcaagcagtcgctggcgaaaggaagcgctatcccgctggtgaagcctgtggaatattccactgcctcatggcgccgggcggttctttcactcgatgaacactacaaggcgtggttgttgtggaattacagtgagaatacctgctgggaacaccaggtcgaaataacacgttgggcgtggtgcgagttcagacagcagcttgcagggaggaagatggctggcaagacagtggaacggctgaagaaacttatctggctggcggcgcaggatgtcagagaggggctggccggacgatacgtctaccagcaacaggagcttgccagcctgtgcggggttaagcctgacaactggagccacaactatgcggactactggcgcgcgatgagtaacatctttaagaggcttgataccgaatctctgctttgtctggtgaaaacaagatcacaacaaaaagcgaccttttcgcagcagggtattgcaaaagtcaattaa

SEQ ID NO: 381289 - DNA, 141 bp, Salmonella enterica
atgaaaccagaactgatcgagatactccgcatgcgctggcagcgcctccgcatttaccgccgtccggggtcggtgttggttgactaccgcatcctgcgcaattttgttcgtatttatcagttcacaggatttactcaatga

SEQ ID NO: 381290 - DNA, 234 bp, Salmonella enterica
atgaaagttgagttaaccattgatcgcactaaaaaacttcctgacggtgcggaggcggcacttgagaaggagctgcttaagcggcttaacaatcagtatgaagattgcagtctggtgattcgacgagccggatctgatggacttaacgtttatggcgctgccaaggacgataaaaagcaaattgaaatgatcctcctggagaccagggagagcgctgacgattggttttattaa

SEQ ID NO: 381291 - DNA, 597 bp, Salmonella enterica
atgaaaaaaagaacaggtttaaagtatgcattatatatattgtcactatggctattgtttgtatcactttttataatgtcatatgacaagaatctttttgtaagtatatcaacatatctggacagcaaagatacaggaacattactttcaagcatcacgcctaaaaatatagtttttatttccagttttgcaatgatagtagcaggtgttttaatttttctatatttattactttcctttaactctggttggtcggtagcgtgcacggtttctgatgttagaaatgaaagtcatgagcatcttgaatttttaactacctatgttatgcctttggtatttactgatgtgaacagcaagaggactatgctgaatcttttgatcatgatagtagctatagggatgatttatgtaaaaacaaatcgtttttattctaatccatcgttagcattgcttggatttagaattttcaaagctaatataaatgatagaggaaccaaagaatttgtaatcatttgccatggcgaaattgataacaacagcagaataaaatatatcaaactagataacaatacatgtcttgctaaaatcactcaataa

SEQ ID NO: 381292 - DNA, 978 bp, Salmonella enterica
atgttcacagcaatagataatatattaaattcaacccaactctccggtgaggcttattttgttgcagaacaccaagggcaactagatattttcagagtagctctagaaccaggtgcagaacagaaattaacacagtctttcagtcgatcacttaagcgtgatgttgttgacccaaacactggacagaacaccttgccgttagtttcttctctgctaagtcgagataagcaggtgcatgaatatgatcaccaagtaataaactatcttccacctgctctagcaaagatggcggacgtgcttagctttggagttaataatacacccactgactttgactttgcccagcaaaacctatcaaccgtgaaaggaatagtttattatctttgtgatggtcaaggtaacggagttgttgtttaccaacacaaatatccaatcgcactacataaaaaaacaaaattgtcatatttctctgcgaatggtagaacccttgatgaggtcacccatgatagcattgacataaatgggaatgtggatttcttttactttgacaacaagtattatgcactaaatatcaacttacttgaaagagcatatggccttgaacaagtcataaataatttagcggcaaatgcaacccctcatataatcgcactgaacatcttggacgtatcaaatcatccgaaccctgcagacatttttaatgacatgcatcgaaatagaaacttcatgcgcagacttgccaccacagcaaacagtccactactacagaatggaactattaacatagccaacattcagacattaattcaaaatttcccgattcttggaaggaatataataatcaatcaagctggattgatagaattatcatctaaaaagcaaaaactatatttcattcgcctgctaaataatgaggcatctttcacagcattaaacctagagccttttcttgcggtcggaaaagactcagcggcataa

SEQ ID NO: 381293 - DNA, 261 bp, Salmonella enterica
atgatggaccagcttctgcaatacgccacaaaccggatcattgaactggaaagcctgctgctggtggatattcaggaaaccgtctggccaactgaggtgaaaatggttttttctcaggttgataacgccggggatctcccggctcaccaccagcggcgcctactgcatcacattaaccggatgtggctggagaaaatgccggaaagcgacacgtttcttgcggcgagtgaacccggcccgattgcttttgcattcaggtaa

SEQ ID NO: 381294 - DNA, 645 bp, Salmonella enterica
atgaccactattaccagagaacagcaaaagcagattttaattgatacggctaaccacgtaatcagtcgtgataacacgtcaccgtatagcgaaaacctgcgcgaactggcgcgtatagcgctggcccagcttatcgctgaacctgtggaacgtgatggtgcagatgccgatcctgttgtgttcaccgacgaacgaaatcttcatcatattgccaggggtcgagaaacctctttgatttggggtaaacaaaaccaggaggtgggggatatcccgctctatcgtcacgcccagcccgcaccggtagtgccggaggaaataccaaaaggcctggcggatcaaattgtcagtctgctggctcataacattggcgataagtttttggctcagaaaatctggaacgcctgtcgcgctgccatgcttcagggtaatcaagcacccgtcaagcaaccatcaagcaattcagaaaacgtgccggttatttcggatggttgggtgatggtgccggttgagctgacggatgacatgatcgcagccgctatgaactgcgacgatgtgctgttcaatagagatgaatcattctgcgtacagttcgggaatatctacgcagccatgattgcagcagcaccgcagcaggaggctgaatga

SEQ ID NO: 381295 - DNA, 435 bp, Salmonella enterica
atgatgaatatgaaaacagaacagcatgaaaattttgttcgtaggctccagctcattcaggatcaaacgggttggaacttatctgagattgccaggagggttatggtctctccacaggcggttcagcaatgggctaaaggcgatacaacccctcgcggcgagaggctgaaaagactcgcagccgttacagggaaacctgaacattggtttttcatgccacttgatgcaaatgaaccgagtaattctttatctgaaattccaacctcaagcagccgggatatgctggatgacaaagaaaaggctcttttggctcttttcaaccagatgccagaagcagagaaaaaccgcctcattgtccatgccaaagccactctacaagagcttgaccttctgaaggatgatgtcctcagtatcatcaaaaatataagagaataa

SEQ ID NO: 381296 - DNA, 249 bp, Salmonella enterica; identical to SEQ ID NO: 376948

SEQ ID NO: 381297 - DNA, 870 bp, Salmonella enterica
atgtttaccctgagctggcagccgccttacgactggtcgtggatgttgggctttcttgccgcgcgtgcggtggacggcgtggaaacggtaggcgagggcttttatgcgcgcagcctggtggtgggcgagcatcgcggactgatcagcgtgagcccccatctgcccacccacactgtgcaggtcagcgtgagcgccggattacttcccgtcgcgccggcgtgtctggcgaaggtttcgcgtctgtttgatcttgactgccagcccgcgcaagttgccgccgtgctggggccactgggcgaggacagaccggggctgcgtttaccgggatcggttgatacgtttgaacaaggcgtgcgggcgatactggggcaactggtgagtgtcgcgatggcggcaaggttgacggcgaaagtggcgcgccgctatggcgaggcgttgccggatgcgcccgattatgtctgttttcccggtccggaaacgctggcgttggccgatccgctggcgcttaaagctctggggatgccgctgcggcgcgccgaagcgctgattcatctggcgcaggcgacgctggcgggaaaactggcgctcgccgcgccgccggatattgagcagagcgttaaaaatttacaaacgtttccgggaattggccgctggacggcgaactatttcgccctgcgcggttggcaggcaaaagatatctttttacccgatgattacttaattaagcagcgcttcgccgggatgacggccgcgcagatccgtcgctacgcggagcgctggaaaccgtggcgttcctacgcgctactgcatatctggtatacccacggctggcaaccgtcaatggatagcgaaatagctggtattcagtaa

SEQ ID NO: 381298 - DNA, 237 bp, Salmonella enterica
atgaatgatgaagctgcggaggccgcagccagacttcgtgaagctgaaggaacgaaaaacagactcctgcaaatagcgtctgaaaaaatcgcgccgttacaggatgcagtggatctggacgaagcaaccaataaagaaaaagcttctcttctggcatggagaaagtaccgggtacaggtaaaccgtgttgatactttaaagcctgtctggccggagaaaccagccagtagtttataa

SEQ ID NO: 381299 - DNA, 612 bp, Salmonella enterica
atgaaaaaaatggcaatcgcctgtgcattactttcaagcgttgtagccagcagcgtatgggctgacgccgccagctctctgaaaagccgtctggataaagtgagcagctttcatgccacctttactcaaaaagtcaccgatggcagcggtgccgcggtgcaggagggacagggtgatttatgggttaagcggccaaatctattcaactggcatatgacgcaacctgacgagagtattctggtttctgacggcaaaacgttatggttctataacccgtttgtagaacaggctaccgccacgtggttgaaagatgccaccggaaatacaccgtttatgctgattgcccgcaaccaggccagcgactggcagcagtataatattaagcaggatggcgataattttgtgctgacgccgaaagccagcaacggcaatctgaaacagttcaccatcaatgtgggacgcgacgggactatccaccagtttagcgccgtagaacaagacgatcagcgtagcgcctatcagctaaaatcccagcaaaacggcgctgttgatccgtcaaaatttacgtttactccgccgcaaggggtaacgatagacgaccaacgtaagtag

SEQ ID NO: 381300 - DNA, 756 bp, Salmonella enterica; identical to SEQ ID NO: 381270

SEQ ID NO: 381301 - DNA, 1536 bp, Salmonella enterica; identical to SEQ ID NO: 235092

SEQ ID NO: 381302 - DNA, 597 bp, Salmonella enterica; identical to SEQ ID NO: 381268

SEQ ID NO: 381303 - DNA, 720 bp, Salmonella enterica; identical to SEQ ID NO: 8275

SEQ ID NO: 381304 - DNA, 438 bp, Salmonella enterica; identical to SEQ ID NO: 17093

SEQ ID NO: 381305 - DNA, 1959 bp, Salmonella enterica; identical to SEQ ID NO: 17094

SEQ ID NO: 381306 - DNA, 234 bp, Salmonella enterica; identical to SEQ ID NO: 8563

SEQ ID NO: 381307 - DNA, 528 bp, Salmonella enterica; identical to SEQ ID NO: 191913

SEQ ID NO: 381308 - DNA, 729 bp, Salmonella enterica
atgcttattcttggcagcgttaaacagcttacccaggatgcggtcgtgcaggtcgatgatttcgtcggtgacggtggccatgccctcggtggccagcgccacgagagtggcgtagcgccgttgcggctcgagtttggccaggtcggcgggtgtcatctggccgccctcgcgggcaatcttgagcaggcggttctggtgaaccagccgctcgatgccggtaggcagatcgagtgcctgccatgccttgaggcgttcgatgtgttccagcatatgccgcgaatttggcttggccggagactggcgcaaccaagccaaccaggtcgtcttgccgttgtcccggcgcttgagcagatcgtcgaggcggcggcgatgcgcgtccgccagtggttcggccaaggcgtcgtagatgcgccggttagcacgggtgatcgcctcggcactcgcccgctcgacggcgttgagggcgggcagaatgaccgactgccgccgcaggtgcccgatcaaggcgctggccagcacgatgcctttgtcggtttgcatcgccagctcggtcagcatctggacggcctgccggtaatggctcatggtgaagggccggaaaccgaacacggtttgcagctcgctcaggtgctcgcgccgggtctgctcccgctggccgtactcgttccagctttcgacgccgaccttgagctggtcggcgaccagcttcaacaagggcgggaacggtag

SEQ ID NO: 381309 - DNA, 561 bp, Salmonella enterica; identical to SEQ ID NO: 102670

SEQ ID NO: 381310 - DNA, 261 bp, Salmonella enterica
  misc_feature (201)..(210): n is a, c, g, or t
atgcttgatgtgaataagaaaatcctaatgactggcgctactagctttgtaggtacccatctactacatagtctcataaaggaaggttatagtattattgcattaaagcgtcctataaccgagccaacgattatcaataccttgattgaatggttgaatatacaagatatagaaaaaatatgtcaatcatctatgaatatnnnnnnnnnngattgtccatattgcaacagactatggtcgaaacagaacccctatatctga

SEQ ID NO: 381311 - DNA, 138 bp, Salmonella enterica; identical to SEQ ID NO: 372437

SEQ ID NO: 381312 - DNA, 477 bp, Salmonella enterica
gtgctcaccgtggcgctgttcccgcaaatcggcctcaaattccttgagaaccgccataatccggcggcgtttgagccactgccgcaggcggaagccgcgcagcctgccgctgccccggcaaaagccgcagcttccggtatctacaccgtggaagtggaaggcaaagcctttgtggtgaaagtcagcgacggcggcgatatcagccagctcactgcggctgcacctgctgcctcttctgctcctgccaccgccccggcaggcgccggcaccccggtcaccgcgccgctggcgggcaacatctggaaggtgattgccaccgaaggccagacggtggccgaaggcgatgtgctgctgattctggaagccatgaagatggaaaccgaaattcgcgccgcgcaggccgggacggtacgcggtatcgcggtgaagtccggcgatgcggtctccgtcggcgacaccctgatgacgctggcgtaa

SEQ ID NO: 381313 - DNA, 636 bp, Salmonella enterica
gtggccgtactcgcctttcagaatgccggcggtttctttggcgatggttttgtagcgttccccggtcaggacgttgagcaccgcctgggtgccgacaatctgcgaggtcggggtcaccagcgggataaagccgaggtcctcgcgcacgcgggggatttccgccagcacctggtccagcttgtccgccgcgttctgctgcttcagctggccttcgaggttagtgagcattccgcccggcacctgggccaccagaatacggctgtcatagcctttcagctggccttcaaaggcgtggtattttttgcgcacctcgcggaagtaggcggcgatgttttccagcttcaggatatccagcccggtgtcgtgctcagtacctgccaacgtcgccaccagcgcctcggtggccgggtggccgtaggtggcgctcatggaggaaatcgccgtgtccacgccgtcgacgcccgcttcaatggccttcagcagggccatctccgccatcccggtggtggcgtgacagtgcagatgcaggcgtacctcaaaacgttttttgatttcgctgaccagctcatacgccgccatcggcgtgagaatgccggacatatccttgatggcaatcgagtcaacgccggtctctaa

SEQ ID NO: 381314 - DNA, 561 bp, Salmonella enterica
atgatacctgttcggagcctgcataacttaataaccactcatgaacgagagatatttttatttcatttatttccatcacatgcctctgtcagtaccatttcaatctcactaaccacgttttgccaattgaacctctttgcccgcaaaagccccttttggattaaatgcttacgaagttcagaatcattaattaacctcgaaattcctttagtaatagcatcttccgaaagagggtcgacaagaatcgctgcatctccagccacctctggcaatgatgaagttagagaagttaatacaggaataccacaggccatgccctccactacaggtaatccaaaaccttcatataaagaagggaaaactaatcctaacgagcccttatataacgatggtaaatctttttcagacacgaacccaaagaactttacacgttcacttaaaccatgttgtattattagtttttctaaatcattacaaggattaccagtaaaaacgagttttattgatggatcaatatctgctttggcaaaggcagatataacacacttctcattcttatga

SEQ ID NO: 381315 - DNA, 201 bp, Salmonella enterica; identical to SEQ ID NO: 380340

SEQ ID NO: 381316 - DNA, 237 bp, Salmonella enterica; identical to SEQ ID NO: 380339

SEQ ID NO: 381317 - DNA, 1632 bp, Salmonella enterica; identical to SEQ ID NO: 380387

SEQ ID NO: 381318 - DNA, 420 bp, Salmonella enterica
  misc_feature (22)..(31): n is a, c, g, or t
atggagcttttgatggagacgnnnnnnnnnngagacgataagtttaccagtatggttattagacgttgtttaagtaaccagccagtaaagttaacatctggtttgcaacagagagatttcttgtatataaaagatctactaacagcgttcgattgtattataagtaatgttaataatttccccaaatttcatagtattgaagttggtagtggagaggcgacatcaattcgtgaatatgtagagactgttaaaaatatcacaaaaagcaattctataattgaatttggcgtggtcaaggaaagagtaaatgaattgatgtatagttgtgctgatatagcagaacttgaaaaaataggatggaaaagagagttctctcttgttgatgcattaactgaaataattgaagaggaagagaaatga

SEQ ID NO: 381319 - DNA, 189 bp, Salmonella enterica
atggggttcgtgctggcgtttctgttcctgctgatctttgccattcgcggcatgtctgccgtgattactcgcttcttcccggaacccgtcgccgcgccagcaccgcgcgccgttcccgtcgtggacgacttcacccgcttaaagccggtgattgccgccgccattcaccatcaccgccttaacgcttaa

SEQ ID NO: 381320 - DNA, 861 bp, Salmonella enterica
atgaatcggttagccagttacatcaaaccgcatgctcagaggacggcatttacgaaggcctggctggctgaaacagaacagcatctgcgaaatatcacccggccggaaggtttgttcactgattcacttgtcaccggggttccctggcggggacaaaatcgttccgtcaggatggtggtatatcgatacctgccagcgaattacaaagatgattcgccggttgccgctctcaaccaggtttgtgagcgcctgacttcagccttatctgcagccggcgttctgagtgtccgacagaatggcgagcagatacatcgatggttgttacgtcacttcaatcctgagcccgactggatagacaaagatacgctttaccgggaggctcgttattatgatgatgcacctgattcattgcctcttggcaatgatttcactgagacgttgtggtttaaccctccacgttctgatacccgaaatggtgtgtggtggtttgataatgtggcgcatcgtgccgttcctgttgaaacattacgtcgccctccgggacccggtcatctgacgggggaggttaagcgtggcgacaatattaatactctgatggatttattgcctgagggcacaatggtatcgctcactattgtggcgcaggctcaggacacgctggaagccgggtttgacacgctgggtaaaaatgcaatagggcagaacacggaatccaggcggacccgtagtgatgtggagcaggtgaagagtttgctgggcatgcgtcacaaactttatcgtgcatcgataacttttttgatgcgtgcacctgatgtcagtgagctgaataaaaaatacagcaacttaccgctacattgctga

SEQ ID NO: 381321 - DNA, 900 bp, Salmonella enterica; identical to SEQ ID NO: 376755

SEQ ID NO: 381322 - DNA, 300 bp, Salmonella enterica
atggatacagttgaagagcttaatagcacttatttttatgccggacgttcaaatctgactgctagtcagttgctgtttatgattttctgcgaaaacactgccaatcagttgggtgttcaggattttggggcgatagtgtctattgtggctggattgaatgttttgcctacgcggacaaaaccgcgtggtgctaagcatttgcttaatccgtttcgcaaaaacgatattcctcaggcgccggagttcacgataggtatgctcattgcgtctgccagggctggtcgctggttgtatgactga

SEQ ID NO: 381323 - DNA, 1080 bp, Salmonella enterica
atgcttaccgaaaaatatgattttcgcattaccgatcagatgactatcccactcagacctcattggatagccaatgattcatacagggaaaagtgcaaaatgcttgtcctcaaccgaagtaaaggggaaattcataaggtagactttagtaaagtaacagattatatcaaagaaggtgatgtaatctgttttaacgacagtactataataaaccatatgtttatctgtaaaacaagacgaaatagattaattaaaattgttttagagggatttttactaaataatagagtaattatttccggacttttaaaagaaaggcttaacgcgaatgatgttttctatttggttgataaccctgaaatttccattaagatagagcaaaggtttggcgaggagagccagtaccgggccgttgtagaaaatcatgaggctttaatttgctatttagccagtcatggtgagcgtcttgatgagtatgtggactccagcttgttttataaatatccagatgcttaccgttccgttttttctaaaaagtatggctctttggaaataccttctgccggcattcattttacctgggatcttatccaaaaaatcaaagataaaggtgggttaatatcttttattactttacatgttgcatcaacagaaatgttgtccaacagaaaaatacaaacaaaatgtgtagaggaagtgactatcaacgaagaatactacgaggttccacaagctacagcggatatcattaatactgcgaagcaaaatggcggacgtatttttgccgtaggaactaccgttacacgatgcctggagtccgcgtattcgagggaacacaattgcctcaaagcaagttctggctggactgcgctttatatacatccaggctatcaactgaaagtggttgactgcctgctaacgaacttacatcagccaaaaacgacgcatatggtgttaactggtcagtttgctggggttgatctactcatgaaggcctatgcctcagaagatatccagtcatgtcagttcgatatgtttggtgattgcatgttaatcatacaggatgaagggcagggatga

SEQ ID NO: 381324 - DNA, 264 bp, Salmonella enterica
atgctgcttgcattctatagcgggaaggattattcggagctaaagctcctcacccttcgggccgttgcctgcggcaacgttctctcactattgctcgagtcgaaccttgaagtcgatgacggcagatttgcagtcagctcccttatgatcgctcgggaaccccaccacggggtaatgcttaatactggcccgcttcctttcgggaagcggggcgcatcatatcaaatgacacgtcgctgtaaagcattcctttgcctgaaatga

SEQ ID NO: 381325 - DNA, 291 bp, Salmonella enterica
atgaatgagaaggaactgcaggattatctccacaatatgggccagaaggaacggcgggaacttacagccaggttgagactggtaaaaccgaagcggaaaacagtatacaaacagaatatttcggagcagcaacgcctgcagcttgaggcagaactgacagccagagggtttgaaggtagtgcatctgagattgatttgcttctgcgtggtggcagcattccgtcaggtgccgggctacggattttttaccgcaaccatcgactgcaggaagatgacaaatggcgtcagtga

SEQ ID NO: 381326 - DNA, 549 bp, Salmonella enterica
atgttatggagcagcaacgatgttacgcagcagggcagtcgccctaaaacaaagttagccattacgggggttgaattgaaaatttcattgatttctgcaacgtcagaaaatggcgtaatcggtaatggccctgatatcccatggtcagcaaaaggtgagcagttactctttaaagcgctcacatataatcagtggctccttgttggaaggaaaacatttgactctatgggtgttcttccaaatcgaaaatatgcagtagtgtcgaggaaaggaatttcaagctcaaatgaaaatgtattagtctttccttcaatagaaatcgctttgcaagaactatcgaaaattacagatcatttatatgtctctggtggcggtcaaatctacaatagtcttattgaaaaagcagatataattcatttgtctactgttcacgttgaggttgaaggtgatatcaattttcctaaaattccagagaatttcaatttggtttttgagcagttttttttgtctaatataaattacacatatcagatttggaaaaaaggctaa

SEQ ID NO: 381327 - DNA, 561 bp, Salmonella enterica; identical to SEQ ID NO: 15275

SEQ ID NO: 381328 - DNA, 1365 bp, Salmonella enterica
atgtctgcatcccctcttgaatccatgccaaattcccttagtgcagaacaagctgtacttggtggcttaatgcttgataactgccgctgggatgaagttgcagatcgtatagttgctgatgatttttataccagtgctcatcgtgaaattttcagtgagatggagaggttattaagtcatggcaaaccgattgatttgataacacttgctgaagcacttgaacagaacggtaaattagaacgcgccggtggttttgcgtaccttgcggagatgtcaaagaacacgcccagcgcggcaaatatttgtgcttatgcggatatcgttcgtgaacgcgcggttgttcgtgaaatgatttccgtcgcaaatgaaatagccgaagctggatatgcgcaggatggcaggggcagcaatgaattgctggatatggccgagcgccgcgtttttgaaatagctgaaaaacgacaaaagagcggtagtggtccaaaagatatcgccagcattctcgatgcaacggtatctcgcatagaagagttgtttcagcgaccacatgatggtgtaacggggcttgatacgggatttaccgatctcaataagaagacggcagggcttcagccgtccgatctcatcattgtcgccgcccgcccatctatggggaagaccacgtttgcgatgaatctcgtcgaaaatgccgcagtccgtaactataagcccgtattggtttttagccttgagatgccgagccaccagctgatgatgcgctcactggcttctcttgcacgcgttgatcagactcgtattcgaacagggcaacttaacgacgaggattgggcgcgggtttctggcgcaatggggattctgttggacaagcaaaatatttttattgatgactcaagcgccctgacacctacagagcttcgttcccgcgctcgtcgtgtttataaagaaaatggtggtttgagcatgattatgatcgactacctgcaacttatgcgcgtccccgagctgcaagataaccgaacgctggaaattgccgagatttctcgctcactgaaggctttggcgaaggaattacaagtaccggtggtggcattgtcacaacttaatcgttcacttgaacagcgtgcggacaaacgaccggtaaattcagatttacgtgaatcaggagcaattgagcaggacgcagacctgatcatgtttctgtatcgcgacgaagtttatcacccggaaagcgaaatgaagggcattgccgaggtgattatcggtaagcaacgaaatggcccaattggcacggtgagattggcttttaacggccaatactcacggtttgataactatgctggtgctgactggcaagaggattattga

SEQ ID NO: 381329 - DNA, 303 bp, Salmonella enterica; identical to SEQ ID NO: 17925

SEQ ID NO: 381330 - DNA, 975 bp, Salmonella enterica
atgaacatcctgatcattgggcgaaaatttgaagctatcagtgatgtgaaaacatatacggaaatgtgggcttacaacctggcctgcgcctttagtgaggctggggtaacattgcaataccatcgtccatattctcccggcgtcgaaagcccggaggattatgttgaagctgtgttgaccgctgcgctctcgtgttctgcgaaagccattttagcgccaggattgcggtattttactacggtgcccagggaaataggcgtgcaactgcgtcgtcgattcactggatgggtagctcaggtatacgacggttctatgctggattcggcaccagttgatattacttttactgtccgcgatgatacctggcggtacctggataatcccggcaggttagagcgtcataatcgctttaacaaacatgttggatgggcagcgaatcaggagctgttccatctggaaaccaaaacagacgatgttctgcgtatttttgtagaccacgctgcatttgatgttagtgggtttgatcactccttaagtatccttatgaaccttcagcgtctgactgttccgtatgaggccagaacgttgaccgatgacggattggttaccattgatccggggaatatttcggtaactccatacagacggacgccggtaccagcaaccgaatttgcagctgaattgcgtaagagtgacgtttttatcgttacgcatcccgaaagccttggattaactgttcttgaggcggcaatgtgtggggcgttgatattaacgccgccagattgccttccgccagatcgcctggctttggtgaaccatatggttatcaagtcgcggattgattgggatgaggttattgctcgcgttgatcgcgtgaaaaatgctgaaaaggtccagtgtcacacctggtcggcaatcgcggaaaagatgcttgagacgtttatcacgcagaaaccgtcgcgaggtaacggataa

SEQ ID NO: 381331 - DNA, 633 bp, Salmonella enterica
atgggtagtttgacagggaagtatcgggctgtagtagtaagcgtcgatgaccctaaaggtctgatgcgtacgcaaatacgcgttgtcggcatgatggatgggttaccagatgcctcattgccgtgggcagaagctatattgtccaatgcaaacacgttttcaccatttctgcccggcgataaagtatgggtagaatttccctacaatggggattctcgatggccattgataatcggttatgcacaggatgcatccggtggcgctcccaatgtgccacctgaagcgtcaggacaaggtgaaggctatgtaccgcctgaagttgaaggtgcaccagcacaaccatcaaccagcgccaaaaaagactttatttcgtcgcggaacggactaatggaggtccggacggcgggcggagcctgggccgttacgcacttgaaaagtggaacaacaatcgggttcaacgaggctggggagttatatgccatttctcaaggtccggcattcatctcttccgcaggaaatctcgatataaagtcaggcgcggatgtcgccctgaaggcggggggaagtatggcgatagaggccagcgggaatctatccataaaagccgctcaagtctctgttgacaaggcttaa

SEQ ID NO: 381332 - DNA, 1017 bp, Salmonella enterica
atggccacaaagaccaccacagccccggaaactgattcaaaacgcactcagctattcctgcaatctgtttcaattgggcagaacgaaatccctcgcgaaatgatcgtaggatgtacctatgtcgaacctggggagctatctggtccccagcttatgctcatggtcagggattcaacggcttacgtggtcaataagctgggggtgaaatttgggacaatactgacagtttcacttggtgatccggaaggtcatggcggcatcctcttctcggaagagttctttgttcttaaagcgccgcgcaaggacgatactgtactgatttacgcgtttagtaacccggtgcggttattaaaagttccgtccaccagcgcacagtattttgttgataagcccccatcagccgtagtttcctctcttgcccctggtctgaaggtaaatgctgactcattcagaaaaacatccacataccacctaaatgttggagaaaaaccgaccaaggtattgcaggagatagcccgcgataccggttctatgtgctgggcatccagggggacgatcaattttaaaagtatggaaaaaatggcaaacgccgctccatcgcttacttatgagtccgccaatcccaacacatccggatttacaattagtcagttcaacatcctgaatgccgattatgaataccagcgccgccacaattacagaatggccagttatgacatgaccaaaggtgtggtttactcaggtaaccaggaagaccccattaaatttacgagcaatcccgatcctaccgcgctggcgaactacaacaaattcattctcccccgcctcgatatgctggtggaaggaaatgccgcgctaactccggggacgacgctgaaaattgtcgtgcataacacggcaggtgacggagaactcgatgaatctatccctgacaaaatgatagtgatgtccgtgactcatttcgaagaccgcttccgttttgtcagccgtgcacagttaggagtggtgaatgggtag

SEQ ID NO: 381333 - DNA, 786 bp, Salmonella enterica
gtgattctgaataatcaggaatggctactggccatctttaagaaaaaaggtcttactccaaccggtaagctggaatttgccactattgatggcattgattcggcgctcgcacaggctttaaacgaagcgttcgactcacaagttgtcagctttaatgatcgcattaaccagtcgttccgggagttcctgaaacgcacaccaagagatcgcataacgctcggcacttttagtgatgtgaaggagtggttgtcgtcatttgaagccgatcgcgccgggcgcaaagatacagcctctgctggcccggtaaataagctggcaatgccgcttgtgaatctgtctcgttctcccgcgttttcaatttatgaaggtgaactgtgccgggataattacgatgaagggcatgtcaccaatgaaaatgatgagattgaagccctggtatctactatccctttctcactggaatattcgctatggatagccagtgacgagaaggaatctcttgggatggttacaactgcattagcattctggctacgaatgtatgccagcctcgggcaggcatctttcactcacattgccaatgtcggcggttatgagataccggttacctgttacatagaagggcaaaaatcaatcgcatttcaggatctgaccaccggcaccgccgacaacaggctgttcgcggttggattgaacctcaccgttgtggcggaacttcctatcctggcttatatgcagcaaaccaccggcaccataacggtaaaagcgaaaattctggaggaatga

SEQ ID NO: 381334 - DNA, 729 bp, Salmonella enterica
atggcaggtttctttgatgacatgtttgaggacacagaaccatcacaacaagtgactggtgataacctcccggacaccgaatcggatccggatattccaggcgaaggttctgaactgattgaagaggaagatattgatgctgaaatcgaaaccgatggtgttaacgttggtaatattgttgatcctgtggaggacaatcaccttcccaatctggatcacggcctgcttagtgattctggtgtgcgccaccgttatcaaggtcatgcagtttttaataaccttgtgcggatggactggctcaaagcaatcaagctagaccctgactcattcgatgcggttctataccgcgcaataccttacagagacaaaaatacacctgaaacggcatctgaaataatagaaccgaaccaacgcatatatgactatcaggatccagaactgataacggccctcgactgcccggatgagatgtacgccttctacgcgctatacgacggcagtgataatacgggaattagcgacagtgctttaatccttcggttagccgccgttaatgtgccagtgggttctatgctcgaatggctggaacagctgtcagacggcacaaccattcgccgcttctggtacatccataaaatattcaattacggcactgccagggtaggcagtttgttttattgcgtgccttcacgcgcctttgaagggaatttcatcggtgattctgaataa

SEQ ID NO: 381335 - DNA, 1218 bp, Salmonella enterica
atgccaactgaatatgctcgcgacaaccttggtcgctatcagactgatggattaagtgcaaaagactttaacaaggtcttcgatcttatccgtaaacagcagcgtcagaatcggcgaaacgcgcgacgtacactcaccccaaggattatggggatgcgtaaccgcgaacttgaggcattcctcagccttgggaaaaagaaagatggcacctactttacgcccgaagatatacgcagcttcaacacctcaaggcaggctcataaaacaaaattcaagagcacggtacccggcattacctatgctcagttggtggcgcagtccaccagcattgatataaaacgcgctagcaacaaagttactgatggcacagggatcaaagccgcgacattcctcgggctaaaacacaaccttgcattgatatctgttaatgcctcggatgagtcggtccaccagcatcaccgtgtcagaattcgatttgaggaatgggataaagccgttgaggatattgctgaagacggtgcgaaaaaagcccgaatcgctgccgatctctgcaagggccgggtatctttcgactgtgattgtggacgccatcaatactggtatcgttatatggccactgctggtaactatgctgtcgcgccgccaaaagagtatgccttccccaagatccgcaaccctgatctgactggtgtagcctgcaaacatgtgttgcacgctatgacgcgttttcagtctcccacatggcacaaggccatcattattgccctggaaaaagcagctgaacaggtagccttcggcgatgacaagcggaagacaacaacctatttcaaaggcgaactggctaaatcgctcgcgcgcaaccggacaacaacgacggatcaggctaaagctgcgcgtgagtatgagctgtatctgaaatctcaggatgcattaggcaaaaaactacgcgccaaagatagcgccacggacaacgttcgccggttgttaaaaaaagctcgcaccacggcaaacaggaagaatgccgaactaaaagcatcgcgggtgagggaagcccaggctcgcgctgaagccgacgctctcaaaaaagccctgcaaacgcaggcgaacaacctcataaagtttttcatgagtcagggaatggacaaggccgctgccactgcgcaggcgcgaagcattcttgagacacaaattaacgaagcccgtaaacggaaaggataa

SEQ ID NO: 381336 - DNA, 261 bp, Salmonella enterica; identical to SEQ ID NO: 102840

SEQ ID NO: 381337 - DNA, 246 bp, Salmonella enterica
ttggcagaacgtgttgatgatgcagagctgagcatgaatcagttagaagctctcaaagacatggccatcgataacatcagaaagcaggcacaggtcgtgagccaggtatttacagggaagtgtcgttactgcaatgaatcgattgaatcaggcatttattgtgacgctgaatgtgcgcaatggcacagggaagagcaggccgcaaaacagcgtaaatatggcatgcgaccggcaggatttgactga

SEQ ID NO: 381338 - DNA, 579 bp, Salmonella enterica
atgttgcgctttactgaggaagagtttcaggcttttagtgagcgtcgaaataaggggcggcccgggccaaaaaccaaaaaggatccattcttatcgcttgcgccggtaaaagaagtttctccacatgcgaaggcacttgcagcacttgcaaagaacccagacctgcgcgacggaaattgcgagcacttcgagcaggttttcatttttgattacttcgaacgcaagcaccctgacatctatgagctgttgcatgcaacgcctaacggagggaaacgttcaaaagcaaccgccgggaaaatgaaggctgaagggcagaaaaaaggttatccggacatgagtctcgataaagcatgcggtatttatcacggcatgcgaattgagcttaaagaaccaaatggtaaagccccgacgaaagagcagatcgcctggatgcgcaggcttagagaggaaggttactacgtcgttcttgcgtatggtgcagaacaagcgataaccgccatcctggaatacataagccttaaaaagggtgaggctattgagcatgtattgaacggcgacaagtggttgtatgctgcttaa

SEQ ID NO: 381339 - DNA, 156 bp, Salmonella enterica
gtgtcatccaaggctaattatgaatcgctggcatcgatcatgccgcgtaatgaacaggaaacagatgctgtagtggaccctgtaatcgctgaaatgaatgctcgcctggaggctgaatttgcagctgagaatgaacataccacccagggcgactag

SEQ ID NO: 381340 - DNA, 627 bp, Salmonella enterica
atgtttcccaagaataaatttagaggcagtgatcgcgttattatcgtcggcagtggcccaagcgccgcaaactttgttgcgccgcgcggagtgccgattatagcggtcaatggggccatcgactggctgaaccgcgcttcttattttttcacacttgatccatcgccagacaatatgcggcgcgttggtcgtggccgccgtcgccgtggtgtttgttattgcatggcactacccgatgttaaagaacgtgaagtcagagacggcgttctgtgcttccgtcgtgtggctgaacgtggcatggagccaaaaaatacgaattctcccgagtggtgggcgtggcgctggtccgcacatttcggactttgcgaagatgagaatgaaattgccagcggcaatagtgcatatggcgctctgaacctggctttccatatcggattcaaacatgtcgccctggtgggcgttgacgctacacaagaaccacgcgttcactccggcggcacgccaaaaaatctaagtcacctgcctttgttattccagtctgcgcgtgaacggattgacgttgtttcatgcgggaaaatgggaggtattccgcagatgactcttaaagaatggctgaagaatacatga

SEQ ID NO: 381341 - DNA, 678 bp, Salmonella enterica
atgatggcacccacaatttatcaccgtatcgacggtaccaaatacaggaatgtctgggttgttggtgatctgcatggttgctacaccagactgatgtccgaactccatcgtgtggattttgacccggcgcaggatttactgatatcggtcggcgaccttatcgatcgcggtactgaaaatgtcgaatgtctggaactattgcagatgccctggttcagggcagtgatggggaaccatgagcggctgatgattgatgcgttaagtccagatggcaacgtgaataactggctaatgaatggcggacaatggttcttcatgctggacactgatcaggaaatattagcctgggcgctggtggagctggtaaagcatctgccctatatcattgagttgaacaccgggcaagaaactatcgttatagcccatgccgactatccggataatgaataccaattcggtaaggaggtgccgcttttcaacgttgtctgggcgcgcgagcgtatcagtgattcgatggatgatattggtggcgaaatttcgggcgcagatcgttttatctttggtcacactccggtgaaaagcccgaagacattctggaatcagcagtatatcgacactggtgccgtattttgcggaaacctgacattgatgaaagtgaaaggtgatggtgcagcatga

SEQ ID NO: 381342 - DNA, 702 bp, Salmonella enterica
atgaagattgctttagtttttcgctctggtggtgactataacgcttccgatgtgcagtggctggttaatcaactgccaaaaggctatgaaattatttgcctgacagacctgaagcgtttacatgtacctggcgtcaaagttgtcccattgatcaaccagtggcaaaagtgccgtggctggtgggcgaaaatagagttgttccgaccggatataaccgatgatctgttctatctggatttggacacggttattgccggtgatatacgcccaatcctagagcatccaccaaccagcttcaccatgcttagggatttttaccatccacaatatcgtggcagcggtgccctgtggataccaaatagtgtaaaagcgcatatctggagtgcattctggcaagatccggaaggttggattgctcgttgtgttactactgaatgctggggtgatcaggggtttttgcggaaggttatgggtgatgatacaccagcatttcaggatctgtatccgggatggtttgtaagttacaaggccgatgttgtggaacctggttcgaaatatgcgagcgcgcgttactccagggggaatggggcattaccaaaagactgccgaataatctttttccacggcaaaccgcgacctcgcgaagtgtcagaggattggcttccccttatcagctcattttttgagcgggaatcagaataa

SEQ ID NO: 381343 - DNA, 219 bp, Salmonella enterica; identical to SEQ ID NO: 17939

SEQ ID NO: 381344 - DNA, 1263 bp, Salmonella enterica
atgagcacttcagcacaaaaccaatcaatcgaaaatgtatctatccctgatgtcctgaatgccggtatcccggccattatccagaacatccgggccgcgcaacgccgcgttagttgtgatgacctcacagcacgtttttttgataatgcggttcagtcagcggagatgcttcacgcacagcttattgatgtttataacgcagaagctgatagccataactccctggtcgatgcagctgaaaatatgcagttggatctcggtctgaagggtaaagaaattgaagagcttcagctgcaaattgaacatttgaaacgccagcaacaggacgcgatcgacgatgcgacgcatgacgccaaccagcgtgctgataatgccgaacgtataagcattgagctggaaacaaaactcaatgaaatgaccgcgatggttgaactgcggaactcacagatttcaacgctaaaatctcaatataaagagatcatgaaacttgatccttttaaccttgagaaacgctataacaaagctaaaagcgagcgacaggaactgcgtaagcaggtcgccgaccttaaccaacagctcaaaaaaactattaaagatgcaagcgaagcgcgcgtggcatttgctaataaaaaagcagaggttaccgcgctggttaatgagaatgccaaatttgcgacgctcaagaaggaaatgtatggcattactgagcgccgtttccctgcaagcaaacttcacccgacgttagggcaaatctccttcttcccgcgcctcctggcttatgggatctcatcgcctaaagagttcaataacgagcgtccttatatcgtttctaagctggactttgcttatcagttctgctgcgacatgggctatgccattgatatccggatcaacgaatggttgatgccaaacttccagccgttggccattttccgcgagttccagccggaaggttgggtagagttcttccatgaattgatctgtaaagagatggaaagccgccgcccggaactggtccgtcgagttgagtgggcgcaagaggttatgttggcagatgcagagctgccgttcgaaccggaattcattgatgatctggcaactaaagggctgcataccctgtttgatgtggttacccgccgtcatgagcagttggttgtcgaattgagtttagaggaaactgcggcaagaagacttctcgatgtttgctatgcacgtagcgatgcatgggaaaaagagaacggcggcactatttacgttcgctga

SEQ ID NO: 381345 - DNA, 507 bp, Salmonella enterica; identical to SEQ ID NO: 130100

SEQ ID NO: 381346 - DNA, 726 bp, Salmonella enterica
atgaaaggcgaagtgaaagagcgcggcatgattttcaacgatgagatggtccgggccatcctcgaaggaaggaaaacgcagacgcggcggataatgaaaaatcagcctgcggaagttggtccagaagcaccagtgatggttagaaaaattggtgcaggttttcagtggtacggggctgatggtgtaagcagtgttttcaattgcccctttggtatcgtcggcgatcgaatttgggttcgtgaaacatgggcgatattaggcaatgaggatggttgcagtgtggactggaacgacaacctttgtcgtggcgatgagaagagcgcagcaaggatttatcgggccagttgtgagcaaaagcctggtgattacggcttatggtcgatacccgatgatgccgactggaaacctcacactgtgaatgaaaagtttgatggtgggtggcgtccatcaattcacatgccgcgatgggcatcacgcattctgttggaaattaccaacgtgcgcgttgagcggttgaacgatatcagcgaatgcgatgcaggggctgagggcgttccgcctgctggaagtttgcttcctgattacccgggaatattccttactcccaatggggacttcgcaatggcaaaggttgcgttccagcgtctgtgggagtccatctacggcgaagaaagctggagtgctaatccctgggtttgggtaatcgagtttgagcgtattcagtag

SEQ ID NO: 381347 - DNA, 222 bp, Salmonella enterica
atgcaatcagttatttgtgaggaagtcggcctgaataaagcatccccagcagagttaagagcaagtctcgaaatggcgcatagccttgctcaaattggtgtcaggtttgtaccaattccagttgaaacagatgaagaatttcacaggttagcggtatcggcagcacaaaagctggaaatcatggcagcgaaagtagagaaagctgaaggagcgacaaaatga

SEQ ID NO: 381348 - DNA, 216 bp, Salmonella enterica; identical to SEQ ID NO: 130102

SEQ ID NO: 381349 - DNA, 645 bp, Salmonella enterica; identical to SEQ ID NO: 130103

SEQ ID NO: 381350 - DNA, 183 bp, Salmonella enterica
atgacaattgactatcaagaactgcgcgaggcagcggaacaggcaacgcaagatgaatgggtagcatatattttgccgggtcataacggcatttatcctgcgcgcacgtctgagggtaggcattgtgcggatactttattgactggcctggcgtctgtcaggggcgggagagcatcaacatga

SEQ ID NO: 381351 - DNA, 414 bp, Salmonella enterica
atgagcatcagaacctacgcagtgaattgcaatgacgcatggctaaacaccgaaggtgatgacatctccggctcatacgttaagtacaaagaccatcaggaagtggttgccgctcttgaggccaagtgcgcggcgctggcagtggagaatgcggcgcttaaacagtcggagaaggaatttaataacttctgtcgtcaggagtactacggttgggaggacaacttcacggaaaccccagctaccgacgctctcctggctgaagtacgtgcgcagggggtggatatggctcgtaacgcgatgattgattttgttgatggtgaagttgggccaaacaagaacgttccggggctgattagaggcgcagagatatgcgtaagtattgctgaacagcttcgcaaaggaggcaaacagtga

SEQ ID NO: 381352 - DNA, 762 bp, Salmonella enterica
gtgagcaagattgactatcaggcactgcgtgaggcggcagagaaggctacgaaaggtaagtgggctgttgaattcgacgatgagatttactccactgacggcataaaccatgagcaaatagctatggtgttcagtgaaaacgaatctcgtgatgctgaattcatcgccgcagccaatccggctaccgtcttggcgcttctggatgaacgggaaagaaaccagcaatacataaaacgccgcgatcaggagaacgaggatattgcgctaacggtagggaagctgagagttgagcttgaggaagtaaaacaacacgctgaagaattatccgaaaccaaggctgttcgtaaccaatggcggccagatatttgcccaataaccggacgtgcatttttcatgtggattgagcatccaacattgggaaatgtgccgacatatggtggcccattagatagttacaccattccaacaaaggacggtgacggtgagttttcatgtgagcgttacgatcatgattttggcggttgggtagaaagcgaatgtcttgggttatatctgattgatgatagagaacaatgcagggtctacgaactggaggaacgcgttaaggaactggatgctcgggaaatatcgctcccggaacgtagcagcatgcttcatcgaacagattttcacgatgattaccaaacggtaatggcatacaaagtttctgaagtcatcgctgcaatccgcgccgcaggcattcgcatcaaaggaggtgagtaa

SEQ ID NO: 381353 - DNA, 177 bp, Salmonella enterica
atgaaaaaccgtaaggcaaaacgactttttttacagcgacctgtgcgtgtggtggagctggttattagcaaccataagatagcggtactccatccatttggtcaggtggcttttgccgcaaagcgtaagcctactgcgtcacagaacaggcggaagaaagggtacgctgtaagatga

SEQ ID NO: 381354 - DNA, 189 bp, Salmonella enterica; identical to SEQ ID NO: 20409

SEQ ID NO: 381355 - DNA, 516 bp, Salmonella enterica
atggcgttaacacaccgcgaactctgtcagattgcgtataagttccttaagcgcaacgggttcaaggtttgttttcatgaccgctttatagctgtaaccagtaccggagaacagccagatgctatgggattcagaaattcagcatcatgcctgatagaggcgaagtgttctcgtgctgacttgttggcagatagaaaaaagcgttttcgtaaaaatccatctcttggaatgggcgactggcgattctttattagtgagccgggaattatttcagttgaggatttaccacctggctggggattacttcacgttgttaacggaagagtacggaaagtacatgggtggcccaaggataattgctgttggggtaatcctgacgataagccatttactggaaataagcaggttgaatgcgattacatgttatctgcattaaggcgcatggagttgagagggcaccttaatgaaatatatgacggtgtaattgttaataagaaagaaggaaacgcggcatga

SEQ ID NO: 381356 - DNA, 216 bp, Salmonella enterica; identical to SEQ ID NO: 130109

SEQ ID NO: 381357 - DNA, 897 bp, Salmonella enterica; identical to SEQ ID NO: 130112

SEQ ID NO: 381358 - DNA, 261 bp, Salmonella enterica; identical to SEQ ID NO: 130113

SEQ ID NO: 381359 - DNA, 234 bp, Salmonella enterica
atgggaaaaataacttttgtagtcgaatttgaggatggcaaagagccacctgttagcgccaatcttgatgttgctggtggcaggcttgtttcggttctatttggtgactaccgagatgatttcttccaaccagaagaagttgatgtggtgcgagaggcattaaacgagttaagtgttgataacgatgatgctcatgcggaaatcatccaaaaaatggaactgctaactcactaa

SEQ ID NO: 381360 - DNA, 123 bp, Salmonella enterica; identical to SEQ ID NO: 23009

SEQ ID NO: 381361 - DNA, 294 bp, Salmonella enterica
atgtggagaggtaatagtcatggcaaaagccagatgatacttaccgaatatcagtttgaccataaaaccaataaatcacgttcagtatatttgcttcggcacaatagccgcgtaaggaataccgtgctggagcaaaatctgactgttgaaatggataattacgggggcttcaagccaacaatttcgcttgatgattttcctcgtggtttaagcgaaagagaagcaatgctgaaattagcagaatggctacaaagattaagcattgctattgaagataactggtctgaaccttaa

SEQ ID NO: 381362 - DNA, 375 bp, Salmonella enterica
atgatgacactaaaacattttcttgaccgcccattatgggcggcagccgcaggctatgactttaattatatggattgcatgtcttataccgccaatgcatacgaccattccttcagtctgctgtttaattctttaagaatattgccgcaaacagaagttggagagcttcatttatggctattgggctttatcgcggctggagttggtattgctgtatggccttttattttctggctggtggctgttgtagtgtggtttaagtgcaagacataccggagaaagtatttcttaggtgatggaatgaccgatattgccaaaatgaacattgaaaaatggactaaggaatgtgaaaagaaatggcgcaaaaagaaatga

SEQ ID NO: 381363 - DNA, 642 bp, Salmonella enterica
atggcgcaaaaagaaatgacaagaatcactaaagaacgcatatcagagattatcgcccgtatcgaaatgtatggtcacggtgctggatatacggcagatgaagtattggaaatagcccagcagatgctggccttgagacaaaaagagcaacatgaaagtaatacgtgtagattgaattttgagcagtggctggaacagcaacgcgcgaaaatcgatgtggactgcggttgtgtgtccactgaaacattcatgcactggctgcgggtagcttacgaggctggcaactatccggatagttcggtgccagcgccaggaaagggcgtcaccggtgaacgtatccgcattaagccgcatgtttatcgcgaagtggttaaccgtctccacgatacagcgatcaagtgtgcaggcacccagcaattacgagaaagaattagccgtgttttgggcgacgttattacgccagatcatcataaacaagccgagaaaagtgacctggaaaggtgtcaccttgaggcggcattaaacattaagccggggcatacgcttggcattatcgatgctctgttggttcataagatggccagggctttattgccgctggtggctgaaaagcatgaggtggaccatgccaacgaaagctga

SEQ ID NO: 381364 - DNA, 285 bp, Salmonella enterica; identical to SEQ ID NO: 23008

SEQ ID NO: 381365 - DNA, 351 bp, Salmonella enterica; identical to SEQ ID NO: 102866

SEQ ID NO: 381366 - DNA, 252 bp, Salmonella enterica; identical to SEQ ID NO: 102867

SEQ ID NO: 381367 - DNA, 390 bp, Salmonella enterica
atgggcttcccttctcctgcggcggattatgttgaaagccgaatttctcttgatcagcagataattagacatccttcagcgacctacttcatgcgggcagctgatagccatcaccgtgagggaatattgcagggtgctttgctggtggttgattcctcgcttactccggttgatggttctctgcttgtgtgcgctatggagggtgaatatcgcataaagagatacaggaagtatccgcgccagcacctggaggacttaagcaccgggaagaaagaggcgttaccagtagatgacgatgggtacacgggcagtaatgctgtttttggtgtgatcactcatgtcatcaatgatgcccgaagtggggaatttgatgattgtccggttatttaa

SEQ ID NO: 381368 - DNA, 222 bp, Salmonella enterica
atgcaatccattaacttccgtaccgcgcgtggcaacctttctgaagtgctcaacaatgttgaagccggggaagaggttgaaatcacccgcagaggccgtgagccagcagtaattgtcagcaaggctactttcgaagcctacaaaaaagcggcgctggatgctgaatttgcatccctgtttgacaccctggactccaccaacaaggaactggttaaccgataa

SEQ ID NO: 381369 - DNA, 381 bp, Salmonella enterica
atgaggcatatatcaccggaagaacttattgcgcttcatgatgcgaatataagccgctacggcggcctgccgggaatgtctgatccgggtagggcagaggccattatcgggagagttcaggccagagttgcctacgaagagatcaccgaccttttcgaagtctccgccacctacctggtggctacagcgagagggcatatattcaatgatgccaataagcgtaccgcgctaaacagtgcgctgctatttctacgccgtaacggggtgcaggtatttgattcacctgaactggcagaccttactgtaggcgctgcgactggtgaaatcgccgtatcttcagtagcagaaaagctacgtgaactatatggttccaagacttga

SEQ ID NO: 381370 - DNA, 276 bp, Salmonella enterica
atgtcgaaaattaacttaagaaccgaatctgcggtgttcaagaatcctacgtttaacgtacccaaacaaacgcttgatgaacttgtgccgattgatagcaggtttgttattcctgcggaactggtcgagaactgcaaagagaagcaaaagtcgttaaaggaaatatcgccttctgaaatcctctcccgcagtgatgtaagtaaggaggaggttttaagggcgatatctgcatctactgctaccacgctacgtagattgtatggttctgcggagtag

SEQ ID NO: 381371 - DNA, 180 bp, Salmonella enterica
atggcacgcaaatacaacaaattgtcccgtgaagcgttaaagatgcttcttgatggcgtgagtcgccgcaaggtaaagcaatacctggttggtaagcaaattggagtcaggaccgctattgctgtgttatgccgtcaggaaatggttgtgcttaaacagagaatgccgggcagcagataa

SEQ ID NO: 381372 - DNA, 1044 bp, Salmonella enterica
gtgaaagccgtaattactccctttgtacagaaagagcttggcctcgccacgttcaaagtggatcaggaggtcagaaagctggtggaggctggccgtaaatttattatggagccggtgccgcgtgagttaatcgagcacatggaagacggcctcgttgttaccgagcaaaccatggcaacaaatgaggcgttgcagccgttttttaacagcgatgaactgtttcgccgtattggtggaattgacgcgctggtggcgtggttgcgtaggaaagagggtcaatgccaggccgcagatcgtagttggtgtgacaatcatattgtccacgctgaacgagacaatagcgcggtgttgttgtgctggcatcacgataaccattatcggatgcgtggttttaatgagctgaaagaaacgctgcacaataatcgcgttaactggatactggatgtcgcccgtcaggaaatgggcctttcaaatagccatgatttaagtattcaggagctgtgctggtgggctttcatgcgcaacatgatgcacctgatgccggaagaagtctgccgcatatcaataaataagatgaaggctactccgcaggatagcggacctctgaaagaggcggatattcgcccgtatgacgatcgcgctacagcatatgttcagatgatggaagaacgcgccgcgccgatgcgtgcaaaagtatgccctgtggatgttgactccgaccctggcatggcgcatttcaaaataccaaaactgcaatcgctaaaattacctgagtacatggactttgttgcttcccgtccatgctgtgggtgtggagctgcgggagctggcgctcacattacgccttatatcgttcgtcatagtcgattatgcgcgcatgacatttacgcaattcctctgtgccagtcatgccagcgtgatattgagcgtgaccgcgataattgggagaagacgcacggtaggttggcgatgcatcaacgattgttctttgattacgcgcttggagtgggcgttatcacaagtcattcgtcgagtgttagataa

SEQ ID NO: 381373 - DNA, 453 bp, Salmonella enterica; identical to SEQ ID NO: 102873

SEQ ID NO: 381374 - DNA, 1194 bp, Salmonella enterica
gtgacctgggacgatcacaagaagaattttgctcgcctggcgcgagatggtggttacaccatcgcacagtatgccgccgagtttaatcttaaccctaataccgcacgtcgttatctccgtgccttcaaagaagacaccaggactacggacagccgcaagccaaataagccagtcaggaagccactaaaaagcatgatcattgatcactctaatgatcaacatgcaggtgatcacattgcggctgaaatagcggaaaaacaaagagttaatgccgttgtcagtgccgcagtcgagaatgcgaagcgccaaaataagcgcataaatgatcgttcagatgatcatgacgtgatcacccgcgcccaccggaccttacgtgatcgcctggaacgcgacaccctggatgatgatggtgaacgctttgaattcgaagctggcgattacctgatagataacgttgaagcgcggaaggccgcgcgcgctatgttgcgtcggtccggggccgatgttctggaaaccactcttctggaaaagtctctttctcatctccttatgctggagaacgccagggatacgtgtattcgcctggtgcaggaaatgcgcgatcagcaaaaagacgatgatgaaggtactccgcctgaataccgtatcgcgagcatgctaaacagctgttccgcgcagataagcagcctgatcaacaccatttacagcatccggaataactatcgaaaagaaagccgggaggcggaaaagcacgctttatctatggggcaagctggcattgttaagctggcatacgaacgaaagcgtgaaaataactggtcagtgctggaagcggctgaattcatcgaggcgcatggaggaaaagtgccgcccctgatgctggagcaaatcaaagccgatctgcgtgctcctaagaccaataccgatgatgaggaaaaccaaacagcatctggcgctccatcacttgaagatctggataaaatcgcgcgagaacgggccgccagccgccgcgctgatgccgcattgtggattgagcatcgtagagaagaaattgccgatatcgtcgatacaggtggttatggtgatgtcgatgcggaaggcatatcaaacgaagcatggcttgaacaggatctggacgaagacgaggaggaagacgaagaagttacccgcaaactgtacggggatgatgattaa

SEQ ID NO: 381375 - DNA, 852 bp, Salmonella enterica; identical to SEQ ID NO: 130128

SEQ ID NO: 381376 - DNA, 210 bp, Salmonella enterica; identical to SEQ ID NO: 102877

SEQ ID NO: 381377 - DNA, 222 bp, Salmonella enterica
atgggatattcagctgctaaagtgtccactcatattgagcttgagaaaaaccgtggttactggcgggcaaaagggtttgatcgtgatagttgtcaactgtcattatcgcgcggtgaagagaaaatagaacgcacgcgcggtcgctggcgtttctatgacgagaaccataaacaggtaaaggcagagccgatcctgtacactttacttaaaaccattatctga

SEQ ID NO: 381378 - DNA, 1032 bp, Salmonella enterica
atgtccaatttactgaccgtacaccaaaatttgcctgcattaccggtcgatgcaacgagtgatgaggttcgcaagaacctgatggacatgttcagggatcgccaggcgttttctgagcatacctggaaaatgcttctgtccgtttgccggtcgtgggcggcatggtgcaagttgaataaccggaaatggtttcccgcagaacctgaagatgttcgcgattatcttctatatcttcaggcgcgcggtctggcagtaaaaactatccagcaacatttgggccagctaaacatgcttcatcgtcggtccgggctgccacgaccaagtgacagtaatgctgtttcactggtcatgcgacggatccgaaaagaaaacgttgatgccggtgaacgtgcaaaacaggcactggcgttcgaacgcactgatttcgaccaggttcgttcactcatggaaaatagcgatcgctgccaggatatacgtaatctggcatttctggggattgcttataacaccctgttacgtatagccgaaattgccaggatcagggttaaagatatctcacgtactgacggtgggagaatgttaatccatattggcagaacgaaaacgctggttagcaccgcaggtgtagagaaggcacttagcctgggggtaactaaactggttgagcgatggatttctgtctctggtgtagctgatgatccgaataactacctgttttgccgcgtcagaaaaaatggtgttgccgctccatcatccaccagccagctatcaactcgcgccctggaagggatttttgaagcaactcaccgattgatttacggggcaaaagatgactctggtcagcgatacctggcctggtctggacatagtgcccgtgtcggtgccgcgcgagatatggcccgagccggagtttctataccggagatcatgcaagctggtggctggaccaacgtaaatattgtcatgaactacattcgtaacctggatagtgaaacgggggcaatggtgcgcctgctggaagatggcgattag

SEQ ID NO: 381379 - DNA, 279 bp, Salmonella enterica
gtggtgctgtctgtaagctctcaaattcagtcaccatctgtcattgtcaccgtaaagttgagcgataggatgcctgatatcgactcgatatctgttgcgttccccgttaaaagcatgcggagtgctgaacattttgtgatgaatgcaacggaggaggaagcacggcgcgggcttactagagtgatggcggaatttggcgaactcctgggtaaggtaaacaatgccctttcaatcagttcagcaagatccaaagcgttaacagcttccatgatgaaataa

SEQ ID NO: 381380 - DNA, 1059 bp, Salmonella enterica
atgagaacgtcattagtcacccgtgaagagatgattgaggcaattgaacagcacactgcctgtatcagtaccagggatataccgggtgttattgccaactacttcatgatcaccaaacaactttaccggagaaaggacaagaacgcggttcaccgtatcctgctgtctgatattcgcgaatacctgctcgaacaggggcatctgaattacgcaaccgtcgcagccgaaacacgcaaggaggcacacagaatgaaagcaagcaaaccagatgttgtcgttacaaagcctttgacagcaaccacaccagcaacggccatggatgctatccccaacaccggagacacaatcgacagccagacgctgttaaagatggtcaatgaagcgcggaaattatgtagcgaaaaaccagttcgcaataatgattttattgccagagttaaggatgaactggatggtgagtactacgaaattttcgtagtgcaaaaattaaacaacacaacatctgaaactatctccatgacctacaaacaagccctgagagttgccgcgcgcgagtcaaaagcggtccgccgttcgctgatcgacaaactggaggaattgcagcaggctagcactgcttctccagtgattccccaaacactccccgaagctctgcgcctggctgccgagctggctgaacaaaagcaacttctggaacagaaagcccaccagctaaatcagcagctggtggccgccgcccctaaagtcgattttgccgaccgggtatcaggggccaaggggatcctgattggaaattttgcaaaggttgttgggcttaagcaaaacgcgttgtttgcctggttacgggagaacggcatcctgattgcgtccggcggacgtaaaaatgtaccgtttcagcagtacataaacgccggatatttcacagtgaaagaagtggtgctggatgatgaagatggctatcagatacggctgacgcctcaattaacggggaaaggccaacagtggttgacgcgtaaactgctcgatgctggcttgttaaaaccggtggcggctgaatga

SEQ ID NO: 381381 - DNA, 222 bp, Salmonella enterica
atggttaatgccaatccttgcgcacgccctgaattcatctggcgcttctattcttgtcaaaaacgtcactatcacttcgttatcgcaccaacagaagatgaggcacgttctcagcttccggatgctccctgcattttctccgcccgtttttctaccgattcgcgcaattctctcagttactggtgcctccctgttaacgcttctgctcaggagggactatga

SEQ ID NO: 381382 - DNA, 642 bp, Salmonella enterica
atggataagaaaatatgcgttgtttcgatgagcgtcggcaaaccggcgtcaatgactgctgcatggatcaacaacgagctgataatggctgagcgtaccagctaccctgaacgccgccgcgacatggaactccagctgctgcgcgaattgcgagaaaaagaggaaaagggttttatcgtgctggtggaagaggaaaacagctttattactggtcgagttggccagcgtgtaaggttgcgcgatcccttcatgaacggcaggccggtactgattgaagcaatgcagatttacaaggagctggaacgccagaaagcgatcaagttaccgcgcaaagaatccggcaaatacatcctccaccaaagcatcttcgattccgaacatgacaaaaaaggcgatgaatttttcaacatcaactggagcgaaataacgacagagcacgttctgacgttgttatgctgcttcgcaacggaatacaacaacgttgcaagctccgactacatcagggcaatggctggagaaattgatacccgccaagaaccttcgttactaagctcccttgtgaatataattcaagctactcatgaaatgaccgcacggaaagtgcctcaaggttcattaaccggcagagataattatctttaa

SEQ ID NO: 381383 - DNA, 951 bp, Salmonella enterica
atgaatgtttttattgatacaaatctatatttagaattttatcgaatgggtaaggataaactagatgagctagataaagtatttgccttacatcaatatggtcgtttaaaactttggttgccagaacttttagtgaatgagttctggagaaatcgttctaaagttctctctgaaaccataaaggaaattgcaaaagactacaagcccgcgctaccacagattttcagacagcatgaaaaacattcactatttaatgataaggttatagaagctagtcggctaaagaatgaaattattaccgatatacagaacttatttaaagaagagtctttagctgccgatgttgtaattaaaaggatttttgatgcagcgtctaagatagaggctgatgatgaaacaatagaaaaggggaaacgccgattcgatcttggcaaccctccgggtaaaaataaatcatatggtgatgcagtcaattgggagtgtttgctaaaagcgataccaaacggagaggatatatacattataactgaagatggtgattataaaagtgcctttataaaggatgatatgaatgagtatttgaagtacgagtggaaaaagaagaaagattcagaaccacatatctatgcccgcttatcagagtttataggcgagcactttcctcaagccagtaacttagcggaaatggaagttaatttcactatagatgaattacgccgctcaggcagttttgccacaacacatcgagttgtagcaaagttattaaaattcaatcattttacacaagagcaaatcctaaaaataatcgatatctattttaataatgatcaggttggcttcattaaagatgatgatgatgtaaaactactcgccagaagactaatatcacttggtgacgaggataaagatcctgaagggatgcttgagccattccgtgtatttattgattaa

SEQ ID NO: 381384 - DNA, 249 bp, Salmonella enterica
ttgaaaaagcgatactacacagtaaagcatgggacgctacgagcattacaagagtttgctgacaagcataacgttgaggtgcgcagggaagggggaagtaaagctctgcgcatgtaccgtccggacgggaaatggcgtacagtcgtcgatttcaaaacaaacagtgttccccagggcgtccgcgaccgggcattcgaagaatgggagcagatcatcatagataacgcattgcttctgaatgctgattga

SEQ ID NO: 381385 - DNA, 441 bp, Salmonella enterica
atggccacactatctgatacaataaaaccgaataaaacatatcttgaggcggtactccgtacagcgttgttaggaaagacagaagacgaatacgttgatttcttcctgtcagggctacgcgggcgattactgaaaaatccccgcctgtaccgcagctatggtccatactggccggaaattaaaaaattattactggagcgcggttatggtaatttcggtcgtctcgttgaccgtgacgttcgcaaaatttaccgttatgaccgcccggcgctaacactcatagccgcgacgctctacagccaggagcgttttgataatggtcagatatactcagcctggcatttactgccagtgcctgaagaagttgacgaccaggactatgagtttgagtcttacgatttggaagttgaagccttggcacaggctggagagaaaacttga

SEQ ID NO: 381386 - DNA, 6768 bp, Salmonella enterica
atgaacaagctatctatgggggtgtttcgctgttcaagtgtcagcgaaatattgaaatacattagggcaataacatctcaccgagcgccgattagatacggcgtggaaaaggtggaaggcaaaagctatgaccgactacgccgggaggcgaatcagaaggcgatagatttgcttaattcgctggtggacggcgcgacactgacagatgaacagcgccagatcctggctgggtacaccggcgaaggcggcattggcgggtccgtctccgaatattacacaccaaagccgatcgctgaaggtgtctgggagatcatgaagctctacggcgcggacgtaggtaacactctggaaccatcggcgggaaccggcgtttttaatgagacaaaaccggttggtacggtgatgaccgcgactgagatcagcagtgtttccggtcgtataaaccagctgttgcacccggaagacagcgtacagatttctccgttcgaacaactggctgtaagcacgcctaacgattcattcgaccatgttgtgggtaacgttccgttcggtggtcgtgataacacacgcaacatcgataagccttacgcagaagaaacggacatgggttcttacttcatgctccgcatgctggacaagataaagccaggcggattcatgtgcgtgattgtgccgccgtccattgtttcaggttcaaacatgaagcggttacgcctgcgcctatcacggaaagctgaatttcttggtgcccaccgcttgcctaccggtacttttgacgctaacgggaccagtacggtcgtagatgtggtgctgatgcgcaaacatccggcagagatggctgagaaaatccccctggtggatgaaagcactctcgaatcggcaaatgtgctttggtcaacgtttatttctggcaagtggtttgaaaaggatggccgccggtttgttcatggcacccaggaaaagggcttccaggggcgtattgaggttcgtgccgacggtcagattgataaccaggctcttaaagcgaagctgattcatcgtttcgaaagccgtatcgactggtctttgctcgatatggctgaaccgtcaccgaccgcagacgttgttggtgaaggggaaatgcgcctgattaatggcgtatggcaaaaatatgctggtggtcgctggattgaagctgatgcagggaaggaacttaagatcgatgctgccagttatggcgcggatagctgggaggctcttcagcgtaacctgactacaacagaaggccgtctcggcatgacatttacccagatggcaaatgtccgcgataagtacaccacatcaatcagcgacgatatggtgcagctggtggactggattaacagccagcctgaaaaataccgtgaacgcttgtatcgcggggcgatgattggccggatgttaattgaatatcaggacatgaaggccgccgggcatagtgctgaacaaatcgaacagcagcgcctttctctggtatcccgtttgcaggcagagattgaccgttttggtaaccccggtcgcggtccgatagcgaaattatcggggagcggtgcgcgcgcctggtttgctttccgtggtgcaattaagctggatggcactatttctgacgagctgacaggaaaactggttacgcatgattccagcgccagttatgactccaccagctatcaggacaccctgcgttatctctacagtgatctcactcgcgatccaatccagctcgatgatttccgccttgcgtttaccggcgaactgccagccagtgatgacgagttgcttaatttattggccagcacccctggcattgcggtttcaccgtatggcgggattgttccgttcgcccgcgccaccagcggcgacattaacgagatagtggctccaaaacaggaattcctcgccacgctccccgacggtccagtaaagaacaacgtccttaatcagctggcagcgatcgaagagaagcgcatcaagacgccagcagagaatatccgctttaagctcaatagccgttggttcgaccgttccgtcattctggagtttttgcaggaaaacggctatccggatctgcgctatgtgcagtcagtgcagctggaaggcgacgaaatggtttctgacacctatcacggtggtgatggtctgttcgtcgggcaccgatacggtgtcgtccagcgcaaggataaagaaacaggtgagattcgctacgagtgggaccgtaaatcaggtgaaaacgcgaccgggttcccggcacagctggaaaagtatctcaatggtgcgcgtatcggtggcaaagatagcgcgacggcgaacggctaccgcgagcagatggcactgcttgaggaccagttcaataagtggatcaagacgcacgatcgctacgatgagctggttgccaaatacaacgatgtgttcaatagcaatatcccgtatgaacactctggcgatccgcttgggttgaagggattaagcggtaagcgccagccatttgattaccagaatagcgaggtgcgccgactgtccgaagatgggcgcggcatcctgggcttcggcaccgggctgggtaaaaccacgaccgcgctggcgcttgaggcgttcaactatgagaacggtcgctccacccgtactgcgtatgtagtgcctaaatcagtgctggaaaactggcattacgaagcaaaagaattcctgagtgaagaggcattcagtaactacctgttcgtcggtcttgatgtgctgatggatggcgatcagattcgccaggtgcaggtgctcgatgagaacggtaaacctgttcttggtactgatggcactccagttatgcgcgatgctcttaagctggcagatgaagccactatcacggcgcggatgaacgcgatcccgcactcaaattaccgtgcagtcgtgtttaccaaagaacaatacgcccgcattccgctacgtgatgacaccgtagatgagcatgcacaggatatgctttatgacttcgttgccgccggacgcgtagccagcgcaatggactccgactcccaccgcaaagaggccgcgcgtcgccgggtattgtcggagtattcagataccggcaccgaaaaagcagagaagtatccgtactttgaggatatgggcttcgatagtgtgatcgctgacgaaggtcacaactaccgcaatagctataaaaatggtcgcgaagcgtcacaactggcctatctgcccaccagcgcggtggcgcaatcggcgcgagatatggcaattaaaaacgcgtacctgatgaaaaagaatggtgggcgcgggccggttctcctgactgcaacgccagtcgttaacaccccgatcgatgcatacaacatgctttctcatgttctgccgaaggaatactggcagaacatggggatctacggtcctgatgacttcgttaaattcttcggcaagaccaggctggaaacggtacagaaaattagcggtgaagttgaagaaaaaatggcgctggtgggctttgaaaaccttgatgcgctgcgcggtatattccatcgctgggtaacgcttaaaacggcggaagacgttaaggataccgtggagatcccggagctggacgaacaccagcaggatgcaccacttactgaagaacaactggcggcgtatgaagaattgcgtcagcaggcggaagcggcggccaaagccaacaatggcgtaacgacctcggtcaatgaagacggcgtgattgagcacgagaaagcccgtccgatcttctcaataatcagggatatggaccgcgtatgtactgacatggacctgtactatcgccggatcacctatcgtttcctgccggagtacgccgatgcggtgcagcagctggcggacagtttgcctaaacaagccaccagcgaagacgacgacagtgatgattcaatcacgcagcaatcgcaatactccctgatagataagggcgagtttattcagttgcaggttccggaagcgttcgagcaggaagtgaataagcgcctggccaggtttggcattgacgaacagaccgtaactcaccccgttacgcccaaatacgcgaagctgattgccacgctgaaggagtttttcccggaaggtaagcaaatcatcttcaccgatgaaaaaacgcagcaccagaagctcaagcgcattatctgcaatgctcttaaccttgaaccttcaaaggtggggatcctgaatgctcagacggttaccgaggcaggtaaaaccggtcagaaactgaaagctgttaaaccgccgaaagagctaccggatgaaccaacagatgcacagatagcgaaatacaacgagcaaatggctctgtatgacgcctatatcgcgcagcaaaatgaaatgtcgttgggcggtctggaaaagattgcagccgacttccaggagggccggactccgatcatcatctgcaacaaaaaggcagaggtgggtatcaacctgcatcgaggaacgacggatatccaccacctgacgttgccgtggacaccagccagtatcgcacagcgtaacggtcgcggtgcccgagttggttccaaccgtgcaagcgttcgcgttcactactactgcggcaaggggtctttcgatgaataccgactgaagacgctgaagcgtaaagcaggctggatctccgatatcctccgttcagataagtcagaaatggagaacgccgacgccaatgacatgatcgaaatgcagatgtataccgcgaaggatgacggcgaacgtctggcaatgatgcaggttcaaatggataaggcgaaagctgcgaaacgcgctcgccagaaagaacaggctactatcgaccttcagaactacatcaaggcgcagcacgcagctggtgaggatgtggaggtacttaccgctgaattggagcgaagcaaagcggaacttgaaaagaccaccgccgacgtcgccaaattcaaacaggcggtaatggccaaagcagctgataacgcagactggaaagcccgctggggtagcgtccatcacacagaccgtatgttgttagcacagtatcgcgcgtcgttgaaaagcgccattcagcgcaaggctaatatctctcaggccatctcccgctatgagaaattattgaaccgtactcagaaggccgcgacggatatcaaacgcctgcgcccgctggtggaggatgcaataaataaaggcattctggctgttgatcctgatctggttaaccatgcgaatgagttccttgttatcggcgatcgctcatggcgtgtaggccaatactacgattgtgccggtgatatcgttcgcattaagtcgctggacttcgacagccagcgcgcagacgtggagatcatctttactttcaaaggcaccaaatcgggtaactgggatgtgaagacgctggataaacaggttgatgtaactcccgatgaagatgctgttatgcagaaaatcagtggtggcgtctccatcgccgggattaacgacatcatttcctgtgacgatttctaccgtttccagcagcgcggcatgatcaaaatcactgactcatacggcgttcagactacagagtcaggctatagcattgattttgttggttcctatacggccccactgaagcatgcggtttacccggatcgccgtgacggcgcgctgaagtcgtcaattgcaaaatgggtgcttggtatgatgtcggaagggaataaccgccagatccgttcggcagaaacattcctggttgaattgtttggctccaattatggcgatgtaatcgcgtcatacggagatacgctatcccctgaagcaattcaggagaaaatagcggatgcgatcgccagaatgccggaaaaaacaagccagggggctactcgtaacggggattctgaacttgaagtcaccaatgccattttcggtaccaatgagttccgggcgtcagattatgagatcaccacagcacagtttggcaccattggcatttacagcaataaagccgagatcaagcaggcaatggacgcagcaagcgcgcgcatcgcagcagaacgggaagccaatctgaatcatgcagtcgccgcgctgactcaatcgtgggtaacagcaatcagggaggccgccaccacagggaaaatcacacctgcaatagcggatgtcgtaaacgacggctctaaatttatggatgcctatcaaatggatgcggtgaagttgccatcagcctatggtcaactcagctatcgcatgacctacaacctggtatcaatgttttccgaccttgccatccttgggctggtggatcttaacgaggttacgccggaattgctcagcatgcgcaagaatcatgtggagatattgcagagaattaacacggttcttgccgggcgcaccgatgaagagaaacaggccgacgctgatcggataaacctagcccttggcaacatcacggaggaagagattgccgccagaaacgagaaacaagaagagttatcatcaatacagggtgatgccaccagcatagctcagtctcttggtctgaattatcgcgtatccaccgccgacctgaagatgatgtacgcaccaaaattcgccgctggcgaggtatttgggcttcaggaagcctcaggcatgaaaggcgttcttttccgtgcgaaagacgcaatcaaggcgaaattcggcgctcgctggctgccagcgaaggcgaagaacagcgatttcccgggtaactggtggattatcgagacaaaacacaacgtggcggacgttctggccgtcatccaacaatacgcataa

SEQ ID NO: 381387 - DNA, 1710 bp, Salmonella enterica
ttggcagacaataaaatcacgctatcctcggtcaggaaggcgctggcgggggtttttaaagacaacggagaacgggacaacatcctcctgtccgcgctggctgtgcacggcggaagtgggtatttgttttctcgcgcaggggcaccggtacaactgtccggcttcttaggcggcaaaccgggcgatagtggcatggctggcgatgggctggtggacggaagtcgctttatctttgatgaagttcaactgccggaagaccgcttgcaacgctatccgctactcgaagagatggcggtttacagcacgatcgccaccgcgctgaacatccatattacgcacgcgctctctttcgataagaagaccgggcaaactttctctatcgtgccggtacatcacggaaacgatagtgactatgacgccgcgcaggcgttgtgtgacgagctgatgaacgacatcgggcgaaccatcaacaaagaggtcgccgggtgggcatttatcatgtctgtatttggggtggcttatgtcaggccatacgccaaagaaggcatagggatcacgtcttttgagtgctcctattacacccttccgggcttcatcaaagagttcgaggtcagcggcaacctggcgggatttagcggcgattatctgaaggacgcgtcagggaaaatggtttttgccgatccgtgggccattatccctatgaaaatcccctactggcggcctaagtcaaaccttatgcctgtgcacactggccataaggcttacagcctgctggataatccggaagagcgcacaccgattgaaacccagaattacgggaccagcttgctcgaatacgcctacgagccgtacatgaatctgcgttcggcgatccgctcactgaaggcaacgcgttttaacgcgtcgaaaattgaccgaatcatcggcctggcgatgaatagtctggatccggtaaaagcagccgattattcacgcaccattactcagacgcttaaacgagcagctgacctgatggaaaagcgcgcacgcggcgcgaataacatgcctacggtgaccaatactctgctgcctattatgggcgacggcaagggacagatgactattgatactcagaccatcctggctgacatcaacggcattgaagacattctcacctatatgcgccagctggcggcagcacttggcctcgattacaccctcctggggtgggcagatcaaatgtccggcgggcttggtgaaggtggattcctgcgcacggcaattcaggccgccatgcgcgcctcatggatccagcagggcgtagaagagttcattcagcgggctatcgatattcatcttgctttcaagtacggcaaggtatacccggaaggtgatcgcccgtacaaaatcgaattccactccgttaataccgctctgcaacaagagcacaacgacaaccgcgactcgcaggcgaactacgccaccatcgttacgcaaatcctcgatgccgtcagcaataacagcgtcctcgccaattccgatgcattcaaacgttacctgttcagcgatgtgctggagattgacgaaaaaatctctgaagcactggtgaacgaactgaaagcgaaaagcgaggacgacgatcacctgatggattccatcatcaaaacaccgccacaggaactggcgcaaatccttgaatcggtctttaaagagggaaacgataatgactga

SEQ ID NO: 381388 - DNA, 1020 bp, Salmonella enterica
atgactgatgttttgaaaacggtcactgaccgcttttgtctctatagcaatgctcgaaaaggtcgccagaacgggcgacagtatgtattaagcgcggtaaagaccatgcttgaaagcaaggaaactcaggaaggtttacgccttggtgagcttttcggctattacggtcacggtcgccgacagctgaccggcaaactggaagtaccagaaaccagcgtgatcatggtggaaggtcgcccggtcgtaatcgacaatgttccagcgtgtcgcacagtggctatatctgttgacgacaacggcatcgttacccatacacaggaaattcttaacacagagccgggtaaaattgtcgccgcgatgatcgaaagccgagctggtggctggagctgggccactggcgggcgcgagtccgggaaaatcgctgtaaccaccagcttccatggtgtggattatgtgacaacgccgaactatatcagtctggatcatcctgccagcgccggaatgtttgaaagcgcggattctaaatctctactggcagagtccctggcggcgcatgggtactccgacgagtcagtgcaggcagttatatcccattacggcaaaatggctgaactggaaatgatggtggaggcgacagagcgtacggcagaactggaaaccgcactactcgaaagccagggccgccacctcgaagcaatggccaagatcgcagatgctgaagcgcgaatcgctttgctggaggaaacagcgggtatccgcgacgatgtgctggcagcaatgcaagacgaactggataacctcccgattttcgtctccgccgcccaaaaagacgcattccgcctcaaagaacctggtgatgcaaaaatcgtagccacgcttttcgaatctctgatcaaggttggcgcgcgcaacttgcctgtcaccaagaaaattaaggaggttccgcaagcggctaacgtccaggcaccgcgtgagacaagcatcatcacgtttaataattcaatcaatccgtttaaataa

SEQ ID NO: 381389 - DNA, 558 bp, Salmonella enterica
atgaagggaaaaacagccgcaggaggcggtgcaatttgcgctatcgcggtgatgattaccatcgtgatgggtaatggcaatgtgcgaaccaaccaggcggggcttgagcttatcggaaacgctgaaggttgccgacgtgacccatacatgtgcccggcgggtgtatggactgacgggattggtaatacacacggggtaacgccaggcgtgcgaaaaaccgaccagcaaatcgccgctgattgggaaaagaatatcctgatcgctgaacgctgtattaatcagcacttccggggcaaagacatgcccgataatgccttcagtgcaatgacaagcgcggcattcaatatgggatgcaatagtttacggacctactacagcaaagcgcgaggcatgcgagtagaaacgtccatccacaagtgggcgcagaaaggggaatgggtgaatatgtgtaaccatctccctgatttcgtgaacagtaacggcgtgccactgcgaggcttaaagattcgccgtgaaaaagaacgtcagctttgcctgacgggactggtcaatgaataa

SEQ ID NO: 381390 - DNA, 489 bp, Salmonella enterica
gtggcacaacgcggtgtaaacaaagtcatcctgattggtaccctggggcaagacccggagatcaggtatataccaaatggcggagcggtcggaagactcagcatcgcaacgaatgaatcatggcgcgacaagcaaacgggccaacagaaagagcaaacagaatggcataaagtcgttttgttcggaaaatttgctgaaattgcgagtgagtatttacgaaaaggttctcaggtctacatcgaagggaaacttaaaacccgtaagtggacagatgacgccggtgtagaacgttacacgacggaaattatcgtcagccagggcggcaccatgcaaatgatcggcgctcgccgtgacgattcacagtcctcaaatggctgggggcaatcaaaccaacctcaaaaccaccagcaatacagtggtggcggtaaacctcagagcaacgccaataacgaacctccaatggactttgacgacgatattccgttttga

SEQ ID NO: 381391 - DNA, 789 bp, Salmonella enterica
atgacagcacaaaaaactaaaaccattcaataccgcttacgtaatggccagagtgtcgaagtgaccatcaataatgatggagtacctggcgaaaaagtttctatctctgatctggctatcgaaaaaaccatcatgtgccaccttggctttactgaagaagtgagcaaaaagcatggtgtagcaatctggagcgcaatggatactggtatgcgcaaattcattactgctcgtaccccagggatgaccatgatggacctcatgcagattgcgccgctgtttgaatgtgagcctttagatgtattcagcaatccagctatctgccagcagttatatggtgagatgaaactcgcggttacccccattgtgctgcatgaaggatcgcttgctggcgtgtggaaagtagagcgtatttcaagctacatgcctttccatgtcaacggcgtaatcactggtgaaaatcaacctgtttccgttataaagtcagacctcaagcgcgcaattcttgaagcaagttgtcgagttgtcgggctgggcaaacagtcttatgtttccttcccggctggccctgaaggcccggcagaaattctgattatggatgccgatctgctctggcaaatacagtttctgattggcaaaagcatcatccgcgctgaagaactcgatcagtacattacctgcacgatgacggatgaagtcaaaagtgtggctatagccaatgcccggaacctatgtcgtgctgcattaacagaactgcaagaaaacaccacggaagaagtggaaagcgattaa

SEQ ID NO: 381392 - DNA, 309 bp, Salmonella enterica; identical to SEQ ID NO: 17954

SEQ ID NO: 381393 - DNA, 2988 bp, Salmonella enterica
atgagcttaagcgatcaggtggtaatggccaccagcatagaaacgctgatcgagctgctaaagaacctgcccgattatgggcgggtttcgtatgtggtgacagcgaagggagacgaggtaaaaacagcgtttgatatcgtcgatgcctcagctcttttggtatccaatactctggatgggaaaattaatcctgactatccccaggaacttcagccgcgcgaccggacccgcgcatccagccttcttcaggttaaccagatatccaaaaatttgcggcctgctcagcttactgattccggtttatccagccatggtgcgccgataattggtgaggacaatgccgttgagtcaggtaatggacggaccatggggatcatcaaagcctatcaggacggcaatgcggatcggtatcgtgagtacctgattgatcatgcgaccgaattcggcatacgacctgaaaaggttgaatcaatgacggctccggtactggtgcgccgccggttaaccaaggttgaccgcgttcagtttgccaaggactcaaatatttctgatcttcaggaaatggcagccagtgaaaaggcttttgttgatgccgacagcataacaccggcgatgatggcgctttttaacccgtcagaaagcggagatctgcttagccgcagtaatgacgcgtttattcgcggatttatgacgcaagttggtgccacacaggcggctggccttgtaacggaagatgggcgaccaacgcggcaacttgttgaccgtatacaaaacgcgatctttgccaaggcatataaggatgcgcgcctggtaaggatggttgcagaagaacctgatccggatatgcgtaatgttctgacggcgcttaatgcggcagccaatgattttgtccagatgcaggctttatcaggagaagcgcacaagcaggctgtgacaactattgttgatggcattgagacagcggatagcctcgataaaaaggcgctggcggcattgaaagatgcggtagacctggtaaggcaatcgaaggagtcaggccagcatattaccgatgttattgctcagggggatatgttcagcgaaacggccccggaagtgaaagcactcgcgttgttcatcgtcgcgaataaccgtagcgcgaagcgtatggccaccgcctttaagttgatggctcaacgtatcaatgatgagttacagcaccagggccaggcgctgggggatatgtttggcggtggtgatgtgtcgttacaggatatccttcgccaggtgtctcaggaactggaaaacgaaggcatgcaagggatatccggcggtcttttcgagtccgtttccggcggtagttacaacggtgttgctccgtataccagtttgctattacatcgggcatccggcatcaaagacattattcatctgatcaggctgctttcccgcacagatccccaggatgaacagcttgtacaagtgcttgcgcattttgttcgaatgcctgttgccgacgtgaataaatggtgccgattattcggtatcagcaattcgttacttcgcggcttgttaaatcacgcatcctcccttgggcgcgatggctttgacgagatagcgcaggcgataaaaaacggagatatgccaccagctattgactggttttccattcgcccaaccagggtgaaagcattccttagcgcggcgcattcggcatcaccattggcagaaatggttcagaggttgtcgctcatattcacagaccataccgcgttgggtgatctgactctggacgagatgaaagaagcctccattcagtgggccgatcaacaaaatgaggttaactctgacttcttgccagcattcaggaaggccgttagtaaagctgatgatgcctgtggaattctgagggcatttaaggcattgcaaagtcaggttaataaacatgtcggtgatatcgatggggtaacggcggaaggcagggatatccttaaagagcacggcataacgccagagtttattgatgagatcaggactgatatgcagcgtgaggtcgtatcgtccctgcaaatcgtagccagagcgttggcggatgctaatccgaagagtgcggccattgttaaccgtgttattggtgatattgaagcatcggagggcatgggggcgctgaaactcttcctttcgcgagcgtttaatcctaacggcaatattctccccggcattattggtgaggctaaaaagtatgtcagcgaagaagaacttgagcatcttgaccaactacttaagcgattctcatataacccgcagacacgctggcaaatgaatcagcaaagtatgggttcggtccacgagaaagtgttatctgccatgaacagtgcgatcgccaactcatccgtatctgaagaaaaagctcttgagtgggccgactcttttatcacggaagaagtggaagaagcccgcgctggacagaatggtgggatagacctgcgcaaggaacttgctgatatttatcgcctgaccggcggtaaaatttcgaccttatcaaaggtggttcaccaccagggaagggcatatgcaaatattaatggtgttgttgctgtcaatttgaacgatgaaaatgcaagtgcactgtggcacgagctgggtcatcatcttgagtacagtaaccctggtttgttagagaaagcccggtcattcctgaaggccaatgttgaaggggataagccatctttcgttaatatcggtgggcgtggcaagcctgaatggtgcttcagatctcgattgagtaatatttatatggcgaaggtatacccgccagcctcagtaagtaacaccgggaaaattcggcagaaatcaccgactatttccaaaacgtcagcaacggaagtattctctatggctcttcagttgtatcatgacaaagaggccgctgccgcatcactgatgaatggtgacggattgctggaactgttattaggtgtggcaaaggagctaaataatgcagattaa

SEQ ID NO: 381394 - DNA, 366 bp, Salmonella enterica; identical to SEQ ID NO: 130147

SEQ ID NO: 381395 - DNA, 1920 bp, Salmonella enterica
atggaacagttcaatatcaataaaggggtgacgatcaagcctgggcttgacgtgcttcccccgccagtgactgatgatgaatatcgcgcattaatggccggtgaggaccgctatctgatgacggaatccaacaccctggaggaaatcgaggctacgttcttctatgacacgccgatccactggtgtgctacggatttactggaggcgattagttctactcgtttgcagttacaccggaccatgcaggcatttgtccgggcattgaaccagaagctgaatggtaccggaatctctgcggggagtgataaaacgggggatgtggcccagagcggcgcgcgcgcgatcggcggtgctgaaattggccgggcacgtaacgttaacgggctgccggtcctgccagccattattccgctcagtgatggtcagactatcagcattctgtttcatagcccgacagcggaaaaccggatcaccaatagcgatacgctggttgctttccagttcttactgaataaaaaagacgttactcacaccgttgctccgatgagtggacgtgatatgacgctggcgcaggtcaccatgaaacttgccaaccttgcagagaaaaactcggcaaaatttcagcgtgcgcagaagaagaaaaaagcccttgttgatgaaataacccaactacaggctgatagtgaccagaaagaggatgccatgagcgacctcgtggatcaggtggcagcggtagaagggcagaaggtagatctggagcagaaaattaacgctgttgcatcggaagcggattctctttatgaagagaatgagcgtttgcagacggagattgatcagctcaatcgcactggtgggcgcgataccattgctcctgcggggacgactggtggacactctcgcgcgatgacggatcgccttgccagtatcaaaaatcgtatgcatatgaacggggaagtgacgctcagtaatggtgcatcaatgaagcaattcattgaggacggcgaagggtatatccagttaaccgattcggatggcagcgtgtacatgatcaaggctaaatccatacagggtgtggacatggcagatgcgatcggcaagctgtttaaagcctataaagcgggtaatgtatcggaatacctggtccaaccagaagaacataaaccggaaaacgtcgaacctgaaccagcggaggataccggtagctcttcgcctgaaccagaagtctctgtaggtgaatatcgatatgccctgcaaatgcgtccggcggcccctggcgcaatacctgaaggtaacaaagcaattctgccgcgccctgatgaaggtgacccgtattatgaatatgcacgctacggcattgctacttacgataccccgctttctgatcagcaaatgagtgagtacgacctgaagttattgcctcgcgaggattctttcgacttcctggcgaagacacttactaatggtccgtttggcaaatatgcacaaaaagctctggagctggccaccagctcaccagacgagttccgcgtaatgctgaaaactcagtttcaaaaaactttccccaatattgcgtttccggggggcgctggcaccgagaaaatggtgcagagcatgatcaatgcattgcaggccgaagtcggtgagattactcagccagaacctgccccggcacagcctgatgaaacggttagcgaagcagatgcagaggctaataaagccattgaatatctcaataacgtgatggatatgcaaagcactgacatggcggagatccgtaacgcccggggtaatgtccgggaagcgattgcagcccttcaggatgccgggcgttttgaggaaaacgaagagctggttaatggcgctgctcgccacctggctgatctgctggtagcaatccagaaagcgggggtagcggcatga

SEQ ID NO: 381396 - DNA, 603 bp, Salmonella enterica; identical to SEQ ID NO: 244484

SEQ ID NO: 381397 - DNA, 444 bp, Salmonella enterica
atgattggctggggtgtatgcgctcttgcgttagccttagccgatcgctatttgctaaaacgcaaggacatcacgcatttagaacttggtgatgtggaaattaaaccgggtttcatccgggtgccgttcaaataccggtctaaattcccgtttttgcgcggcgcaacggtcagatattggatccgcgatgttcagaagccaacgacagtgattgaaggcgaacaacgttgtttgacgtcggctgaacagggcgaaaacagtgaatggttgtacatacccactgaatatatgggtaaaggagaacggctgtggcatttcaacgtcatggttacgcatggcgactcgttcattaacccgttgtatcggattttccctgttactcagcaaatccgcagaagttacgtaataaatctcgcacaggatgtgtcagatgacgaaaaataa

SEQ ID NO: 381398 - DNA, 330 bp, Salmonella enterica
gtgcttgacacacaggaattagctccagttgctattgcgctcctgctttcagtaattggtgggataggcacgttcctgatggatgtccgagacggtcgccagtctggcaatttgttgggattggttacggagatctttgttgcagtgacagctggcgcggtggcgtacctattggggcaacacgagggctgggagttatcaattacgtacttaatggtaacgatagccagcaataacggtcatgaggtgatttcagggatgaaacgagtgaatatcgatagcattctgaatgttcttacaagtttggtgaaaaagggaggtgggaaatga

SEQ ID NO: 381399 - DNA, 264 bp, Salmonella enterica
atgacattttatgtacatatcgtgatgttatcccttcttggtggggtgtattcgtatttgagtgggctatgtgaaaaccgttacgagtcctcatgcaagaaattgctggccgaatgtatttccgccgtacttgctggctttattggcatgtatctcgcggaatataaggacatgaatgaaagccttcagagctgcatggttcttattttcagcgccaatagcaggcttattattgaaggttccaaaagtcggttgaataggtaa

SEQ ID NO: 381400 - DNA, 573 bp, Salmonella enterica
atgcaaattggctacattcgtgtgtcaacaaatgaccaaaacacagatttacaaagaaatgcactgaactgcgcaggatgtgaactgatttttgaagataaaataagcggaacaaagtcagccagaccaggcttgaaaaagctgctcagaacgttatcagaaggagatacgctggttgtctggaagctggataggcttggcagaagtatgaaacaccttatcacgcttatagaggagttgcgggaaaaaggtgttaatttccgtagtctgacagacagtattgacacatcaacacccatggggcgtttcttttttcatgtcatgggtgctttagcagaaatggaacgtgaattaattgttgagagaacactggccggactggcagctgcacgcgaacagggacgcattggcggacgtcgcccgaagttgacaaaagaacaacatgagcaaatagcgaggttgatcgaaaatggctacagcaggaaacagttggcaattatttacgatatcggtgtatcgacgatttatcgttatcatcctgtagagaagcgccaaactcaatctgagctgtaa

SEQ ID NO: 381401 - DNA, 753 bp, Salmonella enterica
ttgaattatcaacttgaaaaaacaatcactgaagctgaggaaaggataattctcattagcccataccttaagcttagtaatcgcattaaagagctgatcgaagataaaaatagactaaaagttgacatcagaatagtttatgggaaatcagaactaaactctaaagaatatgaatggttaacaaacctgccttttgtacgccttagtttttgtaaaaacctccatgcaaaattatatgccaatgaaaatcaatgtattgtgtgcagtctaaacctttatgattttagtcagattaataaccatgaaattggagtgttaattattaaggagcaggagaaggatgcatacacttcatcgttaaatgaagctcagcgactgatcagaatcagcacagataacattcagccactaacaacagataaagaaacaacaggttcaaaagaaagtgaaaaaactaataaagagtcatccgacttcacttcagcctttcatgaagaaccattaagaaatcaaaatggattgattactgatttaaatacaaattcaaaactcacttcgacaaatctagcaaaaaatcataaaactgatttgttatctctatataaaaaattaatcgaagctggatatctcatggacgtagaaggaaaatacatattgactgatgctggcatagcggcaggggcagaagccaagccaaatcgatataaaaaaggagaaaactattttctgtggcctgataacctagcattatga

SEQ ID NO: 381402 - DNA, 1047 bp, Salmonella enterica
atgataacgttttctatggatgaaagtggctatacgggttatgacttactccacaaagagcaaaaattccaaggcgcgtcatcaatattaataaaccatgatgacgccagtcgtctgataaaagaatatttccccaaacttcaagccgatgaattgaagtacagctcgctgaaaagaagagattccaaccgcaagccattatttgaattgcaaaagcatctcttatctaattacccatgtataacatgcgtaggtgataaacgctttttactaattcttatgttcatcgattatgctgttgaaccattctattatgattctgggattaatctttatgaagatggcggtaacttctcaatggcatcaatggtgtattacgttggaccagcgtattatggctctgcctttgatgatgttctgcttcagtttcaaaatgctatgaaagaaaaaacattagattcagtgagtttgctaataagcaaaataaggaggcttgattggcaaaggttaaaagagttttttggtcctttggcatttaaccacccagattgtattgatgccatcatgactgatggaattagcactgatgcctcatttactattttaaatgcattaatttctcgcacggaaatgatgtcctctggagagtatgcaattgagcatgatcgttctaaaaatctgctaacttacaatgaacgccttaactttttgatcaattgtgataaggaaggagagtttaaacattccgagatagcaactatctcattccctctaaaccttaaaaaagtctatcaaattgattcgaaagaaagcccaagcgtgcaattgtgtgatgttcttataggtgcatgtattgaatcagtttatcaattaatggactctaaggtgctcaatcaaaattccgttctttcactttaccaagatagccagttaatacatttcatacctgatatagattttgaaggacagaaaaaatttaggaaaggcagtcaaagtgaggagtatcttacgtttattcaaaatgaaatctactctagtaaactttaa

SEQ ID NO: 381403 - DNA, 1407 bp, Salmonella enterica
atgacggctctcgcagcggagtttttcactttggatgaagttaaccgactcaagattattccggacgtcatcgaccggcgtctgacaacacagatggcagcgcagcggcttggtatctccgaccgccagtgccgtcgtctgcttgcgcgttatcgtgaagatggtccgcttggcatgaccagccgccgtcgtggtaaatccagcaataatcagctgcctcagggactggccgcatacgcgctgaatattattcgcgaacgctataacgatttcggtccgactctggcctgtgaaaaactggctgaggttcacggcgttcatatttccaaagaaacggttcgtaagttgatgactcaggccagtctttgggttccacgtaagcaacgtgcgccaaaaatccagcagccgcgttaccgacgtgcctgtgccggtgaactcatacaaattgacggctgcgaccatcactggtttgaaaaccggggacccaagtgtacagcactggtttacgttgatgacgccaccagtcgtctgatgcagcttcgtttcgtaaaatctgaatcgactttcacctattttgaagcgacacggggctatattgaaatgcatggtaagccactggcgctctatagcgacaaagccagtgtcttcaggatcaacaataaaaatgccactggcggcgaaggcgaaacgcagtttggacgtgcgatgcacgaactgaacattcaaaccatctgtgcagaaaccagcgcagcaaaaggtcgtgttgagcgggcgcatctaacccttcaggacagactggtcaaggaactcaggcttcagggcatcagcacaatggaatctgctaacgcatttgccgaagagttcatgaacgattacaaccgacgtttttcaaaagcgcctcgccaggagttcgatgttcatcgggaactggatgtcgatgatgatcttgatatggtgtttacttggcgtgaagcccgccgcgtgtcgaaatcactcactgtgcagtacgacaaagtgctttacctcattgaagacaatgagttcaatcgtcgggcgattggtaaatacattgatgtctggcattaccctgacggacataaagagctccggcttaatggcgtatcacttccctactccacctatgacaaactgtctgaaatcgatcagggtgccattgtggacaataaacgtcttggccgtgcgctggagatggcgcaacttgtgcaggccgaacgggataataaccggtcacaatcagtgccatccggtgacggcccttcacgcaggcgcaaagcccctacgacgaagaaatcccagcgttctttggaccaggacgatatgttcaatgcacttgtaaaacttcagacacgagctgaggagatttttggtgaacgcaaccaaaaatga

SEQ ID NO: 381404 - DNA, 927 bp, Salmonella enterica
atggaacttcgccagttacgttattttgtccgtattgtggaaaccggcagtatgggcatcgcggcgcttgatctcgacatcggtgtctcagcgctcagtcaacagatgacaaggctggaaaatgaactcgccattcgtctgttgcaacgaacctcgcgtggtgtaacgccaactaactcgggtctggccttttactcacaggcacagctggcgttgcgtcatgctgatgatgccgttcttgctgcgcgcgatgcgcgtctgtccggacacgtcagcgtcggtatggcccccagtacagcctccgtcctgggtgtgccgtttattcatgccatgcgggcacattacgccgacgttcgcctgcatgtggtggaaagcctgtcaggtaatctggaacggatgatcaacacccgtcagattgatctggccgttgtttttcggaaagaaaagcacctgcgctggagcgccaggccagttctcgaagagcagctttttctgattggcacacatgatctgctgacggatattccggatgacagcataacccctgctcaactggcgaatattcccctgatcatgccaagctcaggccacggcttgcgcggcctactggaggctattagtcaggaacacgggctgaaggttgatatcgccacggaaattgacggcctggcgttactgatgcgcgccgttggcagcggactcggcgccacattacaacccggagcagccatttcgcatcttgagagtgaatcattaagagtgatcggcatccataatcccatactcagtcgccccaattttctggtcagcctatcggacgatgaactcccacccgccgctcttgcagcccgcgtgatacttacaaaagtcatgcgtaaacttgttgaaatcggccattggccgggcgcaaccatttacgctccctaa

SEQ ID NO: 381405 - DNA, 1404 bp, Salmonella enterica
atggttgatgtactggtgattggcggtggtaatgccgcgctatgcgccgccttaaccgcccgtgaggcaggagcttccgtgctgctgttagaggctgcgccccgggaatggcgcggcgggaattcccaacacacgcgcaatttacgctgtatgcacgatgcaccacaggatgtgctggtcgagagttatcccgaagaggaattctggcaggatctctggcgtgtcaccgaaggcaataccaatgaagcgttggcgcgcttggtgattcgaacctcttcccagtgtcgtgactggatgcgtaagcatggggttaattttcagcctccgctctctggcgcgctgcacgtggcgcgtaccaatgcattcttcatgggcggcggtaaagccctcgtgaacgcctattaccgcagcgcagaaaagctgggggtacagattcgctacaacacgccggtacaggcacttgaattgcacaacggcgaattcatcgcagccctggcaggccacgagcgcattgaggcgaaagcctgcgtactcgccgccggtggatttgaatccaaccgcgaatggctgcgcgacgcctggggagagaacgctcgtggcgaatggccagccgataacttcctcattcgcggcacccgctttaatcagggcgtcttgctcaagtttatgatcgatgccggtgctgacattatcggcgatccgtctcagtcccactgtgtggcgattgatgcccgggctccgttgtacgacggcggcatttgtacccgcgtggattgcgtctcacttggtgtggtagtcaaccgggacgcggagcgcttttacgatgaaggcgaagatttctggccgaaacgctatgccatctgggggcgtctggttgcccaacagccggggcagattggctactccattatcgacagcaaagcgatcggtcactttatgccgccggttttccccggcgcacaggccaatacgctgagtgaactggcccgccagttggggctggatcccgaacgctttacccataccgtggagcactacaatcaggcctgtcagccgggtcagtttgatcacacgaagctggataactgcgcgacgcagggcctgacgccaccgaaaacgcactgggcgcggcctattaatacgcccccttactacggttatgccctgcgaccggggatcacctttacctacctgggactgaaagtgaatgaacacgctgcggttcacttcgcaggcacccccagccgtaacctgttcgttgccggtgagatgatggctggcaacgtactgggcaagggctataccgccggtgtcggcatgtccatcggcaccacgtttggtcgcatcgcaggtaaagaagccgcgcaggcagcacgtaaggaggcgcatcatgaagcagcttga

SEQ ID NO: 381406 - DNA, 1140 bp, Salmonella enterica
atgaagcagcttgaaaaactgatcatcgaggccaaaattctcaccgagccagaagctgaagtcgagcgggtgatgcaggtgtgtaatgcctgtcgctattgcgaagggttttgcgccgtgttcccggcgatgactcagcgactggaatttggcaaagccgacattaactatctggcaaacctgtgccataactgcggcgcctgcctgcacgcctgccagtatgctccaccccatgagtttgcgatcaacgtgccgaaagcaatggcggaagtgcgtctggaaacgtatcaacactacgcgcaaccggcggccttcagggcgctgtatcgccaggctggcgtcacagtgacgctggcactggtctttagtctgatcctctttttactcctcgcgatggggatgaagggatcgctactccatccgccgctggccggtgatttctaccaaatcttcccgcacaacctgctggcatggatgtttggatcggttttcatgctggcgatcggtttactaatggcaggagtgatccgcttctggcgcgagatctctcccgtcgggccgcgtccggcggaaattgccgaagcgtcgcacaacgcgctgacgctgaaatacctcgacggcggtcatggcaaaggctgcaacgaggcggacgatgctttcacattgatgcgtcgtcgtttccaccatttcaccttctacggcttcatgctctgtttcgccgcgaccgtggtggcgacgggttaccactacttcgccggttgggaagccccctacccgttcttcagcgtgccggtcatgcttggcacgctcggaggaatcggtttaattgtcggcccggcaggcctgctgtggttaaaccttaagcgctcgccactgcatggcgacgcgcgacagaaaccgatggatcgcggttttattttactgctgctcctgaccagcctgaccggtataggtttgctggcgggaagagacacctcatggatggggatcctgcttgccatccatcttggcgtggttatggcgctttttttgaccattccatacggaaaatttgcccacggattttaccgctgcgcgtctttactcaaatgggcgattgagaagcgacgtggaaaacaggcgggggtcgcaggcgactaa

SEQ ID NO: 381407 - DNA, 1296 bp, Salmonella enterica
atgactcaacaaccatcgcgcgctggcacgttcggcgcaatactgcgtgtgaccagcggtaattttctcgaacagttcgattttttcctatttggtttttacgccacttatatcgcaaagacattttttcctgccgaaagtgagtttgccgcattaatgcttacttttgccgtttttggctccggatttttaatgcgccctatcggggccgtggtgttgggcgcatatatcgacaggatcggccgacggaaagggctgatggtcaccctggcgattatgggctgcggcacgctgctcatcgccctcgtgccgggttatcagactatcggcctgctggctcccgtgctggtcctggcggggcgtctgctacagggattttctgctggcgttgaactgggcggcgtctctgtttatctttctgagatcgccacgccaggcaataaaggcttttacaccagttggcaatcggccagccagcaggtggcgattgtcgtcgcagcgctgatcggctacggtctgaatgtcacgctggaacacgatgaaatctccgaatggggttggcgaatcccgttcttcattggctgcatgattattccgctgatttttgttcttcgacgttcgctacaggaaactgaagcctttttacaacgtaaacaccgtccggacacccgggaaatttttaccaccattgctaaaaactggcgcatcatcaccgcgggtaccctgctggtggcgatgacgaccacgaccttttattttattactgtctatacccccacttacgggagaacggtgttgaacctgagcgcacgtgacagcctagtagtcaccatgctggtagggatttctaacttcatctggctgccgattggcggcgctatctctgatcggatcgggcgacgcccggtgctgatgggcatcaccttgctcgccctcgtcaccaccttgccggtgatgaactggcttaccgctgcccctgacttcacccgcatgacgctggtgctgctctggttctcgttcttttttggcatgtataacggcgcgatggtggcggccctgactgaagtgatgccggtttatgtccgaactgtgggtttttcgctggcctttagtctcgccacggcgattttcggcggcctgacaccagccatctccaccgcattggtccagttgactggagataaaagctctcctggatggtggctaatgtgcgctgcgctgtgcggactcgctgcgacgacaatgctgtttgctcgtctcagtagtggttatcagacagtagagaataagctctga

SEQ ID NO: 381408 - DNA, 426 bp, Salmonella enterica; identical to SEQ ID NO: 26390

SEQ ID NO: 381409 - DNA, 387 bp, Salmonella enterica; identical to SEQ ID NO: 26391

SEQ ID NO: 381410 - DNA, 222 bp, Salmonella enterica
atgccaaagaagaatttatactctgaagagattgtgattgccaaaaagcaactcactcagctttcaacaataaaagataaagtcagcctgctaacccgtcagtgggaaggtgatattggcgcccatctgcctggttacactgagctattagctcatgtggaaagaattgaaaggcagattcatgaacaaattggcagctggaaaaaaactcctgcaatgtaa

SEQ ID NO: 381411 - DNA, 252 bp, Salmonella enterica
atgaaaattaaaaacattgtattggcaggaataatgtcattggtattttctgttcatgccagcgataagcagaatataaaaagggacccaatgccttatttagggtacgacgcagttacttcaaacatgtgcatagatgctggtggtttaactgatccagtggagatgagaaagaaagctactgaaacattactaatgattcttcacaaacagccaggtgataaactatctaaacaatcagaagctaggtga

SEQ ID NO: 381412 - DNA, 615 bp, Salmonella enterica
atggctatcgataccgacgataacgatctggtagacgcagaggcgtgcgagaagtacctggcacagttacgggaactggaggcatacagggcgtaccgaacgacagctgcgattgactggttctttgaccaggctacccgggccattcacggtgagttgtggctagccgcctgtacgactttcctgaacgggattgagacctcactgagggtgacgatgaagctgaaggcgtcgcaggcacaaccgcaggcaccaacaccgctggtggacttaagcgatatggccacactcagtaatgctctgctaagaagggctcaccaggccggtatgccggtgacactgctggcctttcccgacgagcaggatctgctgaccaagattgcggacggcgccccgaaactaccctatgcggaaatcgtgagggttcggcacaatttatgtcacgggaacatcctggagcacatcatcactgtgagtgacggtatgggggagccagtccggttattcacacctgaatgtatgcgtgatctggcgcagacgctgtcggcagtctcgaaagtatggattgcaggcctgcatcaatattggtgtgataacaatttatctatgccttga

SEQ ID NO: 381413 - DNA, 435 bp, Salmonella enterica; identical to SEQ ID NO: 26397

SEQ ID NO: 381414 - DNA, 1260 bp, Salmonella enterica
atgtacatgcacgttgatatcaatggagcctacgcggcatttgaatgcgccatggaccccaaacttgccaaatccccgctcatcatcgcgagcaacaacgatgccaccattatcgccatgaacaggctcgccaaaaatacagggctcaaacgcgggatgcctatcttcaaatgccgggatctgattgagaagcatcatattgcggtacggagctccaactttacgttgtacgaagattattccaaccggtttcatgaaacgctggaggggtttgccgaggataccgatcgttacagcgtggatgaaagcttcatgctactgaaaaacatggacaaaatagtagattttgaagagtacggatgcctgatcagacgaacgctgctacacaatctttcgctcacctgcgggattggagtatcgaccacgaaaacgctcgcaaaattatgcacctacgccagtaagcgatgggcagcaactggtggtgtggtcgtccttacagacccattccgaattaaaaaactgctgagtctcatcagtacccgggaaatctggggcattggccgcaaaatcagtgagcggctggctgcgtacgggatcatcacggcctgcgacttttatgacagcgatgtgcggtttttacgaaaggcattcggtgttgaaatggaacgtacctggcgggagctgcatggcgagtcctgtttccggttgcatgaatcccctcctgtcagacaacaaattatcgtctcgcggagctttggccagcgccttaatacattcagcaagatgcatgaggcagtgtcattctttaccggccgtgccgctgaacagcttcgaaacgatggctcctggactcgccaaatcaccgtgtttatccagagcagcccgtttgccagagctgaaacccggtacagcagctgcggtattgagccgcttactgcgacgcaggacacccgcgacctggtcagtgcggcaggcgccatactgacccgaatctacaaacccggcatagattatgcgaaggcgggcgtgatgctttcgtcaatgaccgatggcactgagcagctatccctgttcgatgaacgtcccgccaggcgaggcagtgaagcactgatgaaggtgatggatcggtttaacaaagagcatcgaggctctctgtttctggcttgcgaagggattcatcaggatttccgggggaagcaggccatgctgtccccacggtataccactcgctggaatgagttacttgtcgtcaaagcctga

SEQ ID NO: 381415 - DNA, 810 bp, Salmonella enterica
atgattaaattaaattatttaaaacccgtggcgtctgttttaatttctgcggtgattgcgacggctggctctgtgtatattacgtcgaaatatctaaaacccgatgtaccgggtaacgacgaaataggacgagtggctgcttcctatctggtaaaaaatccccagtatcttctcgaagcaggtaaggcgctagaaaaagaaaatactaacgcttcccttgagcggattatcccctacgcaccggcactcttcgagaccaaagagacacccaatatcggacctgataatgcggccgtcgctgttattgagtttttcgactaccagtgtcatttctgtatgcaggtagcgccggttgttgaatctgtgttgagccaaagcactgatgtaaagttcttctttaaagaatttccgatcttcgctggctcaaaacctgtttccgcaatgggggcggcgacaggcctgcatgtgtatcagacattcggtgcggaagcgtatcgtaagtatcacaacaatctgatgaccagtgcgtatgtattcttcaacaaccagcgtgcgtttacactcaatgatttagacatggttgtgaacaaatccgggttcaacagctcattcggcgatcgggagaaaagccgctatgagaacgttatctccggaaacatgcagctgggggaagctctcgggattaacggtacgccagggttcattattatgaacatgcaaaaacccgacgctgcaacgacgtcattcatcccgggcgctgttgacgaggccaccctgaaatacgcaatccagaaggcccgtggaggctaa

SEQ ID NO: 381416 - DNA, 612 bp, Salmonella enterica
atgttacggcaatttttcttactaacagccacaacgttcttatgtggatgcggttatcattttggaaatgacgttgatgcgtacgatttactgccccgcccggtaggcagcaagaaatttgaaattgttgctccggatgacagtattcagtcgcgaatgtttgcagcccggtttgcgagcggattaacgggtaaggggtttaatatttccagccatcagcccgaatatattctcagattcagttacagcaagacccaggagaatctgcaatacagtgaactaccggtgacgggaataaccggatatgttatcgagaagaaaacaacgcgaaaagataagcacgggcaaactgagacggactatgactataagccggtcagtgggatcgtaggaacagagacggtatcacaaagacatttctggcgtcgtcttgatgtggaagtctaccctgcgggaaaaaatgcacagcaggtgctaaaagtcagtatgcagagcaatgcgccgatcccatcggacagcgtggcgtattccgcaatgattgacgctttgaccgggaatctggatgccccgctgcgctccggaaactacgtcgcctcggtcccctggaactga

SEQ ID NO: 381417 - DNA, 423 bp, Salmonella enterica; identical to SEQ ID NO: 26401

SEQ ID NO: 381418 - DNA, 393 bp, Salmonella enterica
atgaaatctgcaatactgacaacgttaatgctggtggcggttggttctcaacccgtctttgctgccaaatgccagttcggggcctgcgacgccgacactgtggccagcagtgagattctggtatctgctgctcagacagataaagacgcagttttaaaaaaactcaatgatgcgacatcccgcagcgacgtgatgtcgaaacggtttgagtcgtatctgagcaatgacaggttaaaggtgaacaccgacagtaccaagaaaggccctagcaatgaaatcgctaagccgagggatgagttggcgccggtaaggcagctgaaagccattcgccccgagctggtacaaacacccatcttccaacccattgttgcgttctatgaacgtctggcctga

SEQ ID NO: 381419 - DNA, 750 bp, Salmonella enterica
atgaataagactatcaaggcatcattatttttactggcatcctgtatggcctttagtatgaatgcccagacagcgaacactgacgtgcttcccgatgctgcactgaagaaattaagagaagtgggcttgtctatcgagcatattgaaccatcgccggtaaaagatatttataccgtcatttcaagagagggcgtgagctacgtcagcaaagatggcgattacattttcaccgggagcttgtttcatgtgaacgggaaagatgtggagaacacaactgagcaggctattctgaaaggtgtcagggagttcgccactaaaacaaaatccatcgaatataagtcggcgaatgaaaaataccgtctggcagtgtttacggatattacatgcggcttttgccagaaattgcatcaagatcttcaatcctatctcgacgccgggatctcaatcaaattcctcgcctttccacgtgcaggtctcaactccgttgtcgcggggaatatggcaaaaatatggtgtgcggcaaaacctaatgatgcactggatgccgcaatgagcccgacatcaaccattccggaaggacggcctgacgaggcctgcctcggtaccatcaaatcgcatttccaggtagcttcaactattccgcttcagggtacgccaacgatggtaacgctgtcggggaaacctcagctattcaccggttggatgagcccggaaaatctggtgacccgcatggatgccgaactaaagtga

SEQ ID NO: 381420 - DNA, 567 bp, Salmonella enterica
atgctccagtcaatttataaattcctgttcaatttatgcagttcaccgcagcagcccaaaaataaagacgtggatgggatattgtctcatgaagaaataaccgctggattatggggtcctctgccatcaatccatgttgttcttttcctggattttgatggtgtagtccacaaatgtcagaatgaatcgttcgagaggatgcatttgattgagaggttacttgacgcgagtccttcaatgttcatcgttatatcaagctcatggagagagtgcggcagtatcacttacctaaagtcacttttccgctcgccatacagagacagggtaattggagcaaccccatccctgtatctcccctcaggaagtataggagtccgtgcagctgaatgtgaggacttcgtcaccagacacaaagtaaaagcctttatctgccttgatgacgatgcgaccctgtttcctccagagtacccgcacctgtttcgtacagattattacaccggggttaatgaaaaggatctaacggacctgatagccagatataatgtgctgatgacccgcttttattga

SEQ ID NO: 381421 - DNA, 3990 bp, Salmonella enterica
atggattacaacatctatacagttggcgatattgaatttgtgtggtccgccctgaacgggattgccctgattttctcacaatacaccggtgtaaaagcatttctaacgacggcagcggtactggctggagccagcctgttttataaaacgtggctttggctgttgaacccgacaaaagcagaagtgccgatattttcatggattcttgggctgattctattttcgatggcaattgttcgtgtggatgtgacgattgaatcagttaagtctggtgaagtgagaaatgtcgatggcattcctatttttattgcggcgatgggaactgtcaccacgaaccttagccagggcttactcaaagactacaaaacggcatttgatccactggcgccgatcgactttgccgcaacgacgcttgatgatgacattactcttggtccgatgattcgtttcgttaaattcttacaatggggtggtgacagccagggctattgttctgcgtttcccgaaccagccagcgggttaggtgcgatgaatgtgtgcgcgacagtacaatcactggcctataactgtctcaagggaacccaaaactcaagcgcaaaaattgctgggaaagaaaccatttttaacgatattttctctgcaaatatcgtggatagcatggaacgcattaatcaggcgatgaaaggttcgctgaagaacgcctctgccaacattgtcggtgtgaatagctcaaagtctgctacttgtgaagaggtctggtcgaccgttaaacaggtaacgagcaccccagaggctcggcagacgattgcattgattgggcaaacaaacggtatccttgctccagatgaggcgggaggtgcggcatcaggagcgagcttcacggatgtaatggcgtcggcgaatggcatgtacggcaaagctattggtgcttatgacgcgacgcttagtttgttcatcatgaatgaactccgtaatggtgccagcaagtacaaaaccccactcgggctggcctcggatatgcagttgtttgaggcatcattaaagcgtacgaataccatggcatctcaggggcagctctggctgcaattgtccggtgcagccatcgcgtttcttgagatgtttgcgtacatggttgccccatttgcattgctcatgcttttggctctcgggggaaatggtgtggccgctgctgcaaaatatctccagcttattcttttcgtaaatatgtggcctattactgcggttatggtgaatgcctacgtgaagaaagtggcgaccgcagatcttgatacatggagcacattgaatagtcagagtaacgcggtgacatggatgggtttgccagggcttgccgaaacatacagctcttatttatcagtagcatcagcactctatgctcttatccctgtattgacgctgttcctgatgacgcaatccattcatccaatgatgaacgcgatgaaaggagtcacaccaccagcgccagtggactccagccacctcacgccgaaagtgtgggatgcgccaaacagcggaaaatcatcgtttggggatgtgaatcgtaccgcgctgacaagcaccggccaaggattcagtggtggcggggccatggactccagtaatttccgactcggtacgtggaatgccggttcaagtatcgcgtcaagccaggggcaaggggcagcatttacctcttcagccatgagcgcagcaagtaacacattccagcaggccttcaaccagatgagtgaagttggccgaacggggcaatcaggccagcaatttacctccaacctgcaaagcttgaaatcatttactgaccaggccggtgcaaacatcgcgaatagcgtaggggcgaagcatggaattagttcgcagcaattagctggcgtggtgtcaaatcttctgctcaatggcagtttgggacttggtggtgaagaaaaacttggaaaaggaggaggaggaggtctcgctcagaaagtaatggatagcctaggaataaaagcgggggggcaagttggatcagggatcacgaaaagtaattctgggaatgaaagtctcttaactgatttgagtaaagctattacgactcaattgactgaaaactcaggactgactgaccaaatgactaaagcggctgctcagataaacagtgatcagtttgcacagaccaatgcattcaaagaagctgcaacaaaaatgaaccagtccacacagacaatggccgaaaacttgtcgacgtcactttcaacgaacgccagcgccaatactggcatgacactcgactcaagacaggctatcaacctggacagattctccgattctatccgtaataaaaactttagcgatgaagatgtgcgtaattttgcacggaaaaatggtcttgatgagaatgcctttatggagaagttcaattcctataatgacacatttaaggccagcactcagttgggttcacaactccaacgtacagatgcgctggtggcaacgacacgtgactttagtgagcaaaaaatagcgattgatactgcccgaggtgaaacggctgagagcaataaacaggatctgcgtgaaacttccagcctgcttaaagggctggttgctgacttcggcggtaacgctcaacagatgctgccgattactaatcagcttgaccgaatcactggtgatgcctcgggtattaacacgattgcacaggcgcaggatcgcaccccagaacatgtaaatacatccagcgtaatgagcgctgatcgtgttgctgacgtggggcaaagtatggatgctcaggcaaaagccgggctggtacaaaaccaacaaaatgctaaccagcatgttggtggacaaactgagtctggtgtaacgccgtacaatgtggacaagatcagcaaagaagatattcagggcattcatcaaggtaatgtaaataaatcctatagcgaagagaaccagaatgtgctctcgtcattggataagaatacccctgttgtgacgaatgaaactgtgggaagagttcagggggctggggtggacgttcagcacgccaaccaaactttcgaccagttacaggctggttcgggaggtaagcatgcgacttcgggcatgggtactatcagcgacaaactgaataatatgtacggagataaccagatacgcggtatatcaggcaacctcccgaattattttggcaggattgcaaatgatcctaccaaaaagccggatgacaaacgtgcggaactggccgcacaagctgtgtttacctatggcgccagtacaatggcaaccggcgctgagaaagaacaactgaaagcggatactcaaaatatcctctccgaactgagtcactataacgttcgctgggggatgaacgatctccagaatatccatgaaggtttcaacatgcataacaaggcttcaggttctcttgactcagttgtgagggcgaatcttggggaaggtggttctggcggcgggctcgttgggcaacgaacccaaaccacgacggatctccttgttggtaataaaattgagtccaatacagaacgtggtgttattggtagtacgcttttatcggggcaggagagtgttgccagaggacttgacgttatcggagctaaacctgtaaacgacatgctctcaggtatgggtatcctgaccaccccttcatctttggcaaacgatgcttcgaatccacaaaatatgccgagctcgctattgggcaaggttggaaatcacctgcaaatgtcagatggtgttagcgcggtgaccagcaggtataaggatatggggggggatgggatcaaggcgtatgagactgcatcacaaaactcagaacgtgcgattcgtcagcaactgaccgatgatccacgttttgggccggataaagcagatgcattcgtgagctttatgaagtcaaacctgaataatacaaatgaaccatatcagtcgagaattgagaaagctgaaagctggctgaatgaaaataagaagtaa

SEQ ID NO: 381422 - DNA, 1416 bp, Salmonella enterica; identical to SEQ ID NO: 26407

SEQ ID NO: 381423 - DNA, 513 bp, Salmonella enterica
atggctaaagtcgatcaaactaaagctaacatgttattgagcgctacaaaaacgatgtctcttggtgccaataaaaactccataaggatactctatggaaatcatgttgccgaaaatatagacttcaggtctgaacctcaacaaaactttaaaaaagggattcgtgggtggagtcgccgcacggataaccgcagggctttttctgcggttattgatgtcgctgtaaactatttcggttttgatcctattcacccggaatccagttttcgaaatattgacttcaaccgcatcatgagtgtgctgcataaccttggatatttcgtctgcgctcctgaggtaaataaaatcattgagattctaacgtcaatgaaagaaatcgaggagcttgaaacttgtgcgaaatgtaagcgcccttatattgtcccgtataccaatgatactcattgtcctcgatgcagattgtcgtccacgtcatcggcaatagcacggtattcccaggaagagttagattag

SEQ ID NO: 381424 - DNA, 801 bp, Salmonella enterica; identical to SEQ ID NO: 26410

SEQ ID NO: 381425 - DNA, 486 bp, Salmonella enterica; identical to SEQ ID NO: 26411

SEQ ID NO: 381426 - DNA, 723 bp, Salmonella enterica; identical to SEQ ID NO: 26412

SEQ ID NO: 381427 - DNA, 3036 bp, Salmonella enterica
atgaatttcagggcactcttcttaagtatgcaacgagtttttggcattttctccagaagggagaatgatgtatctgagttaatgatgaaggatgcagcgaacttctcgccatttgctcagattataggagagcagaaatacactgtgccggaccacccgaatcctgaagtcctgaaattcattgaatacccaaccaggcctgcggggatacagacatttaatgagcagtctattctttcgttgtacagagacaagctgcactctatttctatgatgctggcaataagtgatggagacattcgggaggatgcctataccttcactaatctggtgttaaaaccattgattgaatacatccgctggattcatttacttcctgcgtcagagaatcatcaccataatggtattggaggattgttgtctcacagcctggaagtggcgatgatctctttaaaaaatgccaatcactctgaattacgtccgattggctatcaggatgaagaagtggttcgccgaaaagtttatctgtatgccgcttttatctgcggcctagtacatgatgcagggaaggtatatgaccttgatatagttagtctcaacttgagtgaaacattaacatgggcgccaagctcgcaaagccttcttgactgggcacgagaaaacaatgttgttgaatatgaaatacattggcgaaaacgtattcataaccaacataatatatggtccagcgtatttcttgagaggattttagatcctgtctgtatgtcattccttgaccgagtcaaaaaggagcgtgtctatgcaaaaatggttacggcacttaatgtctataacgacggcaatgactttttatcaaaatgtgtaagaacttctgattattactctacaggtactgatcttaatgtgttgagggacccgataatgggtcttcgttcgaatgatgctgcggctagggcaataggtaccattaagcataactttactagcattaatattaataactataaaactaaacccatgcacatcattattgtaaacggtgaagtttacctcaatgaaaacgcctttctcgactttgtactgagtgattttgcagcccataagttcaacttcccgcagggagatgcaggcaaaacagtacttgtcgaatctctggtgcaacggggttatgttgaaccttacgacgatgaacgtgtggttcattactttattcccgggacatattcggaaaatgaaattgcaagcatcttccggaacggtattggtaagctggaattttataacctcttaaaactgcgttggatcgggttaatttttgattcatataaaatcccggattcagttcctggtctgttcagcgttaatgcgaataaagatttcatctatattgatgagcagaaaactgtaacggaatacagaaggccggtcccgggtcgtgagtctgttaccagagtaacggacactgtcaatgacgccattgagaataccccacagtatggacttcagctcgtaaacggccctgatgccgacagtaacaatattattagcagtgaaaatactgaatccattacggatagtttggaagagtctggcgcggatatctcaaacgagatttttgaaacgcaagttgttacggcaattgatactgccgaaacggtaaacgcggatgagccagaacaggtagaagagcatgacgaccggagccagattcatctggttgaacaacttcatgaaatgctgttgagcgccccactgccccatcatgccgtcattaatattgattccgtaccttacctggatctcgatgctgcgattgcgttaatcccgggtatagatgaggcggcattttgtaatgggccatttttccagttgacataccgtgatgggtctctagatggtatgtggatagtccgtgatgtaaacaatctacgcctgatacagttgggggataactgcgccggtatgcaagtaagcacatcggaaccacgaaacacgtcatcgctgaaatcactatttgatacgtcaatgtaccaaccgttggatatccctgaagctccatcagtaaacgaagctgcttcgcctccacaaacaccgcttgaactcccccaaccacgactgaatgcacctgtggctgaagaggccagctcggtagctgaacagactaacgcccactccgaaccggattccgtcatcgctactgagtatgagcaatatggtcatttgctggaagagacccttgatagcgatggtgaggcatattctgatttaattgcctctgacagtactgaggcagaatcccccgccactgatccgcagagcagcgattttgcccaattacctcgtgaaacggccctgtccgttgcgcccggtgatttggattactcagagggtgccattaagccaccagcacccgatgcaaccggaaaagaaacaatactaacaagtcctgaaccagcagaggatgtccgagaaacggtagccgccgtggagaaagcgagtcatctttctccggcattggctcgactctttgctgtaagcacccatgctgagaagaagcatgaaaaaacgcaggaaccctcccctgttaaagaggttaaaaatccaacctcctctaccacagttaaggctcctatttccattgaaccaccaggcgctgaagagaaagaggcggtggaagaattcaccctgttaaacgacggtgaagtcacagaactcgaatatgtcgagattgccaccatgctccaccaaattctgacgaagttatctgggtcgttcaaaagaaagaggaaaaaccggttcatggttttgacccagaacaccttttatctgacgcagtcatgtattgaaaagtacggaacgcagctaaatgcgcctgagctttttaaccaacttcctcagtaccaggtcacatccggtgccgtagtcaatacaaaatgcattgcattcaacataccaactctggtcgccgcatcagaccgggcaaaggtcgatattgagttaattattaacaagctaaaagaggtcgggaatctgtaa

SEQ ID NO: 381428 - DNA, 2085 bp, Salmonella enterica; identical to SEQ ID NO: 26414

SEQ ID NO: 381429 - DNA, 1104 bp, Salmonella enterica
atggatgagcaaattactctgacacaaaatcaaattttcagtgcatctctgaaagtaagtaaaagccgctcgctcgttaagcggcgtatgcaatcattagggttgaagtttaccgaatcgcaggatgtccgtaaccgactggcggggatagaaaaaggtgctttgaaatgtgtggggcaattttgccatgacaacgatgctgagtctttatcagcgatggcgatcatcctttccgagctttttctgctgcaaggcgaactgtccaccagcaatgaatacggtgaccatgaaacgagttactggaccgtagcacaaggcccatgtgatgaatgggtccagtctctgctggcgagcgaaaatggtcgacgtacatttaatagctttcgtataactttcgacaactccgaagagcgccgcagcctcgtcgaaaaaaatgccaaaatgctggggagttatttattgccttattttgtcaattttacaaatgctgcatctgcgtttattacgctgcctaatagcatcacgtttaaacaggtgcaacgcaacaagccgctcattcaccctgaaaccacattaagtcacattctcacaatagaagattcggcgtttctctctcggatcaaatttaaacttatctcggcaattgaccgtctgcccgacccgtccggtcagtatgccaacatgttcaatcacatcatggatcgggcgctgctgacgcacctcaaccgggagcaaattgatagcccttgtgtgtgcaaaaaggtcatttccacctatgcagacactatgctgacgctcccgatatttaatacgacgattaccgggaaataccggcactggaccccgtgggggattaattttgtcgagtttagtcgtcaggctgcaaaggaaaaatcttgtgtctatgttcctgaacccggccaaattcactggaaaagtccggagcataaggaactggcagagtacagcctgatcaaccagataatcccgcagcaataccactggttgctgggtgtgccgacaatctggcgcagtcactatcgtgaccatagcaaacgattagacttattcaaggagtggagggacgcaaatggctgcggataa

SEQ ID NO: 381430 - DNA, 663 bp, Salmonella enterica; identical to SEQ ID NO: 26416

SEQ ID NO: 381431 - DNA, 1182 bp, Salmonella enterica
atgtttaaacgtaataataagaagtcacctgccaatatcaaagaatcgcttgatgagaacgctgaccgtttctataaaatgttccgaatccataccacgtcaaaagtggttatttcactgctggcattagccgccgcaggggtttcggcctttaatatttacgataagtatcaggaatccgaaggacgaatggatcatatcgccgtcgtgcgtatctcgggagaaatgggtaccggttctgaggtcggcgatggatctgtgatagccacagcactggcgaaagcgtacaacaacccacatgccaaagccgtcattattgaagctgagtcaggtggcggcggtccttcagacgcgattattatttaccgccagattaatgcactacgaagccaccagcagaagattgaacgggtttcacatgccgaatccacaagcaagccccgtaacacgagtgatcacagtgcttcacgttcgcaggccgatagcaatgccgaactgtcgaaacgtaatacgctggacgttctctccgccgggagtgggcatttcatttctgatatggaaaacagctacaagcctattatcgtcagcgtcaaaggaatttgtgcgtcagcatgctactacgctgtgtcccctgctgacgccatttatgcagacagtagcgctctgaccggttcgatcggtgtccgaatggatcactggaacctgtctcgcgttatggatactgtcggcgttaaaaatgagccactcaccgccggggagtttaaagatgcactcgacccctatcatccactttctgatgccacccgcgattttatgcagaagcaaatcctggatgcaatgcacgaacaattcattgcggacgttgagcaaggcaggggtaagaaattattaagccgtccggaggctgatgctgtcgcactgtattccggcagggtatggacaacgcagcaggcgatccggtacggactcatcgacggtgacctgacacctgtcgaagtccgttcacgcctgtcccaaatgtactcaaccactatcttcaagacgtacaacgagccacaacggtcgcttcgctccgcgctcgggatgttaatgagtctgtcgactaacgtcgaaacgctggcaggaacaacctctcggatacttgattctgttcaggccaccagctatccgacggtgagataa

SEQ ID NO: 381432 - DNA, 729 bp, Salmonella enterica; identical to SEQ ID NO: 26418

SEQ ID NO: 381433 - DNA, 357 bp, Salmonella enterica
atgacaacggcaaacgtaaccaccactacttaccgttccgatgacatcgtcccttttcgtcggccgcagggagatctggataatcgctatatgccgcaggcttacgctctggtgcggagctgggccagcaaacctgcggagtacggtgcaggagttctggctacctacagacagccggtagtcaatctcgggtataagataaaagggactcgcgttgttttaattcttgtccctatcgaatgtgagccggttggcgtaaaaatgactgacgccgctttatggccgtctctatcgattggggaggccatgcgaattatgcaggaagcgtggcaaaatattccggagttgaatccataa

SEQ ID NO: 381434 - DNA, 315 bp, Salmonella enterica
atgaatacttttctttacgtgctggtgggctggattatcgttctatatctggttaataaagtccgcgaaaagtacagcaaaccgaaaacagttaatatcctagtgaaacgcaatggcgtttatcaagaagtggaagccgtagtgatgcctcgaagccataatagcgatgtgggttcaggtaagaccggcaatgaagccgccccacaatggttgaataaagaggatgatatttctgaactggagtactacagtggcgggtcactcttgaaggctgcaagagattttgaagctcaacaaatggagcaaaaattctag

SEQ ID NO: 381435 - DNA, 234 bp, Salmonella enterica
atgttactcaatattgcattaatcctctatgttgctgtttgtctttacctctgtctccgtaataaaaaggcactttaccgttcccagggcggagggcgtcagtttacgcagtccagtaagagtggagcgaacacaggcgaaagtggtttcttcttaatctccggatactcagacactggcgttgggggcgacagtggggacgctggtggcggatgtgggggcggtggtgattga

SEQ ID NO: 381436 - DNA, 237 bp, Salmonella enterica; identical to SEQ ID NO: 26422

SEQ ID NO: 381437 - DNA, 546 bp, Salmonella enterica
atgaaaactttaaatattcaggttaatgacatcgcagcaattagcgcacttggcggctcaatgttggcggatattatcgccgcgcaatataaagtgattgatgataccaaagacgcatctgaaatggccatgccatgcattgcttacgggcagatccccgcaaacatcggcccgggcgtctttatcaatcgcgtgtacagcatggacagccagtcactgagtgccagccagcgttacgagctctttaacggacttgcaacccaggcgtttaccttctttttccagtcgggctggtatggcgcattccgtgttgtgtctttccgtgataacggtcctgccggactccttaatatcggcattgtccatgacaaggtgttaaacgaattttgcgatgattttccacgggctaatgtcagcgaaactggcttcaactgcggcatgacgtttgaccagatccggatgtttatttcggacctggcctatcagatgcctttgtacaacaaccaagaccacttcgttaaactcgccaaacacctcgcggcctga

SEQ ID NO: 381438 - DNA, 438 bp, Salmonella enterica; identical to SEQ ID NO: 26424

SEQ ID NO: 381439 - DNA, 141 bp, Salmonella enterica; identical to SEQ ID NO: 26425

SEQ ID NO: 381440 - DNA, 282 bp, Salmonella enterica; identical to SEQ ID NO: 26426

SEQ ID NO: 381441 - DNA, 1206 bp, Salmonella enterica
atgtccactgtcgaaaatgatgtaaaaaccgctaacaacgatatcagcctgcgcacctacctggagcgtaccggtaacggcgcacgcaaaagcaatggtctagtcattaacccggcagtggtcgaagaggaagaggggtttaacacccgtactgctggcattggggagagttactactcattacctgacgtggtagcccacctgaacagcctgaaagagtcctacaagatcgatcctttaagcgtacaagctattgtcgtacagattctgaatggccgtccggtcctgcgccagggagcatgccgtatccgtgccgtcgcgatggcaaacatcgagctggcagatgaagggcgtgaattgatcacgttaattcgatgcgaggagtttcgcggtagccgcgccagtgccgagcagtttacgctggacggtaactcaaatctggctctgtctgtcgtagctgaggcgctctccatcaaacggatggttgaagacgcggaagaacccaaaacgttcgctgaactggcgaagcgtcgcggtaaaaccgaacagcacctgcgtcagatggttcgcgtcctggatctgcctgaagccctccaggccatgttggtgaagggtgaagtgagtatgtatgtcgcgctggatgaatacctttacagcggcgatgaagcggtcaacaacatcaccaaagccattgatgtttatggtaaggcgacggccaaaaccctgaaattcgtcaaagctggcaacattgatgcagcgatgaagccgaaagcagccatcgtgccggacgcaaatgcgatccccccggaaaccaccgtgactgaacaaacgtccggcgaaggtactaacgatgagaccaccccaccgcagctggtggacgggagtgcgggcactaacccggagccgaccccggaaaggaccccggcaccgcagatgaaagacccggtcaaaacgccagagcctaaagctgtgtcggtctccagcgtactgaacaaaaagaccgtgacgacgattgcggacacggcaatcccgctgttttcgcgtattgcggaagaagctaaacaacgggccgctaagaacctcagcgacgatacttacactctggtgctgaccaatgacgagatgaatgccatttgtgaagctcacggcgatctgacgcagtacctgcgtaaacatgctgaaaagcagaacaagggccaggcatga

SEQ ID NO: 381442 - DNA, 1269 bp, Salmonella enterica; identical to SEQ ID NO: 80762

SEQ ID NO: 381443 - DNA, 165 bp, Salmonella enterica
atggcaagcaaggcacgtatcgcaatcgccattggttttctcttgctgtccgtgctggtggatttcaccagcacaatcctgtcagttttatcggacggggcgttggtggcagtagctgtaacattggtatggccgatattaaaaacagcttctaaggatcagtga

SEQ ID NO: 381444 - DNA, 435 bp, Salmonella enterica; identical to SEQ ID NO: 244445

SEQ ID NO: 381445 - DNA, 2265 bp, Salmonella enterica
gtgaaagagctgtgctatggatctgtttgcagtggaattgaagccgcgagtattgcttgggaaccgttgggtatgcgtccggcgtggtttgctgaaatcgagccttttccatctgccgttcttgcgcaccgctggccccatgtcgccaaccttggcgacatgacaaaacttgccaaaaaagtcctggctggggaaatcgaatcccctgatgtgctcgtcgggggtacgccttgtcaggcattcagtatcgcgggcttacgtggtgggcttgatgatgaacgcggcgcgctaactttgaagtatgtggagcttgcaaatgcaattgacgacaaacggtctgagtccttcctcaaaccgacagttatcgtctgggaaaatgtcccaggagtcctgtcatcggcagataacgccttcggatgtttccttgccggattggctggagaagatgcgccatttgaaccaggtgatcgacctgaatcaggaaaaagtaacgcgttctggcggtgggatggcaaaaccggttgccatgctccaaagtggccgcagtgtggttgtatttatggaccgcagcgaaaggtggcctggagaatccttgatgcccaatacttcggagtggcacaacgacgccgacgcgtgtttgttgtcgcaagtgctcgaacagacctcgatcccgcaacggtactttttgagttcaaaggcgtgcgccggaatattgcgccgagccgaaaaaagaaggaaatcgcttccgccattattgcaaatggcgctgcaatcagtggcgaaagcctaaatccatgcctacacgctgacatgccacccggtatgaaatcgacgaaagccgtaaacgctttcaggatggcagcatttggggaatatattgacgatgaaaccgcatcgacagtaaaggcaagagattttaaagatgccactgaccttgccgtttttagcagcacaggagcaggtttttggtcagaagggcatggtacattgcgggcacgtgagcaagaaagccatgagcatcttgttacattggcttttcctgagcgtatgagcggtacacaacatgctgcaactaagaatacttcaccatctctaatggctaaaaatccaacagctgtttgctatgaagtaagaaacgcagaagtagctgtccgccgtcttacccctgtcgaatgtgaaaggctgcaaggttttcctgatgggcatacgttgatcccgacggaaaagcgtaaaaaagttaattcagatgaactggcatatcttcgcaatcactatccagatttaagcgaagaagaggccgcgatgcttgcagctgacggaccgcgttacaaagcgatcggcaatagtatggcaataccagtaatgcgctggattggcgatcggattactaaggccgtatgtcggcagaaagaaggaagtgaaacaaaagagcgaaaagttaaaccagcggcagaattcgaacggtccatattcaaatgggctggtggaaaatttggtgttctggaacaaatctttcgctatttgccaaaagggaagcgcctgattgaacctttcgttggtggcggagctgtcttcatgaatgccggataccaggaaaatctgctaaatgatgtgaatgctgacctgattaacttttacaagactctgcaacgcgaggcgcattcacttatcactctggcacatcgtttcttccaggactacaacacacaggaaggatacctggcagtacggaatgcgtttaacaaacaagtttatgatgatttacatcgcgcagcggcgtttttgttcctgaaccgacattgttttaacggattgacgcgttacaaccaggccggtgagttcaatgtcggttatgggaagtataaaactccgtatttcccattacaggagatggaagccttcctcggtgcggaagggcggtctgagtttgtatgcggtgattttgcagcggtgattgaagctgccggagaaggagatgtcatcttttgcgatccgccgtatgaaccgcttccaaatacagagggattcacgaactattccggtcatgactttaagtttgaagagcaaaaacgcctggtgtctctgttgacggatgctcatcgtcgaggtgcaaaggttctcattactaacagtggcgcgccaaacatcagagagctttatcatgacagtggcttcagagtggaacctctttttgccagacgttctgtgtcttgtaagggggacactcgaggtgtagctcatgacgttttgggtatattgctctaa

SEQ ID NO: 381446 - DNA, 906 bp, Salmonella enterica
atgtttaagcactggaaaaatattactatttataaactttctcgtgaggcggatctgaccgacttagaagataaaaagaaaatgatccttttcacaccatgcggtagtcaggatatggccaagttcggttttgtatcgccatttggtgataattccgaagttatcgctatgcatggaaatggttttatccttgttgaagcaaagcgcgaaacaaaaattcttcccccgccggttatccagcgagctattcaagaaaaaattgaaaaacttgagcaagaacaagcgcgtaaactgaagaaaacagagaaggactccctgaaagacgaagttctgcattctcttctgccacgggctttttcaaagttttctgttatccaggcgatctacgacggttcaactaaacgtatctatatcaatgccagcgcgcggcaggcagaggatatgctcgcgcttatgcgtaaatctctgggttctcttcctgttgttcccctaagtgttgaaaatcccattgagttaacgctgaccgactgggtacgtgatggtagtgctccacagggatttcaaatgggggatgcggcagaacttaaggcagtgcttgaggatggcggtattgcccgagtgaaaaagcaggatttgggaagcgatgaaatttccacacacctggaagctggcaagctcgtcactaagttggcactcgactggcagaaccgcattaaatttacactggaccataacttcagccttaccagcgtcaaatttgcggatgaattgcttgagcagaactctgatattgatagtgaagatgttgcgcagcgactggacgcagatttcttcctgttgaccagtgaaatttcgtgcctggttgatgctctggtaaatgcccttggtggagaggctaagcagtga

SEQ ID NO: 381447 - DNA, 285 bp, Salmonella enterica
atgcagatggagctaataagccgcaaggagttcgatagccgtgtaaccagcggtgaactcgacaacttgcaggttatcaaggtgaaagaaggcttttgcctcattgggaatcagagcggaacaaatcgcgtttttatgcttcgccgtacggatttgaagccatttgtctggaagaacgaaattggtcccagctcatacgctcaaacgagggggtgccacaacttggcctttttctataaagacgagctttctgtggttgatattcaagggttacaacatgtttaa

SEQ ID NO: 381448 - DNA, 789 bp, Salmonella enterica
atgctggaaaaagactaccagttatccgcatataaaaaattggccgcagccggtgggatgaaaacacctggtgccataacatcggcacgaaacagtgctaacacggcaaaacagcttgcagaagaattgatcggattaattttggatacaattgtctatcccgacactattaccagttatgtttcaacgatcagaacaaccacaacaggcttaacgaacattgtcgaactggcaactaagcacgcggacctgttggctggttatgcagatctgtcaatgctgcttcaactcgatattggttgggatgtttactgccgtgctaatgagcgagaagtttcagaactgccgatctctattgccattggtgatgtgactattactaaatcgcttgaggacgctgtaaacgcgcttaatacatcaagtttagttgctgctatgggagatattaaccagacccttaacactggctcaggaaactcgtcaggctctgattcaggcggaggtactgccactcccccaccagcactaacagaaaagcaaattgaagcactgaaagtagcaactgaacagtttgggggagttttcaaccaaacaacagcgcccacagttgcattgcaacagcagtatgaacaggcgaaggaaagcgccagcgtagccataactgcttataaccatgctatcggaaccgcgctggcggaagcatcagcaaataaggccagcaccgccagtgcagtcgcagctttggttcctgattctgttcttgatgaattaaacaaggcgacactttaa

SEQ ID NO: 381449 - DNA, 423 bp, Salmonella enterica
atgtcgtttttttcaacgttaaaaacagctttgtctttgaaggagaaacttgctgttactggtgttcttgtcctgatttgcgcacttgttggtgctgggtttgcatgggaacgttatcagttaaagcaagccttggaaaaaattggcagccttgatcaggctgttaaggagcgcgataagtcaatcattgatcttaaccagaccattgagacgatgaataaagcggatcaacattttcacagccaggaagtgaaaaatgaatcagaacaagcgaagtatgcagacagacaaatggaacgaaaagctgaagttcagaaacaactggttgcgtcgggtagtgttcgccagcgcattcctgttgacactcagcggttgctccgggagtcgatcagcgaatttaacgccgatgccgacaaaggttaa

SEQ ID NO: 381450 - DNA, 360 bp, Salmonella enterica
atgtccgatatggaaattgaagcagagatccaggctaaagggaaaaccgcaccacgcctgactcctgatcacattgagcatgttattgccgaagagcattatttcacggcttttgacggtattcgtgccgccaatatgggcgttggtgatgcatggacagcacataaatctacagacctcctgactttctgcgtactggtgctgaagaatggcttcaccgtcaccggagagagcgcctgtgcaagcccggaaaactttgatgctgaaattggccgtaaggtggcccgtaaaaaagccttagagaaaatctggccgttggaaggttatctgctgaagcaaaagctcagcgagcagatttaa

SEQ ID NO: 381451 - DNA, 402 bp, Salmonella enterica
atgtttgcgattaaacaagaaataaacaacgctacttctctgttcgaaattgagagtattaccgttggatatcctggttcagatcaatttaaacaggcgttcgagattgctgaagagctgggtatcaaaacgcctgatgcgattgaatatatccctgttgcgtacgaagatgaggagatgacaaaggcaatcggggaagagcaaactttgagtacagagcgtaaggatgtacagcgggatgactgtatcgccgtgatttgctctggggttgcttctgaaatgttccccgacctccctgccatgggaggtgttggttatcaattcctctacaaaggtgatacgttacgtatctatacaagtagtttgttgatcgaagaagtaggtacggaaaacgacaactaa

SEQ ID NO: 381452 - DNA, 861 bp, Salmonella enterica
atgaatcaatcatttatctccgatattctttacgcagacattgaaagtaaggcaaaagaactaacagttaattcaaacaacactgtgcagcctgtagcgttgatgcgcttgggggtattcgtgccgaagccatcaaagagcaaaggagaaagtaaagagattgatgctaccaaagcgttttcccagctggagatagctaaagccgagggttacgatgatattaaaatcaccggtcctcgactcgatatggatactgatttcaaaacgtggatcggtgtcatctacgcgttcagcaaatacggcttgtcctcaaacaccatccagttatcgtttcaggaattcgctaaagcctgtggtttcccctcaaaacgtcttgatgcgaaactgcgtttaaccattcatgaatcacttggacgcttacgtaacaagggtatcgcttttaagcgcggaaaagatgctaaaggcggctatcagactggtctgctaaaggtcggtcgttttgatgctgaccttgatctgatagagctggaggctgattcgaagctgtgggagctgttccagcttgattatcgcgttctgttgcaacaccacgccttgcgtgcccttccgaagaaagaagctgcacaagccatttacactttcatcgaaagccttccgcagaatccgttgccgctatctttcgcccgaatccgtgagcgcctggctttgcagtcagctgttggcgagcaaaaccgtatcattaagaaagcgatagaacagcttaaaacaatcggctatctcgactgttcaattgagaagaaaggccgggaaagttttgtaatcgtccattctcgcaatccaaagctgaaactcccagaataa

SEQ ID NO: 381453 - DNA, 966 bp, Salmonella enterica
atgaaaaaaatagtttcccgtggacgagtgctgggcaagaatagctccgagtttgctcgcatgcttgaaggcagtgaaggcaccaaaacctttaccctaaaatctggccgccaggctaaattcttgcttaccgtcgtgctgagtggtgagattgagtcgcgcacgttcgttgacccggcagttaacggccgcgatcagtctctgctcacccctgagtcggtaagcgatatttcccgcaccattaaattgcaacagttcttcccggctatcggtcgtatggttggggagcgcattgaggtattggacggatcgcgtcgccgtgctgcgtgtatcttcaatgaaacgaaatttgagattctggtgacgaaagatgagatcagcctggcggatgcccgccagctggccattgatatccagacagcccgcgaacacactctgcgcgagctgggtaaacgcttcgaggttatgtacggtaagaatatgaccaaagaagagatcgcccgagctgagaacatctcaaaggctaaagtgacgcgagctttccaggctgccgcggtgccggatgagatgattgctgtcttccccgtagccagcgatctcgcccttccagattaccagttactgctccagatcgccgaggatgctaacgctaaaagcgtgccgattgaagagctggttgatacggtgcgcgaacgaattgcagagactgagggcgcgaaagaggataaagcgaagatactggctatcttcaaagcggaaagcaaaagcctgaagcccgcgccggttaaatctgtggtgattgagaagctgcgagacttctctgaccgtcgtcaatacgccagaaagaagtccgatccgaaaaaacgggtagtcgcctacgagttctccagactcccgtctgaagtgcaaactgaaattgacgaagcaataaaaaaaatcattgggaaaatgtctgctggggaataa

SEQ ID NO: 381454 - DNA, 1707 bp, Salmonella enterica
ttgagtaacttacgcgaataccagaatcgtattgcagatatcgcaaaacgctctaaagctgtgcttggctgggcaagcactgcgcagttcggtactgataaccaattcattaaagatgatgccgcgcgtgccgcatctatccttgaagctgcacgtaaagacccggtttttgcgggtatctctgataatgccaccgctcaaatcgctacagcgtgggcaagtgcactggctgactacgccgcagcacataaatctatgccgcgtccggaaattctggcctcctgccaccagacgctggaaaactgcctgattgagtccacccgcaatagcatggatgccactaataaagcgatgttggaatccgtcgcagcagagatgatgagcgtttctgacggtgttatgcgtctgcctttattcctcgcgatgatcctgcctgttcagttgggggcagctaccgctgatgcgtgtaccttcattccggttacgcgtgaccagtccgacatctatgaagtctttaacgtggcaggttcctcttttggttcttatgctgctggtgatgttctggacatgcaatccgtcggtgtgtacagccagttacgtcgccgctatgtgctggtggcaagctccgatggcaccagcaaaaccgcaaccttcaagatggaagacttcgaaggccagaatgtaccaatccgaaaaggtcgtactaacatctacgttaaccgtattaagtctgttgttgataacggttccggcagcctacttcactcgtttactaatgctgctggtgagcaaatcactgttacctgctctctgaactacaacattggtcagattgccctgtcgttctccaaagcgccggataaaggcactgagatcgcaattgagacggaaatcaatattgaagccgctcctgagctgatcccgctgatcaaccacgaaatgaagaaatacaccctgttcccaagccagttcgttatcgcggctgagcacacggtacaggcggcgtatgaagcacagcgtgaatttggtctggacctgggttccctacagttccgcaccctgaaggaatacctgtctcatgaacaggatatgctgcgtcttcgcatcatgatctggcgtactcttgcgaccgacacctttgacatcgctctgccggttaaccagtcctttgatgtatgggcaaccatcattcgtggcaaattccagactgtatatcgcgacattattgagcgcgttaaatcttctggtgcgatggggatgtttgctggtgctgatgcagcatctttcttcaaacagttgccgaaggatttcttccagccagccgaagactatatccagactccgtatgttcactacatcggtaccctgttcggtaacgtgaaagtgtacgaagtacctgctggtatttgtaagaacttaacgacagagaacattcagttcagctcgatggatgtgctgtgctacgtccgtgatgaaaatccgggtaaagcaggcttcgtgactggtgatgctgtcccggccatcccgttccagcatccgaccactccggcgctggtcaaccgtaccacgctgtggggttcggctatcaacgatatgcacccacgcaacggcgctgattacttcactcgtgtaacgctgacaatggccaaaaaaggcgggcttaacttcattagcggcgacacgattgatgccggtgactctgagtaa

SEQ ID NO: 381455 - DNA, 1590 bp, Salmonella enterica
atgtctcaatattcaattcaacagtcattaggtaatgcatccggcgtcgcggttagcccgatcaatgccgatgcgacgttatctaccggtgttgcattaaatagcagcttatgggctggtattggcgtatttgcgcgtggcaagccgtttactgttcttgcggttactgagtccaattacgaagatgttctcggcgaaccgctgaagccgtcttccggctcacagttcgaaccaattcgccatgtatacgaagctattcagcaaacgtctggttatgttgttcgcgctgttccggatgatgcgaagttcccgattattatgttcgatgaatcaggcgaaccggcttacagtgcgttgccatacggttctgaaattgaacttgatagtggcgaagcctttgctatctacgttgatgatggtgatccgtgtatttcacctacccgtgagttaaccatcgaaacggcaacagcggacagcgcgggtaatgaacgcttcctcttaaaactgacccagacgacttcgctcggcgtggtaacgaccctggagacacacactgtgtctttggcggaagaagcgaaagatgacatgggccgcttgtgttatctgcctacggctctggaagcccgttctaaatatctgcgcgcggttgttaatgaagagctgatttcgacagcgaaagtaacaaacaaaaaatcgttggcgttcactggcggtaccaacggcgatcagtcgaaaatctcaaccgctgcgtacctgcgtgcggtgaaagtgctgaacaatgcgccgtacatgtacaccgctgttctcggcctggggtgctatgacaatgcggcgatcactgcgttaggtaatatctgttctgatcgcctgattgatggcttctttgatgtcaaaccgacattgacgtacacggaagcgatctctgctgttgaagataccggtttacttggtaccgattatgtaagctgtgctgtctatcatttcccgttctcctgcaaagacaaatggacccaatcccgcgtggtcttcggtctgtctggcgcggcgtatgcggcgaaagctcgtggcgtcaagaaaaactccgatgtcggcggttggcattactcaccggctggtgaagaacgtgccgtcatcgctcgtgcatcacttcagccgctgtatcctgaagacaccccggacgaagaagctatggtcaagggccgactcaataaagtatctgtaggtacttcgggccagatgatcatcgatgatgctttaacttgctgcacgcaggacaactatctgcatttccagcacgtcccatccctgatgaacgcaatcagccgtttctttgtccagttagcccgacagatgaagcataacccggacggcattactgagtctggcctgactaaagggatgaccaaacttttggatcgctttgtcgcctccggcgctctggtggctcctcgtgatcctgatgctgacggtacagaaccgtatgtgctgaaagttacgcaggcggaattcgataaatgggaagtagtctgggcctgctgcccgactggcgtagcccgtcgcatccagggcgtaccgctgcttattaagtaa

SEQ ID NO: 381456 - DNA, 816 bp, Salmonella enterica
atgagcaaaaacttttttcaatccggggcatttttggggaatggactgtctcgtttcgctttgaactctgatcctgtgcagttgatggagtctgcccgagcaagcgccgaaccgacaacagatccggttattaataataatccgaaaccggcggcacagactaacgataacgttccatctgccacggctcctgagcaaatcctggaagggaaagacggtaaagaatggaccgtcgaacaggcgcaccagatgattctggaagctgcaaatcgaagtgctatgcagaatgcgttgagtgatgcggccgacgccgttttcgcctgggctgatagcggtgatctgactttcgactcccttgatggtttcgttcaggctatcgctggtatctctgatgacgacgactccgaagttacagaagaacaggacgatgcctataacgaagcatgggcaaatgttgctgacttcctcgcagcatgcggtgtagatgatgacctgatcgaagcactggctgatgatgaagacgacgacgcagctgctgatgttggtgcctctatcgctggtttagatagcgacgaccgtgacgaactggaagcggcgtttgttgttgctggcacttctgatgaaatgctgactgaagcatttaagaaggttgttcgtaacggtgagatcaaactcatccgtaaacgcctgcgtaaaaaacgtctgactgcggctcaaaaatcggcgctgaaaaaagcacgccgtaaagcccagaccggcgcggcaaaactggcccgcaaaaagtcaatgaaactgcgccgtaagcgcctcggctaa

SEQ ID NO: 381457 - DNA, 465 bp, Salmonella enterica
atgaacatggcccagaattgggaagcgccgtttaccggtatgtccatgggatctgtttctggtgctctgggtggttttgtgcaagtaggtactgaaacaacgtcggttgcccgttggaatagcttaatggtttgggaaggggggactccgccgacgttcacgctgcctgtaactttcattgctttgaacaatccattcattgaagtttcaggcgctatcgccgcgttgacagccatgattagcccggaactaaaagcggccaatgttggtggtcgaatcccggagcgcgtgacgctaaacattggtcgccggatcaacatcaccgatgtcgccatccaggacttaagttttgatctcgatgcgccaagggacagtaatggatatttcctgaaaaacaccgtcaacctccagttgaccggttcttcgatatataacagctccgatattgttcgggcgttccagtaa

SEQ ID NO: 381458 - DNA, 510 bp, Salmonella enterica
atggggcacaataacactaagggaaaccgtaaatttattaagggccgctatactgccaacgcggccaaaggcgaacgactggtatcttctgaattccagctcacttttgcaggccatgaagatatcagcgtactggttcgcacgtcgcaaatccctgaaatgacacgcgaggatgtggaggactatggtccgaatggtgtgaagttcaaccagcacggaccaattcgaaactctggggaaatccaggtccagtgcgtggagactatcgaaggcgatattcttcagttcatcaaggatcgcattgcggcgaaggactatgttgatatcacgatggctgctacccctgaatccaaatcttccggggttaacgctgtgacaaaagctgctacaacaattgaaatgttggactgcaaaatctacagtgatgcaatcgactttagtaccgaagatgtgactgccgctgtgcgcccgtcacttcgtatcgtctacaactggattgagtgggattaa

SEQ ID NO: 381459 - DNA, 627 bp, Salmonella enterica
gtgcctgtactgttaaagggggactctaaaatggctgtgattccaatgtcgtactccccgggtactgtcgctcgtcgattttcgatcctggacggagttaccatccagggtgtgctttaccaggttatatgggattccaaaaccccatttgcagctgtaatagaggctgcgccttctgttatcgatggtgatatgcgccataaggttgtcgctactcttgaacttcaacgtcgcccgcagcttgaaggcgtactggtaaggaagttctgggaggatagcgatgttgcccagattgaaggtatcgtggttgatggaaccgtccgggatgtcggtttagctacttttgtttacgaaaccgtagcctcaaaagctggtgttgttttgctcagtgataatgagcaatacgaaggtggaaaagctctttggcaacacatcgcccgtcgctcttccgagctaaaagtgtttatcctcgacaccgatgccgctcagtattacccgtttgacggcgaacgtgtttgctatgacggggtaagtattcctgaatccgagatatggagtgaacacccagatcgaagtaagcatggggttgttctggtcgctgaatccataattggaaaggcggcatag

SEQ ID NO: 381460 - DNA, 246 bp, Salmonella enterica
atgcaatctgattttttacagttagcgatcgcttttgcaggatatgtttgtattggcttctgtgtatacatgatcagccgaaaaatgcttgtcgatatcgaccgcaaagaacgagcagaggagatcttagtatggattttctttggcgcggtctggccattagggatcatgtttgctgcaacatttcttctgatgtggatattcacccttccaggtgatttctatagaaaaaaagccagacattga

SEQ ID NO: 381461 - DNA, 810 bp, Salmonella enterica
atgagcgattttactttttctggctatgaattggcctgctttgtaacacactccggtctatcccgtagcgccgggcatatcctgtcgcaatgtgcaaatctcgcggcaacaaccagtgaatacttcattcacaagcctcaccgcctgatcgcggcagaaactggttatagccaatcaaccgtcgttcgtgcattccgtgaagctgtaaacaaaggaatcctgtctgtagagattgttatcggcgatcaccgtgaacgtcgcgctaacctgtaccggtttacaccatcctttttggccttcgcacaacaagccaaaaatgcgctgattgaaagcaaattaaagatctcttcagcggcaaccaaggttaaagctgttctcgctaagacattggctttatttaattttttatccacacccccatgtcaaaatgataccccctccccctgtcaggatgacgtggcaataaagaataagaagtcacaagttaaaaaaacaaaaagatcagtttccggcggtgccggaacgagcagactcaaaaaattgacttcatggatcgctgaggcaaaagcaaaggctgacaatctgcggttatccaaaaaacgcgctcaaaaacatgagttcaagcagaaagtagaggcggcagcgcggaaatatgcttacctgaagaacaagcgttctcctgatattggcggggtatcaaacttcgataatttgccgcattgcatgacggtaaacgaagctcttaatgcggttttagccaaaaataaagataacgaaaaatggggtataccggcaggattcagagggtga

SEQ ID NO: 381462 - DNA, 801 bp, Salmonella enterica
atgcaacaaacattcaatgcggatatgaatatatcaaaccttcatcaaaatgtcgatccttcaaccactctgcctgttatttgtggtgttgaaattacgaccgaccgcgctggccgttacaaccttaatgctctacacagagcgagcggactcggtgcccataaagcgccagctcaatggctaagaacgctgtcagccaaacagctcatcgaagagcttgaaaaagaaactatgcagaattgcatagtttcgttcgaaggccgtggcggcggcacttttgcccatgaattgctcgctgtggagtacgcaggctggatttctcccgcgtttcggctgaaggtaaaccagacatttatcgactatcgagccggaagattacaacctgctattccgcagagtctccctgaagctctccgtttggctgccgacctggcagagcaaaagcaacggctggagcaaaaaatgcttatggatgcacctaaagtcgaattcgccgaacgcgttgctaccgccagcggggttctaatcggcaactatgccaaagtgctcggtctgggccaaaactatctcttcacctggttgcgtgataacggaattctgatcgcaaccggtgaacgcaggaacgtccccaaacaagaatacatatcccgtgggtatttcacccttaaagaaaccgtgatcgatacaagcaatggaagcaggatttctttcacgactcgtataaccggcaaaggtcagcagtggctgatgaagcgattgcttgatgctggtgtgctggtacctgtcgcggcaacgcgctaa

SEQ ID NO: 381463 - DNA, 1044 bp, Salmonella enterica
atgaaaaaacctctcgtcacccgtaatgacatagccgaagcgatcgccctgcatactgcctgtatgccgacacgggagatccccggcgcaattgccaactatttcatgataaccaggcgtttttatacccgaacagataaggctgtgatcaacaggctactgatagccgagatcagggattatttgattgaacaaggacgtctacgttacgcaacggtggcagcagaaatgagaaaggaggcacatagaatgaccagtaataatttgaatgttaaaaaaccagcacctgttgcttcagcaacgccagcaccagccgtgaatgtcatccccaccaccggagacacaatcgacagcctgacactgttaaagatggtcaatgaagcgcgtaagttatgtggggaaccagaggttcggaacaacaaattcatcgaaaaaatactcgacgaattagaaggtgaggacggttacacaaaaagtgcaaccgtgccgccaggtggcggtacgcctatggttgtcataaccatgacctacaaacaagccctgcgagtcgccgcgcgcgaatcgaaagcggtccgccgttcgctgatcgacaaactggaagaattgcagcaggcaaactcccctaccccatcgatcccccaaacattaccagaagccctacgcctggctgccgagttggcagaacagaaattgcagctggaacaacagctggtggccgcagcccctaaagtcgattttgccgaccgggtatcagtggctaatggaatcctgatcgggaactttgcaaaggtcgttggacttaagcaaaacgcccttttctcatggttgcgccagaacggcattctcatggcttttggtgcgcgcaaaaacgtaccgcgccagcagtacattaacgccgggtatttcacggtgaaagaagtggtgctggatgatgaaaatggctaccagatacggctgacgccccaattaacgggtaaaggccagcagtggttaactcgcaagctacttgatgctggtttgttaaaaccagtagcaataggttaa

SEQ ID NO: 381464 - DNA, 222 bp, Salmonella enterica
atggttaatgccaatccttgcgcacgccaagaattcatctggcgtttctattcctgtaaaaaacaccactatcacttcgttatcgcagcaacagaagacgaagcacgctctcaattgcctgatggcccctgcatttttactgcccgtttttcaactaactcgcgcaattcacttagttactggagcctccccttctctgccaacgttcaggggggtttatga

SEQ ID NO: 381465 - DNA, 318 bp, Salmonella enterica
atgctgattcgtttgtttttagtgctttcctttttaacatttaatgtttttgctgatgaagttgacttttcgaaggtagattgtaattcagtggaaacaagaaaagctcttattgaagaatataacgaaatattatcgtcatatggaataacagtggttgattcttataatcaaaaaactattcagaaaggaataaataaactggtctgttatggggtttaccaatattcagatggctcttcggagtatgttatttataaagcatacccaaatagtcttggtgaattaattagtgagtttaaaccgattaatgagtga

SEQ ID NO: 381466 - DNA, 780 bp, Salmonella enterica
atgaaattatttaatgtaataacattttgttgtgctatttttgctggaagcgcgatagctgataataaattgccagattggctttctacctcaaagaaagattatgatttagtaagggcattctatttgtctggatttgcttcgaaagcaatgaacaatcaatttggttatcatttgccatctgagttggttaatgattttaaagataatgaatttgctgctcaggaaaaatggaacacaattccaattgtgtatggtgaaataaaatccataagaatggtgaataataaaccaattgtagagttatttactccaggggaaaatgcaacgccactaaattatatcaaattgaaaatattggattcaaagcaagactctctgttaaaactaaaaaaaggggatgatatatatgcagtgtgctcaggtgctaattttagcttagtgccaattctgagcaactgcactcctgcaacagacgtcattgatgctgcactctctttttctggtgaatatatgttccctgcttttgattctttttcgcctactaagcaaaacgtcaaatatatattcacaaatcaagatcctgttcagatgatgaattttatagggtacctatccttagtcgatacaacgaaggataagaataaaatggatatggttcgtaagtgtacgccttggaagccggaatgttcacaacaattcgttgatgtaatggaaggatttgatagcatcatgtataaatatgagggagaatttaaaaattacatagaattaaaatag

SEQ ID NO: 381467 - DNA, 567 bp, Salmonella enterica
atgacaccacgacaattactcgaagacgtcaaaacccgcttcacacctttgattgcggatgaatctgccttactggaatccctgctaagaaaagcattgggaacctaccaggatagggcggggcacatcaagcggatacgcatcaccgatcaggccagtaaatcacttgcttgcccagctgattttcttgcgctcgtatcggttacagatcacaccggcgatcttgtctactccgacgtttacgatgggaatatcgagcttgaagatacccatcgagcggtatacccactgaatgtgtcatatctggctaatttgcgtgatatggatctggataatggggaagtgccacctgaaatcattgggttactttctgactatctggaagtgctaatcgcgatacctaacactgatcgcctgcgaagaatatctatcgcggggaaactcgatgccagcaatttatccgacgagaacacgctgtatcagcgaaagctggatctggaagagaaaatgagcgcaacaagggcaattatcccgggaattgttcttttctcatccatgttgaagtga

SEQ ID NO: 381468 - DNA, 612 bp, Salmonella enterica
atggggcttaatgttgcttcagtaaagtcttatgtatcttcggcattaacgacgacattatttggctccggcgttggtgagcgggaagttggtaagctgacgtcaatcatcatgaacaaaatgctgttcgcgcaaggatggcagttctctgtcgaagttgatggactggagggggcagacttctttgccaaagatattacctaccacgattacagcatcgaatatgaaacgattaaaatcggcggagggaatatccttcaaccaacggagcgttcgcctgggcagataacaatgatggtcagggataccgttgatggcctcgttttggactggtttaagacggcaaaaagtcgggtgatcaatccggacggtaccgggaatataccgtctaaatatttgctcaatgtgcgtatttatcggttgctgtcttccggcttaaccaaactggaaaatgagatgacggtattcccggtcactaccggcgatgtcacctatgcgcgagatcaggttactgaatttaagtcattcccaatgaccttcgcattgcacagcacgtttaaccaatcctcaagttctttggcttcccttctgggctttagcttttctctttga

SEQ ID NO: 381469 - DNA, 882 bp, Salmonella enterica
atgcttttacctcttttcccgctaccatcgcggccaactgaattgatccagttccgtcagccaaatattgctgatgcgatgcgtttcaactcgataacaccggaggaacaagaacaacagacaacggcgtatttaaaagccttgctggctgaacccgcgaaacatgatcccctgacatggacggcgcaggaccggattaccgcgttatggtggatatttactggctcccgcgaaacaccgatcgagacatttacctacacctgtaaacattgcggtaaagagcattattacgattgcgatatgaatgctctggctgaagatatccaggtcctggaagtggaaccgttcattgacgatattgaggtgtctgtagagggcgtgccttatcaatggcgtatcgtgccgcttgatggttgggcaatggaaatgctggagatgcgccgagcagcattgccacctgaagacgacgcggaattcaaagaagcgatcgttgatttgcgtttttgggaattcgcttatcagtgtgaactttataacgatgttagcggtactcgtgaagagcaggctgagcgtcgttatgaaacgatcaaacggatggccattgatactgaatttatgaagctggcggcacacatccggctggctcatgaaaagctcgaacatggtttaccgtgctacatcgataaaggcgaaatgcgtcttcgtctcccgccgcacaaatgcccaaaccaggatacaaaggagtccacagagggtgcgtatacccgtctgtgggtgccctttcgggctaccgacttcattccacaggtggggattgaaaagctatcagaccttagtgtccaacctggttttgtatgggggtataccgattcaggacgctga

SEQ ID NO: 381470 - DNA, 3987 bp, Salmonella enterica
atggaaagaaaaaacgccaatattgacgatgttataaggacagttgaaaccgccagcgcgaaagagctggaagagcttgcaggtattcgggaagctgttgaagatttgaaaggggaacgagttgcaactgttgatcctgtctctcgcagtgtgtcggcattaaatcgcacaatcgaaaattcccggccagactttgtggccaatgcgccatcagtagaccctattgttgacgcaatgaaacggcttaatttaggggacgtttctcgtatacgggaggacaaagtcactaaccgtgaacagcaggttgcaccaacagcgcacaatcccccaaatagacgaagagaggcaataacagaggatgttaaagcacagcggttagaaacggtcaaactcgctcgtgatttgagagggggacgcgttgcaacggttgacccagtatctcgcagtgtgtcggcattaaatcgaacaatcgaaaattcccggccagactttgtggccaatgcgccatcagtagaccctattgttgacgcaatgaaacggcttaatttaggggacgtttctcgtatacgggaggacaaagtcactaaccgtgaacagcaggttgcaccaacagcgcacaatcccccaaatagacgaagagaggcaataacagaggatgttaaagcacagcggttagaaacggtcaaactcgctcgtgatttgagagggggacgcgttgcaacggttgacccagtatctcgcagtgtgtcggcattaaatcgaacaatcgaaaattcccggccagactttgtggccaatgcgccatcagtagaccctattgttgacgcaatgaaacggcttaatttaggggacgtttctcgtgtagttcaggagggcattgctcaacaggaacagcaggccaaatcaactacaccaaagggtaaaaaaagacgcaggaaggctataccagaggatataaaggcacaacgtaccgaagcagccgaacacgctcgcgaaatgttcgatcaaaaaggcggtgcgcaaaaaagccaaaaccaacgcgatgcgcgtggtcgttttattggaaagtcagggagtaaggccgcagcggaagatgcccgtgctgaacgagcagaaaaggccaggcgcaaagaggatgatgagcgtctaaatgctgaatcaggtttattaaaaaaactgtcaaaagtagctgaaggcataggtaacccttcagagactcgtgccgtcgatgcgttaggttatgccgttgctggtccattgtgggcagcagggaaggagcttggcgggatatcaaaagaagttggtggatcgcttaatggtgccagaaagtctattgccgatgtgattcgtggcaatgacgataacagccgtagaaaaggtttttttaggcgtaaatcgcaaaatagtgccgatgtcgttcaggttaacacccaaaaacggacggttcaggaacttcaggagcagaccagcgaaattaaagagggcaatgacaagattctcagcgcccttgatcagatagccaaaaacaccgggaaaaagaagggcggcttgctgtccaaactatttagcctgttagggaagggggccggtggcgtcgcgtcgttgttaatggggcgtggcatgctgaaaaaagctggagcactcgcttttggcgctctgggggcaaagaaacttgtaggaatgctacgcggtggtggcaagaagactatcgcccatgaaggtggagatttggctgcccgggcagcaggtaaatttggattaaaggcagttggtaaaggggcgttacgcgcaattcccttagtcggcacagtggctggaggtatttatgatgcggtaaccggttggaatgatacagaagcgcaacgtcgagcgtttgggcttaaatcaggacaagagccatcattccagcaaaaagccgcttatacgttagccaatgttcttgatttggggggactggtatctggtattagcagtgctattggtgatgttctcaaatcacttggatttgaggatatcggcaatatgttgcaatcattttcgacggaaagtattgcccaggccattgatagcggggttaccaacttagaaacatatatttctaaccttggcgacaccatttctaccaagttcgatgattacacagcaaagattggtgatgctgtttcagcatggtttagcgatacatctaataagctgcttgaaaagctggatgccatcaaagacttctttactgtcgataacctgaaacaggttttcagtgatgcaattgatagtgcaattgatttcattaagaacccagggaaacgcattaaagaggcggctggtaatatttgggatggggttaaaaatttaccaggtaaagcattagatgcagcggttgatgccgttaaaaatacccctgcggcaatgattgtatcaaaaatacccaatccgatcggcgaggctaatgcgaaagaaatcactccagagttaaaagctccggttaatagccaccaggagacatctgattctaaaactgaatccgatgccaaacagactaatattgttacccgcgtgataaatgcggcactggacacggcgaaagatagcaataaaacagttaaagaaactgctaatcagattatcaatgcaaatgccgtagaaacgggcaatagcgcgttgcagagaattgataaagctattggtcaaaatagctcgtcatcatcgtcgcttaataccactggcaccaggaatgacattcagaaagctgcggatacctacaacaatggcaacttggatgtaaaagtcggaagtcttggcgctgaaggtaaggcaaatctcgataagttggctccgtattttgccgaactagagaataaatacggtcttccagaaggcactctttacgcgattgctgcaactgaatctggtggtaatccgtatgcaaaatcccaaaccggtgctctggggatgtttcagttcacggggattgctcgtgaagagactggcttagctgaaggtgaatcgtttgatcctgtgaaatcggcagaagctgcggctcttctcatgagcaaatatctgaagcaagccaatggagacttaaacgaggccatcactgcatataatgctgggtttggcactatcaataagtggaaaaaaggcacaggtgacttatcgaaagaaaaccgtgagtacgcgatcaaggtcaatactcatcgtgctcgctatttaggtggtgaaatctatacacctggagcaggagcacagggtggggcgcaatatggagtgaggggaccactgcctgataacgctgttatcgatcagtctactggcctggcgtttacccctggtgatagcccgtttgagaaaggcggtctggtagacaaaattggcaatgctgttggcgttaacgatctggtcaacaaattcatgaatggccggggtatgcgtcgggaagtcgttcagggaacgctcgaagaacgtgcacgagggaaggggaccgcaacagcagctggcaatgtgtatgttgatactccgatgccagttgaagaggcgcgtccggtggccagcaactcaagttactttgaccaactcggcgcacaaatggggattgatggactatttgataaactccgcaactcgccggggatgcggaaaaataatgcgcctgaaccagcctccacgtcccaggtgacgactgccgccaacgatttgcagcaaccaaccggtcgtatgcagatagacggacaggttattagtgaccttggcggctccggtgccaagccgacaatgcagttggctgataataccgtttcacttgatggtgaaacgaagcggctgtttgcgcagatgacctcattgcttgccaggattgaagagcacactaaagactcggcgaaaggccagggaactgtcgtaaaggtcagcacgcctcaaccgggcgttatgcgcacggtgccactgtcaattgatgatccgttgatgaatgactacgcgagagttgattga

SEQ ID NO: 381471 - DNA, 357 bp, Salmonella enterica
atggccaacaataatgaaattgatcctttactgacgctggagttatccggcgtaaaaacgtatgagtcccaggaggaggcctggggcgctcgtttatatgagtggctaaacacttatcagggtgaggtatacggagatccgtcatggggcaatgttttaccgcagtttaaacacgaaccgaccaacttgtcgcatgttcaaattgcggttgaggcaatgctgttgcaaaaactgacggtagatttacctgacataccgatttctggcttgtcagtagccgagggagatgcttttgataagttgaaaatatccattcgtatcagggatataactatcacacaggacgtggtgctatga

SEQ ID NO: 381472 - DNA, 1434 bp, Salmonella enterica
atgagtaaaacaacaccgactaaagacagtattcgtgcagagtttgaagagcttgtcgagaaagattcattctggtcgaagtttgtcggctctcaatttgtctcgatgctgacattgtttattacccagattgtctacaggtgctttcagtatgccgatgcggcgctgtctgaaggctttatatcgaccgcgacgcggcgttcctctatcctggcagcggcagaaacgaatagttacgttggtaccaagccaacaccgtcatcggggatgattgagatcaccgccacaagtgaagatgccccagcggtaatccccaaaaacatgcctttaatatctgacgaccagtacccttacatgactatggatgtatgcaggttggttgacggcaccggtacggtagaagtggcacagttggaaatccaggaggtgacatataccgttacggcagccaaagaatttctggaagtcgtgttatcaaaggctctcactgctgtctgctgtaagctggaagtattcgtgacgaccgatggtaagaccacgcagtggtcttccagcactatgttccggttagccggtagtaaaagccaggtctacgttgagttttataagccatccgagcagttgggggttcgattcggtgatgggctaattgggcaaataccgccagaaggctcgaccattacacttaaggtatggtgcaccaacggagatataaccctggttgctggccaaaacctgactcctgtcgattctgcggctaatttagctaatttgatttcagttaagacaacgacacccataaccgcaggtaccgatgccgaaacaacggagatcacacgtaatcgtgcacaatattaccttgcctatgatgatcaggtcgtatggggcggggactatacgtattttctggtgcgtaacatcccgggactgtcctgggtaaaggcatggggcgaaggccagcaagagaaattagatggtgcttataatgttcggaatatcaataagatatttatttcaggatggcatccaaacaaaagccagtcagagcttgaagaaatgatcctggctgcctttaagaaggtgccgaatgagttgaacaagaaattctcgtataaagaggtcagaaaactcccctttaagatcaccatcactgggcggatatcggcaagcctgaccattgagaacgtgactgatgagctgaagtcggcactggaaacaaaatttgggcgtgactcaactttctttgatccgaaccgtgtcggcaagtacatcctaatcaagaaaaaagacgtttgggcatttatcgaaacgctgggttatttccgcgacttttatctggaatttgtcgagtggaatgagtccaacggcttttacgatttcgtttatctggatacagaaaactccacctttaatatttcgtatgaggaggagtga

SEQ ID NO: 381473 - DNA, 837 bp, Salmonella enterica
atgcagcgttcctggtttaataaccggcttacatcagctaagcaaaagtcattactttataaatcattggctgatttggttcagtcaatgatggacacctttgttgacccatggttggagcgaattaccaaccggaagtctattttctccatgagcaaggaggatctggagactaggacaaatgaacttggccagttttttactatcaggacgtcgaattcatcttccgttccgatgttgttacaacagcggtttgatgagatccattttaagggtactgaacgccctataaaccagacaatttatcgcgaatttaacggtatatcggttttatgggatcccatatatgctccggtggactttgaacgtcatccctatggcacggtcctgattccagaaagcacactggaaaccaccggcggcacattcggcgagatgtttctgacttccagaggaatgatcagtattcccataaacgacctggcccggacaatgggtattactggaacgatagatcagtccgcaattacagaagaaattctcagaaagtttaatcagttcgtaaagcctctactgccactgcatatagtgtttgatgggcttacgctctatttgtcggttgttgtaaatgaacaggccgacatgattactttgaatgagatttctgataccgaaaaagcattctgctggtttgaaacttcggatacaacttcgcttactgaagttacgtcgattaacgccccgatcactgcaacgccgggcggcactattgtgaaagcaacgcctacgtttgatcgcacccgcgcagatgatttgctgttggatagcgatgcgtga

SEQ ID NO: 381474 - DNA, 435 bp, Salmonella enterica
atgtctgacgtctcaacaaacctctataagagtcagttgttggactattactatcagcggcgcgctgaatcgtccattaacaaaggctctcgatttttaatcagcaaggccgtttttggtaccagttcactggttactaagaaaggagatggcacttatgagattggagaactgcctaaggctttcgatctggcagaactgaccagtcaattttgcaccatcaacctcgtcccaacctactcaggcgggataattactgtccgaatggaccttgatcaaagtcagttgcaggaagggaaaaactacccattcaacactctggttgttctggataacgagaataagccaatcgccattatttgtgtccaggaagactcgctgtatgtgggcaaaacatataccgcagttatggccataaactcgactacagcataa

SEQ ID NO: 381475 - DNA, 207 bp, Salmonella enterica; identical to SEQ ID NO: 26433

SEQ ID NO: 381476 - DNA, 225 bp, Salmonella enterica; identical to SEQ ID NO: 26434

SEQ ID NO: 381477 - DNA, 207 bp, Salmonella enterica
atgaaattgttctacagcaaacctgttcgctttatcgtcattatctgcgtatttctcctcggcgttgataacctgagcgatatgttcgtcgatatctcccgaccagtattctacggcggtctcgctgcactcctggccgctgccgtcgttattgcccgcgttgattacaacaagaacgcggaaaaaaaggccagccaggtccattaa

SEQ ID NO: 381478 - DNA, 261 bp, Salmonella enterica
atggttattgacgctgagaattcggaaatgcatcaagtacgtgattttatcgctgcaaactggagcctgtttacttcgcacatccgcgagaaaagcatgactgatgaacaggccgaagaggaagctcaacgcatttttgttgttgtcggagggggaagagtaaaggcatttgcctcgctcagggattcagccaggtgctggatatgcacgttattttcaggtctgtccgctaatctgtcagccggacagccctcgttataa

SEQ ID NO: 381479 - DNA, 492 bp, Salmonella enterica
atgaccacattaacattcgaaattgctggggtaaaaaagctcctcgaagaactccgctcggcgaaacggttcaatgcaaccattgaacagctttttgaaccgtcaaattaccccggcggtactcctctcaacgaagagggcaaaacagaagtggaaatgaaccagacggggggaattttctggccatcatccaaacacattgacccggcccgcctgactccacagatccttctggtaaaagatcatggcgtctatctgattaccaatgcatctctggatggaacccctgtttcccgtgatacggttgtctatgcccgtgggatgaatccgtctgttgatgatgaatggtatgacgaggcagaggaggcattgggcggcgatgatagttcggtctctatcccggtggcgtggtttgaactcgctcttaaaaagaaatttaatgcttttagtatcaaagtatcccccacaaaaatcactctggtgaatggataa

SEQ ID NO: 381480 - DNA, 309 bp, Salmonella enterica; identical to SEQ ID NO: 26336

SEQ ID NO: 381481 - DNA, 381 bp, Salmonella enterica
gtgaaatttatccttatgtttttcattttagccattctgatctggggttttacaggtctgacttttaaagatgccattctgtttacatccgtcggcctgagcatttcggttgtggctttgtctgcgctgcttgtggtagctctgacatttgtcatggctgcaatgtatgcggctcatgaactgggagcgcttggtaaaatgattatctctcaggtcgttctggttggattctggaacctgattttttctgttatcccggacggaaaattaatttcgttttttggcgttaatgtctggcaatctggttcatatctagtttacttcatgacggtgttggtagctgttttcgcagcgtatatcgcgctccagaagcagcgatag

SEQ ID NO: 381482 - DNA, 249 bp, Salmonella enterica; identical to SEQ ID NO: 26334

SEQ ID NO: 381483 - DNA, 222 bp, Salmonella enterica; identical to SEQ ID NO: 26333

SEQ ID NO: 381484 - DNA, 384 bp, Salmonella enterica
atgtttttgcaccttgtaccaaaaatcccgcatccgatgggaaatctttgcacgctggattccgtaagcgtcccggaactgtcgctacgcctgactggtaatgaccttgttgcgatgcgcccttaccaggcgggcgcatcattcatagacattccaggtaacgtccgttatgccctggagatggccgcattcagtaaagcggtgacaccggacgcggtcagttatgaggataataaaaacgcgttagtccgccaatactccaatttagggaaaagtagcttttttgccgggggaattctggcgttaattggtctgctgatattaagttgcgtaaggaggcttaaccagcgagtcaagtttcttaattcgtttgcttacaaatag

SEQ ID NO: 381485 - DNA, 177 bp, Salmonella enterica
atgtgtgaaccatgtgtgaaaggagacagcacagtgaagatacgtggaatgctttttaatgatgaaatggtccgggcaattctggcagatcagaaaacacagacgcggcggattataaagcctcaatatagttcggatgtcttctggttcgaaatacatcaggcgacggcacaataa

SEQ ID NO: 381486 - DNA, 225 bp, Salmonella enterica
atgcctattcaagaaaaaaccaccgttttcgtttttaatgcctgtcatgctgacaaggctgctgctgccagcgccaatgcactgcacagcctggaagttgaatacccaatgaccctgaatgatttgtcattgctgtgtgagtccgtcgctaaagcgttggatgtacccggcggagtgaaatatgaaattacgactgagccggtagtggatggggaatacgattaa

SEQ ID NO: 381487 - DNA, 465 bp, Salmonella enterica
atgaccgatattaaggagaaacaaaatcactttagtaatttaaagtgtattgcaatttcctggcattttaataaacctactgggaaggagcaccttcttttatttgttgccattgtggcatggattttcccaggactggtgtttttcaaacattctctatggggcggactcctgttctttttttttgttgcaggtagttatgcattcctggcttttcctcattttactcatcggaagaaaatctggaaggaaaggcttgaccagtcgctgaaagagtatcagccgcttgatctgcaagcctgggcgtattttaaggaccgcgttagagaggaaggcatgacttataaagcctgtgagtcgtggatgagtactgaggctagtgcattatataaaagccccaaacaagaatggtcatttctcgacagcacttcggttggagaaaatgataagtcacaacccgattaa

SEQ ID NO: 381488 - DNA, 2376 bp, Salmonella enterica
atgtatatcgaaatgaaagaaacattccttgaattaccctcagaaattcaattttctgaggcggctaacgctgccattctgacgcaggataaatggggcgatgtctggcagacactgaagaccgatgcggatctgaattatactgatgccggtgagccggtcagtctcgcttcgcgcgtgacgacggcaaccagtgccatttatcatgcgattaccgaaggctggaccatgtgcgtcggctacagcggcgggaaagactctcactcgctactgcacttgttccttatggccttgatccgtgcagtacgaaacgggtcgaacgtcagccagcaccacttcattcagatgtctgacaccctgattgaaaaccctgagatgcatcatcaggccacgcaggttctcagccagctcagagcctttattgccgaacaagaactgcctttgaccgtccttgtggcccgcccgtccatgacccagagctgggtcggacgcattctgaccgggcgtggacttccaacctggacaaattcttctacgcgtcaatgcgctacagatctaaagcgttctccactgcgccaggccaaagcccgttatctgaaaaatgcacctgcttctgtccgcaacaaagtgtgcctgatgctgggttcccgcgatgatgagagcgcccgtcgggcagacaacatcctaagaatgggcgggcaggcggacagcgtctcgctcacggagcacggcggcgaactgtacccggtgaaagagtggcgggcacaggatatctggtcatttctgatggcctgtggttctctggcgcgatttccgctgccaagctttttgccggacaacttcagcctcgccacgctttacaaagacgcgaccggggaatgtatctggacgccggagaaatccactgtccggtcttctgcctgcggcgctcgctatggatgctcgctatgctgcgccgtcggcattgatcactcgatggaaaccttactccgcactgaccctgagaagtacggctaccaggctggtctcaaccgccttcagcgtttcctgaccaaaattcagtacgactggagccttcgggattatatcggacgcaaagtgtttgagggcgggtatgtgcgtcttcagcccaatgtgttctcgtcgtccctgaccgaaagactgttccatatctgttgcagcctcgattacgtggaggctcagcgggccgcagcggtgcatgaaaagttactttcaggcgagatcgaagataccgcgcataaccgccgcatgtcggagccgcagtttcgactggtgcaggaggctaacgtgctgcatatcgactttctctggtcactgcattgctttaacccgcgcccatttcgtgccattgaactttaccgccaggtgtgggaagggggggcactggatcttctcgacgatgagccagctatgcaaccagtaccccgcacgccgatgccagcaccacgctggatgaagttgccggaaggccgtatcgggacgtcatttgacgggctgtccgatccgtcatccgaaatagcctattttgacggtcgggaggatgagcgagcttcccgcagtctgatgagtagcggggaaggcctgaacatcgttgcattcgaagaagaggatgagctgacggtcgatgaagacacggcatcctggattatctggcatgaatatgacggattacgccagcgtgtgtctgacggtgagtttacccctgtggcggcggcacagtacctgcttagatacggcgccgtccgaatttcgcgggggaaaggtgcggtgtaccatcgactcgctcaacgcgggcaggcctattcacgtcttggcattaacgaccagacgccgctgccgtctctgctcgccagccgccgtttcaagatcctgaccgacagcgattatcgcttgctcgtagcccgcaaactgcgggggcagcggcagaaactgcgcttctggtgctgtgttgcggcctgtgtggcactgcacacctacaacaaaacccctctgggggggtggataacgacgcaactggagacagaacaacagctacatctggcccggacgggagacgaactgaaggcaaggactcttgacgctgtcctgaccctctgtaacctgcggatttcgtcacagcaaccggaagaacgtctgtattaccgggccgtaagaaaacgctttctggagacattagccgggtgtatttcgccggagcgcgaaggaaccttacgggaagtcatctgggagctgcggatgttatccggcccccagtcttcgaaaaagacggggttccggcatgtggatgaatgccgggagaggacggcggcgttgttaaggcctctgttgaaacgtctggtccacctgctggcgtga

SEQ ID NO: 381489 - DNA, 447 bp, Salmonella enterica; identical to SEQ ID NO: 26324

SEQ ID NO: 381490 - DNA, 807 bp, Salmonella enterica; identical to SEQ ID NO: 26323

SEQ ID NO: 381491 - DNA, 189 bp, Salmonella enterica
atgtttgatgatgaggaagaggtgatgctggtcgaagcggactcctgcggtgaagctgaagcggcattccagcaacatatcgacgaaggtgtagcgcacttggatcaggtgcttgttatttcgtctgcgtccctacaatcactgttaccagacaggctcattgcttcctccctgacacataccgtataa

SEQ ID NO: 381492 - DNA, 333 bp, Salmonella enterica
atggaatccgaacagctcattactaaaattactcagacactgaaacgccccgacggctctgaagtacgtattgtggtggagcaggcattcggcagtggcctcacgccttcgctgggtgtatatgtcctgcgtcgcccgaccactgccaacaactggcagttgtgcaaaaccgcaccgcacaaggactggcgcactatgtcggtggatgaataccagaaacacgggcgttcggaaatgcttcggtacgtctccatcggcgaaatccttcgcctgagcgccgcgatcggcaaaccaatgagctacgttgatacctgtccgggtttacagggctga

SEQ ID NO: 381493 - DNA, 1146 bp, Salmonella enterica
atggatgcgatgttttatattcaggccagcacaaaacaacaggcaagcttcatatttgacttcctcgccacccggctgtattcgcattgccagcttattgaacctctgaatgaaaccatcattccctccttaagtcggacgacgctttcattacagccctggtcccagaactcccagacccggacgagtgagatgcagatggttacgcacggtctgacactctccggggcagtgatggtggagcactcccgccagatcgtcgacttctgcgataacctgggtcttcgccttgatgctcccaccggaaaacccggttggacagaactgatcaataccgactgcgaacaactcaattccccgcgtctataccccgtcctgatccaaccgggcactgaaggacagtttcagatttatgttccagctccggctgtcattgacgccgatacggtcattgccagtgtgatcgacgagtgttttagcgatgttacctcgtactgcttggccggtacgccgtttccaatgacggagaaaccagtgatccgcatggaggcacaccttagtgacgcacatacccgggtttttgagctgacattcatcagctataacctggcgctctctgccacggtctatgacaaaaacctgcgccaggtactgatgttatgtgaagactttggcgtcactcttcaggggcgagccggtgcatcctgtcatgcctatatgcgtaacgagtaccgacgtcttgctcatgtcggcgtctactcacgctccggggctgaaaatgatgttcgcgcctacagctcagataaagaggaaaccctgatccgccagttgatgactcaggcgacagcggggagcgcgttgattccggcgcggcacggaaagcaatttaacggcgtgctgatgaatgccaacccgtcatcagccaccactggctttatctacctgtcaccggaattcccgcaagggcagtttatgatgacggcggaagttgtgaaatccagttgcacgccacgggggatcagctacatcgaaacggtggacggataccgttttattgtgacggcatatgacacgaaggcgatgcattccctgaccgaatttcttgctgttaacgaggactattttgccccttatcgctgggagtag

SEQ ID NO: 381494 - DNA, 297 bp, Salmonella enterica; identical to SEQ ID NO: 26319

SEQ ID NO: 381495 - DNA, 468 bp, Salmonella enterica
atggataaatactttgaccgtagcggaatggcaatcgataacgctaagattaagtgtattgattcagtaaaaggcaccggggaatatatttaccgtgttacttgcaataaatgcaatggacgtggcgaacgcaatcacttttataagagccgctgtattgcctgtaatgccactggctatagcctggtcactacccgtacctgttacaccctgactgcactgtatcgcatatacccagaagctgctcgcaagatctcagccgctcaggcagcagagcgtcaacgtgcttttcaatcaaagacttccgcgttcaacctctggtgtcagaaccaccaagaactggtggacgccatcacgcagcaagacggcgagaacagttttttgaacagcctgaagtcgacgttatcacgcaaatttccattaagtgataaacaactgacggtcgcagccagaatcctcgggatgtaa

SEQ ID NO: 381496 - DNA, 777 bp, Salmonella enterica; identical to SEQ ID NO: 26317

SEQ ID NO: 381497 - DNA, 777 bp, Salmonella enterica
atggctaaattaatttcgacgcgtgaactggcaacaattattactgcattactggtaaaaccagaattactgggcgagctggattccccagaaaaacatcgcgccctgatggaagatctggggcgtgttgtggcagagcattgtggcggtaatgtcactgaaatcgcactaccggagaccgatggtacggctgctgaaggcgcgttgcagaatggccagcccgtccgctatctggaaaccaaagaaagctctccgtatctcatcgtacaccctgacgcctcactgccgtcggtgacgcaaaacgtctggatgcacgctgatcctgatggctgggaagagcatttcaacggagagaccgatgccctgactccagagatgagcgagcagttccgccagcaggtttatgcactgctgacgccggaatcccataccacctcttcagaaatgagactgactttgcaggactggcaactgggtgaagccgagatcccagaagaagactgtcagccctaccaggtgaaggtgttagcagaaaataaaaacgttcagtgcgaagtgacgaatgaaaccggcaccacgtgtttcggcctcattttggagatcgaccgtggtgtaccgacgctgcacattgatacgggcagtgattcactgctgcacattcacgcggcacatgacggcctggttctgacaccggatgcaccgagccacggatttgaagatgctcctgtagatcgcttttcttataacagcccgtccctgttggtgcctggggtgtaa

SEQ ID NO: 381498 - DNA, 123 bp, Salmonella enterica; identical to SEQ ID NO: 26315

SEQ ID NO: 381499 - DNA, 342 bp, Salmonella enterica; identical to SEQ ID NO: 26314

SEQ ID NO: 381500 - DNA, 264 bp, Salmonella enterica; identical to SEQ ID NO: 26313

SEQ ID NO: 381501 - DNA, 180 bp, Salmonella enterica
atgaagggtaaaaatatcgtggctcgtgtcgtgcgggaagcggcctataagtgggaaactcgccaccaattgcagcaggcgtacaattcagcgagtgacgtgggaaaagttcccagacattccggttccgcatctgatttacgccagacgctgtcatttttaattctttgtagggcatga

SEQ ID NO: 381502 - DNA, 699 bp, Salmonella enterica
atgaaaaacacagtaataccgacggtgactgaaaacgagatgggagaggtgatcccccgccactcggcttacggactggtatcagtaagccgcacgtccacgacgggacagcgcctttatgcctccgacctcagtcataaagaggtagtcacgatgaccttcagtgaatcagagcagattgaacgcgacggtgtgatccgtcatcgactggcggaaggccgacgccgctcaccgctcctgcaagtcagtctgtctccggcgcagtgggccacgatgatcacatcgttcggaatgagtgacggcgtgccgtgtaccattaacagcctgattcgcggcgattatgagcggcagccggagattggctatattgagtcgacacgcgaacgatacgaacggcagatccgggaagccgctgagcgtgaaatggcgaaattgcatgaaaagctggaagtgctgcgtttgctggcggtaaaaggcaaggctggaaagcgtgagcttgacgaagcctatcagtcgctgttaagcgtaatcaataacttgccggtcaatctggccttcaccaaccaactcattcaggaatccatggtgaatatcgtctcacacggcaaggccgaactcgaagccaccgccatgggcgtagccgctcgtctgggtatgaaagaaatgagcagccttgcctcgctggaagagaagaagtaa

SEQ ID NO: 381503 - DNA, 297 bp, Salmonella enterica
atgtcagaaattgctgagaaacctcttatcacgcgtgtagctcccttggagaggatttattattgcgcttcccgggcagagggtctgaagccagatcgccatgaaattcgaatgcagagccagtttttgctgcttggcgtcatctggttaccacctgcactcgctatggcagaactggaacgcctgctgaagggatatgacgctgaccacagccggttactggaaaacgtcctggagactgcccaccagcaattcctgaagttctgtgagccgcagaagagagaagggggggcgtag

SEQ ID NO: 381504 - DNA, 2385 bp, Salmonella enterica
atgaaattttgccgacgtccgttgattgtcgccgtctatacggcactgctgttcccgctttacagccaggctcagctttacaactattcgtataccgacacacgcggcacgaaagtgaatgctgaacccaccagagagtatctcaacccgggcagcgcaattacgctgaatctgatatctggtctcgaccgctacgagcgcgttaccgtgacacgttcatccgataatgtgcagatgttccagagtgtcaccggcctggtgacagtggccgacaggatcactgccgctgatggtagtgagtactacggcaagtccatgacactgccggtactgggcgagggtactttttctcttaaatccgaaacactcgacaataagtcgaatgtcgtggcgacaaccagctactctttcagcatcgatatcactcctcccgttctaccagatccgatgcagtggatcagggctggttttcagtacggaagtctggatattttcggcgacaggaccgcaacccaggccatttcgttatcgaacgtctctgatgcgaggtcaggactggataaagcggagtggtttgctattgacagcagcggtgtccgccggactgtaaatgctcagctgaatgcactcacgggggtggtccaggcactggcggcggtggcggcaggaagcacggttgcgcccgtcagtccggcatattacaccgtaggttttcgggtttatgacaaagccgggaactggacagaaacatcacatcgctctggtattgatcgtacaatacccagctacattcaacatcaggtgcggaatgcgaaaacaggcgtctgggaagattatgttcctggcatgactattttcgagaacccagtcaaattcaggtacaaacgccttaaatcggactcaaccaattttaacgggacagacttcggctgggtcgatcagattaccaactccgacaatacctatttttatactgaagccacggtgagctacccggaaacctatatgtactacgagcttcatactaaagcgggccttaacgtcaacctccagtacaaaacgctgaaatttactccgggtaacggcgtggctgaagccccccgctatttgtcagggcagtaccatttcagagatgctaatacatggacttcgagtgacatcgtcaggtttaccgggccggattgcgtagatttgggtcgtgtaaacgttgaaccgcgctcttatgtgcaaactgctactatcgtcggcattggcagttgcaatgtttcagtgggtgagagcagttgccaggtcagcatgaattactgtaagacgagcgggaaaggctatgttccgtaccaaattcatatcagagggaccggttcatacgcaaatctcggcggactacagtcgcatttctacacctactgggatatgaacgccccggttatcaacagtatcgtctccagcccactggataaaacggtggtaatgctggtgacggacagtgacgtaactaacgactggaccaattatatgtgggccaccaatatctttaacctcacactgaaggacaccagtaataaagtctctaccttgtcgccgaaaaacgttacggtcctgaactaccagctgaaacaagtgacgtttgattacagcgcgttaccctccgggaaatacactgcaacgggtgccgcgacggacacctacaacaacacggcagaactgacgctatcgaataccatcctgcatgacgtcacgccgcctgttgtcgatatcagttttgagggaaagcaggctgacggagcactggtcaaagggctggaaaatctggtgatcacactggccgacgatatgacaaaagcttccctgaaaagcatcacgctgagcggcggacccacttctgacaaagtcagtgtgggctggtacagccagggaactgataaatacgggctgaactacccgcgtatcttccccgcgacagatgatgcggattcctaccagcttactgcggttgcggtagatgaagccggtaataccacgacaaaggtcagccggttccgttatgtaccgaacaacctgattgaatttaacactctcaaaacgctggccgtgggtatggggctgaagacatcagataaccagccgctggcgtatctgcgtaccaatagcatccggaaaaaagatggttcgctgatcactggagcacaaaccggcacgctgacggtccgcaaagatgcggcctttgcggtcagtatgaatggggtggccgtcgtacccggggattcgaaagacatcacgatagatttcgggcagggtgatggcgtcctgatccccatcttcccggccaccagcggcaatgtcggtgaatcaagcttcatgatcgagctgccgcaaatccagtaa

SEQ ID NO: 381505 - DNA, 609 bp, Salmonella enterica
atgaaaaatcaggctatagctttggctatggctatgctcggagtctcagttccggcatctgctcaaatttatgaatccatcttcacagataccaatggtattgaagttcacgccccctcaacccggctgttgctgaatccggcctcaccggtaaccctgacgctcattgccggtcttgaccgttatgtgaatgtcaaaatcaccagcgccaccggcacgcaactgctgaacaccactactacgcgcaccagcgtatccgaccgtctgaaggccggagatggcagcgaattttacggaaaaaaagtaactttaccggtgcttggcgaaggcaggtcggttgtgcaggtcagtattctggatctgaatcagtccgttgtagccacctacagctacaactggctggtagacaccacaccgctgtctggtaatgccctcacaggcaacgccgcctatggatcaactgcgggtagcgtctggaaaatggggctggaggccacggggcagtttgattttacctcaaccaatgtcacggacgtaaatggcatcgagaaaggtatgttttatgtctatcacagtaacggcagtctgttcagtacgacgcagatgtag

SEQ ID NO: 381506 - DNA, 297 bp, Salmonella enterica
atgacaacgcaggaaacacccgaacccttccgttgcagctctttcgatatgataactatctgggcggtccgagatccgcaaagctccgccagcgtggtgccaagggtttccggatatccggcctattcagctgggatgaccgttaatgagaatccgattcatcttgtatatcgcgtgccaaagtccaactaccggtcatatgccgagggcggcctgctattctataacctgtattcttccccgaccgagattgcgacggacagcacctatacctacgttgaaatgatcctgccctag

SEQ ID NO: 381507 - DNA, 597 bp, Salmonella enterica; identical to SEQ ID NO: 26306

SEQ ID NO: 381508 - DNA, 882 bp, Salmonella enterica; identical to SEQ ID NO: 26305

SEQ ID NO: 381509 - DNA, 516 bp, Salmonella enterica; identical to SEQ ID NO: 26304

SEQ ID NO: 381510 - DNA, 204 bp, Salmonella enterica
gtgatccactttgcggagcgtgaggctcgggagcgaaaagcccatgcctcgtcaggaccgatagtgacgctttcctccgtcattgaggtgttttttggcattcgctttacgccggtacagaatgacggtaacttttctaaggcagcggatgattacaaacgcagtctctcaaaactcgtacaaaatggagccccaaaagaatga

SEQ ID NO: 381511 - DNA, 2457 bp, Salmonella enterica; identical to SEQ ID NO: 26303

SEQ ID NO: 381512 - DNA, 177 bp, Salmonella enterica; identical to SEQ ID NO: 26302

SEQ ID NO: 381513 - DNA, 1677 bp, Salmonella enterica
atgtctgctgttgaatctgattccctgccaatgggtgcccctgggagttctctggttgcttatatgcctcatactggcctccttattaacgacgataacttcctgcccgaaatgcgggaagagctcgatgtcattaacaggcaggtcgaatcatataacgatgagcttagcttactgaggtccatgtccgctcagttcctgaaatgcgggaatcagaagctctattcatacctctccggatacaatcatctcatttcagaagcggatgccagctacgcagaaaacgcgctgcgttcagaatactggaagagggtcatggccctgaccgatgtactgtctgtgatgtctgacgaaaagaagaaagaatgggataagcagtttactgctgaccgttaccaccttcctcctcaggagatccctgattttacactcgatgctgttgttaccacggttgtcgcgttgctcaatgaccggcatcagttcattaaagatcgtgtctatgccgtctttcagtcattaagccgtcaacacaaaaccaataaagcatttggcttctctactcgcatgatcacctccggcgtatgtgaaggcgtgaaagacaaatgggtaaaactgaaggttgagtttaaagaatccggcctcatgccactttcggagttgcgggtgatctgttcttatttccggggcgaaacagttaaaccggtctatgacacgaaaaaaatggttgagaatatggttggtcatgttggattcagaaactggatcagcctggatggcaacagtattcgttttcgggtctacaaaaacggatcgatgcacattgatgtgcatcctgatatcgccgaacggcttaacaacattcttgctgccatcgtccctctggctctgcctgctgaacgcgtggcccataccaaagcgacgttgcaggagttcccggcactgaaacgctgcatcgattttcattcacggatgcagcttgcagagctggattttacccagaatgaaaaggaatggtccagctggacatcgctcggctatgccggtgagaacgctgataaaacgcggcaggtgaacgcggatgttctgcgatttctcggtgcccgagtgacaagctaccatgtgacgtttgattatgacccgaccgaagtgatgcgcttcatcggacatatgggcgccatgcctgatattaaatcccaccagttttatccgtcgtcggcgcgactcagtgaatacgtcgcatccattattgcggccggggagggggaacggctgctggagcccaatattgggcacggggatttgcttcaatgtttcccgaaaagtgtcaacgtaaccggcatcgaactggatacactgaattgtctggtctcccgggctaaaggttacgagaccacggaagccgattttctggcctggtcggcggcgaatcagattcagaaatttgattgcgtggtgatgaaccctccttttgctgacaaccgggctaagctgcatctgctggccgctgcgtctcatctggttcccggcgggcgtttagctgccgtcctgcctctgtcccttcaggggatcgataacctgctgggcgaggggttcagaaccgagtggatggataccttcgataatgagtttgacaacactgccgtctccgtccgcgttctgtatgcagaacgcttttaa

SEQ ID NO: 381514 - DNA, 1158 bp, Salmonella enterica; identical to SEQ ID NO: 26300

SEQ ID NO: 381515 - DNA, 825 bp, Salmonella enterica; identical to SEQ ID NO: 26299

SEQ ID NO: 381516 - DNA, 822 bp, Salmonella enterica
atgcaaaatgatcttggacttgggttcatccgcaagtcagcaagaacgtcagcaaaaattatttcccgaaaagttacttttccgctcgatgacttggataatgcaaagctaacgctaactggcctacagtgtcatccatcctgccgttttccattttaccagctgtctatgcttatccataaccaactcgctgagcacggcgtcatttctgccgatgaaaacgcaccgttcactgtatccataagcattcacgagtggctgagtcgtgccagagtggcatttattgattatcacggtcttcgtaatagcgataagacggtcatgatcacacgcgctcatctggaagaattgcttacttacttgtctacgacattggctgtttatgtcccgtattcaaagaagcgactaaacttcagcttcctgacgtccttcactctggtcaaaacatcgcagtcttatacgttaacgttccctggggtacttcgtccgttcctgatgttgctggggggattaattcaggaatttatgacggaaaaattattgaagcgacggaatgcccagtttgtcatctttgattatttgcgaaagtcccggcgccattcacacaaaattaccgatatcgtgaatgatcttcagttgcatacagtgaacgtacgaatcatgaatgtccttacccaacttgcagatcaggggttcatatcgtttatatgcgaaggtaagagaggggagcgatcaattgaagagcttcagtttattccctatgccagccgtgaccattccgaagtgctgagcttcgaggaatggataagcccgatcgactaa

SEQ ID NO: 381517 - DNA, 924 bp, Salmonella enterica
atgacaagacagcatcctttattgaaaattgcgcttaatagcgatggacatctttcgtggccaattttaccaggagagactcaccgctgcccaacgtgtctgcgacacgttactacgggcccggatggggatttggtgcattcgatggaggagggcggcaacgtctgcataccttcagcttctgttgttatttcaaaggcaattattgaaatgctcagcgcaggcgaacgtctctatgttaatccaatcaagaatgggaataaaaccctagcaccgtcatttatctttctgcatacagaccagcaactccgcccatttatcaattcggattatcagccagccggtgccagctggagaagtgataaaggtttcaggcttggccttttctttatgaatgagcgagcctctaaaattaataaagaccagtttgattttattgcagtaatagacccattgacctttcagtcagaatttgatgcgacatggtcccgtggtgaatttgatgaccctctaaaggcattacggtattcaattgtttctgaaaacttgtcttccgtctgggtgaaatggcccgtaaaaaacctgcaaccgaggaaagaaacggtgatggccgattactggtatgactattattcacctcattccccagctcagcaggctgcttgcacagcaacggtgactggaatagatgggaatgtatccggcgaaactatttacatgctccagatcgctttagagcggtcgacagttgagtaccagcttgtaaaatcgctaggggtcatattgctactggataatacaggaaatttggtatcggaggcgcagccgcactttgatataatcatcaaggcatgcatatcgggcgtcagagactttgttcttcagaatcctcggacgctgggttttgaaaagaaggttgcatag

SEQ ID NO: 381518 - DNA, 516 bp, Salmonella enterica
atgactctgttgaaaaagttacttttgccgacattaattgtccttttcccggcggcagttctggctggtcagtcttcatttgaagcaaaagtggtaaaaattatcgatggggacaccattaccgcgctcgacggtcagaatacaagcatcaaaatccgtatgtacggtattgatgcccccgaaagtaagcaggcctttggacaaaaggctaaacaagcgttgagctccgcgattgctgcacagaatattacggtaatagaccacggacctgatatttacggcaggatgttggggactatttggcttgatggttatgacataaacgcctcaatggtagacagcggctatgcatgggtataccggtttgacggtaatgccatcgtcccaaactatctgaaattcgaagcttcagctcagaaagcagttaaaggcctctgggtagatcctaatcccgttgccccctgggagtggcgccagcaaaaccagaaacctcaaaagacgaaaagcagggggtga

SEQ ID NO: 381519 - DNA, 168 bp, Salmonella enterica; identical to SEQ ID NO: 26456

SEQ ID NO: 381520 - DNA, 1320 bp, Salmonella enterica
atgggccagaagtttgcagtttttattgcttacgatgacgaaccaaacacgaaacgatactcggctgaatttcagacacaggatgagtatgtaaagggatggcagtcggccctgaagaaagcacaccacacgtccgggcagaaatctgtgatcagctgcggatgtcggggaaaaggcgcaaagcgtctctacgtccgctcactaccaaacagtgatacgttcatcctgattaaggctgcaaataccggcactgagcatgatccatcgtgtgtgtttttcgaccttgatgccaggcatacagggttaaagggttatgccagcaatgttgtacgcatcaacaatgaggggaccatgtcaatccgccttggaataggcatgacggagaaagatccgccggaaaagtctgaggttccttccctgccccaaatccagcgacctgaaggtggccaggcttcaatgaccctgtccggacttctgagtctgttgtggactgaagccggtcttaatgtctggtatccgaatatggccgggaagcgaaatgattcgctggttcgataccggatgttggaagccgcaaagcagattagatcgggtagagcatgtattggcgaccatctttttatcggggtggcggactctaaaagcaaagtggccagtgagcaggttcaactgctgtcgtcggcggaactgagcgacaaacgactgctgctgctatcagtactgccgcgctatgacgcagaaaagcatgagaagccgctgaagtttctacctatgcgtaacttcggcggtatgccccttaccttctttaactcagacgggcactgggatagcgtgaagcggcgattccctctggaatatgccgcctggaaaaatgggggcaaagttgttgtttttgctcttacatctcccgtatcggtgaccagtagaggtatctctgcacgagctcatcagatagtgcttatgctggtgagtgataactggatacctctggactcctcctacgaagcgatagtgtcccgtaaacttgatgccgaacaccggcactatgttaagcctatgcggtatgacgccagtgcgagcgatgttttcccagatttttatttactggatacacgaagtgataagccgttcccgatggaagttttcgggatgtcgacacctgcctatcttgcgcgaaaggaacttaagaaggcgtattacaaccaggaatatggggcctatggatggtggcactgggatgctacggagaagactgaataccaggaactccctcatttcccggaagctagacgatacaattcacccgaatcacaaccttaa

SEQ ID NO: 381521 - DNA, 216 bp, Salmonella enterica
atggggctaaaaatggcgtacatactttcgatgagtgagcaggttaaactgaaggcgtttttggcggcagtactcgatgactacaaactgggagctatttcacaacagcaagctgttggcgggatcactagcctggttgatgctattgagatcagtgattcggggaaaatcagcctaatgctgtcggaaggacgtaaactcctgcgaacgggataa

SEQ ID NO: 381522 - DNA, 1221 bp, Salmonella enterica; identical to SEQ ID NO: 26453

SEQ ID NO: 381523 - DNA, 348 bp, Salmonella enterica; identical to SEQ ID NO: 26452

SEQ ID NO: 381524 - DNA, 456 bp, Salmonella enterica
atgagcatgaattcgcaaccggaactgaagttgagtacccgtaccgaacaactcgccagtagtcgtgatgccgctatgcaaaaatttctggacggcatgacgctgattgccgaagcctcagcaatttgcgggttttcactgtttaacagcaaaattatggcccctaatgcttttggccttcctgcgtccctggccgcaagcatcgaggaagggcgacagcaaatagaccgtaagacatggaacaatctttttgaagaaacgggtattgaccgattctggaatcacaaccagcgggcggagttccgtgagtctctccggaacgctccgccaattgcgtcgttaaccgtaatccgcagtacattgcgccaggcagttgccatgcgcagcattacgcttgctgaagggtttgttgatctgctatgccagcttgatcgccggtataaaactaatgcctag

SEQ ID NO: 381525 - DNA, 669 bp, Salmonella enterica
atggcggcgtcgcgaattacacacctaataacgtcctgtaccaaaggtaagcacagccagtgcggctccatgccagaactgagtatccggtctggacagacaccagaagaggcaatgtccagctgggcagcaacgattaaacggtcgcaaagtgcttcaccggtaccggccctgtcgctctatgccggtaatcactggtcaacggcaaaagagatattacggacaactgagaacctggagttgtgggtgatctcggccgggttgggttttttgaatagtcgtgacctcgtggacgcttatgaagccacctttcatgatttaccgttcagtcaccgacaatggtggcgggaattaacaaatacattcgggaaagaaaggacggcgaaatctattgagacattgatggcagcaagacctttcgatgattatgttatcgctgcctcccccgtttatatcgaggcgacggaggatgatatcctggcaggggcaagcaaattaaataatcacattgcccagttgacggttgtaacgtcagggaaatattctggactacttgaatcctatttaattcgtagcgaatcccgtatgatgcgccaactatcaagcaacatggtatgtcttaacatcaaacttgctcaatatattattggaagtcggcgctattcatga

SEQ ID NO: 381526 - DNA, 273 bp, Salmonella enterica
atgaaccgcactgatgattccataacgcaactatctacactttatgaacggctcggagctgtggctcatgaactggaatattgtaaaattctgctccctgaacactctgaacaactggatcttgatgccgcagaaacatatgcaatgatgctccgcattgaacagtgggcagcaaacgttaagaacgcatataataccaacacatacgaccctttccatattaacgaaaaggacaaacaactaagaaatcaagaggaagaaaatcaatattaa

SEQ ID NO: 381527 - DNA, 405 bp, Salmonella enterica
atgtccgaagcactcaaatcattaaacaacattcgtactcttcgtgcgcagggccgtgaactgccgttagagatccttgaagaactgctggaaaaattaagcgttgttgttgaagaacgacgtcaggaagaatcttcaaaagaagctgagctgaaagcgcgtctggagaagattgaatccctgcgtcaattaatgcttgaagatggaattgaccctgaagagttactgagttctttctctgcaaagtccggagcacctaaaaaagttcgcgaaccgcgccctgcgaaatataaatacactgatgttaatggtaaaacgaaaacctggactggccaggggcgtacccctaaagcactggccgaacaacttgaagccggtaaaacactggatgatttcctcatctaa

SEQ ID NO: 381528 - DNA, 171 bp, Salmonella enterica
atgaacttgaaaagtattgttccgaaggctgctggccttgctgcatggattgtaggaatcatttatagtggttttgctctttctgttctgtggggggggtttttgtgcctctcggtgtggtgccgatcacaactccatgggctattggaatttactgcttggcaggcataa

SEQ ID NO: 381529 - DNA, 450 bp, Salmonella enterica
atgtcgagcccggaccaggcactattttctgaagatgtccggaaaaactgcgccggtacgtgtgttcttaccggcgttcgaggcagacaaagaactgaggctgcgcacataaaaccccgtcatgctggtggtgagccggatgtgacaaacgggattctactgcgaagtgacatcaataccctctttgacaattggcacttttcgatcgaccctgattcaatgaaagcccgtttcagcccggatgtgctctccgtcgataaagacttactacaactggaaggcaagcaaattgatttttcccgcctgcaaatgcctatcaatattgaacaccttcgacatcactggaacaaattttttaaccgtcatgtcaatccagtcataaagaatgcgctaaataaaaaaatcaacaattatgaaaaacggccagttagcagcaacatacattattag

SEQ ID NO: 381530 - DNA, 408 bp, Salmonella enterica
atgcaaaattgcctttcgggatatttaaaagcgaccattgttattttatctgcgggcctgacaggttgcgacctggcaaatgggactgcggaaagtggagtgtatcagaaatacacgaatggacctttcaaggaaccgactatcgtgatgagtccgggctggcggatggatgaccacggcagggaagcactaatattcgggagcagccactgcccggatgtaaacggcaataatacgtctgagggcggctgcgtcctcattgaggagcactctgcgactgtcgcggtcactgttgttgatgcgacaaatcagtcccgtcgccaggaaacctggacgattgaacgtaaaaaggatcgagttatagtgaagcgcccggataacagttttgtgatgccctgggaaaaatag

SEQ ID NO: 381531 - DNA, 555 bp, Salmonella enterica
gtgaaaacccagcaggactaccgtgctgcctaccgcaagcttgaagcgtatggatatgcaccggccgttattgaacaattgaacacaggcgttgcctataatcttgcttattcacggacaccgttaaaacgccctgagagcgccaccagcgaactgaagcgaaaacctgacgtgaatattcagggtgagccttgcgaacgctttgtgaccgaacggagcagcgcagcgcagaataaattcaaaaccctgctcattgagaacttcgccggtcggtgtgcagtcactggatgggttaatggtggtgtgctggtggcggctcatatcgagcatgggacgcgctacaacccttcgaacggcatcctgttgacgcctacaatgcacgcattgtttgacgcggatctgatgggtatagacccttcaacactcaccgttcattttaaaccgggcatcgaggcgggagagctgtttgaaggaaaaacgctcaatccgttggtgtatgatctggataccgaccggctggctgctcgctgggctgactttataggtgccgagtga

SEQ ID NO: 381532 - DNA, 699 bp, Salmonella enterica
atgttacaggttaatgatttaaatcagtattatgggggcagtcatattttacgtggcctgtcatttgaaaccacgcccggcgagattacctgcctgctgggacgtaatggagtgggtaaaaccacgctgctgaaatgcctcatgggaattattcctgcgaagtccggtaccattcactggcaggggaaattaatcaaccacagtaagccacatcagcgggtacagcagggtattgcctatgtaccgcagggcagggagatcttcccgcgtctgaccgttgaggaaaatctgctgatgggactgtcgcgattttccggtagccaggcgaaaagcgtaccggaggagatttatgaccttttcccggtgttgcgtgaaatgaaacagcgtcggggtggcgatctctccggggggcaacaacagcaactcgccattggccgggcgctggcctgcaaaccacaactccttattctggatgaaccgactgaaggtattcagccctcggttatcaaagagatcggtgcagtcatcagggggctcgctaatcgcggcgatatggcaattttgttagtcgagcagttttatgatttcgcggctgaactggctgatcaatatctggtgatgtcccgtggcaccattattcaacgcggtcggggtgaaagtatggaagaacagggagtcaggcatctggtggcaatttag

SEQ ID NO: 381533 - DNA, 792 bp, Salmonella enterica
atgactgatttgttgtttacccagccacagccccaggatcgttttcgcgagacgaccgacccggtgttgcagcttgaaaatatcaacgtcacctttgactcctttcgcgcactgaccgacttgacgttgtcgattggtgtgggcgaactgcgctgcgtgatcggaccaaatggtgcaggcaaaaccaccctgatggatgtgataacaggcaagacacgtccggacagcggcaaggttgtatacgaccagaatatcgatctgacggcaatgtcgtcggtggacattgcccgtgccggaattgggcgtaagttccagaaaccgaccgtctttgaagctttgagtgtgatggaaaatcttgaaatttctcaaaaaatggataaatccgtgtggaccagcctgcgggcaaaactgaccggagaacagcaggacaggattgacgaggtactgcaactactcaggctagacgagcaccgccatagcccatcagggctcctctcccatgggcaaaaacaattccttgagattggtatgttgctggtacaggagccgcatttgttgctacttgacgaacctgcagccggactgaccgatgctgaaaccgactatattgcggaattgtttcgtacactggcgggtaagcattctctgatggttgtcgagcatgatatgggttttgtggaaactatcgctgatcacgtgacggtgttgcatcagggacaggtactggctcaaggttcgctgcgcgaagtgcaggccaatgagcaggttattgatgtttatctggggcgctaa

SEQ ID NO: 381534 - DNA, 1077 bp, Salmonella enterica
atgagccaacctatcaccttaacgatggcgcgccgcgcgccgcgcctgagcggcatactggcctctctggttctgacggctctgctggtactgccttttctcgccctgctaccggcggagaatccgttgtccatttctatctatacgctgacactgatgggcaaaattctctgctatgcgattgtggcggtggcacttgatctggtgtggggatacgccgggttgttgtcgctggggcacggtcttttcttcgcccttggcggctatggcatggggatgtatttaatgcgtcaggcggcgggagatgggctgcctgcatttatgtcgtttctgtcctggactgagttgccgtggttctggacgggtacacagcattttgcctgggcgctgtgtctgattattctggtgcctggcctgctggcgcttgtgtttggctactttgcctttcgctcacgtatcaaagacgtttacttctcgatcatgacgcaggcgctgacctacgccgggatgctgctctttttccgtaacgaaaccggttttggcggcaacaacggctttaccggctttaccacgctgcttggtttccctgtgtctgcgactggcacgcgaatcggtctgtttgttgctaccgttctgttgctggcggcatcacttgctattggcgtgttactgacacgcagtaagtttggccgggtgttgacggcagtacgtgatgcggaaaaccgcctgatgttctgcggctatgacccgaaaggtttcaaactgttcgtctggacgctctccgccatgctctgtgggctggcgggcgcgctgtatgtaccgcaggtgggtattattaaccccagcgaaatgtcgccgaccaactctatcgaagctgctatctgggttgcacttggtgggcgcggatcgctgattggcccgatcctcggggcgggtatcgtcaacggcgcaaaaagctggtttaccatggccttcccggacttctggctctttttcctcggtctgatgtttattctggtcacgctgttcctgccgcgtggggtaattggccttctcaaacggaggaagtatgactga

SEQ ID NO: 381535 - DNA, 1575 bp, Salmonella enterica
atgaaaatattcccggttttgggctttctccttttcggctgcctgctgatgaccgcgacggtgcaggccgggcctgccgctgattatggcaaggccagccgtacacagcaggcgcaactgcttcagcagtggtctgccgcgccggaggcatcgcgtttgccgttgttgcaggcgctgaatgacgaagcggtggtcaccgatgagaatggtcaactcttcaccgaacagaacggcaaactaacggctctggaaggggacacagcacctgcgggtgcgacgaaaaaagtgtttatgaataaccgcattcgcggcctggcggccagcgcgctggcaacacaccaactggtcagcccggacgacagcgtccgtctgcgcgcggcactgacgttacaaaacagcgcgcaggccgatcaactgccgtttctcagcacacggctggcggtggaaaaaaatgagggcgtacataccgcgctcgccattgcggtggcgaacctgcaacttactgatagccgcgcagaacggcgtttgcaggcggtgaaactattaggtgaagccagcgatccgcaggtgcaggccagcctgcaacggctgactcaaccacaaaatgagccggactctgcggtgcgtgaagcagccgttgacagcctgaaacaggtacagcaacgcctgaaatggggggactggctgggacaggcatttagcggcatttcgctgggttcaattcttttgctggcggcactgggactggcaatcacttatggtctgctcggtgttatcaacatggcgcacggagagatgctgatgctcggtgcatattccacctggatggtacaggatctgtttcagcgcgttgctcccgactggctggcgatctacccattggtagcgcttccggtggcgttctttattaccgctatcgtggggatggtgcttgaacgcaccattattcgccatctttatggcagaccactggaaacgttgctcgccacgtgggggatcagcctgatgcttattcagttggttcgtatcttgtttggcacgcagaacctcgaagttgccaacccggcctggctttccggcggctggtcggtattaccaaatctggtccttccctggaaccgcatcgcggtgattatcttcgtggcaggcgtcctgattctgacctggttgttgcttaacaagacccgtctggggatgaatgtgcgagccgtgacgcaaaaccgccggatggccgactgctgcggcgtgccgaccgggcgtgtagacatgctggcctttggcctgggatccggaattgccgggctgggcggcgtggcgctgtcacaactgggtaacgttggcccggagttgggacagagttacatcatcgactctttccttgttgtggtgactggcggtgtcgggcaactggcgggaaccgtggtggcggcgctgggactgggcgtactcaacaaagtactggagccgcaagtcggcgcggtgctgggcaaaatagccattctggtcttgatcgtgctgtttatccaaaaacggccgcaaggattgtttgcattcaaagggcgggtaattgactga

SEQ ID NO: 381536 - DNA, 1272 bp, Salmonella enterica
atgaaaagacgttctttactgaaagcatttgccctgtcagccacttttttgagcatggggttatcgttacaggcatacgcagcagacactattaaagtggggatcatgcactccctctccggcaccatggctatttcggaaacgcccctgaaagacatggcgctaatgaccattgatgaaattaacgccaaaggtggtgtactgggtaaaaaactggaacctgtggtggtcgaccccgcgtcaaactggccgctgtttgctgaaaaagcgcgtcagttgctcacccaggataaagcagctgtggtttttggttgctggacctccgtatcacgcaaatcggtgctgccggtatttgaagaactgaacggcctgttgttctacccggtgcagtatgaaggtgaagagatgtcaccgaacgtattctacaccggcgcggcaccaaaccagcaggcgatcccggcggtggaatacatgatgagtgaagacggcggcagcgctaaacgcttcttcctgctcggcacggactatgtctatccgcgcaccaccaacaaaattctgcgcgccttcctgcactccaaaggcgtacaggataaagatattgaagaggtctataccccgtttggttacagcgattaccagactattgtggccaatataaagaaattctccgccggcggcaaaactgctgtgatctccaccatcaacggcgactccaacgtgccgttctataaagagctggcgaaccagggtatcaaagcgaccgatgtgccggtggtggccttctcggtgggcgaagaggagcttcgcggtatcgacaccaaaccgctggtcggccatctggcggcgtggaactactttgagtcggtcagcaacccggtgaacaccaaatttgttgcggattaccgtgcctatgccaaagcgcacaaactgccgaacgccgataccgtagtgactaacgatccgatggaagcgacctatgtcggtatccatatgtgggcgcaggctgttgagaaagccggaaccaccgacgtggataaagtccgtgcggcgatggcaggccagacctttgcggcgccaagtggctttacactgaccatggatgccactaatcaccacttacataagccagtgatgattggcgaaatcgaagagaacggtcagttcaacgtggtgtggaataccgataagccgatccgcgcccagccgtggagtccgtacattgcgggtaacgataaaaaaccggattacccggtaaaaaccggcggtaaataa

SEQ ID NO: 381537 - DNA, 699 bp, Salmonella enterica
atgagcgagaacggcggtaaaaagcgcaccgtgggtctggcggagcgcatttatcacgagctgaaaaacgacatctttgattttcgtttaatgccgggcgcgcatttcagtgaaaacgagatctccgagcgaatgtccgccagccgtaccccggtacgtcaggcactgttctggctcgaacatgaaggttatgtgcaggtttactcgcgcagcggctggcaggtaaaaccttttgatttcaattacttcgaagcgctttatgattttcgtattgtgctggaaagggaagcggtgcgtcgcctgtgcggcatgccgccgggtatttgttccgaacacctggcgccgctggtcaacttctggattgcctctgcgcgtatggagcccagtaaagcgttatcgcttcaggatgagcaatttcatacgacgctggttcgcgccagtggcaacagtgaaatggcacgggtgcatgtggaattgaccgagaagatgcgcatcattcgccatctcgatttcacccgcgatgatcgtgtggacgcgacctacaacgaacatgcctgtgttttacaggcgatcctgaaacagcaaaccgaggaggcgcaacgcattctgaccgagcatatttcgcagagcaaagccgaggtcaggaaaatcaccttacacatgctccagcaggccagtttacaacctgtttcaccgtag

SEQ ID NO: 381538 - DNA, 3615 bp, Salmonella enterica
atgtttaatactgtactgattgccaacaggggcgagatcgcctgtcgcgccatccgcacgctgcaacgtctggggattaaaagcgtggcggtctattccgatgctgataaaaacgccgaacatgttaaacaggccgatgttgctgtagcgctcggcggcgagaaggccagcgacagttatctgcgtatcgataaaattattgatgcagcgcgtgaaaccggcgctcaggctatctggccgggctacggatttttgtccgagagccttccgtttgcagcagcctgtgaacaggccggcattgtctttgtcgggccaactgcacagcagattggtgagttcgggctgaaacaccgggcgcgcgaactggctgcagaggcgggcgttccgatgacgcctggcaccgggctgctcgactctctggaagaagcgcaggatgcggcggcaaaaattggctatccggtgatgctgaaaagtaccgcgggcggcggcggtattggcctgacgcgctgcgccgatgcgcaggccctcaaccaggcctgggagagcgtgcgtcgtctgggtgagcagttttttagcgatgctggcgtgttcgttgagcgttgtattgatcgagcccgacatatcgaagtgcagatctttggtgacggtaaaggcaatgtggtggcgctcggcgagcgtgactgctcattgcagcgccgcaatcagaaagtggtggaggaaaccccggcaccgcacctgcctgccgccacccgcgaagcattactcagcgccgccgtacagcttggcaggctggtcaactaccgcagcgcgggcaccgtggaattcatctatgacgctgcacgggatgcgttttattttctggaagtaaacacccgtttgcaggttgagcacccggtgaccgaatgcgtaaccgggctggatctggtggagtgcatgctgcgcgtggcagcggatgaagcgattgactgggcgcggttgcaacaggccccgcagggggccgctattgaagtccgtatctacgcagaaaacccgctgaaaaacttccagcccagccctggtgtattaaccgaagtggctttcccgcaaggtgtgcgtgtcgataccggcgttaccaccggcagtgaagtgtcggcattttacgatccgatgatcgccaagctgattgtgcagggagccagccgcgaagaggtgctggcaaaattgcaggcggcacttgatgccacccaactgcacggcatcaccactaaccttgattatctgcgccaaatcaccgccagcgaggccttccagaatggcagcgtgtggacgcggatgctcgacagttatgaagcgcactcggcggtgattgaagtgcttcagcctgggacctggagcagcgttcaggattttccgggtcgcctcggttactgggacatcggtgtgccgccctcggggccgatggacgattttgcttttcgtcttgccaatcgcattgtcggcaaccacgacgcagcggcagggctggaattcactttgcagggtccggtactgcaattccacagcgcggcggttatcgccctgacgggtgcagattgccaggcgacgctggatggcgaagcggtgcccttgtggcaacctatcacggtaaacgccggacaaacgctggcatatggccgtgcgcaggtcggctgccgcgcgtatctcgcggtgcgtaacggcattgatgtgccgcaatacctcggtagccgctccacctttgcgctcgggcagtttggcggccacgccggacgtacgctgaaagtcgccgatctgctgccgatttcgcgccctgaacgggctgcctgcaccacgcctgccccggtgagcgaaccgcaggcgataagtccgtcgctgatccctgagtatggtgaattgtggcgtatcggcgtgctctacgggccgcatggtgcaccggatttctttactccggaggcaattgacgagtttttcgccagcgactggcaggtgcactacaactctaaccgtctcggcgtgcggctggtcgggccgaaaccgggctgggccaggccaaacggcggcgaagccggtctgcatccttctaacgttcacgactgcgaatatgcgatcggcgcaattaactttaccggagacttcccggtgatcctcacccgcgatggcccaagccttggcggttttgtctgcccggtcaccattgccaaagctgagctgtggaaagtcgggcaggtcaaaccgggcgaccacatccgtttctaccctatcagcgtggaagaggccgtggcgcgggaaaaaatgcaggagcgttgcattgagacgcttcatgccagccatcttgctgaatttaccacgccatcgcttgccgatcgcgacggcgtttctgccaccgcactggtgtcgcttcctgccgctgctgacgcaccggcgattgtctaccgccaggccggggataactacattctgatcgagtatggcgacaatgtgctggatctggcgctgcgtctgcgcgttcacctgttgatggaacaactgcgcaagcgggcgcatccgggcgtgaaagagctgtcacccggcgtgcgttctttgcaggtgcgttatgacagtctcgccattagccagcaagaactggtggcgctgctgctggaactggagtcgcacattggcgatgtcagccagatgaaagtgccatcgcgcattgtgcatctgccgatggcgtttgaagacagcgccacgctggatgcggtcagccgctacaaagacacggtacgcgcgacagcgccgtggttgcccaacaacgtggactttattcagcgcattaacggcctggcaagccgcgaagcggtgaaggcgacgatttttgatgccagctatctgatcttaggcctgggcgatgtctatctcggcgcaccctgcgcggtgccgatcgatccgcgccatcgcctgctgagttccaaatataacccggcgcgcacctttaccgccgaaggcaccgttgggatcggcgggatgtacatgtgcatctacggcatggattctcccggcggctatcaactggtgggccgcacgctgcctatctggaacaaattcctgaaaaatgcgcaattcgccgccgacgagccgtggctgctgcacttcttcgaccaggtgcgcttctacccggtgagcgaagcggaactcacccagttgcgtgacgatttccgcgaaggccgcgcaaccatccgcattgaagatacggtatttgatttccagcagcatttgcagttcctgcgtgacaacgctgccgacattgccaatttccgtacgcggcaagccgaagccttcgatgcggaagtggaacgctggcaactggacgatgagtccacgatgacggaaaacctgttgccagatgaggtggaagaggatggcgtcgcgttgccggtgtgtgccgatatgaacggcaacatctggaaagtactggtcgcgccgggcgatgtggttgaggaaggccagccgctggtgatcgtcgaagcgatgaagatggagctggccatcaatgcgccgcagggcggcaaggttaaacgcattgcctgccagcccggacgtccggtcagccccggcgacacgctgctgtggctggaataa

SEQ ID NO: 381539 - DNA, 1800 bp, Salmonella enterica
atgactatgatgacagggaaaaccctgagtgaatggcgaaagataattgagaatgacagtgaggtgattctctcgctattaaagaaacacatcgattctctttccgaagatgataacgcatggattgttctggctgacgaagagcaattacgtgtgcaactggatgctttatttccactgtatcacgcgaatccccaggcgctgccgctgtttggtattccgtttgcggtaaaagataatgtggatgtcgcaggctggccaaccagtgcagcttgtccggcgtttacttacactgctgagcacgatgctactgctgttgcccggctgaaagccgcaggcgccgtcctgattggcaaaaccaatcttgatcagttcgctaccggactggtgggaacgcgttctcccttcggcgcagtgccgaacacgttcaacagcgattatgtgagtggcgggtcgagttccggttccgcctctgtggttgcgagaggactggtgccattctcgtttggcaccgatactgccgggtccgggcgtgttcccgccggattcaacaacatcgtcgggttaaaacccaccaaaggctggttgtcggcgaaaggcgttgttccggcatgtcgcctgaatgacacgctttcagtgtttgcgcttacggtggaagatgcgttttacattgccacccttgcgggcggcgaagatactgatgatgcgtactcacgcaccaacccatctaccgcaccagcggcgctggcgcaaaatccggtttttgctattcctgctgaactgaaattctttggtgatgtgcaggccgaacatgcgtggctgagcgcacttgagtcattgcgtaccagcggtgcaacgctgaaaccaatcgatttttcgccgttctaccagcttgccgaacagctttatcaggggccgtgggtggcggaacgaaccgcgtccgttggcgagatgctgcaacacccggagcagatggatcccactgtacacatcattatctctgccgggctgaaatacagcgccgtcgatgcttttaacgccgagtatctgcgtgcggaactggcgcaaaaaattcagcacgccctgagtgatgtcgatgcgctggtcgtgccgacatcgccgaccatccacacgcgggaagagatgaagcaggaaccgatcctgttcaactcgcagttcggcacgtacaccaactttaccaaccttgccgatctctcggcgctggccttgcccgcaccattccgtgccgacggacttcccgcaggaattacgttgatcgccccggcctggcatgaccgcgcgctggcggatttcggcctgcgctggcagcaacaactggcgcttccgcttggcgcgaccagcctgccattcaccccgcaaggggcattaccaatttctccacaccatgtacgcgttgccgtggtgggggctcatctgcgcggcatgccgctgaacttccagctcaccacgcgcgatgccgcatttgttgaagcgaccgaaactgcaccgtgttacgggctgtatgcactggcaaacacccagccagcgaagccgggcattgcccgccagccgtcgggtgccgctatcgcggttgagctgtgggatatcccgctggcccgttttggcgaatttgtcgcagaaatcccggcgccgctgggtatcggttctctggaactggcagacgggcgctgggtgaaagggtttatctgcgaaccggccgcgctgcacgatgccaccgacattactgaatacaaaggctggcgtaactggattgccagccaggagagcaagcatgtttaa

SEQ ID NO: 381540 - DNA, 135 bp, Salmonella enterica
atgtcagatgagaataattgcagtacatctctgctaatgaagttttttcttgttaaagatgtcgatgacaatgtcggcatctcttcctgtgattatcaaatcacccattacgcttatttcacccgctcggaataa

SEQ ID NO: 381541 - DNA, 204 bp, Salmonella enterica; identical to SEQ ID NO: 26440

SEQ ID NO: 381542 - DNA, 399 bp, Salmonella enterica
atgcgtccgttggaattgcaccggcaggatacgaatttaaccgaccccgtggcgggagggttatcacaattgcatgtcctcatccctaaagtcccctgccagacccatacgtgctgtcaggcttcgcctgatttgagatcagtgcaaatacttcagcagataactttttgttttctttttattttctccctgtttcctcaaaattcgcgtgcggcctggtcagggcacgattgtcacatagggtgtattgaagcgggcaggatggtcgggtgggcacggcctgggtttgagtcggacactatgtgggatgaggacatgcaaaatattcgctttatctgtgaaaactgttgtctacgggcagtcaccagttcaagttacaccatccacgttagcttttaa

SEQ ID NO: 381543 - DNA, 261 bp, Salmonella enterica; identical to SEQ ID NO: 26438

SEQ ID NO: 381544 - DNA, 507 bp, Salmonella enterica
atgcatacattaggcaaaatggtttatccaatggaaaagacgcaatcacccgcagagcgcttttacgaaagcatttattattctgatgaaagcctggaagaggattacctcgcggagctccgcaatttcagcagcgaccactgggacactgcactgcgtgccgcccgtttgtctgcggcggtaaagcgtttcaagacatcggagatgcttcgcttcattctggaattcgttgttcccgagaacgctcaggaagacgcccccgatctgacaccgctcgcagcgaagcggctttgcaactccctgttcggccggtctggtagccagtccattcttgtctatgtctttggccaggcaggccgtgtgcatcgcagtgcaacctgttcccccaaaaccatagaggctatcgctgctctttatcgttctgacgctgaacgctactggaattcaactcttgcgacaattgaaagggtcaaacacacctaccgcgcaaaaatccgaaactcctga

SEQ ID NO: 381545 - DNA, 1074 bp, Salmonella enterica
atgcgaaagagctatacctatgggattcctttcggactccatcgcgaaaccggacggtttctggacatcacggaagtcagcagaggaagcgcatgcaactgcatctgtcctgggtgtcgtacggatttgatagccagacagggagaggtcaaactttggcactatagccacagtaccgatctcctcggtgattgtgatggcctgatggaggcgattcggggaaaaattattgaaattattcaggaaaaacaacttctaggattcccgcatcttctggccggttacgatggaggcacggtcccacttgatgaagtcagcggcagcggaagcatgttcggcgcaacggcagatctgtttgtgaaggtgaacgatctctgcgtagctgtgtttctggacattgaccgcagtgtggccgggaaactgacgttcgaccatctccatgcctcggagatggtagctgcattgcgtattgatctgccggatatagaatacgaaatcagtcaggttcagcttggtagacgagatggtacctacagtgaatgtatcgagaaaatcatcattgatgcgacggagtcacgcgaatggttgtatcaccccatgatgcaggaactggggaccgagcccctgaaggtatatgagggccgcgagccagcggaagcaggaccacttctacaacgcctttccgactgccccctgaagctgccggacaacttaccccagagcatgaatgtgctgataagaatgcagcaggccaccattgtgtgtttgtgtcggctgaccgtcagagcttcagatatcgcccagaccgacgaattcccgctgtttatgcgttacttccggctgcattgcctcgacaccagtgagcatgtgaattacgagaaattgcttaactggcaggacatgattacaaaatcaaaggaagggcagttactaacggtggaggaaagggattatctccaggaaatcgtccgtattggtctctataaccaccggcttaaaagtgtctgcctgacggcctgcgaagacagtagggtgggagaatctgaaggaccaaacaattactcattgctctga

SEQ ID NO: 381546 - DNA, 1785 bp, Salmonella enterica; identical to SEQ ID NO: 26360

SEQ ID NO: 381547 - DNA, 876 bp, Salmonella enterica; identical to SEQ ID NO: 26361

SEQ ID NO: 381548 - DNA, 987 bp, Salmonella enterica
atgaaacaaaaaataaggccgactgcattttgcagtaagcaaatggattttttctctatattcgattttgaagaagaggaaaaagaaataataactatagttgagtctccacttgactatataaatgatgcaatagccgcacaacaaagtattcaatcagaagataaacattcaggcccggaactggagcctagtgtgtcggaagatgttgctttgcctggtaattgtcccaaaccactcaaaaatcaaattctgcatgacattagttttgctgcggaaactgattatctcttcactctagaagagtacagtgcggagttaggtggtctggtttttgactgggcccctgaagatgtatatcagttatacgtcgtcgcaatggaagagtcgttggaaaacgtaaggcatctcgtcattacaaaatcactctattccactgatgaattcggtaacataaccgtgaatccgcttcttgaagccgaaacacggtggtatatgtcgaaatcatttgagcttacatgtgccactcatggtattgatgctattgagttcaggtcagagcttaaaaaaagcttatatgaatatacgcacagttacggaggtgaaaatgctgaattagctcgttatcatcaagataaagaggttattctgcatgattgtaaggaagagatgggatgggatatctttttcgaacaggactatttgttgcaagaaaacaaactggcaatgaaatggactgatcgggatataatggatgtctattctaaagtatttaaatcaacaattaatttgtttgaaaaacttgtcgttaataacaagttaaccttaagagatacttttggttgggtaatcgtaaaccctacatttgaacgccagtttgaatggattgagtcagaagtattcgaaatcgtaggaactcatcttggttacaacgttgccgctatcagaacacagatggcgacggcgtgtaggatgactttccactaa

SEQ ID NO: 381549 - DNA, 1053 bp, Salmonella enterica; identical to SEQ ID NO: 26364

SEQ ID NO: 381550 - DNA, 270 bp, Salmonella enterica; identical to SEQ ID NO: 26365

SEQ ID NO: 381551 - DNA, 1128 bp, Salmonella enterica
atgactttcaatacttctaaacttaataaagtttctgcaaaggaaatcagtgaaaactttataaaagcatatcctgacttgcaggaaggtgctgttataacaaaaattgaaattagtgggtgtcagggctctcggcgaactgataaaatcgaactgtcctatggcggtgatgatataacagaccagaagagcgtgtctaaaagcgaagttcgctggatagacataaaggcactgagtttcaaaagcactatcactagtcgaatttcaaccctttgttcacggttgtgcatccgctatagcaatatgtggatactgccagttgaaaggatggaggagtttctcgaagaggcacaagaaatcgaacgtgaatttcaagccggtatccagaacgtggttgataactatgacactcatattcaggctgagaaagatcgcagtccgttgatgtcagatttaattgaccagttgaaattgactaaagatgattttgttaaatcattccggtttaatctggcacatttcattccgttttcaccgattagtgtggagggggatgaaacgcaggacttttatcaagaacaactgataactgacttggccgatgaagctatgaaggtttatacaaaaatcagcaaaaatgataatttgcgttccagcacgattgaccgattaaagcagatgcaggataaaataattagcttcatgttcattcataaagaggctgttgttcttgcagaagctattaagcatatcatgaacaatttaccaaaaggtgccatttcttctccccgtgatgttgcggtattaaagcagtggttctatttcatgagcgatgcgtcaatgctgaaacgtattatctccggtgaacaaaaggtaaccgactggctggattccataacccggtcattcaatatcgattcacaggttacagcggctaactctctgaatactgctgaggatgatgttttttcttcagcaaatgttttcagagaagacccggttgaagatcttgagaacaaggcagtgaatgcacctgagcctgctgttggccctgatgaagatgtttctattcaggccagtggtagtaatagagcatttgactgcgaactcgaattgaccggttggtaa

SEQ ID NO: 381552 - DNA, 2013 bp, Salmonella enterica
atgaaatttgatttaaaatcttcaccacgccatattcaacgcctgacgaatatagccagcgtgataagcggtataaatgggatttatgtaattattgacaataaggtgagtacaccttatttcaacacccaaaacaatgtctgtgttttacctaacggtgattatagcgatgagagatttgtcaagctaattgaaggattcatatgtcatgaagcaggacacggtcgttatacagagcatgaagtataccgtgaagcttttgttggagaattgatcaatgcagatggcttcatcagtattgatgatgacttgaaggctgattttcaaaacctaaaacaaaagcaaaaagcatatgctcgtgcttgtcgactaaaaggacttattaatctttttgatgatgtccagatggaagagaagacgggtattgattatcaggaggcaaaaaaacgcctcgcggtgacttatgccttgatggttgaagctgggcgaatgacggttgatatttcttcaacccctcaaaacccggttcagtttattgaaatgtacctgcttaatacattgcgggttaacgttctccaacaagaagggcataaagaaacgcttgacccatttttcgattatgcaaagaaaatccttgcacctgtaacttcagaagtcgatgagatcattcatcaagctctaagttgcaaaagtacgcaaaattgcgattctctggcgcgtaaaactctggctcttttagagcgtttaagggatgaagcaaaagagaaacagcaagaagaggagcagtcgaaagacccgcatgacgatacagatgaatcatctggctctgagaatgaacctgataccgaacccaatggtgatagccagggtgaaggggatggtgataaagaaggtcaaggcgatgattctggtgatggtaaggcgcctgcggaaggtaatgggttaccggaccaatccggaggggatgaacaaaatgctgagaactctaacggcgaacctgatggtgagtctgaaggtgatgaatcggcgacccccggctcggatgatgctgactcgacaccttccctaaacgacagttcaaatggaaattcttctgatggggaaagtaacttttctcctgaacagtgggatatgcttgccaaattgctggatgattttttaaacagtgatgaggaaagcgaggattttcatgaggttcttgcaaaagagatctccgtaattgctgccagtgtgtcggatgaggttaaagctgaatttggtgcaagtgagtgggatgttccagatttgaacattgatctgaatgtctacaatgaagcattaaatatcagccagacccttggggcagatttatctgttttacagcaggtaaaaatgcgtggtcaatttaaaacccgtgatagaggcttgtcattcgatattaatcgactgatccagtctccgatgggtgttagggatgtatttcggtcacaaagcgaatctaaaaaccggggccacgtcggcttggtcattgttcgtgatatttcaggttcaatgagtctggaacaccgttatatccatgcaattaagactgaccttgcattaactctggcaattgaagctatttcaaaaatgcatgttgctaatgtgatttatccgtttgtagacaaagattttgaagttatcaaaacgtttgatgaaaacgcggaagagaaactttcaaaattctcacttggctgcaagggcaataataccccaacgggttctgcattaaatgctgctttagagttgttacttgaaagccagtttgacaggaaaattgttttccttattactgatggttatccgactgagtcggcttacaccattaatgatgttttttcagttgctgaaagtaacggcattgaaatcgctggtgttggtattaaaactgatgtgttgatgggttttaatgagggcaccttcgtaaatgttgatgatatttctttattgccgaatgaggtcagtaaattagtacatcaaattctatctaattaa

SEQ ID NO: 381553 - DNA, 222 bp, Salmonella enterica; identical to SEQ ID NO: 26368

SEQ ID NO: 381554 - DNA, 1233 bp, Salmonella enterica; identical to SEQ ID NO: 26369

SEQ ID NO: 381555 - DNA, 525 bp, Salmonella enterica; identical to SEQ ID NO: 26370

SEQ ID NO: 381556 - DNA, 879 bp, Salmonella enterica
atgaaattagctacagatctggtcaatgcggttctgataaagaatggcattgtaccaacttccattaatgagttgcctgtaacgtcgctggtaaagccattgacacaagtgcatctcagcctgtatctgaaaacaacgcatttatctcagttcgtccctgactacgttgagtctctgaaagattgtccggtttcgtatgatatcggccttgaacttcagcagtgtatcaacagtgctgaattgctctgtgaagacatggagtcacttgagtttatctctgtatggatagagctctatacgtgtaattcaaagcaacagcggtttgagaaaagtaacttttcttttcgaactgaagatatcgagctggctaagatgctgtcttgctcgcatgaaatcttaataagtcaggcggcttgtttctggcttttgtattttgaagatttcatgaaatatgttcgtaataggctctgtgcattactcagacaggttttaattttgattgcaggactgcgaaatgtatacctgcaacggaatgaagatcagttgattaagagagttaagcacgggaatgaaatgctggaggtgactcttaaagctgttgcactatgttcaatggaaaggtatctgaaatcatatgcctctttacgaacagaagcggcggcttctgggtttatcaaatgcattcagtcttatatcagtactggttggagacatggctatatagtctgtcaatattcaaaaaatggacggtctcttggtaagtcattaccactttttataaaagagacatctgagcataatatacagaaacgtgtcaatcgccttatatcttccacgatttcggggcgaaataaagatttaggtctttacgatttctga

SEQ ID NO: 381557 - DNA, 936 bp, Salmonella enterica; identical to SEQ ID NO: 26372

SEQ ID NO: 381558 - DNA, 921 bp, Salmonella enterica
atgaaagcgatttataaaataattgaagcgatgctggtgaaaatgggctttgaaggtgccgtgatccaaagtgtcaatctggaaacgggtgtgattcagagtctagttgttaaggctgatattcctgtccggactttaatgccgcatttaaggcgatatctgcgcgattgtgagcctttatggggacatgacgtggattaccaccctatagcacaatattgctcaggagctgcgttgttgaaggcagggccggtcactcttgaaacctttcggtttgaggtttcagtgtcaactgctcacctgcggcttgtggatgttgagccggactgtctaaatgagggtgtgaaccgtgaaaaactggagtatgtatattaccgctccagcaatgcagacaaggatctaatacttggtatggttgaaaaaggacataattttatcaatcatctgcatgaacttttacgctcgcgcttatcaacggctttgccgctgattttcgcagttacagaaaagattgcggagagttcagttccacaagtagtcaccagctttttcagtgttgaccatcaaatcaatgcccagatagtagtcgaacctgtacccgtttcagtcgcagaccagataatttctgctgactggaatgtgtgtagtgtttcaggagcggataagttcctgaaccatgttaatcgttatctgtcgggtagggtgatgaagcggcgtatttacgctgttatagaagcttgcgacggtggatctttatccctcaatgcgaacttaggttgctttacatcacctcttctcgtaactgagtataaaatggttcagtcacactcttcatcgctttatcgaaaggctataaataactcgcttaagcaagttaattcgtatgctccagagcattcagatgacctgctttctatgtaa

SEQ ID NO: 381559 - DNA, 936 bp, Salmonella enterica
atgtttaatgaaagtgatgataaaaactttgttagtgcaatgcttaaatgtcaacttggcctgaatataagccaagaggatattacaatatatgacaaagaaaatcattttgaacaactttcttttaaagcaaatgtggcgcttgatgatttgttattttatctggatttatatatatcagaattgattaagcataatgcgccgtattctgaaactgaagtccttcggactaaaatcaaatactttcttaaagtatatgaaaagtctggttttcagaacataagaattcgcggttatcataacgcgcacagcactatagatattgtcgatatcgcatcattaatattggcggggtctgtaccggagtctgaacatgattcaatagatcctgttttaagaaaggaaatctatcaaaatcgcatgagtgttgagggtaaagttctcattgcccgttttgcacttaagcaatttttccattctgattttggtgatttcatcttagagttcgagaaaagtatctccaagtgtttgaatacttctctccagataattaaatctgtaaagaactcatttaaccgtttaggtcaatatcaatatcagcgtcgtgtaaaagatgacctgactttgcatcttgatttgaatacagatgaatacccggcctgtatgccagacctttacatcggtttcaaggagtctgaagggacgacgggagtgtatcgcgatgatgaaaaaatcattcgtctttatactggcgttagttccggaaaggatgttcctgtaatgatgaccgttcgattcactggctgtgacgggagtgttttgtctgaatcatcgcacggtactttctgttccgtgggacctaccggccgagtgcaggtttgtgacagagttgcgttggtccaagaagcggtcgaagagttacgggatgttgtttaa

SEQ ID NO: 381560 - DNA, 957 bp, Salmonella enterica
atgactaattctactgataaccagaactacgttcgtgcagtactggcaggcattggtattgattttgatgaaacagagatgtttatcagtgtctctcattgccagagcgacgaagtttcgtttacatgcagtatatcagccagtgagttaagagaatctgcggggcattatgtggatactcttaatgatacccaactggctggcctggatgcggatgcactcaagaagcgactggtttacttccttgaggttttcgacctggtttccggtcaatatctggatatttccggtaaacatttcgcgaccagccgctttgaatacgacgatgtctgtagtgagatcctgagtaactctgcggacagcgcccagccaggtggctatgatcgtgaagagtacaaaagactgatggaagttgatggtcaggttttaatcgcccgatttgcactggaaaaattctgggatacgcattttattgggcttatcaactatgtatcagatgaaataacatccgggctttatgaggcttatcgcacgttcagtgatataaacatggccggttatacatttagtgagtattcatatacgcgtcgtattaccgacgaacttagtttgcatatttcacttaaagaggacgatttcgaagagcaattaaccgattgttatatggatgaaacaacgctgccgtctggcaaggtggttttacgccgtaataatgaatcaattattgggatttatgaaggatatgcttcaaaatcttactttcctatggttgctaatgttagagtccttgatacagatggtgaagttgttactgaactttaccaaggggtgaatgtatcagaattagctggtggtcggattaaaatccatgaccgtcaggaattaatttctgaggtgttcgctaacttacgtgaattcatcccagcatcagaggataaaatctttgatgcggcatga

SEQ ID NO: 381561 - DNA, 270 bp, Salmonella enterica
atgcctgccactacaatcctgagcaataaccctgtgaattcggtcttctctaatgacaatagccatttcacatacaggcatattgatttcagtattgagctactgctttcttcaggaactgactcacaactggaatatctgtttctcaaaccggcggctgaagtaaagatcgatttacagcgccgtttagctagtggggaacgttacgttacaaccgagagttgtgacaattttagcgaagttgatggctgcatgggacacgattgctga

SEQ ID NO: 381562 - DNA, 591 bp, Salmonella enterica
atgatgactgaatcgttctttgactgggttgtgtattgcatcacaggcgtaatactggcatctgcgttcctcgaaggaaaaagaacccgttttccggctgcatttttttacggaagcattgtgctgctggtcgttttgatagtggccggtgccctcaactggtggttctaccgttctaaattcggctcagttgtcgttatttttgccgcgacaacgctgttaatgacccgattcagattggttatttatgcgttcaggtttcggacgctggtggcagatctccaatcacatgtagccaagggattcaggataatccttgtcttacccgaaaatgaagacgagaagaccgttttgcttagcaaattgtcgaaagtgatacattctgggacgttgttttatacccgaactgctctgggtccatattctggggatctcctgcatgctctgggacaaaagcaccgaaatggcgagggctatctgcttctttgtgagcaacaacttccggctcgaacctggctaagcactgtagaaaacggtcaaccagagaagtctattgcagttaattttcattcgatccctgatatggagtga

SEQ ID NO: 381563 - DNA, 258 bp, Salmonella enterica; identical to SEQ ID NO: 26378

SEQ ID NO: 381564 - DNA, 537 bp, Salmonella enterica; identical to SEQ ID NO: 26379

SEQ ID NO: 381565 - DNA, 456 bp, Salmonella enterica
atgaaaaagcgactttaccttcttgaatggaaacttcgtgagacaagagcctggttaggatggatggtgttctggattatcatcagttttatgtttttatcagcgatgctcatgacaggtcatttgttaaacaaagttgtcctccagcccgtttggctgtgtatctggtctttaccctggctgggcttcttgttgaaggtacgcgtgaccgagatggataaagggctcgtgaatacacttcagctcggagatctgccggttttccgctggagtcgttctgtagttcctggcacctggtctgttgacagaattaatggacgctaccggttgaaccggattggaacggatggtttgacggtacactatccgtggcgcctgaactatcagcctttgttcctgacaccggataagcagatttctgatattaacggacgtaaacatgaacgaaaattctga

SEQ ID NO: 381566 - DNA, 228 bp, Salmonella enterica
atgaacgaaaattctgacgcagtagtgagtgccgctacttcctgcctgctgtatgtgcgtgaaatcgaaaggtcaggccccggtgaaatgccggtgtcatattcaaatgagcttatccagagatggcttagttcggctgaacgtcgtaatttgcattcccgccgcagcttgcgttcgattcgtacaattctgaagcacgcaaggaagagccgtcagcctgatttttag

SEQ ID NO: 381567 - DNA, 255 bp, Salmonella enterica
atgcagccggtagttgtacttttacagcaccttccgcaattccccgggattgccggttgtataaagtggcagaggttcaacctgctgaccgtcatgccgaaaacaacgattagggtcattcaaaaggccaaaactgaccggctggcgttgcagattgatgcgctgccagtcctgctttacaccaaacttcacccaccaacccagaccaatcagttcattacgtatgttctgcacattgcccaaatccgatactga

SEQ ID NO: 381568 - DNA, 960 bp, Salmonella enterica
atggccagtgaagatttactcttttaccgtgaccggattctggagcgaattgaaaagctcagatcctttctgaatgaccatcagccggtgatggccgagctgatgactgtggggaccgtcacacgacacgaagagcggttgaaagaggtgaaccccatcgaggtgagtactatttcagatgcctccgtggatgaaattatccgtgttattcaggatttctgtatcgatgacattgatgtactcagcaggaattcgacgaaagtgacaaccaaatacccggggttgattattgttcctgagggtgccgaacagctgagcggaattatttgcgatataaatgatgccaaaagtgactttgcctctgcaatgaaaagggtgaattcggagaaacacatccggtttaaggaagttcaccgtaagcttcccggtctggtgactgcgcattccactcgcaaaattctgtttgtggaagaacagctcaaaaaagttacttttgcctggcggctaaaccgaaaccaggtaaaaacaaacgcaagtgatctcatcgcgatgctggataagcgtcgtttagtagcggtcaaatcgcccgtgacaactgacctgacagtggtggcgaacatcgatagagcgaaggcattactggaaagaaaagtactgagagacggcgaagggtatcgcctttgtcgaaccaataccttcccggttccgatagcgcatttgttcacataccggcctgaaggcaaggagcgtggaagtagcaaatatgccgagactgattacaaggtggtgaaagcctcattacccatttttggcgtcggacaaaagccaacaattaaaagacttcaggactgggtgccagcgcaggatgaagcactgtccaatggtcgaaggagcaaccatagctacacggaacttgtacccggtgcagatcttggcattttcattatgagaaaggtctga

SEQ ID NO: 381569 - DNA, 330 bp, Salmonella enterica
atggtgtgcatcgtgttgttactctcactggcagcggtgtggatcagtaacaagacggtcggattgctggaaatccattactttaagcggccgctgagcatggagtatgcagcctggctgcgtgtgatgtgtgccggtttgctatttatttttattcagatggtcccggcattcacgtttctgtataccctgaagctggtggcactgttaaatctgggcgtgcagacgatgaagctaaacggggtttataaatttaaacgcaccgggatgatgccgccgaaagacgcccctcatgatcttggccgctttaatccatttcgaaagaagtaa

SEQ ID NO: 381570 - DNA, 1182 bp, Salmonella enterica
atgaacagcaagccagtaaccagacagtttgaagactcagacctccatcaggaactggtcacgtttgaggtgcccaataatgaccttaaggagctcattttttacttttctcatatgaaataccacacggctaaaacttaccttcactggctgcgttcctggaacgagtggtaccaagctaatgcaggaaaggagggaaacgaagcctggcctgccagttctctcccggtgactcaacccccgttgttggcctatctggactatcttcagggctcgctgtcacacagcagcattaaaggttgtctgcacgcgctgaacagtatccataggaaagcactcgatcgccctgggatcatcacatccaaggtcaagagtattcttgcaagcctcgaacaagctgaagcccgagagcaaaaagtgactcgtcaggcaacgccattcctagtctccgacctgaaagctttgattaaagcccacggtacgacacagtcggtgcgcaaactccgagacctttgcattatctggacaggttttgaaacactgttgcgctcagcagaacttcggcgcattcggatgcaggaccttgtgctgaatgaacagacaggcagttttaccctgacggtgtaccggacaaaatccactgtcagtaccctgcttacctatcatctgacccctcatctcactgccaccctaatcaggctgatgggtatggtcaaaagggaccagcaaagccatccgaaggattatctcttccaggcagttaactttcaggacagcggatatatgccccctggatggggtctccggagcaaagggaatgagatcaatacgctgctgaaaaatcataatatgccttaccgacctacccgccccccgatcgggaaaaatggaaagcccattattgtcgatgatgagggtatgctcagtaaaaacacattgctccgggcctttgaagcgttttgggatgaacttcatccgcaggaagcgggcacccgatgctggactggtcacagcgttagggttggcggcgccatcgaacttgctgaagccgggtacacgcacttgcagatcatggagatgggtaactggagcaatgcagaaatggtttcccgctatatccgtaacattgacgcaggtaagaaagcgatgacgaagttcatgcgtgaggcgctggatgagtag

SEQ ID NO: 381571 - DNA, 420 bp, Salmonella enterica
atgtattttttacttcaaaaagtaattttaccaaacattgatctatgcacggaagagcagctttatttcagaactcagggcgggaagtataactatacctcacgtaacttacttgttccgcgtcataaggttgcatattttgatactttttttaatgcattctcaattaagaaatggaaaaaatatacaaccttaacatcactttttttgcgggttaatataattggtcgcggaactataactgtaaggcataaagagaatggtgtcattagagtattaaagcaaattgattttaaatcgtcatgtaatattagtgatgagattgagattgagattgagattgatatatcaaaaataaattttggatatatctatgtggagtggcaatcagacgaagactctgttttaaatggattttaa

SEQ ID NO: 381572 - DNA, 708 bp, Salmonella enterica; identical to SEQ ID NO: 26297

SEQ ID NO: 381573 - DNA, 201 bp, Salmonella enterica; identical to SEQ ID NO: 26296

SEQ ID NO: 381574 - DNA, 1077 bp, Salmonella enterica
atgaatcactgcgactatcagattattgagatcagtcctaaagcactttttatcgaatctggattcaatccacgtgaagcggtaattggtgaactttgttatgaacaggaaccagtaaaatcgaccattgtttctattaaacaagcctataaagagggcagacgagtcgatttaattaaggttgttaagaaagactccaattacgttgtaaggcaggggcattgccgttacagagcactatctcttgctcttgcggaaggagctgatattcagctcatttcagtagttgttatgaactataagaataaaagtgaagaatacctggagaaccttgatgggaataggaataacggtcttaatcccgtagccttagcttatgcactggcagaggcgctgaagcttggctctaccgttgaatcccttgctatgcgctatcaacggtctagcactgctattcgtaaccagcttaaaatccttgatatgcctttagaactacaacgtttaatcagtctaaacctgattaaaaaaacactcgcgattgagatcatgttgaagtattccaatgaccatgcaaaagtccttgcacatttggaatcgtgttctcttttagtaccatcaactgaaccagaacctgttttatctaagacatcaagcgttcaaacatcatcaaacgatgagaaactagataacccggaaacactccctgttcatgttattcctaaggaagttaaaacaaaatccatcactcgcagttcattgggtattaaacggctttctcataaaaaaactgaacgcttaaaaactgaatttatcgggctgattgatactgtacggccagcactaaacgacagtaataaactcaccgaattaattttcgacggacaacattccaatttatttacgaacatcagcagcacttccatcacaaagacaacggaaagtgtaaagatcactctagatgaagcaaaactccagcttttattaagccttctgaatgatgaaaatactgctatcatcattccaaaatctaaggttacagaactgcatgaaattcgtgacctgttaacaagtgagtag

SEQ ID NO: 381575 - DNA, 876 bp, Salmonella enterica; identical to SEQ ID NO: 26294

SEQ ID NO: 381576 - DNA, 582 bp, Salmonella enterica; identical to SEQ ID NO: 26293

SEQ ID NO: 381577 - DNA, 354 bp, Salmonella enterica
atggaactgacattgaatactaacgttgaaagagtaaaaactaacgcttttgcatttttgaagtccaaacatgcaaaagtgcctttgtttattctcttggttttagcaaattgcagttttgcgtacgcgggttccgatgatggagccttcggcgatatctgggcctacatgagcgaagccttgactggtgcgccgggtaaaatcatcgcgtgcggcatgttgttctcggtggcttatttcggcgttgtaaaacctaaccttggtttggcgctggtatcagcattaatgatgctggttatggcaaacggtgaaaaaattatcagctcgttcctggatgctggtattcctctgtga

SEQ ID NO: 381578 - DNA, 318 bp, Salmonella enterica; identical to SEQ ID NO: 26291

SEQ ID NO: 381579 - DNA, 786 bp, Salmonella enterica; identical to SEQ ID NO: 26290

SEQ ID NO: 381580 - DNA, 1233 bp, Salmonella enterica; identical to SEQ ID NO: 26289

SEQ ID NO: 381581 - DNA, 441 bp, Salmonella enterica
atgagaaaagctacttttcttacagtgatctcgtttggtttagttgtctttttgggtaccagttattactaccaaactaagtatatcccgaaaggcaccgtgaatatatttcctgatgtccaccgacagggtgagatcgttgatgatgcctttgagaaaagcacgattgttataagcgacccaacgcttgcggataaatttgttggaagttcaaccgagtctgtcggtcggcatgaagttaatgtaataaaagaattgggcacgcaaaataatggttcgaaatttattcatgatgagtctgataaatcaggtttgacggttggagataaatggcctagggctggtgaaccttatatcgtgcctcagatgacagaatacgagcggaatttgaaagttaagcgattccagcaaccaaagaatggagttaataatggacattaa

SEQ ID NO: 381582 - DNA, 1359 bp, Salmonella enterica
atggacattaaaaaggcctgggaaaataaaactgtcagaatctcagtaattggtgctgcattgatggtattgattgttgtcatcagtcaatcaatctttaccacaccagttaaaaaagagaagaaaacccagaaaaaagatatgcaaactggattccttattgatgattcacaaatgaacaagctgagtaatgaggaaagccagaagacttataacgaaatggtaaggcagaaccgtattgaccagaacgctgccaaggctgaccgtgacaaagctgaaaaggctcagcaagaaaacaaagcacagatagccagtcttgcttcgcaagttcagcaactcactacgcagttgactgaaatgcagacctcaagaaatggtaatcgcaatctcgatgcaggcggaccacgcaacaacgtcaatgaacaagccccagcaaagccataccagcttaatccaaatgcagcggtgaacggggttagttctggatacgcacctatatctccgacccgaaacagtccaatgcggacaataacacagagttcaattaagacaaacggcactgatggtgtcattcaggtgatgccgatatcagagaaccggatcagagaggggcgcgaggttgttgcgggaagtgaaaaggccccaacgcgaactattcgcggcgatgggactgcacctgttgatagtaaagctcgtcatgcggcccgtaaggatgaaatgtttcttccagcgacgtcaattattactggggtgctaattaccgggctggaagctccaacgagtttgtcctctaaagcagaaccgatgccggttaccatgcgcattaaaaaagacatcatcatgcctaacaattacacgatggatttgcgtgattgtaatttattgggttctgctgtgggggatctggcatctcagcgtgcgtacattagggcaacctccatatcgtgtgtcaactcgaaaggaaaagcattcgacgtaatagtggaagcttatgcggttagtgaaaatgacgggaaaaatggcattcgtgggaatctgataagcagaaatggaaatgcgattgcaggttctgcgtttgcaggagggctgtcagcattggcggggagtctgagtccatcaaaggtgtcttcgcttaatatagatccaaactctacggcacaataccaatcgccaaacataggtgcattaggagcgctggccggagccggtgcagctcaggggggtctaaaccgtcttgtggactactatacgtcaatagctgagcagcagtggccaattgtagaaattagcccagggcgcccaattacttttgtcgttcaaaaaggggcgacaatacctacaaacctgacaagccgctga

SEQ ID NO: 381583 - DNA, 513 bp, Salmonella enterica; identical to SEQ ID NO: 26286

SEQ ID NO: 381584 - DNA, 858 bp, Salmonella enterica; identical to SEQ ID NO: 26285

SEQ ID NO: 381585 - DNA, 2682 bp, Salmonella enterica
atgagatcagctaacgtctataataaagaattaagccgtcatcagttaggtggatttattcccgtgtatgatcagattccgggtacacattattttctacttgacggaaaccgactcggttttatgtttatctgtagtccgtcgcccggtgtctttgataatcagcaggatgtgttaactgaattatttaaaatggacttcccaactgacaccatctgtcagacctcattaactgcgctgccagacttgatcttgcacttaagtgcctggtctgccgttcgtggtggtcgaatggaaggtcatgataagcttaagggggatttactcactgcatatcaactggattattatgaccgaagcctgaatgaacctttgaagccggaccacgataaattgatgcttcgagattttcaggtctggatttccttttcaattccattgaagtcagcacttccttctgaaatagaaaagactcgcattgatgcgctttactctgacttaatcagtaagttgaatacagtaggccttttcccacacaaagttggtgctgaaaattggctttattgcatggataagttattgcatccgggaaaaacatcgcgttggtctgaaggtcatgttgaagctagcaccatgagacgcctaaacgagcagatcaatgtaccgggtcgaaaatatacagtgacagagaatcatttctcatctacaacgcagagcaatgatatttctgagcatcgttatttcaaacaattatcagtagtgaagtttccagaatttgtaaactttggctgcatgtatgaacttgtagttaattggttgaatggacgtaaaacgatctttagccctttcatgataacccagactgtccatttcgccgatcctttaaaattatcaagagaaaacgtcagatataaggcaattactaacaaacaagccagtattccaacagttttgacgttttgtccaagattaaaggatatggataatgattacatgacgataacacgcgaactggaagatggggctcgcctcctacacagttatctgacatttactgtaatggggaattcagcagttgatgttcagtctgccgcagaccagttaaaatcattttatctggaaagtcgtgttaatgttgctgatgactcgtacatagtatttccctcatttgtttcaagcctgccgatgtgtaatgacccaaagacaatactagaactggatcgttttgaggtcgtgagtaatactggtgctgcgcacatgacccccatatttggtccttggaaaggtaatacggacagacccgtacttaaccttgtctcacgagaaggacagctgttggggctggatatcttcaagacttctgccagctataacatggtcgttggtgcaacgtctggtgctggtaaatcattctgggtcgcatacatcattaataattatctaggcgcaggtccgcgttctaataatctgatccattatcgagatacttttgagggattcaaaaacaattcttatgatgcatttgaccctgatggagcccagattttcgtagttgatgtcggacgctcataccaaggtatttcggaacaatatactaatagtcagtttatagactttgggaaaaagcctgattttacgctaaatccattcgcatttttgactgatgtgactgttggagagcgtgtttttgatgaagcacctgtctttaatgacgattcaaataatcatgatgatgataaggataaagtagcccagaccattatggttctaaaccagttaaaaataatggcatctgaaaaaggaaatattgacgattttcaacaatcggtcatgctgcaactgattagtgaagaatataacgaatcacgcaaagttggacgtacaggctctattactggatttgcgcgacgctgttctaaccatgaagataagcgtattaaagatatcggtgaccagttggggcaatggtgtgaaggagggatttatgggaatcgctttacagaaaatctcccgccaataaattttgatagccggtttattgttctggaacttgaagaattgaaggggaccccacaccttcagactgtcgttctgatgtcgattattcaggccgctcagcatgcaatgtttatcaagaaagacggacgccgccggttgttcatacttgatgaggcatgggagtatatccgtccggacaatgcttcaggttccagtaatcattcaaatcaatttttctcctctttccttgaggccgcttggcgccgattcaggaaaacgaactgtgccggtatttgtattactcaatcctttgaagattacttcacctcatcggttggtcgcgcactaacggctaactcgccgtggaagatcatcatgaagcaggaaaaggaaagtattgaagccatgaaggtgaacaactacttctccacaactgatgcggaatatgagcgtatgaaaaatattcgaacggtaaagcgtgcattttccgagatgctcgtacgattcgaaaatttccaggagatatgtcgcctctatgtagatagaaaaatggagctttgctttacgactgacagcaccgatcgtggaaaactatgggaaatccaaagccgacttgattgctcttacggcgaagcaattgagattctgtacgaacaggaagttgcgagcaaatcagctgcctga

SEQ ID NO: 381586 - DNA, 294 bp, Salmonella enterica
gtggcgcacgtcttcggtgaacgcactctggccacactggagcgtcttctgagcctgctatcggcctttgaggtcgtggtatggatgacggatggctggccgctgtatgaatcacgcctgaagggaaagctgcacgttatcagcaagcgatatacgcagcgcattgagcgacataatctgaatctgagacaacatctggcaaggctgggacggaagtcactgtcgttctcaaaatcggtggagctgcatgacaaggtcatcgggcattatctgaacataaaacactatcagtaa

SEQ ID NO: 381587 - DNA, 4221 bp, Salmonella enterica
atgatttccggaaaactccaggctgatatgcctgccgtcacgtttaatcccggcccgggcgattttgttgcattcgtcaacaataatacaattactgcttcaggtactggcaacgcatgcaatgtgacggttgatgatcgtgcgacatcaagcgtagataacttggtctgcttttttgaatggcttccaaatacctctggctttacagcaaacggattcaatttaacagggatacccaatgcggcaggagaactaaaactgccgtataaaatttcttatttttctggatcagaaaggcagaaagtagaagtggttaatggggagtatacagttaatgctcttgtaccggttaaaccgacgataacgggcctgaaatcgtctatgaatggagtggttcaggatggttacactcttaaatcctatcttaaggatgaagcaattaggaatgtcactgtctccgtagagcctcgcaattatgtgcaatatatctctatcgggtctggatcagcttgcgaagtcgaaattggtgggaatggctgcacgatcgatgttggaagcatcaaagtaagtgattcggatttgctgatgggttcacgggaaatcacggtcactgccaattcgaaaaataattactttgcccctcctgaagcgcagaagctaacgctgacctgggattaccgtcctcctgttgttgaccatactctctggaatttcacggatgaagctaaaacaataagtattggtggacaggagatctatacaggagctagaacggtggccgtagccgtcaaagtgcctcaggaagaaactgagggtgagtggtggttaccaaccgctatgacgctaacgatgaatcctgatggggtgtttaagccgacaacaaaagttactttagaagatggtacggttatcgactttaagcaatcctgggcaacaccgctacgtcgtactcttcagcccgtgagcgggccacagaaagtcggcgatgaatatctgtatatctttgacttaacagacttgacgaatggttcttatgccgcctcgttcacggtagagaacaatagcaagaatacctctacgtacaatgagcctgaaagcaaactgatgctttctgataacccaacactgatggtgcttaaggacggtgcagctctggccaaacgagctcctgtgtatttcttaaatgaaattattgttgccgcattccagggccaggccggagtcgcggatattaaagctgttacgatagataacaaacttgttgagctcacccccacgaaccacaaaggcatttattatctgccggttggggatgatctagaagtgaatgctgaccatgaaatcacggtcatagctgaaaacctgtacggcaagattgtgacatttaatactactttcacgtatcaaccaacaggattcacgcttaaaaactttgagaaagacatcacattgtactcacgagttcggcagtataccgatctcatgagtcagacggccggtgataaatgcactctctttactacagaagagaacgcactggcataccttgaatggtatggtgacaaatctgatatcaccgcctgttaccctcagtggaacaatgtgcctgacgggcttgaattttactttaaaggccggacgccaggcctgacagggttcttcaataaaacaggcgataacctgctcgactatcaggtctatatgataaacggcaagggctctaaagctgtatcgtccagaaaccgccatgtgctgattacgcagttaccttataacccggtccttacctacaagaaaaacaaggtgttgacggggattaacgataacaccgcactggcgtataccactggcggggaagcagctcgtctattggcaaaagtggttcctgctgatgtgacagtctatgtttcacaaaacgggggggaaagcgtaaaaacgacgtttaagaaccgttcatcaaataacgatgcaacgacgtttgttcaacgtcttaaagtggcatcagccccgttgtggacgaagaatgtcttcgacatagctgtcgagtactcgaaggaaccgactatgcgaaccgttgatacgctcaatgtgtatacggtacccgactttaacattagagcggcaatggaaattgaggacaaaaagactgctaccacgatggaattgccattgaaggtgtctgttggccgctataacaattcaacccgcaaaagttcatttagtcggacaacaatgggggactgggatgtaaccatttacgctcagaaaagtgtttatggaaaagatccagaaacaggccgatataaaacgacgtatgaacgtacacccctaaccgaagcactgcccgtgaatgatgccggggtggttgaaaccaagatcaagatagaaaatatggacctcgggaacgtgcgacttgtcgggattgctaaagtacgatcgcctttcgcagatttcgaactgacccgggaaaccagtgcagttagcatccgtgtttataagggcgaagagctagaaggtaatctctcaaagagtctgattatcggacgtatcccgctcagtacgcttgttaacttcaaatcggccagtacagctaactccgatgcgctggcgcctaccgagtggcaggagtcttctgataatggacagacatggactatgcttcaggacatgacagggaagcgaagcatttcgatcaggaaaactgaggttggtaaatggctttacagggcaaaaatgaccaacaagtttacgtcgaaagagtcttatagcgacgttctgacggttgtaacgtacaaacagcctaagctgagcatcgatgttgctgaaattctcgaaggcgatgatttgcctgtcacgctgctggataacgatgaaccaattccgcagggtacggccgaagtgatgtggtcggaggataaagtgaattgggttcagggtgacactacctataacgtatcggccgctgatacgctacctccgaccatttacgcccgaatgcgttacctggattctgatgagttggctgaagagtcatcctggaaagagacgtctgcccggttaaccgtcgctaaacccaagcgcctatctgtttcagtaagtggtatttcaagcgtcgaggtgggaagtaaagttactttagatggtaaatacactaacccgaacagccgattcaagaacggaaatgacgtcattgaagaatggactgcccctgacggacaaaaaatcagaggtgcgaatctgtcgataactttgactgagcagatgctggataagcaaggatatgcggcatttgaatacagtgcatggcttgctggcagtaaggacagtactatttccacgcggaaagtatctgttaaatcttgggtgtataagtttcctgagatgaaagtcagtacaaagcttaaatacaccatggccccgtcgaccttacatgttgcgctgagcggaataaaagacggtggctatcctggggtaacttattctcgggaatggatctacgataaggacaatatctcagttttaaaagatgatggtgatacgaaagaatttgcaattgcgaagccggggaaatatacgttggtaatcgttttccgtgataaccgtaacaacgaacagcgtattgaaaataccttcgtagtcgatgagcaaacgcccatgactgtagaaatgacaccgaaattctctaataagttcatgagggcgcctcttgatgtcacgctaagatctaacattaaactggcgcactctgctgacagtattgatactgtgacatacaaagtaaacggcgaggttgttcctggtagtaaaaactattgggctcagttaatttctggtcttactgagaagaaatacgaagtcacgctggatgttgtcagtaaaatgggccaaagaggtaccgcatcagttgattttgaggttgttaaaaacgcggctccgcaatgtgcattaagctacacagagtctaatatgagctggagtttcacaaacaaatgtattgacactgatggcaagctggttcgatatgaatggtatatcaatgatgagctaaggaatgttttcggcagcactgcgacactgtccaaaaaccttaatcgtgggaagcaagatatacgagttgtcgcgtatgatgatagtggggattcagcaactcagcgtacgaccgtttatggtccggatgagggcgcgtcaaagtccgtagattcagttgaaacctcgcagtaa

SEQ ID NO: 381588 - DNA, 513 bp, Salmonella enterica
atgagagaatacatacctaagaagcgtggtttactgagttttgattggtacgtgccaataaatctcggaatcctgatactggttatgttgattttttttaatcgatttacgtttggtcatggactattaaatggatgtttacctgctgatttttacatgatcgatctgaaggataaatcggtaaggtcagggaatatcatagcttttcatatgccaaaatcagtccgttttatacgtgaaaatgagaaggttattaaaattgtggcaggagtcggcggagatcgcctgagggtcacattggatggtgtttataatgggaacaaattttataaagccaatgccagacgtatttctgtgaaatacggcatacctgccgagaccattgaaagagaattaactattccggaaggggaggtctttttaattgggcaaacggaccactcatgggactcacgtttttgggggccggttaagttgacttcagttattgggaaaacatatgcgatcttttga

SEQ ID NO: 381589 - DNA, 1509 bp, Salmonella enterica
atgcgatcttttgaattaaaaacaactattaagcctctggcctcctgtctggcattttacgccttaatatccaccgctgtggctagcccccagtatcaacaggttgctgatgacattgcaaggcaagctcaggttctgggcgcccaaataccggtaccacacgcatcagaaggtccgctcccgtctggttctctggattctcctgataccaagaaatacatccgccaggccgaagctatgaagaaaaacggggacctcagtcagcaaacaaatcgcggttatgtcccgggtatgaatgctgacagtgtgcaggcagttatagaccatacgcaggctatccgcgctcagagtaataactcggaagctgttaacgacatcattcgcagacgtgatgagattcagggaaattcacagctcagcgagtctgcactgaaatccgtcgaaaataaaccagaagttatgcgcagtcagtcttcgaatatcgaaaagatgtttggttcatcaggaatcaccgccgctgacttcgagcgtaaaatagacagcagtcgggaagaggtgctctcgacagaaaacggtatcactatctttgcgtcatttagcttgcctgattacgtcctggaagatctactccgtaccgcgtcagaacataaggcgagagtggtttttaatggtctgaagaaaggcactacacgcctccctgaaactcaggcagctatcaaccagctggtggtgaaggggaagtttgactccccactaattacgattgacccggacgcatttaaccagtaccagatcacgcaggtcccgacaataatctcccgtgagcaatcccggtttgcaaaaatggtcggctctttcaacgttgatttcttccagcgcgaactggccagaaaacccgaccaagatcttttcccgattgctggtacgacctatccggttgaagagaagagcattattaaagagctcgaagagcgagcacagaaatacgactgggacggcgccaagaagagagcagtcgctgatacctggaaaaaccagtacatggttaatctgcctcccgctcaagagcacaaggaatggctaatcgacccgacaatcagggttactcaggacgttaaagataagcagggtcgcgtcattgcttctgctggcgagctcattaacccactggccaggttcccgcagaacctcacaatgataatttttgacccaatgaacccagggcaacttgagtgggcagagaagcaatatcgccagcgtcttggcagcggtcaggtgatgccgatgttcacgcgcatcaaacaggaaaatggatgggatcatttgaatgatctgcgcgaaaaattcaatgggaaggtgttcaaagttaatgagcaaattattgctcgtttccagataaaaaacacgccagcgctgatctccactgaaaaagagaaattccgtataacgcaattcagtgaagctgaaatacgtggtattggaacaaaaatcgcggcagaggagaattga

SEQ ID NO: 381590 - DNA, 132 bp, Salmonella enterica; identical to SEQ ID NO: 26353

SEQ ID NO: 381591 - DNA, 3177 bp, Salmonella enterica
atgaaacatagaaaaataatttcttcagcaattattgcgtctatgatagctaatactatgagttgggcattttacgtgtcgctcataaacattgcgttaacgcctaaaatatttgcggcagatgcgatttttgaccagcttgaaaacaattttaaccttgccaatcccaacgccaaccggaacgcaaccaccagtgctcaggatattgtggaaaagtataaaaatgctgattccggggaaaatctgagcggcaaaatttccgagaaatatgttggtaaagcagagtcaacaaacctaaatgttgggaagtacgggacgccgaactcaaatgaaagtgttatgagtaatgcggtgtccgacgggaaatcgatcggtaaggctgtacaattacctagcatgtcgggcggtacaattaactcgaattatacgaaagagggggcaaagttactttctagggacagcagcggtaatattggaataagtaacaacccgaatacaacggcaggtaccaaaaccagtacaggggaactattcagctcagagcagaagcacagtgatgttcagttcaatgctggtggccggtatggagatgaaaatggcttcatcaatgacatcaaaaatcgaaaaagtcagctgtttgaagcgcaaagttatgatggagtcgcctaccgtactctggtgaatgcaaataaagaaaacccagcatctactattaaacctaacgaccctatgttcaatgcgggtcgaaacgaaataggaaatgctgtagctggtacaggaaactggctacagaattgtaatacggaaacatcaaaacaaacaattactacgcactatccagattacaaagagttttactgcaattcacccaagaaagataattttaacagttgcacgataactcgtgatttttccgtgccggtttatatctcaggtggtaatggtgatatgtccatgtgcggagataattgtgtgagagtctggtttggcagaagggacgacaactattggaacgatggagtctatgacaactcattaaccttaaaattccatccagatgcaaagctcgcaactgcgaaaataattaacgcagagtgggatgaccatatgagggtcacgcttgatggtacacagatttttgctcatatagatggagcatatagaagtagcaattatccatctccacaaggtcaatgggagttaaagaaatcctggaagctcgataaagtctacgatattactgaacaagtaaaaacctctgtatatcaggagcaggatcgtgaagtgactatggcttcgcgcgtatgggttggcggtggtggggaaggctattttgaagttgagatgacttttgaaaatatgaagttggaggataaacatatacaggagcccgcaggatgttttgatgcagtacaaacgccgaattcattctgtcggtttgacaggtttgtcaacatggatgttggtacaaagcgactcccggaaagtgtgcttaagatggccacaccgctttacaaaggtgatacaggatacttaacctggaaaacaaaccttgaaggctatttctgtgatcccctggcgaaggaaaaactgtgctcttatgatgcgaagggaaacatcatgaaagaccccacaggcaaagacctttgctacaactacgacgatataaaaaatatgcctgacgcatgcagcacatataaaaatgatgctgcgtgtgtgctagataatcagacatgtgctgaaggttggttcgatgaaggcacaaatacttgctacatgtatgagcagaaatatacatgtgacagagggaaagacgtagtcagagaggtagagtcacagactaactcctgtgtaggtatgatcccatgttctggcggaacatgtgaaacaggcccaaaagaagaaaacaaagattttgggaaagtggccgcgtactccaatatggttcagtacatgcaaggtgaagcaaaatgcgaagatccaaacgaccctaactcctgctctgtctttgaagggaaagcagagtggtgcggcaggtccgttggttttgtgaacggactggccaaaacagattgctgcgaaaagccgcagggtgctgctgggtcactggaggcgataatgctggccgggtcgatgatccgaaacacgaactggacccgagtgaatgctcaactggtaaactggactggaggggagagcggaacctgggcatcaatggctaactcagtgggtgaatggactgcatcggcaggtaaaactgtcggacaaatgtggaacaatgtgaccagttcaataaccagcgtttacgaaaacgtggccggtaaccttggccgaacagtaggatcatccgctgctggtgaaagtggtcagcttgctaaggagactatgagttcattcgggcttggtaaacttaagcagatggccatggaaaaagcctatgacctgcttcccgatacagttcgagacttcgtatttaaaaatgtagcgacaacgggtggagaaatagtcttttctgctgctgttcaaaactttatgcttgcattaaatgtaatcggctggatttatacggcatatcaagtcacaaaaatgctgcttgaaatgctggtagcctgcgatcaaaaagaaatggaagcatctattcacaaaaatcagaaatcctgttttacactggatacaaaccgttgtgttaaatatctgaatctgggatttacaaagaaatgtgttaaaaaagcaacagacatgtgctgttacaattcaatgttatctcgcgttattatgcagcaggcctacccgcagcttggaatagacccggttacttcaaactgcgttggcttatcaatagggcagatccaaaagttagattttgacaagattgatttaacagaatggattaacgatgctgttcaggtcggagaagtaccggaccagtacgctacattctcagaatcgtcaataacagcaaatttgccatttaaaaacgagaattatcaacttccatcagaaagaacaaaagatgcaatgggaggagaggagaatatgataaaagccagacaggaaaacgctcaggccattaaagaggagaacgtagactgtagctatcttccacgccctgcgatttgtgaagttgggtcaacttatgtagatccaattacaggtaaggaaataccaaaatattaa

SEQ ID NO: 381592 - DNA, 873 bp, Salmonella enterica; identical to SEQ ID NO: 26359

SEQ ID NO: 381593 - DNA, 1113 bp, Salmonella enterica; identical to SEQ ID NO: 11536

SEQ ID NO: 381594 - DNA, 141 bp, Salmonella enterica; identical to SEQ ID NO: 11535

SEQ ID NO: 381595 - DNA, 1254 bp, Salmonella enterica
atgaatctaattgataagatcgcccttgtcggtcaacgcatgaagagcgagcagatctctctgaaagagtcattattggtctcttcgagggtttcggtatcggatgatagtgtagacggtgttgatcgcctaatctataaccactgcttgaataaaaaaaatctgtcagatttttttggtaaatctcgcgtaacttttaacaaaatcttagcggatcttgaagaaaaagaactggttggtgctcctatctaccagaacaaaaaccatctctatacccgctgggatgtccagaaaataatggatgctctgaactatcctcgatatagcgactactactgtagccgtacaatcgtaacgcagaaccataagggtggtacggggaagagtacaacttcaggcgttcttgcagttgcggcagcacttgatttgcatctaaacgcgcgaatactgttgatcgaatgggacccacaagggtctattggaagcgggatgatccagagcgtagcggaagatgatgttttcctgactgctattgacgccatcttaggggtttacgaagaagactcagattacagaaaatatcttgatttagggtactcggaagaacaaattattgaaggtatgcctttttcaacacaccttccgaatcttgatgttattaccgcattccctacagatgcacgtttcaaagataaatactggcagtgttccagagaagaacgaactgagttattactacgttttaaagaggtaatcctgccggtcttgaagagcaagtacgacctgatcattatcgatactccaccagaagattcgccaatcacatgggcagcggatgaagctgctgatggcattttggttgccgtttcacctcgtgagtatgattatgcctcaacaactgatttcatgttgacgctcagtgagcgattcaaacaatcgccgagcaagggcgaaaatctaagctggttcaaagtgttggcagtgaatgtcgacgataagagtccctatgaaaagattgtcctggataaactggtaaggacagtgcaggaactctttatgtctgcaaatatcaaaaactcagaagcgtttaaagccgcagcttctaggggtagaaccgtattggatattaaaaaatcagaagagctctgctctcccaaacagcttgatgttgccgaagaatccgtgatggcggtctaccagcaatttattaatgagattaagagtttttcagtgaagcaagggggtaatgtatga

SEQ ID NO: 381596 - DNA, 1008 bp, Salmonella enterica
atgagtgatgagcagcatatcgggaacgacaaatcccgttatattaatgcgcctaagcgtactgaagtaatccatcgctccgggcttcaaggcctgaaaggtcagccacgcctgaagaaactttttacattacacaatgggcggaagcttgaggcggaacacatcattgttccggcggaaaaggtggaactggaaaccacagtacaccctctgaacccacgaaatcaggaggctctttctgtaaatgcagtaagagatattctgaaggacattgaagcaagaggtgttgatactgagggcgttgcagttaagcggaacggagtgtatctgctaatagaaggtagccgcaggcgtttctgttgcattcaatcagcaaaagaattgccattatgggttttgcctgatgatgttaacgcagatgatattaattccatcatatcagcaacacaaacttctcgacgcttttcatatcgtgaagtaggtttaaagtatttaagggaaatggaagagcatggatttgttaccaatgaagagcttgcaaactatcatggtatcagtcacgtgtccgtctctaagcgagttcaggctgcaaagattaacagcactcttattgcactgtttcctgactatgaagctattccgaattcttattacaatcgcctattccgacttcaaaaatatatagagaagaatttattttctcttgaagaagttgttgagaatacacgtgaggaaattcgagatctggatatttctgatattgctgaagcacagaaaaccgtaatggagaagattacaacggtagttgaaaaacttgatattaaaccacctagcaaaggttgggatacacgtgaattggcaacttttactaataaagataaatatgcaagaattagcaaaagttcctcggggcgtaaaatccgttttgagtttaatagaatgaaccgagaattaattgacgaaattgagaagtttataaaatcaaaactgagcgaaatgaataattaa

SEQ ID NO: 381597 - DNA, 393 bp, Salmonella enterica
atgaaatatatattgaccgttttgtgtatttttttctgccagactgcaagtgcttacccttatcgcatttacactgccccagaaggtgcaattgtgaaaaatatacttactaatgaagtgatcgggaaaacaccggttgaagttgatgtcagcaatactgaagctggatcaactttcggaatttcaatgtatcgtcatgagaatgtagctattaaaatttttacagtaatgccaaatgcagaaaataattttactgtttctggtccagacgttgccactatgtctttaccgggtaaggccccgttaaacgtgaccaatgacagtaatgcagcagcggttcatatagatctaagaccttttctgtctgaaccggcccatcaccctgttcaataa

SEQ ID NO: 381598 - DNA, 522 bp, Salmonella enterica
atgattagagtttcagcatttattcttaccttacttgtgactggatgtcagtcggttggaagcaaaattgcagtcctcccttcggtagggttcgaccctataatgagcaacagaactgaagcctacaccgacggaaaagttacttttctgattgagagttcaggcactgatgtctggttactcgccaagaatgggaccaaagaatttattgagttgtctgatctgaatctcggcgggagtcgttgcacctattcgtcacgtggaaaacagttgatatcacctagttcagttacaatttttacggtgcccacagttggtttacttggtctttgttacgataacaatgaccaattaacatttattaataactcatttaagaacatctcacagtcttcacgagatggactcacattgccattactgttcagtattaaatataaattcccaggttcatttgattccaaacaaattgtagtcactcaatcatttgatttagaatttttgcaaaaggagcaatcatga

SEQ ID NO: 381599 - DNA, 840 bp, Salmonella enterica
atgcttaaattagaactgataattttgccgttgctggcatttttaggtccatccaacattacaaatgcatcgactaaaaccccgataccgtcgtcccagctatctgatgccaaaactggggttaactatgaatttattactattgctgcaaattacgtcaacggaatgtggcttgttgatggtcgacaaagaccagtaattaaaacaagcatgactaagcgtaactatcttcagattgaaaacgactctgcttcaactcctttaaatcttgtaatacccaaaattgaattttccatcattgcaaaaaatggcgtgtttatatcaaaatttatctcccttgatgaagatgcatccgggaaacgaattctctggttagaacctggttccagcatgacaatttcattcgtcaatgatctatccagtaccccgttacaggcgttagtgtccgtaacaaagcagaaaaaagaggttattgccatttttggcccagatcagggtaaaaaattcaccctgcccctaccgtcagattcacaacaatcgtcaatcgactatgtcccctctccagaaatcgcattacgtatcaatgcccccaaaaaacttcaacccgctatcgcaatcccggaggacgctagtgcatctttattaccttcacatacctacaagatcagagcggcagaaaaagtaaggacttttaaattttcgtcgttcgtttgggttggaaagcgtaacaacctcctcggtggttcagattatttcaccaaagagttgaaaatttacccaggagaaaacttcgatatcagtaccatacagaaaacgactatgaggactgaaaatgattag

SEQ ID NO: 381600 - DNA, 948 bp, Salmonella enterica; identical to SEQ ID NO: 26343

SEQ ID NO: 381601 - DNA, 150 bp, Salmonella enterica; identical to SEQ ID NO: 26344

SEQ ID NO: 381602 - DNA, 1035 bp, Salmonella enterica
atgactgaattagcaaaaacaaaactggctgtggctgaatcaaactctactgaacttgagacactcaaagttgttattgatgatggtagtaaagcggcaaaactggtttgcactaacaatcaaggtgaccttgtacctttattgactcaaaatagtttcgttgcagatttccgggtaagccatgacggacttattccattcaattatctaattgatggtcttcaacgattctcgcaccacagcgaatcaagcaatgctttagaaactaccgacgttgcgcatcagtacgatgaaatcagtcgtcttaatgttcaccatgctctacattcctcaggtctaatgccacaggatgttcatctctacgtaactttgccactcagtcagttttataccgctctgggtgaaaccaataatgaaaacatccaacgaaaaaaagacaacctgatgaagccggtggagcgttatattgatggtaaacgtgtttcatttaatgttgtttcagttaccgttttcccggaatcccttccagcggtaacgcgtgctgatgaaatcgaatcaattgaatcttttgaatcaagcctggttatcgatttaggtgggacaacacttgatgttgcaagcattacaggtcagctggaacagatctccagtgtcaggggttttgaccgtattggttgctcaatcgtatatgatgaaatccgtcgttatttggattctgcaaagctgaatgcaagtaacgcctatattcatcacctagtcgataatcgtgaaaacaaagcctcgctcaaggtgtccccggaagatcttgacggcgtgttcaatgctgttaatggggctgtggcgcaacttcaagaaaaagtgattaaagcagtcactcaagtggaagaacggccgcataatgttttccttgttggtggaggttcttacctgattgaaccggcagttcgtaaacattttgataaatcgaaaatcatcatggttgataatccgcaattcgcactttcactggctatcgcagatactgtttttgcatga

SEQ ID NO: 381603 - DNA, 1206 bp, Salmonella enterica; identical to SEQ ID NO: 19666

SEQ ID NO: 381604 - DNA, 201 bp, Salmonella enterica; identical to SEQ ID NO: 26428

SEQ ID NO: 381605 - DNA, 216 bp, Salmonella enterica
atgctagtcacattcagagtagcctcttacccgcttaaatgcaaggagaagaaggccatgaaactgccgaaccaacccgttgttttgtgcgtattgatagtatgtcttacgctgttgatattcacctggcttacgcgcaattcgctctgcgaactgaggctgaaagacggtacacgggaagtgtcggctgtgatggactacgaatccggtaagtag

SEQ ID NO: 381606 - DNA, 606 bp, Salmonella enterica
atgaatcaaacagaaacgggcccgtccggatttaccgaaacaacggtcgatgaagaacgcatagccatcagggtaatgattggtgatgtggtcggccgctaccgtaagcaggtgccgcctgatcgcgtccagaaagctacttttgaagtgaacggcgggctgctcatggcgctgttactggctctgctgatgctggtctgtattattcagcgtctggcaactggcgaccgcctaatgagctttaccggagagcctgacgtccgggatattcagtttaccctgatgctggtcatcgagttcgcacttggcatggttgtctggtttctgattgcaacgggggagttttcccgcccctggctctaccgccttactccggcaaaacccgtctggctttttgatgaagtggaggatgcagacctggtactgctttccggcaatccctttatcaaacgctggcttcacaaggaaatcttgaaaatcaggaggctgacgtatacccgcctcgatgaggaactggagaaaatcgcccattacccggacagcctccggcacagtagtgttcgtgctcaccgtttgtcactgatcgcaggtacgaaaacggactga

SEQ ID NO: 381607 - DNA, 282 bp, Salmonella enterica; identical to SEQ ID NO: 26431

SEQ ID NO: 381608 - DNA, 171 bp, Salmonella enterica
atgaaaccattcggacttgccggaaaaccccagcctgagccctgcggctgttgctggtaccacccggaagattgtcgctacgctgccgcgaagccgctatatcgccgcagccagcgtaaggctgagcgccagcgtcagcgtgcgtctattacccgcgccctggccgaataa

SEQ ID NO: 381609 - DNA, 324 bp, Salmonella enterica; identical to SEQ ID NO: 26432

SEQ ID NO: 381610 - DNA, 282 bp, Salmonella enterica
atggcgcatcagctactcattggtaaaggaatgatcaccttgaatctcaaacggatttttctcgccctcaccttacttcccttgtttgctgttgccgctgatgattgcgcactctcagatccgacgctgaccgtacaggcgtataccgttaatcctcaaacagagcgggtgaaaatgtactggcaaaaagccaatggcgaagcgtggggaacgttacatgctctgctggcggatattaatagtcagggtcaggtgcagatggcgatgaacggcggcatctaa

SEQ ID NO: 381611 - DNA, 951 bp, Salmonella enterica
atgctgagcgcatttcaactggaaaataaccgactgacccggctggaagtcgaagagtcacaaccccttgtaaatgcagtatggattgatcttgtcgaaccggacgacgacgagcgactgcgcgtacaatctgaacttggccagagcctggcaacccgcccggaactggaagacatcgaagcatcggcacgtttctttgaagacgacgacggcctgcatattcactccttcttcttctttgaagatgcggaagatcacgccggtaactccactgtggcatttaccatccgtgatggtcgtctgtttactctgcgtgagcgtgaactgcccgcttttcgtctgtatcgtatgcgtgcccgtagccagtcgatggtagacggtaacgcctacgagttgctgctggatctgttcgaaaccaaaatcgaacagttggcagatgaaattgaaaatatctatagcgacctggagctgttgagccgggtgattatggaagggcatcagggcgatgagtacgacgaggcgctctccactctggcggaactggaagatatcggctggaaagttcgcctgtgtctgatggatacccagcgcgcgctcaacttcctggtgcgtaaagcgcgtttaccgggtgggcaactggagcaggcgcgtgaaatcctgcgagatatcgaatccctgctgccgcataacgaatccctgttccagaaggtgaacttcctgatgcaggcggcaatgggttttatcaacatcgagcagaaccgcatcatcaaaatcttctcggtggtatccgtggtattcctgccgccgacgctcgttgcttccagctatggcatgaactttgagtttatgccagaactgaagtggcgcttcggctaccctgccgcgattatctttatgatcctcgcgggcctggcaccatatctgtactttaagcggaagaactggttgtaa

SEQ ID NO: 381612 - DNA, 810 bp, Salmonella enterica
atgttcatgccgcctgtttttcctgctcattggcacgtttcgcaacctgttctcattgcggacaccttttccagcctcgtttggaaagtttcattgccagacgggactcctgcaatcgtcaagggattgaaacctatagaagacattgctgatgaactgcgcggggccgactatctggtatggcgcaatgggaggggagcagtccggttgctcggtcgtgagaacaatctgatgttgctcgaatatgccggggagcgaatgctctctcacatcgttgccgagcacggcgactaccaggcgaccgaaattgcagcggaactaatggcgaagctgtatgccgcatctgaggaacccctgccttctgcccttctcccgatccgggatcgctttgcagctttgtttcagcgggcgcgcgatgatcaaaacgcaggttgtcaaactgactacgtccacgcggcgattatagccgatcaaatgatgagcaatgcctcggaactgcgtgggctacatggcgatctgcatcatgaaaacatcatgttctccagtcgcggctggctggtgatagatcccgtcggtctggtcggtgaagtgggctttggcgccgccaatatgttctacgatccggctgacagagacgacctttgtctcgatcctagacgcattgcacagatggcggacgcattctctcgtgcgctggacgtcgatccgcgtcgcctgctcgaccaggcgtacgcttatgggtgcctttccgcagcttggaacgcggatggagaagaggagcaacgcgatctggcactgttgcaaagttag

SEQ ID NO: 381613 - DNA, 402 bp, Salmonella enterica; identical to SEQ ID NO: 304455

SEQ ID NO: 381614 - DNA, 612 bp, Salmonella enterica; identical to SEQ ID NO: 244504

SEQ ID NO: 381615 - DNA, 327 bp, Salmonella enterica
  misc_feature (267)..(276): n is a, c, g, or t
atgaaaaataaagagaagcttttgagtttctcgaatccagtgaggtttattttttcgcactctgctttgaaagaaggctgggataaccccaatgtattccagatctgtagcctccgagagatgggaagtgaacgagaacgtcgtcaaacattaggccgtggtcttcgcctgtgtgttaaccaagagggtgaacgtgttcgtgatgacagcattaacattctgacagtcgttgccagtgaaaattatgaagcctacgctgaacgattnnnnnnnnnnaacgattacagtctgaaattgagagcgaaacaggcatacgttttggtgtga

SEQ ID NO: 381616 - DNA, 390 bp, Salmonella enterica
atgggacacgcccagctttcctccatggtctggcgattaagggggttaaatgccacggtacgcaaccagcttccctccatggtctggcgattaagggggttaaatgccacggtacgcaaccagcttccctccatggtctggcgattaagggggttaaatgccacgggacacgaccagctttcctccatggtctggcgattaagggggttaaattccatgggacacgaccagctttcctccatggtctggcgattaagggggttaaatgccacggtacgcaaccagcttccctccatggtctggcgattaagggggctcaatgccacggtaccctaccaactttctaccatggtcagtcgattcaagtggttaaatttcgttattgaataa

SEQ ID NO: 381617 - DNA, 435 bp, Salmonella enterica
atgaaagttaattttaaaaaggtaatcccccttttaatggttggtttaacagtggcggggtcttactcgatctttaacgcaaaaccgtcgaagcctgacttgtacgattttactggcaaagttcttaaaaccacttctgttttccaaccttgtgataaagaatccacaccttcgttgaacatccagatagcagataacggaagcgtacatatcaatggcgttgcatcaaaagttacttttgttgagagagttccgggtaatgaaattgcagttaagtgtacgggtctgcaagtcaaaaattcccgccttgtgcatacgagctcttacaccatgataatttcggaaggaaaaggtggttttgttatttcggatttgacgcacacgaaggataatgaagttatgtccggtacatggttctttaagaagagagtatga

SEQ ID NO: 381618 - DNA, 453 bp, Salmonella enterica; identical to SEQ ID NO: 26347

SEQ ID NO: 381619 - DNA, 369 bp, Salmonella enterica
atgtaccccaatctggcaaaggcttaccccgcgaataaattaccggatttacggggtgagtttattcgtggctgggatgacgagcgcgggattgatcctggtcgccagttgcttgagtggcagaaaggtactttggttggtggtagagatgacaatgatgccgcagttgatatttcatatatgagtaacggaaatagtattgattacggtggcgataaaacattttcaacgaattaccggagtgattatttatggtatgcaattctgggtaacgtcactggtcgtgccaaagctgctttaagtgggtccttttttaatgtaactcgtccacgcaacatcgcctttaactacattgtgagagcaacatag

SEQ ID NO: 381620 - DNA, 282 bp, Salmonella enterica
atgggacacgcccagctttcctccatggtctggcgattaagggggttaaattccatgggacacgcccagctttcctccatggtctggcgattaagggggttaaattccatgggacacgcccagctttcctccatggtctggcgattaagggggttaaatgccacggtacgcaaccagcttccctccatggtctggcgattaagggggttaaatgccacggtaccctaccaactttctaccatggtcagtcgattcaagtggttaaatttcgttattgaataa

SEQ ID NO: 381621 - DNA, 219 bp, Salmonella enterica
gtgaatttatccgtggctgggatgatgggcgcgggattgatgcgggacgtaccctgctttcagggcaggatggtacaagtttttctcattacggaggtaatttcgacattgggtctggtcattcaatcaataactatgaccaaattgtttctaaccaaccaggattttcccgtttttcatttgcagggccttcacgaggtgatggggttaattatgtaa

SEQ ID NO: 381622 - DNA, 219 bp, Salmonella enterica; identical to SEQ ID NO: 381621

SEQ ID NO: 381623 - DNA, 258 bp, Salmonella enterica
atggtgcagcattttcttctgaaaagtacccaaatctggcaaaggcttaccctactaataaattgccggatctacggggcgaatttattcgcggctgggatgacgggcgggggattgactctggccgtaatttattatctgcacagaatgatgcaattcagaatattgttggttctttcgggcgtactcagctttttagagatgtacttagttcagggccatttagtcaacatggtcaagtattatctacaggcctaa

SEQ ID NO: 381624 - DNA, 219 bp, Salmonella enterica; identical to SEQ ID NO: 381621

SEQ ID NO: 381625 - DNA, 219 bp, Salmonella enterica; identical to SEQ ID NO: 381621

SEQ ID NO: 381626 - DNA, 1209 bp, Salmonella enterica
atgacctcaatgcaaaaatggctacggatcggcgcgacattaatgttcggcctttttgttgcttatcttgaccgttctaatctttccgttacgttacctacgattacacacgacctgaatattgatggcgcaacagccagcattgtattaaccatatttcttattggctatgccttttcaaatatttttggcggcgtatttacccagcgatacgatccgaaaaaaatagtcattctgatggtgctaatctggtcgattgcgaccgtttttgtcggatttacctcgtcagtgtacgttattttgatttgtcggctggtgcttggcattaccgaaggcatttattggccgcagcagtcccgcttcgccagcgactggttttcagacaaagaacggacgcaggcgaacagcattatccagtattatggacagttcctggcattaggcctgggatttatgattttgtccccgctggatgctgccttcggttggcgaaatgtttttattatcactggtgtgatcggcattgttgttgtggttccactttatataacaatgctgaaaaaacaggaagaagcgccttattatcgtgcgccggcgccaacagagaaaactaaacttactctggaatcgctgggcggaactcccttcctactccttatttttacctacatcactcaagggatgttgttctggggaattacgttatggatccccatggttgtcaattctctcggctataccggattcagtaaagcattggtcagttctctgccttatctgactgcggttatactggcaatccccatctcatggatcagtgataagacacaaaaacgtgtacttattgcttcattgggcctactaatccccggcgtgatgttatttctcctgccatttgtcgatgcgccgggctttaaaatcacgctcattaccctggcgatgggttattatgccgccagctttacccccaatatctggtcgattatccagtcgaacgttaaaccccatgcgattggcccagcctccggtattattaatggcatcggcgccggcggcggcggtacgttggcaggcctaatggtcggctatttttaccggacaaccggcagctatatgcagggatttatggttctcggatgcattgttatcctgggcggcgcgtcattattgatctacggcagaataagagctcaccatgcccggcgttaa

SEQ ID NO: 381627 - DNA, 996 bp, Salmonella enterica
atgtcgattaagaagctcgctaatggcaaattctgtgtggacgtgcggccagctggatcagaaggaaaaagattcaggcggcgatttgatactcgtggtgaggctgttttgtatgagcgtcatgtattgcagcattaccacgacaaagactgggttgataagccaacagaacggcgctcgctgagggagttgctggattgttggtggctataccacgggaaaaatcatccttacggtgcgatggagcgagtgcgtattgctgcggtcattagtgatcttgaaagtattaatgttacacgcagcgaccaacttactcgtaagaacataattaattatcggttattgttgcttaaccgcggaataaaacaatccacggttaatcgttattgcgcaatgatgagtggtttcttcacaaaactaattgacgcagaggaatattctggggctaatccgtttcatgatgtgaaaaaacttaatatcaaacagcctgaaatggcttatttgtatcatgaagatattccacgattactggagttgttatctggtgatgaattaaaagctgtcttgttgtgtctggcaacaggtggaagatggagtgaggttgcaaatatcaagggggagcatgttattagcggcaaagtcatttttatggaaaccaaaaatgggaagcgtcgcgttatacctatatcgtcagaactggagtgcatgattaaaacaaaggccactggtcgtttaatttatccaagttatgccgctgtcagagctgctatcagaaaggtgaggcccgatcttcctgaagggcagtcgatacatgttttacggcatacctttgccactcacttcatgattaatggtgggaatatcatcactttgcagagaatacttgggcatagcactattcagcagacgatgacttatgcccattttgcaccggattatctgcaggatgctgtgcgctttaatcctgtggctgagttgtccagatattgcccataa

SEQ ID NO: 381628 - DNA, 300 bp, Salmonella enterica
atgtcaactaccgtagctatgaaaattcgcatcatgcggaagtcagaaatgcttacacaagaaaaaatggcagagattactgggcttactcttgctgcattaaggcaatatgagcaaggacgaaatgaacccaaccttgagtcaacaaaaaagcttctgaaagcccccatgttccgtaagtaccgcgactggtttttgtttgatgaagttgaacccaaggccgggcaggttgtaccggctctcgcacacattgggcaaggcgaagcggaatcatcccgctccggcaagaaaactggttaa

SEQ ID NO: 381629 - DNA, 426 bp, Salmonella enterica
atgcaagaaagcactcaaaacgcgcctgagtcactttgcggaacacgatgcgatcacctgtcagaaatgccagaaggtgagcatcaaaaaacaggacgcaaagcacgtgaacgtgaagaaattcgactttcagaaaatccctcgcatctcctgtcaaaagaaggatttgcgatgtatatcggaaagaccgttgatgccatcgtaagcatggcaaaagcaggaaagctacctgcggtgtatatggcggaccctctcaagccaggcggaaacgctgaactctacatcaacagaaaagcgtgggatgaagcatgcgatcgcctcatcgaaaacgcacctcaggaatggcacgactgggaaaaccgtctgtttttgtttaagccaacaagtggcagacgaaacagaaacatcagcggtaaagcagcataa

SEQ ID NO: 381630 - DNA, 411 bp, Salmonella enterica
atgaacgcaaaaaaagaaggtattatcaaagcactgaaagaaatttcaaagatggaaagcgaagtggcgaaaaaagccgtagcaaataatcatatagacgtcgctacccacacaatgatagttgccaaagtcacggcagaagccgccaaaatcatcgaagaacagggtgcggaacttacgcttttcaaaactcaaccagtcaccggactggatttgtctaacaccggacgccttatttacacaattggctcggagctacagcgatacaccattatcgccggattacaggataaatacctgatcactcctcaccccataagggaatcagagattctgacaagtctccgcctgatagagcgctctcaagtcgcattcattgatgacgcacagcgcaccgtatttaacgcatag

SEQ ID NO: 381631 - DNA, 204 bp, Salmonella enterica
atggcaattaagcgtttttccgtcattcgtttcacatccagagggcgtgaatacgaagttgacgaacggctgattaaaacgctcgaccgtcaccgttcgcaacctgacgcgcatcacatttatctcactgacgacacttacttctgcgccaccaacgtggtgcaggtgaaccttatccgacaggtacaggagtcacgcagatga

SEQ ID NO: 381632 - DNA, 246 bp, Salmonella enterica
atgaccattctggactacatcgccgccaatccgggttgtagcggtggagaaatcgccgcagcactgaataccccaaccacagccattaatgcggagttacgccgactctggcgcagcggttcagtcataagaaaagagcccaaaacaggtggtcgcttttcttaccaggtaaacccgatgcagttcgggtgtggcaacccgcttactcacttgtttaaccagctactgaaggaagccagagcatga

SEQ ID NO: 381633 - DNA, 315 bp, Salmonella enterica
atgagcaccatcaaccaccaggaactacgcgaactggcatttgccctgcaacgaatggcaacgcataaaaaattactggcgtttcgcgcaatgctctcgccgtctgccgtgctggcgctgctggatgagctggagcacgccagaaccacggctcctgccattcgcctgacgctccgtcatgaaatcactgacttctgcgcaacgctgggttcacccggagaacccgaaacaccggaagcaatgcagcgcgaactgcttcaacgcatcgacaaggtttttgatttttttcttgatgcaacagaaaagcacgactga

SEQ ID NO: 381634 - DNA, 486 bp, Salmonella enterica
atgggtaatcagccatctgaaaataatgctgtgtggcgacacaaggtgatgtatcgcctctggaatagttactggcttgaacatattgtggaggtgtttaatcgccgcatggatacggttatcaacgctgctattcttacgttgggagccacggtgtttgctgacagtaatttcagttggctgctgggcggtatagtggctgtacttagcggctgcaatatcgcctggaaatttggtcagcgagcggaggcggcgaaagcacaagcccatcgttacagtgtgctgatttccgaaagcggcaatctcagcacggaagatgtgcttaacaggcttctggaaacagagaagcaggactccccagtgattgaaggcatggatgcagtcgcgcgaaacaaggcgagtgcatctatggggcttaaacatcgcgaccaactctccctccctcaaaaaatcattgcgttattgaccgttggtaatcccggttaa

SEQ ID NO: 381635 - DNA, 231 bp, Salmonella enterica
atggcaaaccgcaaacaacagcgcgcatacgctgcgcgtcgtcacatccagactgaaatcgatcgcagactcacccgcgctgcacacatcgcctttatcatgcaatccaacacattgcacagactcaacagcactatttcagccgactactgcgccgctgtattcagctatctggcggaagacctcctgtctcttcaggatctcatccagcagcaaaacaaactccattaa

SEQ ID NO: 381636 - DNA, 504 bp, Salmonella enterica
atgactctggattcaacagcgatacaaatcattagtaacgtgatagtcctgtttggcgtcatagttgctatctgcacgattatctataacattcgtacagccaaaaaaacacagactgctaattttttatttgaaagtcgccaggacaaagaatacctggaatcgctacatcttctcagacgcattcatcgttcaggaaaatcgtttcgtgcttatgtctttccctgtgaaggcggggtgattacggaagaagagatgactgaacgtcgcaaattccagtacattcttaacttttatgagagagtggccgtaagtatccgtgaagggatttacgatgaaaggatgattaagcgaacatcctttacaacggtcgttacgacttatgatattgcggagcccctgattaaagccatcagagaggatacccaatcaaaaacggcttaccaggaatttgagtggttggtgaagagatggaaagctaggccacttgagaaagatgtgtag

SEQ ID NO: 381637 - DNA, 366 bp, Salmonella enterica
atgaaagagacgaaaaacatcgataccgaaaacacggtagttgctgacactgtgaaagaaaccagtgagcgtggcgtaaaacttacccaaccaattgagcgaggcggcgaaaaaatcacgtatgtggagatcaccggggctattgagcaggctggatctctgcgagatttgtcgctgtctgatgtgctgaatctgaaagcggaatccatgtttacgctgctgtcacgcgtgacatcaccgcgactggatgaagtgacgatcaaaaaaatggcatcccgtgactttattcagttatgtgtggttgccgtaaattttttgagcggtgcggactctggcgggaagaacgaacaggcgacggaagcctga

SEQ ID NO: 381638 - DNA, 282 bp, Salmonella enterica
atgaaagttaaattttttattgggatgtgtctttgttttgtgtctgtgttggggtacgcaaagactaataaatctgacagtcaaattaaacaagaaataatcagggagtctattgaatcttatcccggaaattgtgcatgcccttataatcatgcaagaaatggaagtcgatgcggtgggcgtagtgcgtacagccgtagcggaggatataacgtgatttgttatgcgagtgatgttactgatgaaatggttaggcaatggagacaagagcataatagttaa

SEQ ID NO: 381639 - DNA, 336 bp, Salmonella enterica; identical to SEQ ID NO: 380386

SEQ ID NO: 381640 - DNA, 1632 bp, Salmonella enterica; identical to SEQ ID NO: 380387

SEQ ID NO: 381641 - DNA, 585 bp, Salmonella enterica; identical to SEQ ID NO: 380431

SEQ ID NO: 381642 - DNA, 1284 bp, Salmonella enterica
atggaaagtctgaacgccctgcttcagggcatggggctgatgcaccttggcgcaggccaggccatcatgctgctggtgagcctgctgctgctgtggctggcgatagcgaagaagttcgagccgttgttgttgctgccgattggcttcggcggcctgctctccaatatcccggaagcgggcatggcgctgaccgcgctggagagcctgctggcgcatcacgacgccgggcagctggcggtgattgccgcgaagcttaactgcgcgccggacgtgcacgccattaaagaggcattagcgctggcgctgccgtcggtgcagagccagatggagaacctggcggtggacatgggctacacaccgggggtgctggcgctgttttacaaagtggcgattggctccggcgtcgcgccgctggtcatcttcatgggcgtgggcgcgatgaccgacttcggcccgctgctggccaacccgcgcaccctgctgctgggcgcggcggcgcagttcggcatcttcgccaccgtgctgggggcgctgacgctgaactacttcggccttatcagcttcaccctgccgcaggcggcggccatcggcattatcggcggcgcggacggcccgacggcgatttacctgtcgggcaagctggcgccggagctgctgggggccattgcggtggcggcgtactcatatatggcgctggtgccgttaatccagccgccgattatgcgcgcgctgaccagcgagaaagagcgcaaaatccgcatggtgcagctgcgcacggtgagtaagcgggaaaaaatcctcttcccggtggtgctgttgctgctggtggcgctgctgctgccggggatgttctgctttggcaatctgatgcgtgaaagcggcgtggtggagcgtctgagcgacacggtgcagaacgggctgattaatatcgtgaccatcttcctcgggctgtcggtgggcgccaagctggtggcggacaagctcctgcaaccgcagacgctgggcattctgctgctgggggtggttgcgttcggtatcgggacggcggccggggtgctgatggcgaagctgctgaacctgtgcagtaagaacaaaatcaacccgctgataggttcagccggggtgtcggcagtgccgatggcggcacgcgtatcgaacaaagtggggctggagtcggacgcgcagaacttcctgctgatgcacgcgatgggcccgaacgtggccggggtgattggctcggcgatagccgccggggtgatgctgaaatacgtgctggcgatgtaa

SEQ ID NO: 381643 - DNA, 363 bp, Salmonella enterica; identical to SEQ ID NO: 380433

SEQ ID NO: 381644 - DNA, 624 bp, Salmonella enterica
  misc_feature (567)..(576): n is a, c, g, or t
atgattaaaaaaatcatatttactgttactcctatattttcaattcctccacggggggcggctgcgatagaaacctggatttaccaggttgctaaacggctttcaataccgacttctattgcttgtataaagaatgctggctatcctgaatataataaagtaaacgataactgtgatatccattacattgggtttagtaaaatttataagcgcctttttcagaaatggactcgtctcgacccattaccctattcccaacgcatccttaatattagagataaagttactacccaggaagatagcgtcattgttattcataatagtatgaaactgtatcggcagcttagagagcgtaatccgaatgcaaaactggtcatgcacatgcataacgcatttgaaccagaactgcctgataataatgcaaaaattatcgtgcccagtcagtttcttaaagcgttttatgaagaaagattgcccgccgctgatgttagtattgtgcctaacggtttttgtgctgaaacttataaaagaaacccacaagataatcttcgtcagcaattaaatatnnnnnnnnnnagcggaagatgccaccgttctcttatatgccggaaggatttcgcctga

SEQ ID NO: 381645 - DNA, 783 bp, Salmonella enterica; identical to SEQ ID NO: 377850

SEQ ID NO: 381646 - DNA, 1866 bp, Salmonella enterica; identical to SEQ ID NO: 377853

SEQ ID NO: 381647 - DNA, 828 bp, Salmonella enterica
atgggtattttcatttcaaaaaagttaaaatattttataatggctatggaaaagcgttcttttgccagtgcttctgaagcattgtgtatcacacgctcaccattaagcaaagcaatcactgaaattgaagagcatctagacggcaaattatttatcagaaaacataacgatttaatacccacacctctggcaatagaatattataaaaaatgcaaaccgatatacgaagatttattaaagctggagcaaaacaaaacggtaaaatcatataagataattttcgacagttattttcctttgagttttgtaaatttcttacgcgattttattgaggcgccaggtattgaattccgcgttgaacacacaattattacacctgagaacctattctctcttaaaaatgaaaacaaaatatttataactttcaatgatataattgacattccggatgaaaataaatccttattgacaaccggaggcttgctcatgatatcaccatttatcccatcaaataataacgtattcgtatgcaaagatatttatattaatttcctgaaaaatatattttcaaaaattttaagagattctttacgtgacattaactttgttgaacacacttacgatctttcctctttgatctacaaagtaaaaaatggcgacggccatgcattgctcaccaacaaattagcacagtactataacctcaatggaataaaaaaaacgccaataaaagaatataacagtcgcttagtcatttatcatgatgcgtctgttctggatagcaaacctttgttaaaattgaaacaaatacttaatgattttatttag

SEQ ID NO: 381648 - DNA, 816 bp, Salmonella enterica
atgctggttaaagcactggatgtcgccaagcgtcacgtagaattatccctgtggattgtcgatcttaataaaagcgatctggagcgtctgggtacttcatggagcggtagtattactatcggggacaaacttggcgtgtcattaaaccagtcttcaattagtactctggatggcagtcggttcatcgccgcggtaaatgcgttagaagagaagaagcaggcgacggtagtttcgcgcccggtattactgactcaggaaaatgttcccgctatttttgataacaacagaacgttttataccaagctgattggggagcgtaatgttgcgcttgagcatgttacatacggaacaatgattagggtgctaccccgtttttccgcagatggccagatagaaatgtcgctggacattgaagatggtaacgataagacgccgcaaaccgataccaccacctctgtagatgcgttacccgaagtcggacgaacgttaattagcactattgcgagagttccgcatggaaaaagtttgctggtcggtggttatacacgggatgcgaataccgatactgtccaaagtattccgttcttaggaaaaataccgtttattggtggtctgttccgttattccagtaagaataaaagtaatgttgttcgagtattcatgattgaaccaaaagaaattgtcgacccgttaacgccggacgccagtgaatcggtaaacaatattctgaaacaaagcggtatctggagtggggatgataagttacaaaaatgggttcgtgtttatctggatagaggccaggaggcaattaaatga

SEQ ID NO: 381649 - DNA, 1782 bp, Salmonella enterica
ttgccggatatagattcccgctttgttgccggagagacaaacctgcagtcaggcatctttgatacgttcgactttaccgggatatccctcaacagcgacgatcggatgctgccctggcaattacgtggctatgcaccacagatcaccggcaccgctcggagtaatgcaaccgtcagtgtcagtcagcaggggcgagtgatttaccagacgaaggtcgcgcccggcccgtttgtgctccgcgatctgaatcaaaccgtacagggaacactggatgtccggataacagaggataacggccaggtcagtacttttcaggtttccgcctccacggttccatttctgacccgcaaaggacaggtgcgttataacgtatcagcaggccaggtccgccccgatatctcacatcataccgctggcgaggtattcacgctgggcgaggcctcatgggggatattatcccagacatctctgtacggcggttttctgggcgcgggtgatcattatcagtcgctggctctgggaataggtcagaacctcctgtggctgggggctatctctgttgatgtgactcgggctgccagccagttaccggatacgtcgaagcagaccggtaacagctaccgggtaatgtacagtaaacggttcgatgaaaccgacagccagatttcagttgcggcgctacgccactccgatcagcattttctcagctatgccagctacaccgatcttaaatacggcaacgatgacgatctggaaaaacaatcggtcagcgtgagcggcaaccagaatattgccgcactgaaccttaatctggatatcagcatactccggcagacttggtggaataaatccgcatccaccactttcaataccacacttggttacaccttcgacatgggccgatttaagggctgtacggccagtatttcgctcagcgatacacagcatgacgacgatgaggacgaagatcgccagatctatttctcgctgtcgctgcccttcgataattatcaccgactggggtacgacctgcggcacgacaaacacgcctcccagtcactgtcgtggaatgattcagccgatcttgataacacctggggaatttcagcgggtgcggacagtaacgcaccacataccgaagcgaatttcagcgccaactaccagcatctgacttctgccggagagctgcagctctccggtggctggcaggatgcggactaccgctcggttaacggaagctggaatggctcgctgacggtgacccccagaggttatgccttccatcgtaaaagcgtaagcaatgaaccccgcctgctggtcagtaccgacggggtgaaagatattccgattaataatggttcaggaaccacgaatgcctggggatatgccgtgataccagtggtcaccagttatcagcctgccagcatcagtgtggatatgaatcatttgcccgaaggggcatcagtagatgacgccgtattacaggccacctggacagagggggcgattggttatcgccatatggcctcccgctccggactggatattttcggtgaggttcatacccatgatggtgtccctcccgtcggtgcagaagtgatgccggaaggcggaaatacagatattggcatgattagcgatgatgggcatctctggctgagtggtgttaaagggggtcaacactatcacgttcgctggagtggcagccatcagtgcagctttactctgccggataaccttgcggtatccggttctcgtctgattcttccctgcaatgagtga

SEQ ID NO: 381650 - DNA, 969 bp, Salmonella enterica; identical to SEQ ID NO: 377604

SEQ ID NO: 381651 - DNA, 615 bp, Salmonella enterica; identical to SEQ ID NO: 377620

SEQ ID NO: 381652 - DNA, 759 bp, Salmonella enterica
atggaaaattattacgtaagcaataattcaaatgttgatttgactaagtatggttcgcttgctgatgcaaaaatttccataaatgggtcagatcttgttattaaatttgaatcaaatgagatccatattataaatggtgcgctttattcatcgctaaatggatcgggtattgtcgttacattttcggatactgcagttgcggggaaaacacttcttgataaagttgatctgcagaatgtcaatcttacgcatttaagtcaggatgtcatcaataatcaacatactcaaaatatcgataaagaagaactggaaaaagaacttgcgaaaacaaaagaggagctcaaacatcttgctgaacatgtcaaacaggagcaacactctgagcattcccttcttcaggaaatgcatcagatattacagcaagatgccaggcagcaagatttttctaatccacaatctgatgttcatttgaaggattttgattttgagtatgatgagcagatggacaacgtcgagcagcgcgaatttatggttttatcagacccctcaagctcagtcagtgctcctcctgagacaccgagcagcggtaatttgccttctatcacgttggagttggttgacagtagtgatagtggtattgcacgtgataatgttaccaatgatatctgccctatggttgcaggaaaatcgcaagcggacagtattgtctatatttcaattaatggggtagtggttggtgaaacaacaacggacgcttaa

SEQ ID NO: 381653 - DNA, 351 bp, Salmonella enterica
atgagccgattcaatgcagttcgggggaaaggggttacagagcccgtctttttccgtcatgacctttccgttactcagcagtcagaactgcagggtgtatttcacttcagattcaatgccggacggcagttgtttttctgtattcataaattttttcctttaaaacaacttgttatgaatgaacgaatgctgtccgtaccttctgaccgggggcggcaaacttaccggtctgaaaacgtacagacagtcaccgggattttattcccgacaactgtacgtccggcacccttttcccttttttcacacagccaggtttccggcagtcagagggggagggtacgccatggctga

SEQ ID NO: 381654 - DNA, 387 bp, Salmonella enterica
gtggaaggtgttactggcaccaaagtacaaaaattagccgatggtggcagtgccaccaaagtacaaaaattagccgatggtggcagtgccaccaaagtacaaaaattagccgatggtggcagtgccaacagagagcgaaaattatgctgcgtcagcagcatggaaggcggcggcactgaatatcctgaaacatctgacggtaaaccgccgaagcccggcgtcagccggaaacatcctgacaggatgcagtgttcccctccagccctgccagaccctgtttgtttctggggaaagccaggattgcataaagggaccggaggacagggggaaaaccgaatacttgtcgccgtttttctcgtcagtatactttccgcgctgaaattttga

SEQ ID NO: 381655 - DNA, 204 bp, Salmonella enterica
atgaacggtatgcaggagactcttaccaatcctgtgattaaacagagcgggagttttacggctgttggcgtaccggttgataagcgttttgttttacgtcttggtgagcaggtggtggggattgagaaccagggcttcggaaaagtacgtttaccagccggagatacggtatccccggatgttaagaaagaggtgatccagtga

SEQ ID NO: 381656 - DNA, 267 bp, Salmonella enterica
atgcgtaaagcccgttttactgagcatcagatcatcgccgtgattaagtcggtcgaagccggacgaacggttaaagatgtctgccgggaggtcggtatctctgaagccacctattacaactggaagtctaaatatggcggtatggaggcctctgatattaaaaagataaaagagcctgaggacgagaacagacgtctcaaacagatgtttgccgacctcagcctggaatgtcgggcgctgaaagacgttatcgaaaaaaagctttaa

SEQ ID NO: 381657 - DNA, 381 bp, Salmonella enterica; identical to SEQ ID NO: 377887

SEQ ID NO: 381658 - DNA, 225 bp, Salmonella enterica; identical to SEQ ID NO: 377879

SEQ ID NO: 381659 - DNA, 1830 bp, Salmonella enterica; identical to SEQ ID NO: 377699

SEQ ID NO: 381660 - DNA, 1392 bp, Salmonella enterica
atgattgaatatgtgaacacgtggtcctatcatattataggaaagctccctcaaagtcttattaaaatagtacgcgatagtttcaatcggacaatatataactcttttgattatcgggttttttcatctggattaatcgaactatctcagctatcaataaaatacgcctcgggaaactttactaacactggacgttatctgacacaagccttttataattcaccgggctctgatgccttgatagaatgttactcacgcggtattccacctaaatatcttgaaaaggattcatcctccgaaaggcttaaatcagctcatacgctaggttgcggaagcgtaaatgaagtgacattgtgtgtttataacgcaccacatggacaacatcctattgagaaagtttttaaacctgagtatgttggtcgttatggattaggtaatcttcaacttcattgtttggacggcaataacttttcagaaatgctagttcgtaatattgcatccagtgaggtagccaagtatttaggttgtcaaaatatagtatcaacagcaacagcgggagtgtataaaaaacagtttggactttttatgaataaagctcctggaaaaacaccttgtgatcttgtaagtacaggcgggataactcaatcccagttagaatcgattcttagcatatgtaaaacaaataacaaattggaaattgcaaaagcaaatttacggcatgaattaaataatctggaatgggctgatgcgttagccggccaaatagatcgacattctgataattatcttatcgatattgataagcttaccggcaacataaaagtaacagggattgataatgatgcctcctttagcgtagcattaacaggtataggtattatatcagtaaataatctaaatatatctgtacaagacaggaataagttaaccccttattttcttagaacatcgcagggaaaactataccttgatgattatcatagcccggtaattgatattcgcatgttagatcatatcggtcaagaaaccataataaatattactgggataaatcaaaaaatagtgcctgatcttatttctcaggagacttacgacgcattaatgtctatcgatgctgttgattatgcagaaaccctaagcgaattattaccaccagcgaatgttcaagctgcccttaagcgtcttgaatcagctaaacaacatgcttcagaattatatcgtaataatcgggtcataagtaattggcaagatcctgacattgaaatttattataacaacgaactgatagattatgaaaataaagtaaacagaggcatcagttatccacaaaatgccaatctcgatctatctttatatcttagggacttccactatagtgtattattggtttga

SEQ ID NO: 381661 - DNA, 486 bp, Salmonella enterica; identical to SEQ ID NO: 377953

SEQ ID NO: 381662 - DNA, 306 bp, Salmonella enterica
  misc_feature (233)..(242): n is a, c, g, or t
atgctgtattgggcaaataaagatcagtattatattaaaagcggtgaaaattttgccaactattcgtttaaattagccgatggccgaaaagttagcttcaaattacttgcagcagatacggcaaaagataaccgtaaagataatgatttagatcgctgctttgttcttattgagcctcatgtacgtactaaatttgatgatgaaggtgaagaatacgaacaagaatataaacnnnnnnnnnnccagtcgaagttattaaaacttcatcgattgttgatggcaaatccattgacacagaagaattaa

SEQ ID NO: 381663 - DNA, 648 bp, Salmonella enterica; identical to SEQ ID NO: 377926

SEQ ID NO: 381664 - DNA, 357 bp, Salmonella enterica
gtgggtataaatcgatggatagaaatttgctatatccgtagtgaacagatatttgaactgaagagatttattgatagattcttgttcgacatcacgccaccatcccgatacagtctcagcggtatcagaaatatcatcatcttcagattctcttggcaaacttgcgcacacgataaaccacatgagcatgtttggaattcggagtggattactgacaataattttaagaacatagtgatggctaccacttttattgattctgaaaagcttgaagactgcgagccagtaatacctgaagatgaagttgtgctatatccttatgatagtgactatgattatgaggaagaagaagagtag

SEQ ID NO: 381665 - DNA, 234 bp, Salmonella enterica
atgacccgtgaggctgcacttgaacgattggcacacccagagatgagtgaacattttctggaacaggaatttgaatatgttgctcataaattaggcatcaccgttaaagagttacagcagctatttgaacagccgaagaaaacctaccgcaattataaaaataaacgctggctcattggtcttggtgccaacattttgcgtaaattaggtatggaaaagaggttcttccggtga

SEQ ID NO: 381666 - DNA, 279 bp, Salmonella enterica
atgagtaagcaaactgttcagtgccccttttgttttaaagaaagtccccacggcgtaaaaatatgcaccggatgccatgcaaaagtggcctatggtgaaagtccgctcagtgtggccttcctgtttcaattcgtggccttcggtctcgcatggttagtattttcattgaccgatagcacttctgtttcagtcattacgttttttgccagcatcattattcttatctgtataattaaaaagacatatgcaaacagagttgtttttattcaacgaaattaa

SEQ ID NO: 381667 - DNA, 258 bp, Salmonella enterica
atgctttcttatccgggaacacaggaaattatctaccagaatattaacactagttcgagtgcgctgggtattttacctgctcctgttgcgagtattggtggtaatagtgattttccttatgtcattctggacgatggtactcgcttgcaaaaaggggctgtgctgcctggggggtatcaaatcgtgaatatcgacagtattaacggtatcgaacttactaaacgtggggagctattgcatctacccttgggattatga

SEQ ID NO: 381668 - DNA, 540 bp, Salmonella enterica
atggcaagagataagcctttaaagttggccgctattgtccagagtggatttacagaaaggttagatgcagacagagcttatgctgatgttttaatgaaaaaccctctcaacatgcatgaatggagaacgacatggacaaatacttcagcatatgatttacaatacctcttagattttatcccagacaagataagaatttcgagtaaaaagaaaagtgttatacatgggctgggccgcaacgttaacttgttcgaagatttgagaattattgcttataaagaagtattaagttttaaaaagagtaaaaactatcgttgttttttttatgatatgctatcaaaagcgactttacttaataatcatagcaaccctcaaaatccattatctcatgaagagacaaaacaaatttgtagcagtatttgtaaatggacatggcgtaatttttcaattcagagattttcgacaatacaatcaataagagcaaagaaaacaagaaaaacgcaaaaaaaattagaaatagcattggagacgttattatga

SEQ ID NO: 381669 - DNA, 567 bp, Salmonella enterica; identical to SEQ ID NO: 380624

SEQ ID NO: 381670 - DNA, 690 bp, Salmonella enterica; identical to SEQ ID NO: 28130

SEQ ID NO: 381671 - DNA, 342 bp, Salmonella enterica
atggatttcttcgtcgccacggtggatcaaccgtgcggcgagatcgaccgtcacgccggaaaagcggacgatcggatcggcgcaagggctggcggcgtgccgtcgcagcgcgacgcgcaaacgcgcctgcagctcgccaatgccgaatggcttgctcaggtaatcatcagctccggcgtcaagcgcggcaatcttatcgctttcttcgctgcgggcggaaaggacaatcaccggtattgcgctccactgacgcaggtcgcgaataaaatcgattccgtcgccatccggcaggccgagatcgagaataatcagatcgggctttcgcgtggcggcttccagtaa

SEQ ID NO: 381672 - DNA, 1338 bp, Salmonella enterica
gtggctacatcacaactggcactttttaatccagccgacgaagcggagacttatcacaattccgggcggcatggtttcttttctgtactggctcagtggccaacgggtaaacgccaatcttcttacccattaagtgagatggccaccgttcttagcatggtcgatacctcacgcgatacatggataacccaagctgaatttatgcgtcctaaccggcgtgtagtaaacctcttacgtttggggttgctttttgtcgatatagatacctacaagatgagttgggcgcagggtagaacacctgaagctttggccgctgcaatcaactatttctgtcaacaagaaggcataccagaaccctcctttatggtctattccgggcgtggtattcaggctaaatggctacttgaaggaaccttgccacgtgccgcgctaccgcgctggaatgcttgccaaaagcatttagtatctaaactttcctcgctaggggctgatcccgcagctaaagacgccagccgggttttacgattggttaatacggttaacactaagagcggcaatatttgccgtgtagtaagcgttctagaacgtgatggcgcaccaatccgttataacttcgagtaccttgctgaaatgttattgccggtggctcgctgggatattgaaaagcaacgccagacaaaagcagaacagaaacttcaattgctgcccggaggccgacaaagcaacctcagaggttttagcggtcgtcagcttgcatgggataggcttgaagatttgcgcaagctggacgagctgcgcggcgggttagcggaaggggaaaggatgcgtcatttattttggcgtattaattttttgctgttgtccggggcgacaaattcaacgcagatgtatcacgaagcggccgcactggccacggagatctcccctgcatggtcttaccgttcacaagagttaatgacgctgtacagcaaagcaaagcagtatgaagccggtgagaaggtatctttcgggggcaaggaattttcaccactctacacgccaaaaaatgacactctaatcaacctgtttcaaattacagatgaagagcaacgccagctaaaaactatcatttctaaaaatgaagcgttagagcgtagacgcgcacgagacagaaagcgtgacgaggaacgccgcagagctgctggagccgttgagcgtgatgtttacgaagctaattcactgactaaacagaaaccgtgggaagtgttaggaatgagccgcgctaaatggtacagattgggcaaaccatcaggcagtgagacaactccctcccctattactaatggcgtagcctcctaa

SEQ ID NO: 381673 - DNA, 315 bp, Salmonella enterica
atgaaccagacacaagtattaagaccggcaacgccgggtgacgttctgctttctcagttcttagaaccgaacagaattagccaaacggcgttggccacctataccggatggacgagaaagcacgttaatcagctctgtcatggaaaagtggccataacaatagattccgcgctcatccttgcaaaagtctttggtaacgatcctgatttttggctggatttgcagaagaaagtcgatttatgggatgcactgcattcagaagatcgccgcagcagaatagataaggcgcgcccttttcaattactggcggcctaa

SEQ ID NO: 381674 - DNA, 372 bp, Salmonella enterica
atgagaacattcaaaggattaagcaaccaaaaccggagtccgacgagtaatgttgttccgattcgtccgggtggcggggttgcttctaacgatgataatagtggtgctgcgaaagctaagtggattgctggggcgacggcaaaaggcttaggaagcgttttgcgctccctaacctttctcatcatgttgtggctacgtttgccggttcgcctgttgttggttgccacatcagcgatagcttttattggcgttgttctctgccttgctatttttagcgaccgttccatggttccgggtttcatcattattggccttgcttctacggctctcgcttggctttatgatttagttctcgccaaactgaccccttaa

SEQ ID NO: 381675 - DNA, 309 bp, Salmonella enterica
atgaacacggtaaaaattatcgctgtagccttggggttgactcttatttctgctatgccagcccaagcaaaagacccttgtaaagcggttttatgcctcgcgggtatgctgaccggcaatgacggcggatcagagtgcaaatcagcagttaatgattacttttcgatagtcaaattcaagaagggcaagttcaaaaaaagcgcaactaaagaagctcgcggcgcttttctacaacaatgcaccagtgaggatgaaggctggattaacaaaataaatagcgcctacggcactgttcgtaagggtttctaa

SEQ ID NO: 381676 - DNA, 747 bp, Salmonella enterica
atggaactcttttcaatattggcaacctgcgccgctttgacttttggtacaggtagcccagcagaacaggcttaccctgttagtgagcaagaatgtaaatcagcagcggcgatgtatcgtgagcagttgcaaaaagtacagctcaccgatcaggacagggatgctattgcacgtgttgccatagccgaagcggccaatcaaggtgattcgggtttagctggagttgtgtatacgattatcaaccggcgtcttagcggtcagtttggccagactgttacggacgtagtaaacagccctaagcaatttgagccagttaccaaagttggtggtgactggaaaaagttaccttccgtaaccgtttcacaatatacgcaagtacagaccatcatcaatttggcgttagaaggtcacttgcctgatattaccaatggtgggttatttttccagaatcccgcaattgtagctgacagagaaaaagcaggaaaagtatctaaaggtttaactaatttcggtggttccgcaccatcagcgatcattaaagatcatgccttctacgccagtattaataaaggtggcccatctaacgctcccccggttcaattaacagcttccgctgtgcctgagcctaaaaaatgggatgtatacggaactgcaaagtttcaaaaaaatggtaacgccgaatggaatgtattttctaaaaatacgccatccaaaagcgtttatcaaaatgaaggggtgcagccatga

SEQ ID NO: 381677 - DNA, 1983 bp, Salmonella enterica
atgaaattaatgattgtggaatctccggggaaagttaagaaaatacgcgaaatccttggcgatggttggaaagtcgccgccagtgttggccatgtcagagatttaccagaaaaagatattggggttgccgcacctgacttcaaaccaacgtatgtggccactgagcgcggcaaagaggttttggccaagcttaaacaggacgttcagcatagtgatgctgttttcctcgcaactgacttagaccgggaaggggaagccattgcatggcatctgaaacaggcgctacggcttgagaacccgcagcgggtaacgttcgctgaaatcacccctcgcgctatcaaagccgctctggcgtcaccaagggcaattaatatccctatggtagcctcacaagaagggcgaagagtccttgatcgccttgttggttacatggtttcgccgcgcttgtcagaaatgagtgggcgacaagggttatccgctggccgagttcaaagccccgccgttcgtattattcttgaacgtgaacgtgctattcaaaactttaagcccaccgcccattttggtgtaagacttaattttgcaggcgattggtttgctgaatgggatgtaaaacctttcttggccgaaggtagcgaatatttcatggatgaaggctttgctaaaaaaatagccgccatccgggaagttgacgttatttcttatgaagagaaaaacgcatcaaaagcacctcctgcgccttttatcacttcaacattacagcaggcggcatctaataaattaaagatgaagccaaaagcaacaatgacaaccgcgcaaaaattatatgagcaaggccatataacttatatgcgcaccgataacccaaacctttctgatgatgctctggttgaaatataccaactctgcaaagctaagggtttacctatggcgtctaaacctcgtacatggaaagcgaaaggtgacgcacaagaagcgcatgaggctatacgaccatcacattttgacgttgaagaagcagggagtacgccagaagaaaaagctctctatcgcctgatatgggatcgcgctgttgcctgtcaattagaatcagctcgctacgccgttcgcgtggcccgcttccgggccagtgacaatagcgacggaaaaccagttgagtttgaggctgaaggtcgaacgttgacgtatgccggatggacaacgttatttaaagacgataccgaggccgatgatggcaaaaaggaagagaaacctaagaacccgatcccttctttgcaacgtggtcagcaccttaccgctgaaagtgggaaggtattaagtaagacaacccgcgcccccagccgctttactgaggcatcacttatcgcagaactggaaagattaggcattgggcgaccaagtacctacgcggcgatcatggaaaacatcatgcgccgtggttacgtcaaatcggatagcgcaaacaaatatcttttgcctactgaaaccggtgcattagttattgatgctttggttaaaggcggctttagctttatcgagtacgactttacacgcgctatggagggcgagctggataaagttgcccatggccagacatcatacaaaaacgttgttggctctgtttatggacgtctggaatcagaacttagccacctgaaaattgacgttgcccctcaatacccctgtccaaattgcggcaaggctcttttccgcaaaaaaggggctaccggcttcttttggggctgctccggttatcctgattgctctaccacgttaccagatacagcagggaaaccggggaaaccaaagcccaaaccagaagcttcaggctttaagtgtcctgactgtggaaagcctcttatccggcgtaaaaaaccagccaccggcggcaaaaaagggtatgactttttcggctgttctggctatcccggttgctcatcaaaatttgatgctgtgaacggaaagccaaaattcgagaaaaagtaa

SEQ ID NO: 381678 - DNA, 255 bp, Salmonella enterica
atgaacaacaaaacgataacagaaccagaactgattgataaccttgtgaatcagtcagtaaagaagatgatgctggtacagggtgaagatggaaaatttagcatccgcgtacagctttcgtggaaaggaggagatcttttattagagacacaaaggaagacgccgcgagtgtgggcgagtttagacaggttagtgaaacacattaacagtaagtacgggaaagtcccgatcattgagttacaacttatggagtaa

SEQ ID NO: 381679 - DNA, 309 bp, Salmonella enterica
atggcaaatgtaaaaaccttcacccgtcagattgcctctaccacttggctaatgttgggtttgatgatgttaccgggtttcgctcacgcagccggtggcgatccaattaaccaagggcttcaatggttaattgatctcttaacgtcaggcattgcccgttcttgcgcaatcttagcgatcgccgtgttgggttacttagcatgggccggacgtctccaagcccgtaatgccgggtttgctatcggcggtatcgtgctggtatttggtgcggcgtctattgccgacgcaatcattgctgtagtccagtaa

SEQ ID NO: 381680 - DNA, 252 bp, Salmonella enterica
atgctatttgcagcgagaaaaatcactccagttgtagcgatacagaaaattattgcctcgtatgttacgccccacacaagtgaggggcgtgtagcaccggcaaagagaacatcttttcctgatgccatgacgccctccttactggactacagcaatgattgcgtcggcaatagacgccgcaccaaataccagcacgataccgccgatagcaaacccggcattacgggcttggagacgtccggcccatgctaa

SEQ ID NO: 381681 - DNA, 2451 bp, Salmonella enterica
atgagtaatgcaactgcgacaaaatcacgccaatgggtgaatgaaaactctgttgctgagtttatcccttattctgttcaccttgacgaaaacactattaaaactaccagtggctattatcttcaggtaattaagattgatggccgcgcccatgaaagtgcagatccagaagatgtgattaactggaaagaacaacttaatgggctgctgaaaaatatagcctcaccaaatatatctctttggacaaacattattcgccgtgaagaaaatacatttcccggcggggagtttgaagaaggtagctttgctgaacagctaaataataaatacaaaaatcatgttggtaaaaataacatgatggtaaacgagctgtatcttacagttctttatcgcccttcaggtattcccggcgttaatctccttcagcgttttgaaaaaaatgttgaatctattaaacgtatacaggctgaagctattgaagggttacacgaagtggttaacaccgtgaccagtagcctaaaacattatggggcgcgggttttagggtgttatgacagaaagggtataaaaaactctgaagtattagagtttttttcttacctgataaatcttgagtggattcctcgcgctttacctcgcaaggtactctctgaagcgttgccttttgatcgtccgttctttggtgaagatgcctttgaagttaggggcgtcactgaaagcaccgtgggcgcagtccttagcattggtgaatatccagaaggcaccgaagcgggcttaatgaatgcgtttttatccgcgccattcccgttgattttgtcgcagtcgttcaactttttaagtaagccggttgcaactgaattattaggaagaacacaacgccgaatgaaaaacgccggggacttttccaaaacgcaaatggaagagatcgacgacgcgcttgatgatttaacttcaggccgtcttgtattcggtgaacatcatttagccctaacgattctggctaaagatgcacgaagcctgaagaaaaatctttctgacgctaaagccgagctggtcgattgcaacatgatcgtgtcacgtgaagattgggctatagagtctgctttctggtctatgttgcccggaaactttaagtaccgggcaaggccagcccccataagttcacgtaattttgcggggttttcctcatttcacaactacccaacaggccgcagaactggcaaccagtgggggccatcggtaacgctacttaaaactacttctggcgctccctattattttaatttccatagcgagttaagcgccgagaaggccagaaaactagcgcaactggaagcggaaaagggggcgggtagcattcaggaaacgaaagaggaacaaaaagctctagggaatacgttaattatcgggccttcaggctccggtaaaaccgtaacgcaaggtttcttgatggctcaaagtaagaaatttaaccctactcaaattatcttcgataaagatcgtgggttagaaatctatgtaagagcagaaggcggcgtttatttgccttttaagaatggtgcccgcactggctgtaacccgttccagatggagccttgcgaagatacttatcagctccttgagcagatagttaaaaaatgtgccggtggttccttcacgaccgttcaggatactgacattagtaataccgttcgcggggttatgcgcctgccgaaacacttacgccggatctctgcctgccttgactttatggacccaacagatccagaaggtgtgggcgctcgtttggctaagtggtgtggtaatggaaccttagcttgggtattcgataacgaaacagacgacattgattttagtaataacacgatgttcggttttgacgttacggactttcttgataacgccgagatcagaacgccattaattatgtatttgttccatcgcatttctcaaattattgatggccgtcgaatgatgattttcatggatgagttctggaaattattgttggatgaatattttgaagactttgcacaaaacggtctgaaaaccatccgtaaattgaacgggttaatggtgtttggcactcaatcagctaaagacgttcttaaatccgctattgggtacagcatcattgaacagtgcgcaacgatggtctttatgcctaaccctaaagctgattgggatgattacgttaaaggcttcaaacttacagaacgtgagtaccagttaatcaaaaccgacatggcccccggctctcatcagttccttattaagcatggccataattcagtgatcgccaagctcgaccttgcagggtttagcgacgaactagccgttatctctggaacggctgacaacgtggaactattggaacgcatcatgcaacaagtaggggatgatcctaaagtctggttgccagagttccataaacagcgcgtagctgcctga

SEQ ID NO: 381682 - DNA, 645 bp, Salmonella enterica; identical to SEQ ID NO: 285459

SEQ ID NO: 381683 - DNA, 249 bp, Salmonella enterica; identical to SEQ ID NO: 40481

SEQ ID NO: 381684 - DNA, 1014 bp, Salmonella enterica
atgggtacgggaacaaacttatttgtccgtatttttgccaacgttgactcggcgttatcaacctacattaccgatacggtcggtaatgtaattggttatgcctcgccactgttcaccagcatgatgatcgtctggattgccatgtggggcattctgatgatgttcgccaaagttgatgaaccggtacgcgatggcgtctttcgcatcattcgtattggtgggattgtcgcgctgggcttaacggtcggtacttatatggatgtggtcgttaacgtcctacaaaaaggcccggaacacatttcagcggtggtttccggtacaacgggaacaacagccgacacgctggatgcgctctttaccaaaatattcaatgtggccaaagctgcatgggataagggcggggtcatgaacggaaacttcggtttgtatctgatagccctgattgtgctggttgttgggtgtggattgacgttgtttgtggcgttcttggtcttgttgtcaaagttcatgataaccatcctgctagggattgggccactgttcatcattgcactgctatttaacaccacgcagcgattctttgaagcttggttagcgatggtatgcaactttggcattctgctgattctttcggcatcggtaggttcgctgatgatctcgttaggtgacacctacatttcaaagatggcaccaacagaaagcgcagcggccaatatggctaacttaggggatgcggcgatgttatgccttgtatttgcgctttgcattttagtggtaaggcaagttccttctatcgcttcagcattaggcggcggtgtggccatggccacgcaaggcgcgttcggctctgccatgaatgcgttacggccaacagcaatgaaacgcggtatgcagaacgttaaccgagaagttaagacgactcaacgcgccatgacttcccccgttcgcggtggtcaagcggcttatacctcctatcaaaaacgctttggtggtaattcagtcgcacaaggatag

SEQ ID NO: 381685 - DNA, 219 bp, Salmonella enterica; identical to SEQ ID NO: 285462

SEQ ID NO: 381686 - DNA, 759 bp, Salmonella enterica
atggccaataaaaaagcagcccctgccaaagaaaaaaaagtaaccgacaaggattactttgatgaggctaaaagctgggatgaatctgagattgtcagagaaaagaaatcagcccgtagagcttggtcggcattttgggctatgactggtgttgtaattgttcaggcgattgcaatttctacaatgatgcctctaaaaacaattgaaaattcaattgttcgcgttaatgacaccaccggcgaaactgaggtgatcagcaacctgaaaaacatggatgagactaccgaacaggtgatgagccgttactggttggctaagtatcttcgccaccgcgaagggtatcactggaacacccgcgaagatgatcgccttcaggttggcatgttgtcagacggggccattcagcaacagtacgctgattacaccaatcccaaagttaacccttacgcgccaatcaagatttatggtgaaaccactgaggttgatattaaggtcaatcccgccattacatacctaaacggtaaaggtggagtgaaaccagagaagggcgagaaggatcagttcggtgaaacggtgtatacagcgttagtacgctacacggctaccgtgaagaaagacggtgaaatgccggtaacaacccattgggccgctactgtctctttcgtctaccgtaaagagccaatcaaggtggatgatcgcctgataaacccggttggttttcaggttattagctaccgtaaagatcaggaagggggttaa

SEQ ID NO: 381687 - DNA, 822 bp, Salmonella enterica
atgctttcgcttaataaaacctccttatcggttcttctcgttctcggcattttttcttctacggcgtttgcgcttgaagttccaagaggcggcgcttatgacaaacgagtcaagttcatttcatacaaccatgagcaagttgttaaattgattggccattatggctattcaacagatattcaatttgcccccggcgagaacgtcaccaacatagcaatgggcgacccggacgcttgggaagttgcgccagtagaaaaccatatcttcattaagccaacaggcgaacaagccaccacaaacatgacggttttaactgaccggcgcgtatacacgtttgatttatccgctactggtaagaaaaccggcgatatgtattttcaggtaaatttccgttatccgcaggacgaagcggcgcggcgtgtagctgaagaagatgctcgcagactgaaagaacggatgaatgaaaaagcgcctaacgcttggacaaactggaactattgggtattcggttctcgtgaagtctccccttggcgtgcttatgatgatggccgttttacctacttcaagttttccggtaatacctcgatccccgctatctacattaaacatgctgatggctctgaaacacttctaaacccaacgatggattccgatcacccggataccatgattgttgaaaaagtggctcctaggtttgttttacgcaatggcaaatatattgccaacgtctacaacgaatctttcaaccctcatggattaatcaataccagtggcacaacgtcacccggcgttaagcgtgtaattaagggaggggcgcagtaa

SEQ ID NO: 381688 - DNA, 1191 bp, Salmonella enterica
atggctaaagaccgcgacgacttagatacagaaatcgaacaggaagatgctgatcgtggtatgccttcgatttccaaaaacaggaaaaccagtaaagcctccggtattggtcagaaaatcgtagctgtaatcatagggattatcgttattctggcgttaatagcggtgaatggtggctttaaaggtagtgaagaagataaaccgcctaagctcactggtaacaccagtgtagccaaccggcttggcccgccgccttctttaccaccgccgccgccagctccaccaaatactgagacgccaaaagaagatcggatgttgaatacagggcaaatagccccgccgccgccgtcttcagcttcgggaactggtggcaatgggaagcatgaacagacaccagacgaacgcaagcgggcaagctctattctggcgtttggcagtatttctaaacctcaacagcccggacaaaaagcaggtaatggccagcccgttcaaatggccggtgaggtacaggagggtaatagctcactatctgaaactgaccgcgctgatagtctttctaaccggcttaaaggtactgaggttagcggtagcagggcaagcctgttagtagacagaagttactttatcacacaaggcactttccttaattgtgcgctggaaacggctattagtagtgatgttcccggaatgaccgcctgccgtttaactgatgatgtctacagtacagacaagaaagttttgctactggaaaagggttcaaaaattgttggccagtatcagggcggcataaagagaggacaggcgcggattttcgttctctggactcgtatagaaacgcctaaaggggtgttggtcaaactggattcaccgggtactgatgcccttggccgctctggtcttgatggcttcgttgatacgcacttttgggaacggttcggtagcgccattatgttgaccacggttgatggccttattacctacggggctaatagcgccaacaatggcagcaatggcaaccaatacaactttggtgataccgcgcaaacagcgcgagattcagcgagcattgcgctggaaaactcgatcaacataccgccaacgttaaccaaaaatcagggtgacaatatttctatctttgtagctcgcgatctcgacttcaggggggtgtatgaccttaaagcagcctactaa

SEQ ID NO: 381689 - DNA, 1038 bp, Salmonella enterica
atgaccttaaagcagcctactaatgctaaaggttcatcacttttggagtaccttcgggtactccagccctttttaaacgaagacggggttactgaagtggtggttaataaacccggagaggtaattactgaaggccggaaagggtggcagtttcataacgtaccaaagttagattttgctgcttgcgctgacatatcaaagcttactgccacttattctggccagtcatttgacgagcgtaagccgattgtttccgcaacattaccctacggcgaacgtatccagattgtgcggccaccggcgacactgagcgaccgttacagcctgactatccgtaaaccctccgatgtgatcagaacgttggatgattacgagcgtgacggtgcattcgatcacatcgtaacggacgctgtagggctgcgtgactttgagcgagaacttattgagctgaagaacgccagacgctttaaagagttcctcacgctggcgattaaacatcgccagaatattatcgtttccggcgctactggttcaggtaaaacaacgttcatgcgttcattgcttcagcttgtacccgatgatgaaagactgatcaccatcgagaacgtagacgagctgaagctataccaaacacataaaaacgttgtgcctctgttttacagcgccggtggccaaggtattgctgatgtgacccagcagcaccttttagaaagttctcttcgcatgaaaccagatcgtgtgtttgttgccgagttgattcgtggtgatgaggctttctattacctgcgtaacgttaacagtggccatcctggatctataacgtctatgcacggcactaacccacgaatggccatagaacagcttgttttgttcattaaggaaagccaaagcggcggaacaatgtcacgtgaagatattaaacagcttctgtttagttgcatcgacataattgttcaattccaaaaccatcaaggccgtcgatatatttcggagatctattatgagccagagttcaaacaaaatattttggtggcttaa

SEQ ID NO: 381690 - DNA, 1929 bp, Salmonella enterica
atgagccagagttcaaacaaaatattttggtggcttaaaatcctgctgctgattagcttgccgcttatctttttggcggtagcggcttggattgctggggctatattcatggccggtaatggatacgaggccaaagatgcgacacccctgacgctataccaatattggtactattacggtgatatacctaaaactaagttatggctgatggggtctttagttggcggtttaattattaccgcgttgccttgcttgctgccgcttctgccgaagaaaaccccgttgcatggtaacgctcgctgggctaacagtcgtgagatccgcgaggctggtttattcagtgatgatggtattatcgtcggcgtaaaaaaaggctttatgggccttttcatgcagtaccttgtattttccggttctcaacacgttttgatggccgcgccaactcgttcaggcaagggggttagtatcgtagtccctaaccttctttcatggcgtgatagcgttgtagttctggatataaaacaggaaaactgggatataacttccggctttcgctctcgtcatggccaagactgttttttgttaaatcttgcgccaagggattaccgttcgcaccgctggaacccactattttatatttctgacgatcccaattttcgcattaacgacattcagaaaattggtcagatgttgtttcccaagattgagaatgaagcgccaatttggcaatcatcggcccgttctctttggttaggtatggtgctttatctcatcgagacggaagagctgccggtaacaatgggtgaagcccttcgccagttaactatgggtgatgaacgtctggctgaaattgtcgaagccagacaagaatctgaaacccctttatcagatgaatgttacttagctctaaaagaatatttagatacgccagataaaacacgtggttctgtccgtaaaggttttacttcggcgttagaacttttctataacccggtgatcgatgccgtaaccagtggtaatgactttgatttgcgtgaactgcgtaagcgccgcatgtctatctatgttggcattacaccggacgatttagaacgtttggccccgctgattaacttatttttccagcaagtcatagacctgaacacgcgggaactgccggagcaaaatcccgaccttaaatatcaggtattgatgttaatggatgagttcacggccatgggcaaagttaacattctgtcaaaaggcattagctatgttgcgggttatggcttgcgaatgctgccaataatccaaagccccgcgcagttacgcgaaacctatggccatgatgcagcggaaacatttattgataaccatgcgttacaaatagtttttgcgccaaagaatcttaaaattgccaaagaagtttcagagtctcttggtactaaaacagtgaaagccagatcccgcagccgttctactattgggagggcaagcggttcagaaaataccagcgaaactggccgcgcgctgttaatgcctcaagaacttaaacagatggggaaaagcaaagaaattattctgttagaggattgccctccgatccaatgctctaaaattacttggtataaagaccccacttttgaagccagaggtaatggccgtgatggcgttaaattcccttccccggaagtgacaattattgacccagccaacaggccaaaaggtgaagtttcctttatgagcaaccgggttgaacaggctgaagagacaaaaaccgaagttgtggaacgtgctgttaccgttgctgatattgaaaatatcgacaagctgaatcttgatgattttagttgtgatttttcaaaggttgaaatccctaaaggggatattaccgatgatgcgatggacgacatagttaatcaatttttctctggcttagaagctgcttaa

SEQ ID NO: 381691 - DNA, 2589 bp, Salmonella enterica
atgaatgaaccaaacttagcaactaagaacaccgtccttatcgtcagttttgaggaaaggaatgaagctaaaaaagcggctggcaagttagagaacggcgaaaacgctttaggcttcgatgaggaagcgaaacactggtttgctaaaccgggtgcagacctgagcaagttaagcaaatggctaccagatcagcataaaggtaatccagtacaggataataatccggctgctgaatttggcgctacgttagctgaagcaggctttgaactggatggcctgccggtgatggatggtaaaaagcaccgagtcagaacggctgacgataaaaaaggcgaaaagaccggggtttatgcgggctatttagacggcgttccggctgggtggtatcaggatcaccgaatccatgaccagcccgttaaatgggtatcgactggccagcaagttgacgccgaagcccaagcccatttacgtgctattgcggcccaaaaccgcattgatagagagaatgccttacaacgacagtatgcgcacaacgcccggagatctggccaagtatataacgcgatgccggttgctgacggtagccaagaatatttggttaataagggtgtaaaggcattccccggcgttaaggctgataagaaaaaccgggtggttattccactggtcaacgaagaaggcgaagttcgtaccctgcaacgtatcagcgccaatgggttcaagtcgctgaagaagaacggccagaaaaccggtaatttttttgttgttggtggtgaactgaaaaacggcgagccggttctctatgctgaaggttactcaacggcggccagtattagcgaagccaccaatcgcccggtagtaatgaccgttgacgcgggaaacctgcctaaagttgccgacaagcttaaagataaatacccggatagcttgcatgttgtgcttggcgacgacgaccgcaaaaatgccgttaacaaagggatggccaaagctgaagaagcggccactatcgcaaatggtgttttcaccgtaccggcgtttaccgctgaagaaaaagaacgcggtttaactgactttaacgaccttcaccaatcacgcgggcttgatgccgttcgcgatcaggttgaaggaatcattactgaacatactcataaggctgaaacaatggctgataaagaacatgaggcaataaatacaggcccggtgattactgaaaattttgaaagggaaatggacgctgcccttaatgtgaatcattcctctatagatttagagccgtatcaatctgaagaggatgagtatgatgtagaaaacagcatcgagccacatatagaacaggaaaaggcccaaacggctgatgatgatgtaagagcatggttatcatcatcacgtgtttctactgcggatatgttagctgaagacgatgaacgcgagggccgtaaacgcgaagagttcaagcaagtagagcctgacgctgaagagccagtttttaaacgtcagtcgcaagatcaggattatttcgaagacagctcttataaacctgtagtgccagatagagtggccaagtcttatattgaggttgaaggtaaatattatttccaaaatcgcccggactcactggcctttgtggacaaaggcgcgaagcttcaaaccaaactgagcaatagccaagtagccggttccatgattgatattgctgaagcacgtggctggactgagatccaagtaaaaggtactgaagattttcggcgtgaagcatggttacaggctacggccagaggactaaccgcccatggctacaagccaaaagaagaggatttagcacggctgaaaaaagtagccggtgagcgcaacattaacgaagttgaagcgcgtgaagttgctgataacgtgaaaacgtcaccttctgccccttccggtacaacgtcacaaaatcaatccgaagcccctacatccaaaaccggcaccactgagtcaagcagtacggcacaaggcaaaaatgagggtgctaaagttgaagctgaagaaaaggttaacaagctggccggtaagttggtagagcatggcgcggccccttatgaacataagaaagacaacaaagataattactatgtaacgctggaaaacgccgatggtaaacaaagcacaacatggggtgttgatttacaacgtgccatggccgagagtgaagctcaaccgggtgatcatgttgagttagaaaaccttggacgcaaagctgttaccgttgaaaaagatgttaaagacgaaacgggcaaagtagtcaaaaaggaaactatcaatacgttccgtaatagctggcaggttaaagctgatgccattcgtgatcaggaacgcccagcgcgagaaatagttaaagaacatcccgatttagtaaacgaaattacagcggttaaactggctgagaaagtatctcaatcaatgaacgctgacgacaaagaacgctttatgagccgcgtccgtgacaaactagcggataaagtggccagtggcgaaaaagggccagaactgaaaatcaaagaggttcaaacggtcgataacccacgggttaaagataccgaactggaacgctga

SEQ ID NO: 381692 - DNA, 174 bp, Salmonella enterica
atgaacaataaaatactggatctgaatataccgggccgtgaaattgagatgagccgccaagaagctgaagagttaggcgcatttgaagaaagcgccttatctgaaactgatgcaagagaggcgattgatatagaagacgagcaggcaggagggttaaccgatggccagaggtga

SEQ ID NO: 381693 - DNA, 1158 bp, Salmonella enterica
atggccagaggtgacgacaaagagaagaaaccattctatgaagaaattgctgatcgtctgatcaaacagcttgaggaaggaaccgcgccatggcaaaaaccatgggaaccgggttcaagcagaatgccgcataacccggttagcggtactcgttacaagggagccaacgccctatggctggctatgcaacagcgtacagatccccgctggatgacgtataagcaagcccaaagcgtgaatgcgcaggttcaaaagggcgaaaaaggtacgctggttcaatactggaagtttaccgacacaatccccaagctcgacgataaagggaaaccggtactggatgataacggtaagaaaaaaatgattaccgtgaaacttgatcgcccaaaagtcttttccgcagtggtatttaatgcggaacagattcaaggcttaccgccattagaagttaaggcaacaaaacccgattgggaacgccatgaacgagccgaaaatatcttgcaggccatgagcgtacctatcaagcatgatcaagctgatggcgcattttaccgcccttctacagattcgatacacctcccggaacgtagccaattccccagcgccgataattactatgccactgcattgcatgaagctggccattcaaccggacacaaaagccgtctggatagagatttaaccgggcgatttggttctgagtcctacgcaaaggaagaactgagagctgaaatagcctctttgatgattggcgatgaattgcaaataggccatgaccccggacaacacgccgcttacgttaaaagctgggtgaaggttctaaaggatgatcccaaagaaatactgagggcagcaaaagacgctgaagctattagttcctaccttttgagccatgagaaagaaaaggcgcaggaagcccctcaaaacgcaccagaaagcgatacagaccaaaaagagggtaatgatagcgcattgcctttaaaactcgctgagaagcttgcagagcgttttaacaacgcagaagatcgggctaaattcatggaaaagatacagtccagacttacccacgaaaaaccagatacggaaataaaaataaaggaaattaatacggttgtagtaagcaaaaaaggtctaaaacaagatactgatttagagcgttaa

SEQ ID NO: 381694 - DNA, 993 bp, Salmonella enterica; identical to SEQ ID NO: 285471

SEQ ID NO: 381695 - DNA, 582 bp, Salmonella enterica
gtgctggcgcatggcaccggctttgctataatacccccatccccccatattgtaaaaggcccgcttatgccgaggatcgttaagagagttacgccggaattaaaagagaagtggcaaaccttttgtcatgagcgtggtgttagtgaatccgatatgttggggctgttgctcgaaaaggtaacggcgggaatagtgcctaatgaagctaaaggattggaagaaccacgttcagataaagtaacgatacgtttgtcaccgaaagatattcacagcatgacagaacgcgctaaggctgaagggtttcccagcagaaccacatggcttactaatttagtgttggcaaccttgagcaaagaaccggtattaactgacgccgaagttaatgctttgcggggttccaatcgtgagctggccgcgataggtagaaacctgaaccagatagccagagcgttgaatgtagagtttcgtgatagcgataagctgaacaaggaattaatagatcggctgcttgaacagatagatggccatcgagacaaggtatctaatcttattgatagaaacatgaatcgttggggagtttaa

SEQ ID NO: 381696 - DNA, 246 bp, Salmonella enterica
atgaaccccgcctatagggatcgccttcttgaggccattgcatctggcaatgctgaccagttcgcgggtgacttagaagctatggggattgaagttggtgaagatggcgagttgacgataaagaatgagaataaatcaaacaggattaaatacacctgctctatgtgcgaaacaaatatttgggggaagcctgacctgaatgtgatgtgtggagactgtaacgtagcctttgaagtcgctaactga

SEQ ID NO: 381697 - DNA, 315 bp, Salmonella enterica; identical to SEQ ID NO: 19841

SEQ ID NO: 381698 - DNA, 1035 bp, Salmonella enterica; identical to SEQ ID NO: 289176

SEQ ID NO: 381699 - DNA, 1278 bp, Salmonella enterica; identical to SEQ ID NO: 19843

SEQ ID NO: 381700 - DNA, 159 bp, Salmonella enterica
atgaatggagatctggaaaagttggttgatgaattggaatccttcgatagttcaattcgtcacctacccattgcagaacagcagcaataccgtctacgaaaattctcttgccatcatattaacaatgacactttccccctcagctatgttgctggctga

SEQ ID NO: 381701 - DNA, 240 bp, Salmonella enterica; identical to SEQ ID NO: 285475

SEQ ID NO: 381702 - DNA, 1125 bp, Salmonella enterica
atgagcgccaaaaaaggattggatttaagcgggctggataacttttcagctttgatgggaggcgacctggcccctactcaatcagcggcttcaacagacgtacctgaaggttttgcaggaaatcttatccgtgtgcctctgaaaaaaattcataaggatgcagataacgccagaaagactatcgacccgcaggaactccgtgagctggccgattcaatgaagtctgtaaatccggcaactggaaaaccacgcggtaacaaaaatccggtaagtctgaaacctcatccagatataccgggggaatatattcttaatgccggtgagcgccgttgtgctgctgctgaacttgccgagttacctgatgttttggcgttcattgatgaggatgccgacgaatttgataatgcagttgataacattcagcgcgtagctctttcaccaattgaaaccgctatgtttatccagcgccggattgagaaaggcgataaaaaaagcgccatcgcggcccgattgggtaagccagcatcgtttgtatcagatcatattattttctttgatatggctgattgtatccgcgatatgtacgacagtggccgtgttgtctctatgcaggcaatggccctgttacatcgtgcctataaaaaacacgctgaagaagtagaggctttttgttccgaagcacaagacgagctaactactgctgatgtgcgggctttttgtgattcactcaaagagccggaatctaaagccgtgaatacgtcaggtgacaatgaagaaggtcaggagctgccgagcgatgccaacgcatggataggagggggtgccgatagcgacgaactggagaagggcgaagagcaacaacctttagttattgatggcgaaccaatcagcggcggctcatcttctgatttggaggatgaagccagtaaaatcattgccgcagatgaggcaagcgacaaaattaaaaaggcgattgttcagattaaatatgatgaacgcccagcgcgattactcacgaaccgccgagcttcttatgggttcggttggattaaatatgatgatgatggcagtgaagacgagattgatttaaaggacgttagcgttgttgccattgttgaaggttga

SEQ ID NO: 381703 - DNA, 753 bp, Salmonella enterica
atgaatatcataacagtgacgaatcagaagggcggggtaggtaaatctacaatcgccgtacatcttgctatggctcttcaggaacgaggcgacagagtgctttttgttgaacttgatccgcagggtaacgccagtaagactttagaaaaggctggaggtgtggcggcacttcaggcaagccaactttttgaagaacaacagttaactattacgccaaatgaaggcattactttaatcaatgctgatgcaaagatggccgatatagaacgcgccccgttaacggttatgtcaacctttaaagaccaccttaccgcgctggcgtctcagtttgatcattgtgtcattgatacccctcctacccttggtttgcgtatgtcagcggcgcttatcgttgcaaatcatgtgttgtcgccaatagagctggaagaatattccattgatggtattacaaaaatgctgcaaaccatttttggtgttaagttgaaatggaatccagatctgaacttcctaggcatgttacctaatcgctttaactcccgttctgaagaccagaaaaaaacattaatgaatctggtagagaattacgctcatctgttaattagagcgcggatcggcattcgttcatcaattccagaagccctttccgaaggtattccggtatggcagttaaagaaaacatctgcacgtgaggcaggaaaagaatttcaagaagcttttaagatcatttttgaaaaaatgggggttgccaaatga

SEQ ID NO: 381704 - DNA, 363 bp, Salmonella enterica
atgaaaaaacgactaacgcaagccgaatttgaacatgccatttctaacctgtcacgcgcactaaagccagcaaatgtagaaattgtgaaagcaattttggttgatggcagaaagcaaaatgacatggtgattgaaacgggattaagccgtacagcaatagcggcaatgacgaagaaagttagagaagcgcacaagttacatggcaaaccaccggcaggctgggaacgtatcgagctatgtataccatcatcaatggttcctatgttaagggctatggaagatgaggcgcgtaaacaggcaaacgctaagggtgaaatgaatgaatatcataacagtgacgaatcagaagggcggggtaggtaa

SEQ ID NO: 381705 - DNA, 510 bp, Salmonella enterica
atgttgaagcgttggaatattatttttctattcttatttttaccgttgcaatatgcaattgctgatattcatggcgaaataatacgaattatcgacggtgataccgttgatgttttagttaataaaacgccaataagggtgagattagttgatattgatgcccctgaaagcaagcaacctttcgggcagaaatcccgtcaatttctggctgatatgatctttcgtcaacaagtaaccatcgttgaaaagggaaaggatcgctataaccgcgtgttaggtacagtttttaaggaagataacaccaacgtaaatgaatctcaggttagtaacggtatggcgtgggcctacagataccgtgaacaggcgactaatccagccatgctagaccttgaacaggacgctaggcaaaaacgccttggcctatggtctgatccgcaatcaagcattgtagagccttggaaatggcggcgagttaacaataaatttcgtgtgcacgaaaccgcaaaatga

SEQ ID NO: 381706 - DNA, 150 bp, Salmonella enterica
atgaacaatgatattttagcattggccgagatgattaaaaaggcaatagatagccacacctcctttaagcttcctcccctatccgggagcgagtttaaagcggtgatggaagcattacgcgagcagaacgcaggctttcaggctgtctaa

SEQ ID NO: 381707 - DNA, 222 bp, Salmonella enterica
atgaaaaacagcaattttgaagaggctaacgagattaacaacgccatcaatgaaatgattagtgaacgtcaatctatcgacgcaggtcggaacgacttcctacaagaaacttggcttcttgttcgcttagggcatcagtataaagaggccggtaaagactggtatcgctgggctaaagctacggctatccgtctttgggagagtggccacatcgttaaatga

SEQ ID NO: 381708 - DNA, 333 bp, Salmonella enterica; identical to SEQ ID NO: 96870

SEQ ID NO: 381709 - DNA, 219 bp, Salmonella enterica
atggctatttcagatagttatctaaagtcgtgcctcgggcgcgaacgcgataaagttgaggagaaggcagaccgggacggtctgtgggtgcgcatttccaaaaagggcgccgtcacttttttctaccgattccgtttcctgggtaagcaggacaagatgacgatcggcagttacccggaattcgggttgaaggccgcgcgcgaagaggtaactaagtga

SEQ ID NO: 381710 - DNA, 741 bp, Salmonella enterica
atgacgatggataacgccacacgtaacgattcgcgggcagtccgggtggatacccggctgcagcgactgctggcctggtcgccgggacagagagatctcatcaaaaccgtggcgctgctgctgatggtggctgaccatattaaccgtatcctgcacctgaaccaagagtggctgtttctggccgggcgcggggcgtttccgctgtttgccctggtgtgggggctgaacctgtcccggcatacgcatatccgccagtctgcgattaaccggctgtggggatgggcggttatcgcgcagtccggatattttctggcgggatttccgtggtatgaagggaatattctgtttgcctttgcggtgaccgcgcaggcgctgaagtggtgtgagcagcgctgcctgtttcactctgcggccgcgctgttactgctgacggcgtggatacccctgtccggaaccagctacggcgttgccggcgtgctggtgctggtcatctgttaccggctgtaccggatcacagatactgaagaacatctggcgcttgcggcctgcctggtggtggccgtccccgcgctgaatctggtcaccagtgatgccgcggcggtggcaggacttctggtgaccgggctgacggtatggcttgtttcgctgacaggcaaatcacggccccggttctggccggctgattttttcccggtattctacacctgccatctggctgccctgggcgttctggcgatgtga

SEQ ID NO: 381711 - DNA, 648 bp, Salmonella enterica
atgcctgaagtaacaccttttcaggtgcttattgtggacgaccatccacttatgcggcgaggtattcgtcaattactggaactggacccggcttttcatgtcgttgccgaagcgggtgacggggcgagtgcgatcgatctggcgaatcgcattgagcccgatctgatcctgctggatctgaatatgaaaggtctgagcgggttagataccctgaacgcgctacgccgggatggtgtgacggcgcaaattattattcttaccgtctcggattccgccagcgacatctacgcgctgatcgacgccggcgccgacggttatctgctcaaagatagcgatccggaagtgctgctggaggccattcgcaaaggcgctaacggcggtaaagtctttagcgatcgggtcaatgaatatctgcgtgagcgcgaacggtttggcgcgcaggaagatccctttagtatcctgaccgaacgagagttagatgtcttgcatgagctggcgcaggggctttctaacaaacagattgcgtcagtactgaatatttctgagcagacggttaaggtgcacattcgtaatctacttcgcaagctaaacgtgcgctcacgcgtcgcggcgaccattctatttttacaaacacgcggaatgcagtaa

SEQ ID NO: 381712 - DNA, 393 bp, Salmonella enterica
gtgctgttccccaacttttcgctcggcgaagagtatgaacatgcgccgccggcgacgaatcgccaaatctcaccgtatctcccgagcggacgatttcgcaccggtctgcccgtcgaagggcttgcgatcgaacggggcgaccttttctatgcatgtccgcgagccagcgtcttttatggcacggcgctcgacgccgaccttcggacgcgcggcgtaagcacgcttgtcatggccgggataagcaccaccggcgttgttctttcaagcgtcgcctgggctagtgatgcggactacgacgtgcgtttggtccaggactgctgctacgacccggatcgggatgcccacgaagctctgttgcgttccgggttcggcggacgtgtacaggtcgtgtaa

SEQ ID NO: 381713 - DNA, 423 bp, Salmonella enterica
atggcgcggctggcgctggggctgcgcacccgcctgcaaaatgatgccggcaatgttgagggctggctcatgctggggcgcaccggtatggtactgggtaatgccggtaccgccaccggggcgtatgcgaacgcctaccacctggacccgaaaaaccgcgatgcggcgctgggctacgcggaggcgctgacgcgctcgtccgacccggaggataaccgctgcggcggggagctgctgcgtcagctggtgagccgcgaccacacggatatccgggtgttaagcctgtatgcgtttaacgcctttgagcagcagcgctttggcgaggcggtggcggcctgggagatgatgctgaagctgctgccggcgggtgacgcccggcgggcggtgatagagcgcagtatccggctggcgcaggagaaataa

SEQ ID NO: 381714 - DNA, 1725 bp, Salmonella enterica
gtgcagaccctgcgtgagatgaacgccgacaacctgcgcaaggtgccggccgatgcacccacggccttcatcaagccgcgctggaagccgctggtgatcaccccggaaggcctcgaccggaaattctacgaaatctgcgccctgtccgagctgaagaacgccctgcgctccggcgacatctgggtcaagggctcgcggcagttccgcgacttcgacgactacctgctgccggccgagaagttcgccgcactcaagcgcgagcaggccctgcccctggcgatcaacccgaacagcgaccagtacctggaagagcgtttgcagctgctggacgagcagttggccaccgtcacccgcctggccaaggacaacgagctgcccgatgccatcctcaccgagtcagggctgaaaatcaccccgctggatgcggcggtgccggatcgggcgcaggcgctgatcgaccaaaccagccagttactgccgcgcatcaagatcaccgaactgctgatggacgtggacgactggacgggcttcagccgccacttcacccacttgaaggacggggccgaggccaaagacaggacgttgctgctgtccgcaatcctcggtgatgcgatcaacctcgggctgaccaagatggccgagtcgagccccggcctgacctacgccaagctgtcctggctgcaagcctggcacatccgcgacgaaacctattcggcggccttggccgagctggtcaaccaccagtatcgccacgcctttgccgcccactggggcgacggcacgacctcatcctccgatggccagcgcttccgcgcgggtggccggggcgagagcaccgggcacgtcaacccgaagtacggtagcgagccgggacggctgttctatacccatatctccgaccagtacgcgccgttcagcacccgcgtggtgaatgtcggcgtccgcgattccacctatgtgctcgacggcctgctgtaccacgagtccgacctgcggatcgaggagcactacaccgacacggccggcttcaccgatcacgtctttgccctgatgcacctgctaggcttccgcttcgcgccgcgcatccgcgacctcggcgaaaccaagctgtacgtgccgcagggcgtgcaagcctacccgacgttgcgcccgctgatcggcggcaccctgaacatcaagcacgtgcgtgcccactgggacgacatcctgcgcctggccagctcgatcaagcagggcaccgtcaccgcctcgctgatgctgcgcaagctcggcagctacccgcgccagaacggactggccgtggccctgcgcgagctgggccggatcgagcgcacgctgttcatcctggactggctgcaaagtgttgaactgcgccgccgcgtgcatgccggcctgaacaaaggtgaggcgcgcaactcgctggccagggcggtgttcttcaaccgccttggggaaatcagggatcggagcttcgagcagcagcgctaccgggccagcggcctcaacctggtgacggcggctatcgtgctgtggaacacggtgtacctggaacgcgccacccaggggttggtcgaggccggcaagccggtggacggcgagctgctgcaattcctgtcgccgctgggctgggagcacatcaacctaaccggcgattacgtctggcggcagagccgcagactggaagacgggaagtttcggcccttacggatgcccggaaaaccttag

SEQ ID NO: 381715 - DNA, 375 bp, Salmonella enterica
atgctgagtaacactattccggaaaatagaagaggatttgattttcatcgaccggctattgttttatcagaaatgaagataagttttaaagacgaattcaaacattttttgtatcttatcgacactttagacaaaactaccgatgaagaaacctatagtttaatgttacggatgtatcatacaaaaattaatgaagatattctcttttttatctcatgctatacgaatacaaacatgactcagttccgttatatttttgaacgccaagacagaaaaatactatttctttctcatcgggcggcggaggtcattactcgcgctaacgacctagtcaaagaaggtaaaaccccttgggatgatgccactgatttttga

SEQ ID NO: 381716 - DNA, 1047 bp, Salmonella enterica
gtggtgtcaatccgaaaacaattagatgggaaatggttactggacttctacccagaaggaaaaccaaaaggtaaacccagcaagcgaattcgtaagacattcactacgaaaggcgaagcgcaagcctacgaaaatcacatcatggagaatatccatgtaaaaccgtggctggatggaaaagaagatccccgcaaactgcgtgaactcgtgcagcaatggtacaacgagcacggcgtgacattagacgatggtgagaagcgtaaaagcgcaatggagtttgcctgtgaaagcatgggcgatccactggctcatgaatttgatgccaccatgttttctctgtatcgcaaaaaacgcctgtccggtgagatatcccgcacatcacgcgtcaaacaggtttcccctagaacaatgaatcttgagctggcgtatttccgggcggtatttaatgagctgaagcgcctcggccactggaaactagataaccccctaactaacattcgtcccttcaaatctgaggaagccgaattagcctaccttgaagatgaagagatcgctcgcttgttagaagaatgtatgaaaagcaggaatgaaagcacgtactgggtggcttgcttgtgcctggctacaggggctcgctgggatgaagctgaatcagttacaactaaacaaatcaaaaacctgaaagtcagctttttcaaaacgaaagggaacagaaacagaactgtgcctatcagccaagaattttatgacgcactaccaaaaccggcaaagcttgggcgattcttcaaatcttgttattcagcatttcgtaaagctgtcgaacgtgccgatttgaacttaccagatggccaactttcgcacgttctgcgccacacttttgcgtcacattttatgatgaatggcggaaacatcctcgttcttaaaagtatattagggcacacagatattaaaatgaccatgagatactcccatttctcccctgttcatcttgacgaagcattaagattcaatcctctttccggagtatttaagaatgaaaacaaataa

SEQ ID NO: 381717 - DNA, 813 bp, Salmonella enterica
atgagcacctctcaaaaaaaaataactagaaataatgatgaagtacctcaggaagcagtagaaaaagagaagacgtgctttgctattatgcctattgccgatcatcctgattatgacaatggtcattttggtcgggtttataaccacctaataaaacccgcatgtgagaaagcaggcttcaaagtagtaagggcagatgacgccaaagcctcgcacatgattatgtttgatattttaaaaaacatagtcgaatgcgacatggctatttgtgatttaagttctaaaaatgccaatgtgttctacgaattaggacttagacaagcattcaacaaaaaaacaattctcatcacagatggacgaactaatacaccgtttgatataactggttttcgttacgtaaaatacgatcatactttacgtgtcgacagtgtaatgaatgatattgatgaaatagcagcaatgcttatggaaacagatgaagcaaccgaagatgacgttaattcaattgtgaaattattaaaaattcaaccagccaatgttgaacatttgcaacttaatgagaaagacagcctcatatttgaaatgataaaaagacttgacgaaaagatgtcaagaatagagtcattacagaaaaacaaaaaattagacaatcaacttatgaactcttggactagaaagattctgagtcaatctgagaataaaaattgttccaactctttactacaagcagttgatgattatcttgaagagaaatctaaagatacgataaacattatttatactcatacgaaaaaagatgatgataattcatag

SEQ ID NO: 381718 - DNA, 591 bp, Salmonella enterica
atgagcaaattcccctttgaccaaatagggcacagcagcgaagtacttgatcgcgtagttgaagcgtatggttttacatctaagcttcaactagccgatcacttcgacatggcttcgagtagcctttcagcaagattcaaaagaggtatttttcctgcagatatggttgttcgttgcgttgcagagacaggggcttccttagaatggctatcgacgggacaagggaaaaagtttgaggatgccgaactggatatcatgaaattccccagccaaaaactagttgatggccaactttatgactccggctatgtgatgtttgacaaagtatttttccgcgctggcgcgccactaccggcagctcctatttgtgtccaggacgaaaaggcccaatttatcctcgatcagaagtttgcagaagttttcggcggcgaatggctggtaaacattgagggtaaaaccagcatcagaacgctcacacgtatcccgattaaaaaagtgcgtgttagtggtgttggtatggcatttgactgcgcacttgatgatattaatgtaataggtcgtgtggttttaattatttcagaagggaattga

SEQ ID NO: 381719 - DNA, 222 bp, Salmonella enterica
atgcgtcctaacattacaatcaccatccctaccccttacctcccgattgatgagtattgccgcattactggtacgcctatggggacggctcgtgacatggtacgtgatggccgtctgcctatccgtggaaaaggtgataagcctcgtgcacgcgttgaaatcaatatggctgcgttaacggtgcaagcgttaagcgaatgcaatatttcggttaacgcgtaa

SEQ ID NO: 381720 - DNA, 252 bp, Salmonella enterica
atgtttgattaccagacctctaaacatgcgcactttaatgcggcttgccgagcatttgcaattgagcacaatctggaagatgtggccgctgccgttggtatgaaaccacagatcctgcgtaacaaactgaacccagcacagccgcaccgtttaacctgtaacgagcttttagctattacgattacaccgaagatgcgcgtttactggatgggatgctggggcaaattaactgccttccatccgtgcctgtga

SEQ ID NO: 381721 - DNA, 933 bp, Salmonella enterica
atggctcagtatcggttagaacgcctagctcctgtagccagcgatcttgagcaactcgggacgaaggaaaaattctggttttcatatatggatacggaaccaagattgtggcttttcaagttctcaagggctgggactggcgaacattggtctgaaaaatgtgcagctgagctttgtcatctgctaggaatccctcatgcagagtatgagttagctctgactgatgggcgttacggtgtgatttcacctaatatgatccctcctggataccgtatggttatggggaatgaggttcttcacactacaacagtggattatccccagccgttaccgcccggccagagtgccgtgagggttaaggaacacacagttactcgtgtattaggatgtcttgataatgataatgaaaaaatccttcctcctgtaagtgactatgatttaaaagatttaaacgcgggagatgttttttgcggttacttgttgcttgatgcattgattagcaatcaagatcgtcatcatgaaaattgggcgattatgctaaacaatgaaactggtgagagaatgttgtgcccaacgtatgatcatgcagctagccttggtcgtgaaatgagggatgttgaaaaggcggaacgtcttacaactaaagatcgtaatcggcaaatccctactttcgtgggaaaagctcgttcagagctttttaaacttaagacagataggaaaccgctgttaacagttgaagcgtttagtcatgctatagaagacagaccaagggcgagagagtactggttaggccggttaaacgccttaactcatgaggatattgttcgcgtattcaatgatgtaccagcagattgcattagcgaagtttctcgaacttttgcaattgaaatggttttagaaaatagaagaaggttacttgaagatgaatcgtaa

SEQ ID NO: 381722 - DNA, 741 bp, Salmonella enterica
atgaatcgtaatgactccgtatatgttgcatggcaggctcctgatacccatgattggcatgtcgtgggaaatttacaggcgcgtaatgctgaatatgtcttcaactacactaaaggtgctttaacttcttcaaagttcacaaagtttagtggtatgaatgattttagcgaaacttatgtttctgaggaattattcccattattcaaaaacagacttctgtcaccaaaacggcctgagtatccaaaattcatccattggctaggattggatggggcgggtgcggaaccaattgagatcctggctcgctctggcggtatgcgtagcactgaccaactgcaaatgtttaagcgcatcgaaattggtagtgacggatattttgaacatttcttttttgcgcacgggttaaggtacatgtctcattccgctaatgaacgcgtatctagcctgaatccaggggatagcctacgcctatgcctagatgtacaaaatggctatgataaggctgctgtgctcattagggcagataacccagcagaaattgtaggatactgccctcgttattttgccagtgatatcaagagaatgcttcttgataacgatacatcgattagtttaagtgtggaacgtatcagtgacgatgcccctcataattataggcttctttgtaaagtagtcggggaagtgtcgagagctttccttgatcagatgattctccaggaagagttccaacctgtagtgtaa

SEQ ID NO: 381723 - DNA, 558 bp, Salmonella enterica
gtgttacacggcaaaggttgtaagaaggacgtgaagattatcgtatggagcggactgctatttctctgcctcgccgcacgcgcactggccaccggtgttgtcggttacctgccgatgagcgacggtgaatatgcgcaaaagcgtgcgctgaagccgctgttgaccctgccttattctgtatcgcccgaccagacctggcattttcgccaggtcggagtcagtggcgtgacgctactgccggagccgaaaaaagataacgaatggcggattagcggaaaagacagcgccggtaattcgtgggttgtcccggtgggaaggctgattaatttggcgggtaatgcgcaattttatcgcgctgacctcgatcgtaacggcattcaggatctggttatctggttgggcaatcctgggttgggcctggcgccgagcgcgcaatacatcattttcacctttctcaagaatggccgcccctgcgtctttgaaccgtgggggttttataccgccagcgatactggcgtcgatgatttgcttgatttacagggcaatgggcgtacgtaa

SEQ ID NO: 381724 - DNA, 501 bp, Salmonella enterica
atggggactactttgcttcaagaaaaccatgaaaaaattttaaacatactaaatgaagctaaagatgtggcgctaaggtattacaaattaaccaataagcctctcggaatcactggagaaatagctgaacatgaagctgcaactcttctcgggttgtcactatgttcagcacgtcagtccggatacgatgcgactgagattttggacgggaaagaatatagagttcaaatcaaaggtcgatatatgcctgatcctaaaaaagtctctgcgagaattggtgctattgatatatctaagccatttgattctgttcttttagttttgcttgatgaaaattatgatgcttttgccatgtatgaagcatcacgagatgtagtagtcgcagctcttcaagctccggggtcaaagtctagaaatgagcgaaatcagctaggcatagcaaaattcaagtccattagccgtctccgctggagcaaagttgctgaacctgagatcctttaa

SEQ ID NO: 381725 - DNA, 2742 bp, Salmonella enterica
atggccaggccgttaccactgaataaagatttgatagtttgtgtacctagtaattattccaatacctcgagagggaagtttttcgagaatttttgcgctgatatactccgccggcaatcgtatagaattgatggtatggaagtcagaaaatctggcatggaaattgatattcaggctactcatacaccatcaaatgaaaagctgtatgtagaatgtaaattcatgcagcaaaaagttgattcatctgtggttgatttggcattttctcaagcatttaggttgagagttaaaaaaattgcacttttttcaatttctgatttgggtaaagatgctcagtcaacgcttgaggattatagacttgatgagcgtatagattattctttttttgataaaaaagagattcttatatctataattgcaacaggtaaggttgaggatattccaacagatgacattccggcaaaatatactagtgcaacacttttagttcatcctgaaatagaaatgacttggcttttgcaagaagttgaaaatggtagccctataagagtggtgccgttcgctataaataaaaatagtaaaattccaagtgtcagtcgcataagtgatattataaaggagcaagggctttttgaaggattggaagtaactgatttttatatattatctgaaccggaacaaactgtttcgtcttcaaaattatctgaaaattacgaaagggaaattgtcagtgaaataattcttgctgacgattttatggattataaaccatgtcagccgaaagactttgttggtcgcgaatatatacagaaagaagtttgggattatcttgagaatgttagaggaaatagctctcaaagtagagtcctatcacttataggcggttcaggaaatggaaagtcatctttaatagcaaggctatcctcaagatttaaaaatcaaaaatggaagaataaattcttccttacaccagtcgatgtccgttctgctagaggcggacgttttgttgcagaagctgtcgttaaagctttcagcagtgcgatcaaagaaggttttatcgaatatgaaaaaccattcctgattgagagtgttacggatatcataggatctgagagtgttcaggaatgtttaaaatacctttccgaacatgataaggtattgactattttctttgatcagttcgaagaagtctttatgaaagaggaactattcgggctatttaaagaatttgaacgattcgcactcgatgtctcggcactacaaagcaatttagttgtagggttctcatggagaactggtattactttaggggatgaaaatccagcgtactcaatgtggaatcggctaaaagattatagggttgaaaagaaacttgagccttttgatctaaaagattcatctaaattaattaatagtttcgagctaaatacagggtttaaattaaataaacctttacgcacgcgtcttattcagcaagctcaaggttatccatggttattgaaaaagctttgtattcatgtattcaaaaagctaaaaggaggtatctcacaggatcaaatgttggttagtcaactacagatctcaaatttatttcatgaagatttagataggcctgaaaaacaaaattcatgtttaaaatttgtggcaaagaactctccgattagtcaatatgaagttactaaagagtttgggagtgatactgttttagagctaatttcagataggatggtaattaaaacaggtgaaaaattatcagtgtattgggacgtttttcgagattacttgaaaggaaatgaccttccagttataccatggtcatatatgccatcaacatctccgaaaatggttttgttaattcttgatgttgtaaactcgttcaaaaccattagcttggatgaactgcaaactaaactaaaatatagtcggggaacattaataaatgttttaatggatttgcagtattttgttctcatagacagagatttaaatgggaatatactttgtaaacagactatcacaaatgtccctgagtttcttcgtgagcattttaagagtcatagtgttttgttagaattggcagagaatattgttgatgccgatttaagaagagttcctatcgataagtatgaatctataatagcccatacttataagaataaagacggtggttatcctaagtcttatagttcaaaattattggcttggttacaatttacggggctgatagcggttatcgggaaatctgtggttatatatgatggcgagttgttttccccagcatttggggcgattgatctagataaaagaggggcgcgtaatagaagaggatcacttttcttagctgctacttcgccagaaaaaacactcgaagttgccgagtatctgtgcgccaataaaaaaatgagccattcattcattcaggcgaataaacataggaatgcagtgcaggatttaatttctttaggtttttgttctcgacaagatgatggtgtggtgataaataataaaatagaagttatattagaaagcatcagccttgaaagggctttagctaggttagtcactgaatctccagctatcaaaatattaaatgcttatgtaaataaatttggcgatgatgataagaaaatgatgggggcagcactagcaaaagaacttgagagaacatggacacctgcatctactactagatatatttatgcactaatgagatatcgaaatttcgcattggaaactttataa

SEQ ID NO: 381726 - DNA, 1188 bp, Salmonella enterica
atggcgcgcattacacgccccctcactaacaacgaaatcctcaaagcaaaaccccgcgaaaaagacttcaccctgcatgatggtgatggactgttcttgctcgtcaaaacctccggtaaaaaactctggcgcttccgttatcaacgaccgggaagcagcagccgcacaaatttgagtctcggctcatatcctgcccttacactcgcagcagctcgtcagatacgcgaccaaaatttggctacgctcgcgcaggggatggatccacaacagcagcaagagcaagcatcagaacaacgtcagattgagctggatagtattttctcaactgtggccgccaactggttcaaaatgaagagcaaaagcatcactgaggactacgcgaaggatatttggcgttctctagataaagacgtattcccagcaataggcgcgatacctgttcaggagattaaggccagaacgatagttgaagcattggaaccaatcaaagcgcgtggggcattagagactgttcgtcgcttggtccagcgcattaacgaaataatgatttacgcggtcaacaccggcctgattgatgctaacccggcatcaggtgttggaatggcatttgagaaacccaacaagcagaatatgcccacgctacgaccagaagaattacctaagctgatgcgttctctggtcatgtcgaatctgtctgttccgactcgctgtcttattgagtggcagctcctgaccctagtgcgcccttctgaggcttctggtactcgatgggaagagatcgatctcgatgccaaactctggacgattccagccgaacggatgaaggccaagcgtgaacacattgtacctttatcgcctcaggcgttagatattctggaagtgatgaaaccgattagtgctcatcgtgaacatgttttccccagtaggaatgaccctaagcaacctatgaatagtcagactgcaaatgcagcacttaaacgtattggatatggaggtaaactcgttgctcatgggcttcgttctatagctagcacagcgttgaacgagtctggttttaattccgatattatagaatcagctttagcgcatatagataaaaatgaagtacggcgggcgtataatcgttctatttatttagaacaacgcagagaattgatgtcatggtggggtgtaaaagtaaaatcatag

SEQ ID NO: 381727 - DNA, 288 bp, Salmonella enterica
gtgctgcgtgaaatcgtgtgcaggaatagcgggtgcaaatcaacagaattcgctcagcgtcacggcagggaagggatcaaacttatgggccagaagttttttgacatgcacgaatccagccgccttaacatgtcttttaaatgttctggtgcatttaacataatatacattatgcgcattagaatagcagagggcgaaaagcagccccccagcgtgaatcagtcatacaaccagcgaccagacctggcagacgcaatgagcatacctatcgtgaactccggcacctga

SEQ ID NO: 381728 - DNA, 189 bp, Salmonella enterica
atgtcagcgcagcgcaggaaaattgcccgtcgtctggaaaaaagcccgttattaaaacgggaactgtcggaaatggctgttgagtcctacggcgataccgtgttatctgcagcgcgtgaaaagagttttccgtctgaaatgccgtgggcgctcgctgatacgctgcgcgacgatttcatcctggactga

SEQ ID NO: 381729 - DNA, 1152 bp, Salmonella enterica
atggcagcttcaacgttttttattccttccgtgaatgtaattggtgccgattcattaaagaacgcaatgaatacgatggcggaatatggttttcgccgtacattaattgttacggatgctatgctgacaaaattaggggtggcgggtgatattcaaaaagcgctacaggaacgtgatatttttagcgtgatttatgatggtacgcagcctaaccctaccaccagcaatgtggcagctgggttgaagcttctgaaagaaaatggctgcgacagcgttatctcgctgggcggcggttccccgcacgactgtgcgaaaggtatcgctctggtggcggcgaatggcggcgatattcgtgactatgaaggcgttgaccgctccgcgaaaccgcagttgccgatgattgcgattaatacgaccgccggcaccgcgtctgaaatgacccgtttttgtatcatcaccgacgaagaacgtcatattaaaatggctatcgtcgataaacacgttacgccgctgctctctgtcaacgactcctctttaatggttggtatgccgaaatccctgacggcggcaaccggtatggatgcgttaacccacgcgattgaagcttatgtttccgttgcggcaacgcctattaccgatgcctgcgcgttgaaagcggtaacgatgattgcggaaaatctggttgttgcggttgaagaggggagcaatgtccaggcgcgtgaagcgatggcttatgctcagtttctggcgggaatggcgtttaacaatgcgtcgctgggctacgttcatgctatggcgcaccaacttggcggtttctacaacctaccgcacggcgtatgtaacgcggttctgctgccgcatgtgcaggtattcaacagccaggtagcggcggctcgcctgcgtgattgcgcagcggcgatgggcgtcgatgtatcagatatgagcgaggcggaaggcgcgcaggcgtgtgtggcggccattcgccaactgtcgcagaaagtcaacattccggcgggactgcgcgagctaaacgtgaaggaagaagatatcccggttctggcgaccaatgctcttaaagatgcctgtggtctgacgaacccgattcaggcgactcacgatgagattgtggaaatttatcgcgcggcgatgtaa

SEQ ID NO: 381730 - DNA, 906 bp, Salmonella enterica
atgctctcacgcatcaatgttaacaatcaccgatatgtcccctcactcgatcagcttcgcaaacaagcccgtttcctcagggagcactgcaatgttcaattgaaccatgcctatgagatggtcgcgtatttttatcggttttctagctggggaggtctgctaaatcacaccaccagtgatatagctatcgaggatcagcaaatcgttgctcacatgcgagaagaactccagacatacagaaaccgtctggcagcatctgatcttcaacgattatcccaattagcagcgctgaagggcaccttaacagaggctgtggtgaatgaccgtataatgacattaaacgctctggatatcgttcagatctataattgcctgtacaacgaagaatactggggagagccagctccggtttcctggtatgaagtactcgatgaaacagacagatgtttagtgttgcttgccaaacggacagctctggcgggccgtaccaacacagtcaatcctcatattagctttccatggtttggattcagaatgtatggatatttacacattgatggaaacacactgaactacaactgcagagaactggacagctacctatggccctcagaaaaaaaatacacaacggtattcagcaggccgtggtttgctgcatatgtcagtggcttcatccgtattcagcttcattcactatgcagttctggcttctcagggaaaatgtcatttgagagaataaataatgtcgatttggtttcaggaccagttagacaatcattctttaatgatgaaataccgagctcgtcaataaacaccgttgttgaaaatttgctcagcatgggaggcgtgagggacaccagaaaacaaaatataacattccgttttggcaacggtgaaatgtattga

SEQ ID NO: 381731 - DNA, 768 bp, Salmonella enterica
atgcaagcactgctggaacactttatcacccaatccactctgtattcgcttatcgccgtgttgctggtcgccttcctggaatcgctggcgctggtggggttgattttacccggtacggtactgatggcggggctgggcgcgcttatcggcagcggcgagctcaatttttggcatgcctggctggtgggtattatcggctgtctgatgggcgactggatttcgttctggctggggtggcgctttaaaaagccgctacaccgctggtcttttatgaaaaagaacaagtcgctgctggataaaaccgaacacgcgctgcatcagcacagtatgttcacgatcctggtcggacgttttgtcggcccgacgaggccgctggtgccgatggtggcagggatgctggatcttcccgtggcgaaatttattgggccgaacttgattggctgtttgctgtggccgccgttttatttcctgccgggtattctggcgggagcggcaatcgatattccttccgatatgcagagcggagatttcaaatggctgctgctggcgacggcgttgctgctgtgggtcggaggctggctatgctggcggctgtggcgcagcggcaaagcggcagtcgatcgtttaaccgcgtatctcccccgcagccgtttgctgtatctggcgccgttgacgctcgggatcggcgtggtcgcgctggtggtgctgattcgccacccgctgatgccggtatatatcgatattctgcgcaaagttgtgggttactaa

SEQ ID NO: 381732 - DNA, 840 bp, Salmonella enterica
gtgaaagacttatggcagacagcactgaacacgcaagaacaaaatagtttcgctgcaacctgtaagccagaagataatttgttgttaaacggtgtatttttgtgggttgaaaccacaggtgcgggtcatgcttttgtctctgtacatatggataattctgtttatttgtacacttacgggcggtatggaaggactggctctagtgcgactgtcggagatggtattttaaacttctttgaagatgaagatgcccgatcttattatcgttatgagctatatcagatggaagcacatgtgtttgaaataaatgatgctaatccgatattggttcgtgaattttttgaaaaattgtggaatgcagcaaaaccacctgttcctacaaaatcaatgacggacagggtaaagttgcgggggcgtacaattgatatttatgatgtaaccggaaataattgtacgacacactccgttgaggggattaaatattctggttcgaaaatatttgagacaaaatatatattaccttctatacagtcatcatttggggtatctgcttcgccacagttaacagttgacacagagatagatttcacgatccctttctcattacaacaataccttattgagaaaagttctgatttttcatcaatgtcagtaatgaatatgaccagtgaattcaggcaacaatatcctaatattggtgataaaagtggagcagcacagggattgagcgctgtactgatgggggtgggagcaaaaagttctgcttcatcaggtacctcgtcgccatattctggtggtacatctggcggttctctggggagttcatacaatgacaaataa

SEQ ID NO: 381733 - DNA, 390 bp, Salmonella enterica
atgacaaataaattctggatacgctgggggattattttatttatctctgccatttattatattgttgttttttattttaatattatatttgcagtgaactactcggaaacgatgagcatgggaggggattttagttcgtcccagtgtgtctggtttgccagacaactcttatcggatcataattatgtgttcattgtttcagttgtgggttttttaatttgtatgccacttattttgctggctttcaaaaaaaataagataagcattgcattttttttgaaacgtaagcgcttttttgtgctttttaaaatatgtttgtgccagtggaatgttatttccgactgccaaatactgcgcttaaatttagtattaaaggagcaaataccatga

SEQ ID NO: 381734 - DNA, 483 bp, Salmonella enterica
atgagttattttaaagtttgggactgggataagaagctgagaacgatgttgcgctttgtgaagctcggagacatattttgttttaaattagatggagatagatattgttttggcaggataatatctaaaataataactgggcatgttgctgagttatttgattatatgtcagccgctccagaaattacagaaaaaaagattaataaggtaaaaagaatttattcgcccattgtaattgatacttatggcttgtttgataaaaaggtatacaaagatggtgactggagagttatttgtcatcagagtaacttttcccctatagatgttgaaaatgtatattttacatacggtcttgaaagtttatgtaaaagagttgatgtgtttggtaatgaaatttccatatctaaagaggaatctctaaaatatcataagttaagtccatatggtgattttgatattaaaaagctattaaataatatctga

SEQ ID NO: 381735 - DNA, 1173 bp, Salmonella enterica
atgaaactaaatgcgcgacaggtcgagacggcaaagcctagcgagaaagactacaaactgccagacggtaacgggcttattctgctggtgaaaaccagtggagcgaaatactggcgatatcgctataccttcgccggtagagaaaagatgctggcgctcggtgtgtatccggcggtttcactggccgcggctcgcgaaaagcgagatgaagcccggcgaagtgttgcagctggtgtggatccggtaaaggtcaaaagccacgttgcagctgccgcagcaaactctattacctttaaagatattgccatcgagtggcatgagtttaagaagccgcgctggtcgcctggctatgcctctgacattctcgaagcattcaataaggatatttttccggcggttggtaagttaccggttgctgagatcgagcccgtccagatgctgacggcgctgcgtaaaattgagaatcgcggcgcaactgagaaagcagctaaaacgcgccgatggtgcggcgaggtattcagttatgctgttgcgaccgggcgcgcgaagtacaaccccgtcagcgaactgaatagcgcaatgaccggccataaaggtgaatccttcccgttcctgacagcggaagagctacccgattttctggcggcgcttgagggttacaaggggagtcagcttccccggctgggtttgcagatcatgatgctggcggggctgcgtacctacgaactgcggcactcaaaatgggaatgggtagatttcgataatcggctatgggagatacccgccgaatttatgaagatggatcgcccgcacctggtaccgctttccgaccagcttgttgtcttgctgaaagagttgcacggtcttacaggtcgatacgtgaatatgttccccggcaggaatgacccgtcaaaggtcatgagcgagaacacaataaacaggatgatccacacgctggggtataagggaagggttgtagggcatggcttccggcatacgttcagcaccatactgaacgatagaggattcaactctgactgggttgaactccagatcgctcatgtggacaagaataatattcgcggggtttataaccatgccctctatatggaagggcgtcgggaaatgatgcagtggtatgcggattatattgaccagctgcgtttgatttaa

SEQ ID NO: 381736 - DNA, 189 bp, Salmonella enterica
atgacaccggttatctctgatactgacctgattaacatcaaagaggttgagcgctctgttggcctgaaaaaatccagcatttatgagcgcatcagtaataacgaattcccgaagcccaagaagctcgggagccgaacctcccgctgggtacgcggcgaggtagaagagtggaaaaaacagtttctttaa

SEQ ID NO: 381737 - DNA, 1401 bp, Salmonella enterica
atgtccaacccacatactttcctaccccacccttatcaagttctaatcattaaccaccaaatcgacatcctgcgctgcaacatctgggcgggtatgggcatgggtaaaaccgtggcgacactcaccacgctggaagatctcttcatggcgggcgcggaaacacagcccgcgctggtccttgcgccgctgcgcgtggccgccagcacctggccggatgaagcagtgaaatggaggcatctgcgcaatatcgaagtgcagccgattgttggtaacgccaaagcgcgcgctgcggcgctggcgaacagtaacgcgagcgtttttaccatcaactacgacaatctggtctggctggttgaaacgctgggagaccgctggccgttcggtaccgtcatccccgacgaaagcacccggctgaaatccttccggctgcgcggtggcggtaagcgcgcggcggcgctgggtaaagtcgcacataagcacgtccggcgctggatgaacctcaccggtacgccagcaccaaacggcctggtggatttgtgggggcaggcgtggtttgtcgatcagggccagcgtctcgggcgcacctacggcgcgtttacctcccgctggttcaattcaatacagtttccggggcaaagctggacgaagctggagccgttcgcacactcgcaggacgagatacagcgagcgttagccgatgtgaccatatcgctggatgccgctgactggtttgatatccaggaacccatccataacgtgatccgcgtggacatgccgccgaaggcccgccagcagtatcgcgaaatggaaaaggaaatgttccttgagctgaacggcgaaggcatcgaagcgccaaacgccgcggcaaaaacggtgaagtgtctgcaaattgccagcggtgcggtatataccgacgacgccggaagctggtcagaactgcatgacgcgaagctgcaggcgctggacagcatactgacggaagcagctggtgcgccggtgctggtggcctaccactggaaacacgaccttgaacgtttgcttaaagcattccctcgcggccgccacctcgaccagggtccacagacccttcgcgactggaacgccggaaagataccggtcctgttcgcgcacccggcaagcgcaggccacggcctgaatatgcaggatggcggcaacatactggtgtttttctcgcactggtgggatctggagcagtaccagcaaattatcgaacgcatcgggccaacccggcagattcaggccggacacaaccgcccagtgttcattcaccacattatcaccgccgacactatggacgaaatggtgatggagcgacgtaactcaaaacgaacagtgcaggacatcctgctcgatgccatgaaaaagagaggtatagcatga

SEQ ID NO: 381738 - DNA, 756 bp, Salmonella enterica
atgaaaatttcaggtcgagaattcctcaaagatttttcgtcaatacctactatatcagcgttgctttatatcttgacttatgcctacttagctggggagagctattattttaaatatccaatagagtttatagatataaatattaacattatcctgataacttcatttaaaatatcgacaatatatctacctctcttttgcgttttttggtttgatttgccgaaaagatcatcgattttatggtttgtgatttctggtgtttattcattgtggattatgagcgtttacacctttaatatattaaatcccattaaattgtttatgttgatatatagtgggaaagccattttcttggtatcacttggcattattgttgtggtttttatgattatgattgttatttggaatggtgtttttaaatcaaatccaacaaataagatcacatcggctgtcttaggtacaatgtgtcttttggtgctgtcatttcttgctggattcgttaactcaacgtctaataaagtatcgtatccggagtacgataatggtgaaaatgggctttcgacaacaactgacgcaccctttatactattgtcaaaaagtagtaatggtttcatcctcgggcgttgtgatgcctacgataaagactttgtattgattccctacgatgacaaaattaaatttagaagggtcaaagacgaagataaaataaatttttataggcattgttttgatgatacttggcatctgtctctttga

SEQ ID NO: 381739 - DNA, 309 bp, Salmonella enterica
atggcctacgaacgtgaaaacctcatcgaaaagcacctcgtcgccgaagtaaaaaaggctggcggtgtggcttataagtttatatcgcccggtcaccgttcagtacctgatcgcattgttctgctacccggcggtcgcatcgtctttgtcgaatgcaaagcacccggcaaaccaccacgcgccgaccagctgcgcgagcatgaacggctgcgtgcgctgggctttaccgtggtggtgctggatagcaaaaatctggaagagattcttcaaagagacagatgccaagtatcatcaaaacaatgcctataa

SEQ ID NO: 381740 - DNA, 189 bp, Salmonella enterica
atgaagattctgctccggttagtcctgtggggcggaggtatcgccctttttatcatgctgctgggatgggcgggggaatcagacaggaatgactgtgaagagcgcatagccaaagaactaagcacaaccgcggtgtatataaacggtcactgcatggtcaaaggctacggccgctttgacgggagatag

SEQ ID NO: 381741 - DNA, 216 bp, Salmonella enterica
atgtcattcgaaaaacacgacagcccgttgtatttccggtctgcaagagaggctatgcgccttgagcaggctggcgaatatgaccgggcggcgaaagtatgggccaaagcaaaccgggaatcccgcaaccctgttaaccagcagtggagcgataaccgcgctgatttctgcatcatgcaaaacatccgcgagaagcgtaaagaggcagaggtatga

SEQ ID NO: 381742 - DNA, 480 bp, Salmonella enterica
atgacacaggatgaagttaaagcgctgttcgtctacgaaccactgacggggttattgcgtcgtgttggtggtcgtaagccctacccgtggcacggtacgggtaagaatcagcggtatcttgcaaccactatcggtagaaaaacctactacttgcaccaactcgtctggctctaccaccacggatccataccaccgatgctggaccacataaaccgtgacccgcgtgattgcaggatagaaaaccttcgagtctgcaataacgcccagaatcaatacaacattgcaaagcgtaggcacaacacatccggtttcaaaggcgttgtgtttcaccctaattgcccgcgaaagccatggcaggcaaaaatcgtaatccgaggacgagttaaaaacctcgggtattttcccacaaaagagcaggcagcagaggcttacgccaaaggcgcggagctttacgcaggagagtttgccagctcactctga

SEQ ID NO: 381743 - DNA, 2061 bp, Salmonella enterica
atgcaaaaactttggttagacctcgaaactttcagcgaaatcccaataaaaaacggcatccatgtctatgccgaaggtgtcgagatcatgttattcgcatgggcaatcgacgaaggccccgtcaacgtacacgatttaaccgccgactataacttgccgacacgactactgactgccctcagcgatgagagcgtactaatatacgcacacaacagccatttcgaccgtaccgttctgcgccacgctcaccctcggctggcacccgatgttacccgctggcgcgacacgatggtgcaggcgctggcgcacggactccccggcgcactgggagggctctgcgaagtactgggcgttccgcaggacaaggcgaaggataaagagggtaaagcgctgatccagcttttctgtaagccacgtccgaagaacagcaaactgcaccgggccaccagcaaaacgcacccggaggaatggcggcgctttgttgcttatgctggccttgatatcgaagccatgcgcgaagtctataaacggctgccgaaatggaactatcagggggccgagctggcgctctggcatcgtgaccagcagatcaatgaccgcggcgtctgcatggatgtgcagctcgcgcaggcagcaatcgaggctgtagacctggagcaaaagcgccttgcgaaacgcacacaggtgatgaccgacggcgaagtgcaggcggccactcagcgcgacgcactgattaagcacattgttgaatcctacggcgtggagctgccggacatgcagcgcagcacgctggaacgccgcatcacagatcctgatttgccgacggcggtaaaagagctactggctatccgcctgcaggccagcaccaccagcaccagtaagtacaaatcgctgatgaaaggcgtgagcagtgacggtcgtctgcgcggcacgctgcagttctgcggcgcatcgcgaaccgggcgctgggccgggcgattattccagccgcagaacctgccccgcccttctcttgagcaggagcagatagacgagggcatcgaagcgctgaaagccggatgcgccgatctgctgttcgataacatcatggagctgaccagctcggcgctgcgcggctgcattatggcgccagaaggtaaaaagctggtggttagcgacctgtcgaacatcgaagggcgcaagctggcctggcttgctggcgagcagtggaagctggatgcgttccgggagtacgacgagggaaccgggccggacctgtataaactggcatacgccagagccttcaacatctcgccggacaatgttgataaataccaacgtcagatcggcaaggtgatggaactcggcctcggcttcggcggtggtgttgcggcgttcctgaccttcgcgctggtttacggccttgacctcgacgagctggcgaacgctgcgctgccgaatatcccccgtgatgttatccgcgaggcgaaaagctggtacgacgaatcggttaaacgcaagtcgacctatggcctgtcagagcgtgttttcatcgcctgtgactcgcttaaacgtctctggcgcagagcgcacccggcaacctgcgatttctggtatgagctcgagcgcaccgtccgcgccgcaatagccacaccgcaaaaaacgctgtactgcggttatctgaaaatccgccgcgatggcgcatggctgcgcatacagctgccatccgggcgagcactctgctacccgtccccgtccatcgagaaggggaatatcacctatcagggcgttaactcctactcgcgcaaatggcagcggctcaaaacctacggcggaaagctggtggaaaacgtcacacaggcggccgcccgtgatgttctggccggaaacatgccgctgatcgaggacgccggttacagcattgtgctgacggtacacgacgaagttatttgcgaagcaccggacaccgacgattttaacgataaagcgctttctgcgctgctctccactaaccccgaatgggcgccagatatcccgctgaacgctggcggcttcgaggcgtaccattacagaaaagagtga

SEQ ID NO: 381744 - DNA, 1482 bp, Salmonella enterica
atggaaatccaagagtttgtaagccactacaaaaaccaccctgttctattcattgggacaggatttagcctacgatacctagaaaactcatttagctgggatggtcttcttttgagtgtcgctatggaactaaccggtaatgctgaattctactacgatttgaaagctgaaagcctagaaggtgacgagtaccgatacgatatcttagctacaaaacttgaaagtgtttttaacaaaaagctggcagaagatcggaacggtaagttcaaagatatcaatgatgttttctatgagcacatgaaaaggggcaaaaaactaagtcgattcaaaatttatttaacctccatacttaaagacctaaaaataaaagagtcaatgatggaggaaataaatagcttaataaaaacaagaaaaaacataggctctatcattacaacaaactacgaccaactcgtagagaatatctttgattttaatccattgattggcaacaacattcttttaagcaacccgtacggttcagtttacaaaatacatggctgcgttagtgaccctaacaacataattatcacaggggaagactacgcaaactttgacaataagtatgagttaattcgtgctcaactactctcaatattcatacataaccctatcatattcatagggtatagcattagcgataaaaacattaagtacttattaaaaacaatattctcatacgttgacttaaataccgaacttgccaaaagaatcaaagataattttcttttggttgaatacgaaaaagacagcatgtctactgaaattacggagcatgacatagatatagaaggcatgtctattataagaataaataaaataaaaacaaataattacaaagccgtatacaatgccatctcgggactggttttaccagtatccgcaatggacataagaaaggttcaaaaagtttggagtaccattaaaagcggtggtgagataaaggttaaaattacagaaaatttagatgaacttcgtaatgatgaaatggtcattgctgttggttcagaaagaacagtacaatatgtttatcaaacaaaatctgaaatgatacagaactattttaaaatagttgacgaagcaaattctcaacttatcgcactactgaataagcaaaccatagctaatagcgaacactttccaatatacgcttttagttctatctgccctgaattagaaaataccgagacatacagaaaacggcaactagataaaatcattgataacatttctcgaattaaagcatgtaagagtgaggctgtgtctattgatgaaatactaaaagagacaaaagagtataaagttgctaacacgattatgtattgcgtactaaacgacaccatttcattaaaacaactacgagactatttaaccacaccagggcataaaattgatactcaatataggcgacttttatgcttatatgattatttatcatattaa

SEQ ID NO: 381745 - DNA, 549 bp, Salmonella enterica
atgaaaattaaactgaacaacgtccgcctggccttccctgctctgttcgaagcaaaaactgtgaatggtgaaggcgacccgcgcttctcagctgttttcctgatgggtccaaagcaccctcagctggacgaagtccgcaaagcgctgaagcaggtagcgaaggaaaaatggggtgagaagtgggaaaccatttacaaccagctggagaaaaagctcaatctctgcctgcatgatggcgacgagaaagccgaatacgaaggcttcccgggcaacttcttcctgaatgctgccaacaaagcacgcccggctgttcttgaccgcgatcgctcaccgctgattcaggctgatgggcgcccgtatgcaggttgctacgtcaacgcagtgatcgacatctgggcgcaggacaacaacttcggcaagcgtatcaacgcatcgctgggtggtgttcagttccttcgcgacggtgacgcgttcgctggcggcggtgtggccgctccggatgacttcgacgatatcagcgaaggcgctgacgccgacgcgctgatttaa

SEQ ID NO: 381746 - DNA, 1302 bp, Salmonella enterica
atgccagacgttcatgcaagactttccccgtcatccgcgcaccgttggctaaagtgtgcgggtagtctggcgctggaagccactcagccagacaaagaaacgtcctttgctttagaaggtaccgcagcacatgcacttgccgaaaaggtgctgcgcaaccgccaaagccacccggaatactatgcgggctgcaatgtcgctatgttcctcggttcttacccgctcgctgcacatcctgatgatactaccggcccacaggtaggtgaggaaatggtcgaagccgttggccattacgtcgatacagtctgggcactgtcacagggcaatgagttgcttgtcgaacaacgtgtcgacttttcgcacattgtcggagtgcctgagtcattcggtaccgctgacgccgtcatcatcgccggcaaagaactgcagatccacgacctgaaatacggtaagggtgtgcgggtcgatgctgagcagaacgagcaactgcagctatatgccctgggcgcacttgagcaattcagcatgctgtacgacttcgaaacgatacgcctgttcatccaccagccgcggcttaaccacgtttcagagtgggccctgacggtggaagagctccagacgttcggcgaacgggcgcaggaggccgccgctcatgtgatcgtgatgttcaacatcgctgattgcgaaaacgtcgaaacactgccactggagaatttcaccccgggcgaaaaacagtgtcgcttctgtaaggcaaaagccgtctgcactgctcagaaaatgcagcatatgcaaacagctgccagcgatttcgaagatctgtctaaacctgtcagcgagataatcgccgatgccagcgcacgtgtccccctgttaaccgtcgagcaactggcggagatctacagccaggccgactttatcgaatcgtggctaaaggcagtacgcgaccgtgtaaacgctgagctgaacgccgggcatccggtgccgggctttaagctggttactggtaaacagggaaatcgtgcctggagcgatgaagaagccgcccgcgcgctgctgaaagaccagttccgctataaaaccgaggaagttttcgaccttaaactaattagcccgaccaaagccgaaaagctcattaaaaaggtcagcccccgccgctggacgaaagtcgaagcgctgatcacccgcgcagacggtaagcccaccgtcgcccccgaatccgacccgcgcccagcgctcaatatcaaccctgttaacgatttcgacgacgtgtccgacgacgcgtgcgccacagacctcatttga

SEQ ID NO: 381747 - DNA, 903 bp, Salmonella enterica
atgagcttagaaacaaacctggagcttaataaccaactggtaacccgtaataacgaactgctggaacgtctaatcagcacgctggcatcaggcgttgtcatgcgcccggatgctatagcgcaggtgcaggaataccatgaaacagtggctaaaacaaaagcggcactgacactggacgacctgacattcagcgacgttatcgcgcttgcagccttctatccggtaccgcaacaaatcaccgaagaaatgttgcagcgcgccgtcgcgtaccgcgacgcaaccggtgaagcacgcgtggtgcaaatcgatgcactggacagcgcgttgcagggtgttaaacgcgcgaaagagttgcttaaacccgccctgctcgacctgtcccgcaacattctgaaattctgggacgacctgccgaccatcggcgagcgccgtgcttttgccgagcgcctgcttgatgctccaccagccgggcgcgatgaagtaaagccgaagaaaggcagcagcaaagacagtaaaaccgaagaacgtacagggccgttttacatcaaaagcccagacggttcagccgccagcgagctgcacactttacgcaagctgaatgcaatgcttgagaaaggccacatcgagattaaccgggttgaatatctccagttacaggaagaattcgcacgtaaaaacgcagcaaatagcgatcagcaagtgaccactgatactgacgaccagcctgattttgcggctctacgtaaacaggccgaaaggttgatcctccagctcgcgaaaggcggataccgtgccgaagccattgccattctggaaaaacagggtgccaaaaaactcggcgaagtcgctgacgagcacctcgcagacgtgatcgcccaagccgaaaaagcgctggagggctaa

SEQ ID NO: 381748 - DNA, 150 bp, Salmonella enterica
atgaaacctgaacacctccaccggctgacggggcgcgacgtgctccgttaccgccgcaaaactttcgacttaattaccggtctggccctcgctactgcgctcggcctgatcataactttcattctccttgtagcgaggactgcagtatga

SEQ ID NO: 381749 - DNA, 525 bp, Salmonella enterica
atgatcactgttaaaagagctgaatacctgtctgcgctgacatgcgctggcgtgaaggaggtccgctattacctgaatggcatcttctttgaccctgaaggttttgttgtgggtacaaacgggcatcgcctgttttgcggtagggccataaccgaaggggaaagcgctattgtcaacgtgaaagcaaagcctcccacaaaatttgagcaggtccgtatagatacggtattgaaagcggccacttttctcaataacgaaggtcagaccgtcatgacatcgcctgtcgaagttatcgacggacattttccggactggcgacgggtggctgactttaaacccgggaaagtggatgccattggtatacatctgccctatctggcagacgctgcgaaatgctcaaaatatttcgataaaaaggccaacgccattatcgaaacacaaggcgtatctgacgcgatacgccttcagttaagcgctgacgcttatatgctcattatgccagtccgtatgccgtcccccatctga

SEQ ID NO: 381750 - DNA, 678 bp, Salmonella enterica
atgggcttttcaactgaaaaactgatagctaacattaactttctgatgacccaacgcggtataagcaacattaccgaattagccaggcaaatacgcatagcacagccaacaatgcaccgtctggtatcaggagaggtcaaagaaccaaaatatgccttattaaagcaaatagctgatttctttaaattaagtgtgcaagacctgatggaaaaggatttaaccaaaacgtcactcaacgaagcggaaagcccaacgaatgcgggaacagttagctttacagaagttccaatagttggcggggcacaattagggaacggggggcattggtctaatcttcaatacccagtgggctatggtgatggctttataaactggccgacacgcgatccagatgcttacgccttacgctgtactggcgattctatgaaaccgcgtattaaagatggggaatatgttgtcattgaaccgaactaccattacttaccgggggatgaagttttggtggtgactaaagacgaacgagtaatggtaaaaacctttctttatgaacgagatggagaagttatggtcatgtccgtaaatgaagaacatcttcctattcgtttttcactctctgaaattcaaagtatccattacgttgcgggtatagccaagccctctctacgcgttgaatactga

SEQ ID NO: 381751 - DNA, 201 bp, Salmonella enterica
atgagaacgttgaccccccaagagataatagttgcgctgaacagcttggggcttacccagacggacatcaaggaacgtacggggattagccaggcttctttaagtcgtatttattccggtagaaatggtgacccgcgcttgtcagttgtgcgtgcgctggaaaaactttatcaggacgtaaccgataaaactaaggcgtaa

SEQ ID NO: 381752 - DNA, 2256 bp, Salmonella enterica
atgccagaaaacaaaagctggggggcgacgcctgatgaatggtttcacttcgatctggtgctgggacgtactgaccagttgctgccagtcgtttgcaacccagacgcggccatttcccccgacagtaaactgaaagcgcttggcaaaacaccgagccgctataaccgtgaccgtcaggtcaccggtatttcacactggacagaacacgtcgtaactgagcatgactttgcccgatggtctaaagagcccgattacgggatctgcgtgcgtacaggtcacggctggcttgcgctggactgtgacagcgaagacgaagacatccaggctgatattcgcaaaacgctggtgcagctgctgggcgagctgccgccacgacgctggcgcgccaacagcaataaatgtctgtacctgctggccgttgacggcgatttccgtaagcgcatccaccgtctggcgggtgatatggggattatcgagctactggcgaacgggcagcagttcgttgcctgcggtacgcacagcagcggcgcgcgtattgaatgggacggtggtctgccggatgagccccccgtcattactactgaccagttcgaaacgctgtggcagcgcctggcggaccagttgcctgtgtcggtcaccactgaagcgggcagcacgaagatgcgcgaccgctcaacgttcacgcccggtgccacggatgagacagcgaattatctggatgcgaacggttggacgctgctggacggcgcgaacggcgagcgctatatccgctgcccgtttgaggatggtcacagcaccagcggcgacccgaccagcacagtttacttcccgggtggtaccgcgggctttgagcaggggcatttcaagtgtctgcacgccagctgtgcgcaccgcgacgacggcgatttccttaatgccatcgggatccgcaacgacgatttcgaagacctgactgcagatgaagaaggtgataaaccagagtttgtggatattaacaccgatatgaccagccacttccttgagcgctttatctacgttatcgagggtgatcaggtatgtgatcttagccgaccgccatatcagtgcatgatggatatgaagtcgttcaaaaacctgatggcgccttaccagttcccgccagaagggaaggggcaacctgtacccgcgacaaagcgctggatagagcaccggcataagaagatagctgagacgacaggctataagcctggctcaggtcgtattatcgagcgtttcgatggcaggtacgagattaacgaattctatatgcccgaacatcctcgtacagcggatacgagtaaggtgtccacgttccttaaccatatggcctatctggtacctgacgcctggcaacgcgagttcttcatcgctcgcctgggctggatggtacagcgccctgaaaggcgttgcccgatttccattctgcatgtggctaccgcacatggtacgggtaggggatgggtcagccagttgatggagcgcgtgctcggcccatggaactgcgctcgcaccagaatgaagatcctgtgcgataaccagttccatgattatctgtacaacacgttgctttgcaccattgacgaggtgcgcgaaaacgataagcggtatgaggtgaacgataagatccgcgacgtgctgacagaaccacggtttgaagtgaaccgcaaatatggcagcaaaaagacgatggatatttataccggctttctgttctacaccaaccactttgatgcgctggcgctgccagaggaagaccgccgtatcgccgtgcttggtggccctgacttcgctgcaagcgaagagcattacgccagcctgtacggcgcgctaagcgacagtgactttatcgcgcaagtgtactggtatctgatgggcgttgacctgtcccgcttcaactggcagcgcgcacctgagacgaaagaacgtctgttgatgattgaaagcaataagagcgatgtggagtctgctcttatcgaaatcctgaataacccgccagtacctgcaatgacctaccagcaaatcgttaacgcgatactggcagaagcaggaatggacgtggaaattaaccagaagcatataactcgcgttttgaaagaaagaataaaacgcgaagcagtgaaactaaaagtggacggcatgactgttcgcatgtggttacttgcaaaaaatagcgagtttagcaacgaggagttacgcgaaatatataaaacttgcaaaatttcgcaatcaggattgtaa

SEQ ID NO: 381753 - DNA, 306 bp, Salmonella enterica
atgaaaaataatacaagtttaacgttcacaaagaacgcaaaaggccaaatcgaaacaagcatcagcaatgtgtttaaagcaatcagttcacctgaacattgtggaatgcatctgcgatacaccggaacgacgctcgaatgtgctccttttgggacgggcgaatggcgtttattcaacgatacagatatcagccacctgcgaatcaccctcggcgagaaaggattcggtcgtatacggccggggatggtgaaagaggttgtagcgcttgttgcgcttggcaatcccgagagcaaatcgagtttttaa

SEQ ID NO: 381754 - DNA, 423 bp, Salmonella enterica
atgcgtaatattcaacaagttctagagcgctggggtggctgggcagcgagtgaaggtggtagcgtctactttccccctgttgctgccgggtttaagaatctgctacccgcgacgcagtctggaaggctgaaatgcagtgacaatgacggtcttatcatcagctccgctatgagctgcctgaagaaaaaagatccgtatctgtgcacactccttgagtggcattacgtccaggccatgcccgtgcgggcgatgggtgagaagctcggcgtatcgcacacccacgttctgaagaggcttcaggcggcagagggatttattgacggttgcttagccatgctggatgtggtgctcgaaatggatcagtcggttcagtcaaagccacaggctatcagaactttgcgtaggagctgctcggcggcataa

SEQ ID NO: 381755 - DNA, 342 bp, Salmonella enterica
atggctctgatcagcgttcgcaacagatttgaaagcttcatggaacagcggtacccagacctgtcgttgcaggtcaaaggtaatattggtgcatcaatgaaggctcaacttggcatcaggattgaacgcgaattgtacagtgaagatgttacttactgtgattcagcagttcagttgatgtggacactctttcaggcaggtgttctggccgaacgaaaagctaccagcgttacgcttcctgcgctgaaggcaaagccggatggtttctacgatgcgggttataacgagggtattcaggactgtcgtaaacatctgacggcatcaggcatcaaggtaagataa

SEQ ID NO: 381756 - DNA, 348 bp, Salmonella enterica
atgaaaatgcacaacgatccccattcctggcagggctggctggagctgttccagagctggtggcgaggagatacgccgctgggcgctgttctgatgtcgttatttatggctggcctgcgtattgcgtactttggcggtagtggtggctggaagaaaaaaacactcgaaattctgctatgtggtgccctgacgttgactttctcatctgcgctggaatatttcggctggcccaagtccctgtctgttgcaattggcggtggtgtcggccttatcggcgtggatgctatccggagcttcgcaatgaagtttatcggggggcgtatcggtggggacaataaccggggttaa

SEQ ID NO: 381757 - DNA, 615 bp, Salmonella enterica
atgaatctgtcacaatttcagcaggcggcctgtatcaacgccgaactggccgcacgctggtatccacatattattgcggcaatgagcgaattcggtattactgctccgctggatcaggcaatgtttattgcacaaacgggacatgaatcagcaggatttactgttctgaaggaaagcttcaattattcggtgggggcgctgaagaagacgtttggtaaacgcctgacgacttatcagtgcgaaatgctggggcgtattgatgatcgccaggttgcccaccagccacaaatagccaatctggtttacggtggccgcatgggtaacaaagacgccggagatggctggaagtatcgcgggcgtgggcttatccagattaccggtcgtgacaattaccacaagtgcggcgatgcgctgggtattgatttattgctggtgccacaactactggagcaggaaggatatgcagcccgatccgcagcgtggtttttcgccaccaaaggatgcttgaaatactccggcgacttggtacgtgttacgcaggtcatcaacggagggcagaacggtattggtgatcggcgggagcgctttgaaaaagcaaaatcggtgctggtatga

SEQ ID NO: 381758 - DNA, 489 bp, Salmonella enterica
atgaatctgttacctgtattgctgaaaaaatactggttgcaactctcagtgactttgctgattgctgcacttgcatgggcaacagagcattaccgcgacaacgccattcagtataagtcgcagcgcgataccgccagccgtagtctgacgctggcgaacgggacaattaccgatatgcaaacgcgccagcgtgatgttgccgccctcgatgcaagatatacaaaggaactcgctgatgcgaaaactgagaatgatgctttgcgcggtgatgtcgccgctggccgtcgtcgcctgctcgtcaacgccacctgtcccgcagtgccggcaggtaaatccacctccgccgcccgcgtgggtaatgcagcccgccccagactggcagactccgctcaacgggattatttcaccctcaaagagcgagtgacaacaatgcaaaagcaactggaaggggcgcaggactatatcagaacacagtgcctggctcagtag

SEQ ID NO: 381759 - DNA, 573 bp, Salmonella enterica
atgaccaagaagctgaaagcaaagcatgaggtgttttgccgcgagtttcttgtcgatctgaatgccactcaagccgctatccgtgcaggatacgccgctaagcgagcgcatgttacaggggctgagctttacggcaaacctgaaatacgcgcccgcatcaacgagctaaagcaggagcgtatcgaccagttgggcatcgacgcgaattatgtgctgatgcggctggtggagatcgacaagctcgatgtggccgatattctcgaagacgatttgagcgttaagccactctctgagtggccggaatcgtggcgtcggtaccttagcggattcaacctggccgaaatgttcgaggggcgcggggatgaccgcgagatggtgggtattcttaaaaagattaagtggcccgacaaggttaaaaaccttgagttgttggggcgccatgtcgctattcaggcgtttaaagacaacgtgaaaaatgaactaactggcccggatggtacgccaatccgaaccgaggttaccaatttaacgcctgagcaagctgcggaggcgtatcaaaagatgatgggttag

SEQ ID NO: 381760 - DNA, 348 bp, Salmonella enterica
atgaaacgatggatattttcattgctggcgttagcgtcttttggcgcaagtgcaaacaccataacgatgcaatgtggcagcttccgtatggatgctatcccggactcattgtttaaaatcaatggcgaaacagtgacgtctcaaaaagtaaaaatgttgggtaaagacggtacgggcatgcagataaaaatggggctgatgcctgccaaagatggcaataattatgggttcgagtatatccatcgtccgggtaccgaaacgcgattcctgaatgtccaactgctgcagaacagcatggacgcgccgagaattatcggttcattcccgtgcaagaaggttgatgattag

SEQ ID NO: 381761 - DNA, 531 bp, Salmonella enterica
atgtgtaatcaacggaatgaagcagttggccttgaaatagatacaattttgtcgtactcaaaagagaggtatgaagaagttaaggcaacgtacagacggttggaggataaagctaattttcttcttgctgtgctcggtgttgagatttctgcattattagccgtttttgggtcctttgagttggggcaacagttaaagactagcctatcagcaagattgtctctattgtgtttgtgttcatgctttgtatgtttagtggtttgtttttattatctatggaaatcttgggaacttagaaatattcctaaaatgccagtgtatcgtacagctgaacaacatgactttcttctgaagggggatcgtgatgatacagttagatttcacttgataatgtatcgtagggctattgatagtatcgagaaaatccataaagaaaaatcagcatttgttaatgagttatttcgatggatggcaatgtcgtttgttttttttattatttccgtaacgtgcatgttgataaataaggtttga

SEQ ID NO: 381762 - DNA, 174 bp, Salmonella enterica
atgtcctatccagaagacgaaaatgagcatcaaccgaaaccacaagaggctgaagaagttttccttaataactatgagcaagacatcatagcgagagttccttttggggacctggaagttatgacagaaagctttcatcgcaatccgaatatctttccaaagaaagaacggtag

SEQ ID NO: 381763 - DNA, 534 bp, Salmonella enterica
atgatgcatctaaaaaatatcgtagccggtaatccaaaaacgcctgaccagtatcaactcactaaaaaatttggtgtggtgtggctgtttgatgaagatggtaaaaactggtatgaggaacagaagaaattttctgccgactcgttaaaaattgcctacgataaaaataatattattgtggatattaacaaagatgtttcggcaataaatcctgatgggtgcagcgttgttgagttacctgatatcacagctaatcgccgggcggatgtatcaggacgctggatgtttaatggcgagcaggtgagtaaacgtgtttattcgccggaggagctacgccagcaggcagaagcgaaaaaacagaagttactcgaagaagccgaagccgttattaagccactgtcgcgcgcagtaaagatgggtatcgcaaccgatgaggaacggcagcgactggaggtatgggaggaatacagcgttatggttaatcgggtggatacctcaaatcctgactggccggataagccagccagtcagtag

SEQ ID NO: 381764 - DNA, 144 bp, Salmonella enterica
atggtggtggaaccggacggggttagccttaccggcctcatcgacaccggcgcgctttgcagcgcccccgcccggcccaccattgagatgtggcagaacgcacgacacaaaaaaagcgcagacgcgcctttgtgtcgtcgatga

SEQ ID NO: 381765 - DNA, 462 bp, Salmonella enterica
atggctactaccctcacccagacacacccgttactttccgtttcctttaacgccgctacggatttcaccgtactggccgggcactgcaaacagttcgccgaaatcctggttgaacacgacgatcccacgctgaaaatggcgctttgcggcaggcttaacgcctgtctgcaactgctccagccctcgctgctcgatccgatcccggatcatatgatggacagcctgaccgttgacacgctccccacccgctcaccgcgtttcgatcccgaatgtacggaactttgccactactgccttgccctgacgcaggtgctgacggggcaggggttgttaccagaaacccggaattaccttggttgcctgttgtacgacctgatccactatttctctgatgaaatcacggccccgcgctggctgcgtaccgccgacggcgtgaagtttattgatggggtggcggcatga

SEQ ID NO: 381766 - DNA, 1263 bp, Salmonella enterica
atgtccctgtccgacgcgaaaatccgcagtatcaagccgtctgataaaccctttaaactgactgattcacacggtctgtatctgcttgtcaatccgggcggttcacgcctctggtatctcaaatatcgcttcaaccgaaaagaatcccgcatcgcgttaggcgcatacccgcaggtctcgctttccgacgcccgccagcagcgcgacggtatccgtaaactgctgacgcagaatatcaatcccgcacaacaacgcatgactgaaaaagccgccgcatcaccggaaaaatgctttgaggctgttgcggtggcatggcacaaaaccaacaaaaagtggtcggctgactatgcagagcgcatccttgccagtatgaaaaaccatattttcccggcaatcggtcatctgcccgtcacaatgttgaaaacgcagcatttcacggcgttgctgaaagttatcgaggataaaggctttctggaagtcgcgtcccgtacccggcagcaactctgcaacatcatgcgttacgccgttcagcagggactgactgaaaacaatccggcgctgcatctggaaggcgtcaccgcgccgccggtaaaaaagcactatcccgccctgccgctggagcggttgcccgaattgtttgagcgcattggcgactatcagcagggacggcaattaacaaggctggcagtggtgttgactctccacctgtttattcgttccagcgaactgcgctttgcccgctggagcgagatagatttcagacataaaatctggaccattcccgccacacgggaaacaattgagaaagtccgcttctctggccgtggcgcaaaaatgcgtaccccgcatattgtcccgctatctcatcaggcgatcaccattctaaagcagataaaggaaatctccgggcatctggaactggtgttccccggcgaccataacccgtataagccgatgagcgaaaataccatcaaccgggcgctgcgtctgatgggctacgataccaaaaccgacgtctgcgggcatggcttccgggcaatggcctgtagcgcactggtggaatctgaactctggtcgcaggatgccgtggagcgacagatgagccatcaggagcgtaacagcgtgcgggcggcttacattcaccgcgccgagcacctcgacgcccgtaaagccatgatgcagtggtggtcggactatcttgacgtaagccgcgaggggtacgttgcaccctatatctatgcgcggcggcataaagcggcctga

SEQ ID NO: 381767 - DNA, 669 bp, Salmonella enterica
atggaagatgtacaaaagcaaattgacggtgttctttccaacgcttttcgcagagagttttggcttgatcttcaagatgaaatgtatgcgacttatctggcctcacaggatgttgtcactggaggttctttgaaacttgagcgtccagatattgttcgtttaagacctcaggtgcgtcactatagccttaatgcagcgttccgtagagcagctcgatctgctggttacgaatgtactgatgctgagactaagcctaaaggtgaaaattatgtgatcgtaagttcgaatggtgttcgtgttagtcgaataggcattaaccatgacgaacaaaaaatcaagtcggctaaacatcgctcattgcttgcggagttaaaccaagattatgaaggctatactcctgattttttcaacctgaaacaaacaaatgatggcaacgatacatcaggaaccttaggtgtattggtgcttaatattaatcctcctttatcgtctgagcagaacagaatgcttgacttaagggttgtagtccctttcacgaatttgaacggatatcactataataaatctgttaatgatatcctggagctatatgcggtagaaagggaaatagttgttccagacattgcgattcctgtgcttaagaagcgcctgaaggaacaagaaggttaa

SEQ ID NO: 381768 - DNA, 1206 bp, Salmonella enterica
atgagagtgggtatttctggcttccaacctgagaggttaactcaaatacgagaagcaagaggtctttcgaaaatcaaccttggtcgcttggttgatcgatctccttcaactgttacaaaatgggagaatgggagtcactctcctgatgcagaagtgttagctttattaggtcaagcattaaattgcccggtaggttggtttaccaaaccgatatgtaagaaaactaataatccggttttctttcgcacacttgcaagtactgccaaggatttatgtatttcttctgaacgctatatggaatggcttcaggaagggtgcgcttttttgcaagagtctctagatttgcctgctgtaaatattccatatttggagatcgatgactatcgcgccattgatgatgaacttatagaggttatggcagccaaatgccgtgacctatgggggttaggtatttccccagttaaggacttattgcttacaattgaaaatgctggtgttatttgttctaggtttgaacagggtagtgctgttatggatggctattctcagtggaatgatgaggagcaacgcccatacattatattagcgactgataaagataactattatagaagtcgttttgacgcagcgcacgaacttgggcatgttgtactacatcgttatgttaaaagattggatattattaatttcaaacctattgaagaacaggctaataaatttgcagctagttttatgctgccagaggaatctttttccgttgaattaccgccatatcctactttggagaactttgtctcattgaaggggcgctggggaatgtcagcacaagcgatgatacatagagctaaatccttagagttgatttctccattggaatatcaaaggctttataaaagtgtatcagctcgtggttggcgaaaaggtgaacctctggacgatttaagaaaacccgaatcagtgaggctgttacctcgctgcgtgaagttactcttggatgagggtatttttactaagtcaggttttcttgaagaactggatatggcgaggactgatgttgaggatattttttcattgcctagagggtatctgactgaatcgaaggttatggagttgatgactagagttaaactaaaagaaccaccgctcaaagggagtgaatttaactctacagatacggttgtcaatatgtttagccataagaagtag

SEQ ID NO: 381769 - DNA, 1077 bp, Salmonella enterica
atgagtcggaagcgcgatcccaacttaccaaaaaatctgacatatcgtaaggacaggaagacattcgcatggagaaatccattgacgaataaggaaattacgcttggtcagctctctcgccgtgaagctattgcccaagctatcgaagcaaattattaccttgagcagaatcacacgccttacacgcttattgaacggttgaaagaaaccaattcatacacaatggcagactggatcgagcgatatgaggtaattctgaaacgaagagatctggctgataatacgtataaagcccgaactaatcagctaataacaataaaagaaaggatgggcggactcattctccagaagatctctacccaacatattgctgagtttctggagatatggacttctgagggaaaaaatacaatggcgggatcgatgcgttcagttttatcagatatgtttaatgcggcaatggaggaaggtcgtgtactacagaatcctgtagtgccaacacgagcgccaaaaatcagcatcgcccgtgagcgcctcagactagagttttatcaggccacgcgtactgcagccgatcgactgccagcttggtttcccctagcgatggatttggcgatggtcactgcacagcgtcgcgaagatattacccatatgcaattttcccacattcatgatgaccggttatacgtaacgcagataaaaacgggaatgaaaattgcaattcctttgtctctaaccctgcctgccgttgggctttgtctaagaacggtgatcgaccgctgccgactggtgagccgcactgattttataattagcgcggggatctggaaatacagcccaacggggaatgtccaccctgacacactgacgaaaaaattcgttgcggcaaggaagctgtctggtatgacactaagtgacaacccgccgacattccatgagattcgtagtctggcaggtcgcttgtataaagatgcctacggtgaagagtttgctcaaaaactacttgggcacacctcagagagcaccacaaagctctatcttgacgaacgcgatgatagagcttacgtgctcctttga

SEQ ID NO: 381770 - DNA, 1269 bp, Salmonella enterica
atggctctgactgatactaaagtccgttcggcaaaacctgaagataatgcaaacccgctatctgatggtgatggcctgtttttactggtacatgctaatggctccaaatattggcgatttcgttttcgctttggtggcaagcagcatgtgatggcgtttggcgtttatcccgaagtttcactggcggatgccaggaagaaaagggaggaggccaggaagctggttgctgctggtatcgatcctcgagcacataaacgtgctgtgaaagaagaacaggcgaaagagattattactttcgagaaggtcgcccgagattggctcgcgaccaaccagaaatggtcggaagctcacgctgagcgagtgaaaaagagtctggaggataatgtttttccggcgattgggacgcgcaatattgctgaattgagcacccgcgatttgttacttcccattaaggccgtagagacgtctggacgtcttgaagtggcttcccgtctccaacaacgtactacggccatcatgcgttatgcagtacaaagcggtttaattgattacaatccggctcaggagatggcaggagcgattgcttctggcaatcgaaagcatcgtcctgcgctggccttaaagcgtattccagaactgcttcagaaaatagatggctataccggaagaccattaacccgttgggcaaccgaactcaccctgcttatctttattcgttccagtgaactgcgttttgcacgctggtcggagatagattttgaaacctcgatgtggacgatccctcctgagagagaacccatacctggcgttaagcattctcatcgcggctcaaagatgcatacaccgcatctggtgcctttgtctaagcaggcgcaggagatcctgaaacagataaagcagttctgtggcaagcatgaactgatttttattggcgatcacgatccgcgtaaaccgatgagtgaaaacacggtgaacagtgcgctacgggtgatggggtatgacactaaagttgaggtttgtggtcatggcttccgcacgatggcttgtagctcattgattgagtcagggttatggtcaaaggatgcggtagaacgacagatgagtcatatggaacgtaactcagtgcgggcagcgtatatccataaggcggagtttatcgacgaacgcaaactgatgctgcaatggtgggcggatttcttggatgcgaatcgggagaaagggatcacgccgtttgactatgcgaagatcaaccaggggcatggtgagtga

SEQ ID NO: 381771 - DNA, 1650 bp, Salmonella enterica
atgagcgcaatcacattacgtaaagcgttgggtgtacttgcgaagtcatcttcgttttccgtcaccaccgtgacacaccgtcagaaggatgagttcgatcagttaaaggaacaactctttgttaaacaagagattgaaactgaattgcaacgctatctggatgttgctaaacccggtgaaatcatttttttgtgcggtagtagcggggatggaaagtccgaaattttaacccgctgtcagtcagatccgcgttatcagcggcgatttagtttccacctggatgccacgcatagctttgcccctcgacaatcagctattgatgctttgaatgatttatttgctaatcatcaccaacaatcatctccgttgctcattggcatcaacacagggatgctagccaattttgccagagaaggtgctgaatgccaccaggcgatccggtctgcaattgactcatttttatcagcgcagcaggatgcaagccgtccttatcgtaaggagaattgttctttttttgattttgaacactaccctaaattccaatttaacgaaaataaaaactattcatcatttattaaagccttattagataacttaactcgtgatgatgataataatttatttcagtttatctttcggcgcgatgagtcagttaatccggatctaaaagaggtcgcaaactttaaattgctttgtatacctggtgtgcagaatgtattaattacgcagctttttaaagcgcgattaattaaagaccagtttgtaacaacccgaacgctgctggactttctgcatcatctgttgatggggcctggctatttgtttgataacctcttcaccggtgcagaaaatgatctgattaaaaaagtttccgattttgatcccgccagattgcacacttatgaacttgatcagtttgttttgcgctatgaattgggattggttgatgctgagctcgatgattttttagccgcacttgagccgttacacattaagtttgatcgccagtgcgttaagcccggtgacgcaacctccttgatccggcttttctggctattgcagcacgagtcgttgggtaatgattatcatcggagattttccgcgttctttaacgaatcgttgtttgaacgttactcagaaatctggcatttgcatagaaattacacagcagatccggagcaaaaaagatcactgaatcgcttttatgcttttgagcttatcgcgggtatccagcgctatgctaaccgcaaagcacctgaattaagtatgcaaaaagaagagttctttttgggtgagtttggtggggttaaaataaccgcgccggtggaggtaaagcctgattgggatgctatccgtaataaacatacggctcatccaactggcttcgatgtctatttaaaggtggggcaaaatccactaccgcatatccatatcgggcttaatttgttcgaattattggacaagttgaataatggctatcgtccgaataaatacgataaaaatgccatcgtgttactggatgaaattgttgagttgatcgcggagcaggctaaatccagcagcgaaatcaaattttatgatggcagacaacgggtttatcgtgcaaaggcggatgacgatatgatcactattagcggtatggagggttag

SEQ ID NO: 381772 - DNA, 1326 bp, Salmonella enterica
atgtatcctatcgcaaccgagttaaaagtgggtaacaatcaactggatagttacctgcctgtacgcaataaaaacaacgatattagctggcaattcgtcaccggactggcccttagctacgcgctgaaacgtaaaattgaagcctacgatcctgaccaattccgtgaagattgtaaaacacatatgcaggagctgctggatgagcctgcattctggtcggtgctggaacggatgtatttttccagtcaggatattttccgtgtatcccctctttttttactgtttcacgctcagtttgtgggcgaaaaaataagtgcgggatctacggcagataaacgtcttggtacgctgtttgccaatttgatgggcgatttcagccttcgttaccccatacaggacagactgaacttcattgagcagcaaatgctgaataagctcaatgaaaaaataaaattgctggggaaaggaccttttgccgaagagcaaccctatcttccatatatggtcacgtgttttcagtccgatctggcgtttttggcggagcacccacaataccttttacaagaattgaccaacaccctacgtttgtacgcctttagctggtgcgctcaactggcgctcaatctggacaactggcaggacggcgaaccacaaagcaaatcactgttttttattcttgatagcgaaaaagccagctccgaacgggaaaaggtgaaacgttatggctataagctgttcgccagccagagcgaaaaactgttcccgatactttccgcgctggaggtgttgcaggtaaaaggggagaaaaaacgccctctctggcaggtatatcaggattgtttgaattattcgggtcccccaaatcaagtgttagatgagattaatgattacatacagaaatttattagtaaggaagaacgagatcttcctgctcgtgaccgcgcaacaaacttggaaagtgctttcaaacagctattatccgttgccgtagagcaattccaggataaaaaaactaaccgcgcggatataaataagaactacattaaggagctggaaaaccagatttgcactgacttcattcaggtgcgcggtcgggcagggaaagtgctggtgctgaatcaggatcgtcttctgttgctgaccaacctcaccgtgggcaaaaatgacaaactccgcctgcacgaactgttgcgtggttttgaacagcgcggtttttatctggataatcagtcggcgcaaacgctggtggcgttttatgaacgcatgggaaatgtagagcgaatgagtgatagtggagacgccgtgtatgtccgtaaaacagtatga

SEQ ID NO: 381773 - DNA, 5082 bp, Salmonella enterica
atgtccgtaaaacagtatgaaacctatctggcagaaacctttattgaatgggtaggtggcatcattcagcccggcgagcgctaccagttcaaatctcccgatcccgataatgccctaaaactctgggaagcattcgtctctctggcgaacggcaatcggttggaaattgcgccagggcaatatattgattgcctcctctgcaatggtgttcagcttattcctgtactgcacggtgccgaggctccagcattcacagaaaactacatttctcatttgcgcgatgaagttgcagggcgcagcggcgtttttgcccaaacagcactgctgattattcacaacagtatgctcgataccctgattaacagcacgaaagacgtggcagcgccggatgctatctggtacccacaaactttcagtcatcaactggaaaagctcattaccactgatagtaaccgttcggaattgtcccgctgtttgctggaggatcaactggcgacggtactggatgaaggcgctactgtctttggtttctcgtcgctgtatcgcttgctggatgatggcaatctggatttctccgagcttcatctgtttaaagatgatgaactattgaactatagccagaagcagctacgcacccgactgaatgaaaaccggaaattatatcgccagatagaagatagtgttgaacgctacagtggacaactggagaatgtgctgcctgagtttagtacaaaattcattcaggagcatttttacgataaagatgactggcgtgagctcgatttctccgactataggaaagagaaagagcagaacagtgaacaaaaactggtgctggagaacgtctccgtcgaaaacggcgaggtttggcaacgggcgaaaagcgccagtaaggcaggcaaacgtgacatcagcttgctggtgcaggtgcagccagggcaatcaaaggctgagctggagttttgttttcagggtaatgatcttcaggatagccagataaagattgctcataatcgccagttaaagactgaacccttctggcgtaccagccgggcgggcggcaagacttcccgcattatggcgtcggtgccttttgacgggcatccctgcttctttagtcttgagctgaccaaccgcaataattcagccgaagagtataaatttcgcctgttgttggtcgagcagggacaattctggctaaacgatattcagcactgctaccgtgttgagcccggtaaagatcaaataaccctgcaactggaagataacacgctgcgtattgccgagtctggcaacctgacctgtacgttggatgatgagagcgaagacatcgactgccagcattatgctcaggtgaattttgagacgctggcaaatcaaagtgacctggttcagtttgcgctcgtttccggtgattcccgtctgtcgtttaacatcgagggaccgggagcagaagaagggctaacgctaccgttgctttttgaccaaagtcgtttcaataagttgttcaaagaagagggcaatgcaacctggaaccgactaaaagggcgcatcatactcgataatactgaacacaaggttgtcggtgtacgccagcagttgttgatactggaagcctcattaattgagcaacgtctgctgggtacgggaagtgacgatagcgagtttgcgttggatgaacttcttgccagctaccccgatctccataacgcctatgaacagttatttgcctactatcatcgtcgtaacaccctaccgagtctggtgtcgtggtcagcagaatatcgcacactggtcagctacattgttactacgtttgaacaggcactccagcaaatcggcctgagcagagcgctgacagcgcaggagaaacgtcttctgcatttggggatctgccgcaatgatagccatgagcgtctctcaccactgcacccattagtgctggcctaccatctacaactggcagaaactatcgttgcggagtcggaacagaacgattcggcttcatttgccacactaccgccgatcactcttgatcgcttgatggtttccgggttaatgccgtttgtttaccacagtgagcatgaatacgcgcaactacagccggtggaagaaaaccgcttttggattgacgcggttccccagcggaaggtcagccatgactacgttaaacgtctggtaaaagacaaactcaatgagttcacggacgcttacgctcgattgttccagagcgctgaaaacagtgcgttgattatcaatgccattaatcaagggaacgccaaagaactgtttctgggattagtagaatattttaaacaagaaaaagagcacgctatttcggtgcatgtgaactgctacgatgaacgtttgctacccaatatgttcgatcactttgccgaaagtggtagctatgagcagcttaaaaacgatctcgatctgaacagcggcgtatggcgggcggaagccgatatgctgattgacctgctgcgtagccggttaacgttcagcaagtttgtactgccgtcagaaagcgacaagctggcctatgcgcatctggcatttttcatcaatacagcacctgtggattgccgccagatccgcattgaagatgcgtctagcggggtattgtgtcatgggttgatcgctggggaaggtgccgaaacgcagggagatgcttactttaccgcgtttggactgcgagatgtggatactgagtcctactgcgccctgcgtcttgcccgactaatcggctgcctgtggcaacccgcacgtcaaagcaacagccagtatcatggacaagggatcggcctggccgtgagtggcaattttaaacagctgctcaattactcttacaatagcgcgctctggaccaccatcattgatcctaaagtcaccctcgacttttttaccagccagaaagatgtggtgcttatccactattctgaccagtacaccagttgcgcaggctacgatgccgtcaccgtcacgaaacaggttgatttgttcctgcggttgctccagaccggaaatcagtcagggcagcctgctgttgatagtcagcatttgctggctgaatttaacgcctttaacggtgaatggctgctgaaaatgctgcgttccagtgaaagagagcgtaaagagaagcacggcattataggtgcgtacaaatttgtgcaatctatgttgcaccagtccgatatttgctggattccgttatcggtggccgaaatgatccgcgtgtccggcaatgtcgggctgaaaatgaaagagagcgatttatcgagaaatttacagggttatcgtaaaggtgcgatctctgatgatgtgctctttgttggtttcaaagaaaaccgtctctatctgttgccgctggaagttaaaaccggggcgcggcctgactacagctatgcaggccaacaggctcgtgagctcaaacgttatttacagcaggatattctggagccacaaacgctggcatcgcaattgtaccgggcgctctttattcgtcaggtgctgatgcaggtggagaaactgcgtctgtatggtgtgctggacagcgacaaactggctcccttgctggatcgacgtgaatggtggttaacgggagactatcagttaggtgaattggccgactatgtggacggcatcgtcgtggcgcatgtggacagcgcaacctgctttgctccctcttataaagagacggtggagaatatcttacagatcgaaatcccttattcactgctaccgtcgctgatcgctgcgcagggggatgaaccaccgctggcggaacgtcatcgggtgccggaaaaatatcggcttcagccagtgtgtgatgccactccgtcacaacccgaagccgtggtaggagtcacaacgccgactactgcacagtccatttcggaaccggggtcgttacagcccgctgtatcagtggtgactcctgatattagcgatacaccattacagatcctgtttggtcatgacgttgcgcgccagatcccattgtattgggagccaaccaacaccgcgaagttcatgaataccaataccggtattattggaacaatgggcaccgggaaaacccagtttactaaatcgctggtcacacagttgatgcgtaatcagtcctgtaacgttgatggcaaacctattggtttgctgatcttcgactacaaatcagactatgtggatgaggctttcctggatgctacaggggctaaaaagtatcagctatctttgttgccttacaaccccttatcgttatttggtgatatgccgatgttacccaggcatacggctatggcatttgctgaaacgatgggtaaagcctacaaccttggcgtaaaacaacgcatgaagctggttacactaataatggagtgctatgacttagcaggaatagtgcctcatgatcgagcaacatggaatcgtgtggcaccgaccattgaagatgtgtggcaacagtatctggctcaagataaagtagacgaagattcattgtacgctgcactttataacctggcaggtttccagatatttgaaacaaatcccgagaaaatgaccagtttgtatgatctggttgatggcgtcactgttattgagttagctggttattcacaagaaattcaaaatctggtggtagccctgacactggatctgttttacgcgcagatgcaaaagcgcggtaaaccggtggtgcggggggattatcgtcagctcactaaaatgattctggtggacgaagccgataactttatgcgtcaggatttttccagtctacgtaagatccttaaagaaggccgtgagtatggcgttggtgcgatcctgtcaacgcaagagatcactcactttaagaccggggaaaataattatgcctcctatattttaacttgggtgatccatcgtgtttctgagattaggaatgcagatatcaaggcggtgtttaacgttgatgataaaggtgatcaggagtctttgatggggcagattcggcagcttgagaagcattttagtctgtatgttgatggggacaagcaggttaagaagatgcgtgaccgggcgttttgggaactagtgaaatga

SEQ ID NO: 381774 - DNA, 822 bp, Salmonella enterica
atgacaattattgaagctatcgtgaatgtattaaaagagcatggaaagcctttagcgcataaagatatctatgattgtattataaataaaaattattattcatttggcgcaaaagatcccgtagcagtagtcagaggtgaaattaggaagcattgttacggtatcgacttcccaagtgcatcaccacgaaaaatatttattgaagtaaaatccataggacaatcaaaacccttatatgatttatggcaagggcaattatctaatgccagttctctaaagattgaaaaaacaacaaaagaccaattaccagaagagatcattcatagtaaatatatcgagcatatagataatataaaaagtcaattacttgatgctattaactcttctgatccagcgttctttgagcggctagtagtaactcttttattgaagatgggatacggatggaatgaatctgaggcgggtaaagttgttggtggcgcaggagatgaagggattgatggcgttataaatgaagataaattggggttggagaaaatatatatccaagcaaaaagatataatagcaaaaaagttccacccagtgaaattcgtgaatttattggttccgtgaatcaaaaaggtgcacataaaggtgtatttttctcatcatcctgttttacagaacaagcaaaagatagtgcaaaaaaagcacaaggcatgactatcacattgattaatggtgaacagctatgcgaatatcttgtccaaaatggcatgggggtcgcaaaggttggcacttatgagctttatgaaatagatagaaacttttttgatttctaa

SEQ ID NO: 381775 - DNA, 1194 bp, Salmonella enterica
atgaactttaatagcattttttcacccgaagatagtgatggactaaacgcatgtgttggtggtgataatatccatgatttctattcctatgccgaagggtatttcaatgcggcaaattatttatgtgataaagtcatatcagagagactcaccggggatctggatattgtaatatttcctatactgtattcagtacgccatggtatagaactggcattaaaatctcatttatcaaatcttcgtgattgtggtattaacataactgatggagatatccatggacatgatatagatacattatggagttgtttaaaagagaagacaccgagggctcctatattcatagagataatatcatctattgatcaccttattactgaaattgctcaattagatccaacagctcaggaatttcgctatcccgtaagaaaagacaacaatcaaataataccagatagaaaagttataaactaccttgcactccagtcaagtattacggagctaacatcgcagttaaaatgttttttgaatgcatctgagtgttatgtagaagagcataaaactgaaactcgtacaaaagagttaagtcgagaacaattatctgaactatcagatttattgccaaatcgtgacacatgggggaatgatgatagtgattttttaataaaaaaatcggagtttatagataaatacgatttaagtaacaaagctttcgaacgtgcaattaaattaattgaaggccatagagagtttgctggaaacataggaatagagtcagatatatctattttaaatgataaaataatcacattaataattaataatcatagttctagaaaatttaaagttgctaataaatcggaaggtggcattgtaaaaatatcagatataatgataagcaatgaatttcctgaacatgattttttcgaaacaataaaagatagtataaccattgatgatattattaaaatggaaacaatttgctatatggcattaaaaggagagtacagtgaattgtttgacgaaaaattacagaccaacttagaaagagtcaatggtatcgataatgaagaaaaggaaagaataaaacatgataagtttatccatttattctcaaaaacgacattccttagcaattttaaaactggcttaagattaattggcaggccgggacttgctgcaatgatcgattag

SEQ ID NO: 381776 - DNA, 354 bp, Salmonella enterica
atgctcccgaatcgaatggcgcttagtcgtcagactgaggaccagcttaaaaagttaaaaggatatactgggattacgccgaatgtcgcggctcgactggcatttttccgctcggtggagagtgagtttcgctattcgcctgagcgggatagtaagaagctggatggttcgttggtgctggataaaattacgtggctgggggaaacattgcaagctacggagttggtgttaaagatgctttatccgcacatggcacagaaagatattattaaggcatgggcggcacatgtagaggatgggattgctgcattgaggaatcatcggagtttaaaggattttgttcaatcattgtaa

SEQ ID NO: 381777 - DNA, 2010 bp, Salmonella enterica
gtgctcattaagcaactggtattacataattttcgcgtattttgcggcacacacaccatcgatctggctcccagaaagcgcccgcatgaagtaaaccctcgcccaatagtgctatttggtggtttaaatggtgcagggaaaacatctattttgtcagcaattcggctggcactgtatggacgtttagcgtttggcccggcaatgcagcagcaggagtatattgagcagctcggggcgctggtgcataacgggacgtatacggcagagcgtccggatgaggccgcagtagaactaacgtttacctacaaccaaaacggccatgagactgaatttaccgtcacgcgtagctggaaaaaaggaaagaaagatcgtctctctttgcagcaggacgggcaaccgcgtagtgaactcagttatgaccagtgtcagggatttttgaatgaattaattcctcacggtgtcgccgatcttttcttttttgatggagagaagattgcagagctggcggaagatgaatccggcaatattctgcgtacagcggtgcgtcgtttgttgggactggatctgatcgccagactgcaaaatgatctgatgatttttgtcaaacgccagcaaactgcccagttgggtggctcccagcaacagcaggttgaagcgcttgaggcaaagattaaaacacttgccggtcaggcggagaaattgttggaagaagccgatttcgtcaactcgcggatcgaatttttatcccaggacattattcgccatgagggattgttaaatgcgcagggcggcgcatttgcccagaccaaagcacaggaaaaacagaaagttgaaacgctgttaaaagaaaaagagcgtctggaaaaagcgttacgacaggaatgcgatggatcgttgccctatgcattagcgcctaatacgttgtcgcggttgctggaaaaaattgccaatgaagcgcagatcaagcaggcgaaaatttttgagacagagttaaatcaatttttaactcaactcaaaaatgatatcgcgttccgttccagcagtgagagtagtaccagagccattgctaccgaagcgattaccaataatttggacgcatatatggcaaccaaaccaaaaggtgatttgctgtttgatatttctgaacgtgaagccggtatgctccagcaatccattgagcaggacagcaaaaaagcatggcagcgttttgatatgtaccgccatcaattagcggatattgaacaacaactggagcaggccgctgccaatattgctcgcgccccggaagacgagcagttaatggatctctttgcagcattacgcgatctcgatcataagcgtgaaaaacagcggcaaaaataccgctctctgctggaagaggctaaacggacgaaacagcagcaactggattgtgttcgtcaggtacagaaagcacatgacatcacccgtagccagcatggtttgagcagcgcatttaaaaatgcacaagagaccattaacctgctcgattactacagcaatgtactaacgcaggcgcgagtgaaaaagttatctgctaactttgaaattgcctaccacaagctggcccgtaaagaggatttacagcttaatgcgcacataaatccacagacatttgatgttgaactggtggatgaaaaggggtcggtgattaatcgtaagctgctttctgcgggtgaaaagcagatttatgcgattgccattcttgaggcgctggcaaaaacctctgggcgtgatttcccggtgattattgatacgccgttagggcgtctggattctcagcaccgggataagttgattaatcattatttcccggaagccagccatcaggttgtgctgctatccaccgatactgaagttgacgagcgttatttcgtcgatcgactgcgtgatgatatttctcatgcttatgagattgtgtttaatgcacataccaaatcatctgcgctgaaacccggttatttctgggaactaactaaggaggctgtctga

SEQ ID NO: 381778 - DNA, 1635 bp, Salmonella enterica
atgagtaaattagttcaggcctacgatttagccgaatacgaagattttattaatcaagagcagttcgctggacgccctctggccgaatatgttgctgaagttcaaagaatttattgtgcggataagcgtccgtgggtaattggctatagcggcgggaaagattcttccgccgtgatcacgctggtgtatctggccctgctcggcctgcccccggaaatgcgcagcaaagatgtttttgtggtgtcatccgatacgctggtggaaacgccagtggtagtagatttaattaaaaaaacaatgttgcagattgaagcaggcgcaaagcgtaatgatctgccgatcactcaacatgcggtaacgcctaaaactaacgaaaccttctgggtcaatttactggggaaaggttatccggccccaacccgtagttttcgctggtgtaccgagcgtatgaaaatcaatccggtgagcgactttattaaagataaggtcagccagtttgatgaagtgattgttgtcctcggctcacgtagtagcgaaagtgcctcccgtgcgcaggtcatcgcaaagcacaaaattgatggctcacgcctggcccggcataccacactggcaaatgcgtttatctatacccctattgatacctgggatgtagaggacgtctggaaactgctgcgcggcgcgttccgctatgctcctgaagatatcgacgaatgggaaagcccgtggggtggaaacaaccgtccgctgtggacgctgtatatggactcttccgcacagggtgagtgtcccctagtgatcgacgaaagtaccccctcttgcgggaactctcgctttggctgctggacctgtaccgtagtcaccaaagataaagcgatggaaagtctgatcaaaaatggcgaagagtggatgtcgccattgctgaaatatcgtgatctgctggcgtttaccaccgatccggcgaataaagacacctatcgcaactataaacgccgcaccggtaaggtgagctatcagtacgctaaagacggcgaagatcgcagtgcagagcgtaagcatgttcctggcccctactggctcaaataccgccagcagtggttaaaaaacttactggaaattgagcgtgatttaaacgctcagggccacacgattacgttaattacccagccggagctgcacgctatccgtcaggagtggttgaaagatcctaacgagccagactggcacgacacattgccggagatttaccgtgaggtatatcagcaggatctgaattgggtggttgacgatcagtcgcgctttgatgccagcgatgctgatttgctggcgcagataacgcaagggttcgacgtagtacctgaaatggtgatgaaactgattgagctggaaacctcgatggaaggattaagtcgtcgtcaggggatttttgacaagctcggcacaattttgaagcaggactggggcagcctggaagagatccagcagcaacaggtaacattgcaaaaacgcaacgatcgggatattcatcaggacgaagttgaaaagctggaagctgaacttcagactttacagcgcagaattatcgatgcgggcgaatcgtctgtgcttatcgatgaggaaaatgaacgtgctcattaa

SEQ ID NO: 381779 - DNA, 1086 bp, Salmonella enterica
atggctagtgttgatgcagactactgctactcgtttccggctatacgtggcatacaggcaggtcgtcctttctatattgccacatgcccgatgcgtatcatccccaaaatattcagctttgatgaaaatgacgttccgcccgagttacgcgcacagcgcacactgaataaatcacgcatccccgaaatggtgcgttatctgctggaaaatccaaaagattatgtgttttcagctctgacagcgtccattgccgttgacgttcagtttgatgagtttcccaactccaacaacttggggacgttatgcgtgccaatggatgcacaaattctgatcaacgacggtcagcaccgccgtaaagcgattgaagacgctttggatgctcgcccggagctgggccaggataatattccggtgttgttctttgttgatgaaggcttaaaacgtagccagcagatgttcgccgatctgaataaatacgccattcgccccagcccgtcgctggcgtctctatacgatcatcgcgatgccagttcaaatctggcacgttatctggcgatgtccatagagccgtttgttgggatgacagaactggaaaaatcaggcatcagtcagcggtcgaataagttatttacgttgagcagcatcaagcaggctacccgcgcattgttgggtaaagatcccaaagagaacaactttgaggaatgcacccaaatagctacccaatattggcaagctatttttaacgtgatgccggattggcagctagcggctaaaaaagaggtttcaccggttcagttacgacaagattatgttcacgctcatggcattggattgcaggcacttgggcaactgggatataccctgctaacggattatcctgagcaatggccggagaaaatagctgcacttaaaacttttaactggcgcagaaacaacccggatctcatcaaacgtgcgatgcagcacggcaaactgagtaaaaccaatacggcgatccagctcacctgcaatgcactaaaaaccgctctctcaatccccctcactcctgaagaacaggagcttgaagctcaaatggttgtctcatga

SEQ ID NO: 381780 - DNA, 522 bp, Salmonella enterica
atgaatacattactcaaccactaccagacctgcctgaacgattatactcgtccggccattattcatggtcagtgccagcccgagataatccgatggcacacgctggcaatagtgtcctgtacacttcccggaggcgatcttgccgaactggttatccctgaacgcctccagcgcattctcaatattccaacaacagcaccaatgataacggcgcaggacatcaacacaggcctgatgtcgttaatgctgccgggtgtgctgctcagcgaatgcgagcgactggggatgcgtcgcctcagcaacaaattacagtcattgtttcaacaattcagggggccagggatcaaagagcggttaacgctgttgtgctggtctgaactggcaactggtatcgatcacaacgaatggaaggagttacaccggttatccacggaatcgctgatatcgtggacagatcagaagctacagacactctgggggttgcagccgcagatagaagactacgtcgctttgagctgttag

SEQ ID NO: 381781 - DNA, 204 bp, Salmonella enterica
atgaataagtccggagatggaaaaaagccaaacatcagattagataacgcgctattcaatgtgattaaacataataaaggcgaatctgtgtttagtgatgttacaggtaaccaaatatttgggtgtgagtgggaagatataaaaaataaaataagcgtttatttttatgggggaatgagtttaaagattcgttttccagtgtaa

SEQ ID NO: 381782 - DNA, 546 bp, Salmonella enterica; identical to SEQ ID NO: 379613

SEQ ID NO: 381783 - DNA, 456 bp, Salmonella enterica; identical to SEQ ID NO: 379614

SEQ ID NO: 381784 - DNA, 477 bp, Salmonella enterica
atggagataaaggatagggtggcgctgagtgcccgtccgggaaagcttacacttatccgggagggcgtgttcctgaaatgctaccagcagtcgttgttttcaggggggagggtcaatgctttaacgggaactttgaccttttcagggaggtcgtatgtatttaatcctgaaggaagcacgctcatgccacgcttaaaaaagatgaatatccttttaatcttattgctttatagcatggcagcatctgcctcatcaaatcatccatattctactgataataaagaatatttatatttaccaaaagataaaccaacattatcctgggagaagaaggagcctcaaacagataaaaatttatattgccttactccgagtgatccggggtgtagtgatatgtggtacaaggaaaaattgagggagcatcaggagcgtgtacaacgttaccagcttccaaaaaaacgtaactttcataaataa

SEQ ID NO: 381785 - DNA, 3450 bp, Salmonella enterica
atgaagtttgtatctctcccgcatccgtccggggatgccgttgcctctccggctttgcgccgactggcctggtttaacattgccgtgcaggtggcctttccgctggcggtggcgttccccccggcgatggccggcgaacagcatttcctgccgcagcctgcgccgctgtccacgcagcgcacgcaggtctacacgctgggtcccggtgagacggccatctcggttgcaaaaaaattcgatctcaccctgaaccagctgcgcgagctcaatcagttgcgcaccttcgcgcacggactcaatggtctgcagtctggggatgacgtggatgtgccgctgatggcagcaaaggataataaaaacgcgtcagatgccgccgcccccggcaggtccgcttccgcagaagagggcaatgagcaggcgcagaaagtggccgggtatgcctcacaggctggcagcttcctggccagcagtgcaaaaagtgacgccgccgcgtccatggcccgcaatatggtcaccgtcgaggccggcggagcatttcagcagtggctgagccacttcggcaccgcccgcgtgcagctggacgcggacaaaaacttctccctgaaaaactcgcagtttgacctgctgctgccgctgtatgaccagggcgataaccttgtgttcacccagggtagcctgcaccgtaccgacagccgtacccaggccagcctcggcgccggctggcgtcactccacctccacctacatgctgggcggcaacctgttcggggatttcgacctgtcccgggaccatgcgcgtgccggcgccggtcttgagtactggcgaaacttcctgaagttgggtgtcaatagttacctgcgtctgtctggatggaaagactctccggacctggaggattatcaggagcggccagcaaacggctgggatgtccgggggcaggcctgggtaccgtcgctgccgcagctgggcggcaagctcacgtatgagcagtactatggcaaagaagtcgccttgttcggggtggacagtcgccagaggaacccgcatgccatcacggtcgggattaactataccccggtgccgctgatcaccctgggggcggaacagcgtcagggccagtcagggaaaagcgacacccggctgacgttgaatatgaattaccacctcggggtgccgtggcgcgcccaggtggacccgaccgcggtggcggcgatgcgaagcctggctggcagccagtatgacctggtggagcgtaacaataatattgtgctcgagtaccgaaagaaagagattgtccgcctgaagacggcagacctggtgacgggctataccggtgagcagaagtctctgggggtatcagtgaacagcaggcatggactggaacgcatcgactgggatgcttcagccctgaacgcagccggcggtaaaattgtgcagaacggaagagattatgcggtggtgctgccggcgtacctgtcatcggcgcagggggtgaacacgtacaccgtcagcggtgtggcggtggacacgaagggcaaccgctcttcgcggagtgacactcaggtgaccgtgcaggcgacggaggtgaacaaacagacctcgaccttcacgccggtgagcagtgtcctgctggcggacgggaagagtacgcaggtgctgaccctgatgctgttggatgagaataaccagccggtagatatggatgtgaaggacatcagcctgaacagcagcgtcctgaaaagcgccacgatatcggccctgacacgaaaatctgcaggagtttatgcggttacagtaacagccggaagggatgctgagaatgtcacccttacgccagtagtcaacggtactacgttgtcctcagccgtggtaactatcagcagcgtcacgccggacggggcacggtcgaccattagcaccgatgccgccgcctatgtgtccggttctgatatggcagtgacggtgacgctgaaggacacgaacaataatgtggtggccggagcggcctcctcgctgacggcggatacggtgaccgtaccgaatgcgatccttaaagccggcagccgctggcgggacaacggggacgggacctacacggcggcctacacggccaccacggcgggttcacacctgaaggcgacggtgaggctgggcggcaggggcaacccggcgtcatctgatgcgtatgccatcacggcggccacgccggacggggcgaaatcggctatcagcaccgacgccactgcctatgtgtccggttctgatatggcagtgacggtgacgctgaaggacggacaggacaacgcagtgaccgggacggccgcctcgctgacggcggatacggtgaccgtaccgaatgcgatccttaaagccggcagccgctggcgggacaacggggacgggacctacacggcggcctacacggccaccacggcgggttcacacctgaaggcgacggtgaggctgggcggcaggggcaacccggcgtcatctgatgcgtatgccatcacggcggccacgccggacggggcgaaatcggctatcagcaccgacgccactgcctatgtgtccggttctgatatggcagtgacggtgacgctgaaggacggacaggacaacgcagtgaccgggacggccgcctcgctgacggcggatacggtgaccgtaccgaatgcgatccttaaagccggcagccgctggcgggacaacggggacgggacctacacggcggcctacacggccaccacggcgggtacgaacctgagggcgacggtgaggctgggcgggtggagcacggcggcgcagtctggtaagtacggcatcattctgggatatgaggcccctgcatccatcaatacgcaggtcaatgcttacacctttacacagaccagcgaagaggggacattcccgaccaccggctttaccggggcgacgttcaccatcgtgccgaaggacagcaagagcgtgactgattacacctggacctccgacgccagctgggtatcagtgacggacggggtggtgaagttcaccggaacaggtacgggcgacaaggtgaccattacgggtacgccgacaagcagtcaggggaacatcattaagtacagtttcacgcttaagagctggttcatacatagtgggtcgaccagaatgagctggtccgacgcgaacacgtattgctcatcgcagtcgggttacagcctgccgacgatcgcccagatgatcctgcgtacaaatcacaccgcaacactgatccggggcaccggagcgctgttgaacgagtggggcatgatgacacgttataccagcgcgcgtttctccgacaacacctactggtcatcggaccagttgagtagcggctcccataacaacgtcagcctgcgctatggcggcgtctacttcagcagcgatagcagcaagatcaacgtggtgtgtcgtcagggtctttag

SEQ ID NO: 381786 - DNA, 414 bp, Salmonella enterica
atgtttgtatccagattaggcagtactctaaacgctattttcggcatgaatgagcaaggtaagccggaagcaatatccaggagtgacccacaaggaataaccttgtccgacgctcagaaactgacagttaaaaacagcaagttcttcgaggcaggcgccagcatgtcgcttctggaccagcctgacaagatgggccatgtattcgaccagcacgcaaaacaattagcaggattgtcgcgccacattctggacggacagagtgaagccgccaaccataccgttcattttcagggccgacaaccaacacgggtttcgctacaggtgcaacaccccgaccttgacctgagcacccgagcgcatgatgtcgagttccacggttcccctgagatgatagaaagcaggcgtctaatgtga

SEQ ID NO: 381787 - DNA, 297 bp, Salmonella enterica
atgaacacgtcaccgtggaacaaagaccgtatcatcggccaaaaaaggtcacttcagatatctcatatctgggggatccgaatccggcttgaacaggaaggtaaaacgcgtgatttagctctgttcaatatggccctggacagtaaactaccaggctgtgatctggtcaaactcaaagtatctgatgttgcatatggtggctctgtttcaaaaaccggtagccctgtgcaatttgaaataaccaaagggacaagagaagctgttgctgctttgatagatgcctggcaattttcatag

SEQ ID NO: 381788 - DNA, 225 bp, Salmonella enterica
atgccggacaacgtagattttattcaggaacaacaggctgaattactggagcgccagattaacgcggcaagggtaaaacattgcggtgtttcttcgctggtttgcgaagagtgtgatgcgccaatacctgctgcccgtcgtgcggcttatccgtcagccacgcgttgtgtttcctgtcagtcagtctttgaagcaaaaaacaaacattaccggagaatggcatga

SEQ ID NO: 381789 - DNA, 2208 bp, Salmonella enterica
atggaacttagtctaaaaaatgtaacaagctacgacaaaaataaatatacgaaaatatccctcgaaaaaagaataaatatcctttacgggcaaaacggagctggaaaatctaccatatcaaattttttctataatccagcagacgatgactatagggactgccgctgcacaaacattaataactatcgtccattggtttataatacaaagttcattgaagacaacttctttgataaagatgttcaaaaagggatttttacattaagcaaagaaaataccgagatcgaaaaagagataagtaagaaaagagaaatagttaaaacattaaaaataaaactagaggcaacaaaaacaaattatcaaaaaattaaagaccgcaatcatgatgcagaaacaagttgtactgaatcaatatggttaaataccgaatacataagaaactctgatgtcaactcattaatggcagggtaccttaagaataaaagaaaccttttcacaaaggtaaagtcttctattagattatctgatatagatttaaatcaattattaactgactacagagagttattgaatcataaaaacaccaccatacaaacaatatctccatataatccttatcctatttcttttgatgatgaaaatttattaaagactcctgtcattgattctagcaatagctatctatcagaaacaatcaaaaagcttcagaatctcgattgggttaaaaaaggtaaagaaaattatttagttggcgacatttgccctttttgtcaaaaagaaaccattgatgataaattcacagaggcgctcgagcaaatttttgatgagagctacgctcagaaaataacatcaattaaaaaattaaaatatatttatgaattaactactcaagaacaacttcaattactaaaaacacagttaaatgactgtacagcaatctcaattgaagaaagaaaaactagtcttgctcacatttcttcccttgagaaaatgctaaaaagtaacattgagttaattaataacaagatacaaaacccgtcactcagcgtaattcttgataaagataaagatattgaggaatctcttctaaaagacataaaacaatataactctagaattaatgaccttaatgaaaaggtaaaacaatttaaccttactcaagataaaataaaaaatcagttttggggagcattgagaaactaccgcaatacagactttgaagttttagagaaaattcaagtcgaaaacgacatcattatcaagaatctcgaagaaagcattgattctattaacaaagaaatcaaacacactgatgatgaaataaaggaattaagaaataaaacatccaatatcgacgcaacaatctcctcgataaactcaaaattaaaaaaccttggcattacctgtttctacattgataaacatccaaccataaaaaatagtttcgttatagttcgctcagataatacaccaagtaaaaatgtatatagatctcttagcgaaggtgaaaaaactctcattacatttctctattttattgaatattgtaagggacaaacaaacacagatgaattcgacaaccgagacagtttaatcgtcattgacgatcctatttcaagtctctctcagaactatatctatgatatagcatcaatgattcactatgacattttcacttctgctaataaagtgataatcctcactcataatctatatttttttcatgagctaataaagttagctccaatttcagaaaggaaattcaatagcacctatcagctttttagaataacaaaaaacctacatagttctttttctaacatcagcagagatagtttgcaaaatgaatatcaatctttatggcaaatactcaaggatgccagagatggaaaagttcacaatgtagttatccctaatacaatgagaaacatcttagaatattactttgcatttgttcataaaactaacgagttacaagatgaattgaacaagcttgcacaaaatgaaagcaatagtaatttcaaggctttctatagatatataaatagaggttcacactcagattcgataaacataacagatatgggtgaaataacacccgacatatacatcacacaatttaaagagatatttagacttatgggagatatttcacattttaataaaatgtatgaagagaaaaagaatatagaagacactaccgcttag

SEQ ID NO: 381790 - DNA, 534 bp, Salmonella enterica
atgatgcatctgaaaaatatcgtagccggtaatccaaaaacgcctgaccagtatcaactcactaaaaaatttggtgtggtgtggctgtttgatgaagatggtaaaaactggtatgaggaacagaagaaattttctgccgactcgttaaaaattgcctacgataaaaataatgttattgtggatattaacaaagatgtttcggcaataaatcctgatgggtgcagcgttgttgagttacctgatatcacagctaatcgccgggcggatgtatcaggacgctggatgtttaatggtgagcaggtgagtaaacgtgtttattcgccggaggagctacgccagcaggcagaggcgaaaaaacagaagttactcgaagaagccgaagtcgttattaagccactgtcgcgcgcagtaaagatgggtatcgcaaccgatgaggagcggaagcggctggaagcatgggaactctacagcgttctggtcagtcgggttgattcatctgaccctgactggccggagaagccagccagtcagtaa

SEQ ID NO: 381791 - DNA, 588 bp, Salmonella enterica
atgaaaaaatatcaggatattaaaaatttcagacttattgacgcgcccgtaaacagagggaaaacgcagtccgaaataaacataggtgcatattttctggagtcagaagacgggcaggactggtatgagtgtcagtcattattttctgatgatactgcaaaaattatgtacgatcctgaaggggttatctggagtgttgttaatcagccagtcccgcaacgtggaaacacatacgccgtatcaatgttgtggccggttaatatgtctgttgcggaaatagacgctgctgactgccctgatgattgtcgtggtgatggctcatggttgtacagggatggtcaggttttacccgttccggtggattatcaggctaaggcggaaaccacccgacagaaattacttaacgatgcaaataatgtcattaaggactggcgtacagaattaacgctggggattattagtgatgaaaacaaagtcactctaataaattggatgggatacattaataagttgaaagatattgatttttcacaagttaatgatgaggccacctttgaaaaaataaagtggcctgaattacctaaataa

SEQ ID NO: 381792 - DNA, 408 bp, Salmonella enterica
gtgcttgatatttacgcgaactacgcacatgtactccgctttatcagtagcctcgtggagagcatggtttccctgaaagtaaacggaaacgctgtagccacaggcgaagtacaggcaggaaatggctcatcgcgcatgactaataacggcgacatctttggttctgtctgggggaatagctggctgagtctgtggattaataataattttgtcgcagatgttcagttaggggctggcacatctgtgactacctggaacaatgcggggtcatggcctaacactcccggatatgtagttacttccgtctggaaagataatcaaggcgaaaatattgatggtattaattatgcgcctttgcaaaaacgagtcgggaatcagtggtataccgtacaagggggaacgacataa

SEQ ID NO: 381793 - DNA, 1497 bp, Salmonella enterica
atggctcacccacatttattagcggaaagaatttcccgtctgagcagcgcccttgagaaggggctgtatgaacgtagtcacgccatacgcctgtgcctactggcggcgttaagcggtgaaagcgtctttttgttgggcccgcccggtatcgccaagagtctgattgcccgccgcctgaagtttgctttccagcgcgcccgcgcttttgaatatctgatgacacgcttttccacgccggaagaggtttttggaccgctctctattcaggcgctgaaagatgaaggtcgctatgaacgcttaacgaccggctaccttcccgaagccgaaatcgtttttctggatgaaatctggaaagccgggcccgctatcctgaacacattgctgaccgccattaacgaacgccatttccgcaacggcgcgtttgaggaaaaaattccgatgcggctgctggtggcggcctctaacgaactgcccgaagcggacagcagcctggaagccttgtacgaccgaatgttgattcgcctgtggctggataaagttcaggataaagccaatttccgctccatgctggttagtcagcaggatgagagcgataacccggtccccgcctcgttacaggttagcgacgaagaatatcaacagtggcaaaaagatatcggcgcgatttcactgccagatccggtctttgagctgatatttactctgcgccaacagctggataatttgccgaatgcgccttatgtctccgaccgtcgctggaagaaagccatccgcctgttacaggcgagcgccttctttagcggacgcgacgcggttgcgccgattgaccttatcctgctaaaagattgcttgtggtatgacgcgcagagtctgaatctcatgcaacagcaactggaaatattgatgaccggacacgcctggcagcagcaggccatgctgactcgcctcggcggtatcgtccagcgtcgcctccagttgcagcaacagcaaagcgataaaaccgctttcaccgtcattaaagaaggcggtatgttcagccgccgcccgcattacactttaccgccggaagccagcgcgtcaacgttgacgttattgctacaaaaaccgctaaaactgcatgatatggaagtgatccatattacctttgaccgcagcgcgctggaactttggctgaccaaaggcggcgagatccgcggcaaactgaacgggatcggctttgcccaaacgctgaatatggaagtcgataacgctcaacatttggtggtgcgcgacatcagtctacaaggtacccgtctggcgttaccgggagcggctgaagacagtatgcctgcggagatcaaacagcagctggaaacgttagaaaacgactggcgccagcaacatacccgcttcagcgagcagcaacattgcctgtttattcacagcgactggttagggcgcattgaggccagcctgcaggatgtaggagaacagatccgccaggcgcaacaatgctga

SEQ ID NO: 381794 - DNA, 591 bp, Salmonella enterica
atgttaaaaaattatataaaacaagctctgactattcagcaggaagaaggtgatgcctcaaacaatgcattggataaatatttagcaggcatagctgcatataatgtaagcaaggatgaggaatacgacttcttatatgctaattatcaagcgttgtggatttgcgccaatttaggtgagtcgaaaaaagcgctgtcttatgctaaaaaatgtatggaattgatgtctgataccataagagccggtgctatattccattataccgatataggacggttttatgaggaagtgatccgctatgcaacgaacactatagcatgggatttatacaaacactccgatagcattgatgaattagagcgagccctcaaaacaatatctcacggctgtaactatattgacagccctgattacttttacgctttcgatactaaagtccgtatcttacttaaattgggccgaaaagaagaggcttatagaattgtttttacttgcctgcaacaacgcccagacttctccgatttttctgatatcaaggaacaaaaggaatatcaggactggaaaaaaaatttcgccacgggaactatgtaa

SEQ ID NO: 381795 - DNA, 1227 bp, Salmonella enterica
atgaaacaaatcacctttacgccgcgccatcaccagcttaccaacaccaatacctggacacctgacagccagtggctggtctttgatgtgcggccttcaggcgcgtcatttacgggcaagactattgagcgtgtcaatgtgcataccggcgacgtggaggtgatttatcgcgccgtgcagggcgcgcatgtcggcgtggtgacggtgcatcctgccgacaatcactatgtgtttattcatggccctgaaaaccctgatgagacgtggcattacgattttcaccaccgccggggcgttattgcaacgccgaggggcgtgactaacctcgatgcgatggatattactgcgccgtatactcccggcgcgctgcgcggcggcagccacgtccatgtatttagcccgaacggcgagctggtgagttttacctataatgaccacgttctgcatgagcgagatccggcgctggatctgcgtaatgtcggcgtggccgtgccgtatgggccggtaacggtgccggttcagcatccgcgcgaatacagcggtagccactggtgcgtactggttagccgcacgacgcctgcgccgagacctggcagcgatgacattaaccgcgcctatgaagagggctgggtgggcaaccgccagatcgcctttattggcgatacgctgtcgctgacgggcaaaaaagtcccggagctgtttattgtcgatttaccgtgtcatgaaaacggctggaaacaggcaggcgacacgccgctgacgggaaccgaatcaacgatgccatcgccgccgttgggcgtagttcagcggcgtcttacctttactcaccagcgtgtttatcctggactcactaacgaaccacgccactgggttcgcagtaatccgcaggcgacggcgatcgcctttttgatgcgagacgataacggcgtagcgcaactgtggctgatatcgccgcagggaggcgagccccggcagttaacgcatcatgcgaccggcgtacagtcagcgtttaactggcatccgtcgggtaaatggctgggactggtgctggaaaatcggattgcctgctgcgacgcacaaagtgggaggatcgacttcttaaccgccaggcacgacaacccgccttctgcagacgccgtcgttttttcaccggatgggcgacacgtcgcatggatggaagaggtgaaagggttccgtcagctatgggtgacggaaaccgggcgatag

SEQ ID NO: 381796 - DNA, 291 bp, Salmonella enterica
atgcttttattaggcggttgttcaagcgtcatgtcgcacaccggcggtaaagagggtacttatcctggcacgcgcgccagcgctacgatgatcggtaacgatgagacaaactggggcaccaaatcgttggctatcctggatatgccgtttaccgccgtgatggatacgatccttctgccgtgggacatcttccgcaaagacagttcggtaagatcgcgcgtagagaaaagcgaggaggagacgaaaatgaccaatgccgtcatccccccggcgaagatgcctcctccctga

SEQ ID NO: 381797 - DNA, 414 bp, Salmonella enterica; identical to SEQ ID NO: 371021

SEQ ID NO: 381798 - DNA, 429 bp, Salmonella enterica
atgcgtaactacgatttatccccactgctgcgtcaatggatcggttttgacaagctggccaatgcgctgcaaaacagcggcgaaagccagagcttcccgccctataacatcgaaaaaagcgacgataaccattatcgcattaccttagcgttagccggtttccgtcaggaagatctggatattcaactggaaggcacgcgcctgacggtgaaaggcacgccggaacagccggaaaacgagcccaaatggttacatcagggcctggtcatgcagccttttagcctgagctttacgctggctgagaatatggaagtttccggcgcgacgtttaccaacggcctgctgcatattgatttaacccgcaacgagccggaaaccattgcgccgcagcgtatcgccattaacgaacgctccgcattaaatagctaa

SEQ ID NO: 381799 - DNA, 1662 bp, Salmonella enterica
atgagtgatatcgcattgacggtcagcgttctggcgttggtggcggttgtcggtttatggatcggcaacattaaagtgcgcggtgtcggctttggtattggcggtgttctgttcggcggtattatcgtcggccacttcgtcgatcaggctggggtgacgctgagcggcgatatgctgcactttatccaggaattcggcctgatcctttttgtttataccatcggcatacaggtggggccggggtttttcgcctcgctacgcgtttccgggctgcgtctcaatctgtttgctgttctgattgtgattatgggcgggttggtcaccgcgattctgcataaaattttcgctattccgctgccagtggtgctggggattttctccggcgcagtcaccaatacgcctgcgttaggggcgggtcagcaaatcctgcgcgatctgggaacgccagtggatctggtggatcagatggggatgagctatgcgatggcgtatccgtttggcatctgcggtattttgctcaccatgtggctgatgcggttgatttttcgcgttaacgtcgaggcggaggcgcagaggcatgaatcctctctcgctaacggtcattcattaattcaaacaatgaatatccgtgtcgagaatccgaacctcaataatatggctattcaggatgtgccgatcctgaacagcgataaaatcatttgctcacgcctgaaacgcgacgacacgctgatggtgccgtcgccggggacgattatccaggcaggcgacctgctgcacctcgtcggccaatctaccgacctgcataacgcgcaactggtgatcggcaaggaagtggacacctcgttgtcgacgcgcggcacggatttacgcgtcgagcgtgtggtcgtcaccaacgaaaaagtgctcggcaaacgtatccgcgatttgcactttaaagagcgttatgacgtggttatctcccgtcttaaccgcgcgggcgttgagctggtcgccagtagcgacgccagcctgcagtttggcgacattctcaatctggtggggcgtccagcctcgattgatgcggtagccaatgtggtcggcaacgcgcagcaaaaactccagcaggtgcagatgctgccggtgtttatcggcatcggattaggggttctgcttgggtcaatcccgttgtttgtgccgggattcccggtcgcgttaaaactggggctggccggcgggccgctgatcatggcgctaattttggggcgtatcggcagcatcggtaagctgtactggtttatgccgccgagcgccaacctcgcgctgcgtgagttaggcatcgttttgtttctggcggtcgttgggctgaaatccggcggcgattttgtcgatacgctgacgcagggcgaaggattaagctggattggctatggtattttcatcaccgctattccgctgattaccgtcggtttgctggcgcggatttttgccaaaatgaactatctgacgctgtgcgggatgctggccggttcgatgaccgatccgccagcgctggcatttgccaacaatcttcatgccaccagcggcgcggcggcgctctcttacgcgactgtctatccgttagtgatgttcctgcgtattatcacgccacaactgctggcggtgattttttggggaatgggttag

SEQ ID NO: 381800 - DNA, 348 bp, Salmonella enterica
atgaagatttcccgcctcggagaagcgccggattatcgcttctcgctggcaaatgagcgtacctttctggcgtggattcgcacctcgctgggatttctggcggcaggcgtcggtcttgatcagctcgccccggattttgccacgccggtgatccgtgaactgctggcgctactgttgtgtctgtttgcgggcggcctggcgatttatggctatctacgctggttacgtaatgaaaaagcgatgcgtctgaaagaggatttgccctatacccacagcctgttgatcatcagcgttattttgatgattgtcgcggtgatagtgatggggctggtactgtatgccggatag

SEQ ID NO: 381801 - DNA, 363 bp, Salmonella enterica
atgccggatagtcgtaaagcccgtcggcagaacgatccgggactgcaaccggagcgtacgtcgctggcctggtttcgcacgctgctgggatacggggcgttaatggcgttagccgtcaggcaccactggcatcaggcggggttcttgttctgggtgtcgatcagcgttctggcgatagtggcggtgattctttggcgttataccctgagtcgtaatttgatggatgtcgcgcatagcgatttttccgaaactcatgtcgtgcgtgacaaatttttgatctccctcgcggtgttgtcgctcgcaatcctgtttgctgttacccatattcgccaacttattgcatttatcgggaactttatatga

SEQ ID NO: 381802 - DNA, 531 bp, Salmonella enterica
atgacaggacgtcaggacattgtcgtgagtgatgaccagattcaggtcgtcgtaaatcgccagaatagccagcgccctcagcaactgtaccgtaacttacaacggctcggcattcgcaatgtccattttatcccattgttggaacatgaccggaacggaatgttgaccgaggattcattgtgttcagcagactgggggcggtttttaaatagcgtatttgatatttgggtacgtgaagatattcagcgtatctcggttcgcctttttgatgagacgctacagcagtggtgcggcggcaggaatggcgctgaagcgccggacaaggcgccgctaagcgctgaatgtcagaagtgctctttattacgattttgcggcggcggatgccctgagcatcgggatagccaggggaaaaaccggctttgcgagggctaccagaccttttttaactactcctcgccgcatatgcgggtgatgcgggatttactgaaacagcatcgctcgccggaggagttgatggcgatgctgcgttag

SEQ ID NO: 381803 - DNA, 1323 bp, Salmonella enterica
atggaaaacatacaaaagctcatcgcccggtatcctttggtccaggatctggtcgccctcaaagaaaccacctggtttaacccgggcaccacctctcttgcacaaggtctaccgtatgtcggcctgacggagcaggacgtaaacgccgcccatgaccgtctggcgcgctttgcgccgtatctggcgaaagcgtttccgcaaaccgccgccgctggcggcatgatcgaatctgacgtggtcgctattccggccatgcaaaagcggctggaaaaagagtatgggcaaacgatcgacggtgaaatgctgttaaaaaaagacagccacctggcaatctctggttccattaaagcgcgcggcggcatctacgaggtgctaacgcacgcggaaaaactggcgctggaggcgggtctgttaaccaccgacgatgactatagcgtgttgctttcgccggaatttaaacaattcttcagccagtacagtatcgccgtcggttcaaccggcaatctggggctatcgatcggtatcatgagcgcctgcatcggttttaaagtgacggtacatatgtctgccgacgcccgcgcctggaaaaaagcgaagctgcgtagccacggcgtgacggtcgtggaatacgaagatgattacggcgtggcggttgagcagggtcgtaaagcagcgcaatccgatccaaactgtttctttatcgacgatgaaaactcccgcacgctatttctgggctatgcggtagcgggtcagcgtctgaaagcgcaattcgcgcaacagggacgcgtcgttgacgccagccacccactgtttgtttatctaccgtgcggcgttggcggcggccctggcggcgtcgcctttggcctgaaactggcatttggcgacaacgtccactgtttctttgccgaaccgacccattcaccctgcatgttactcggcgtttataccggtctgcacgatgccatctcagtacaagatatcggtattgataacctgacggcggctgacggcctggcggtaggtcgcgcttcaggctttgttggtcgggcaatggagcgtctgcttgacggcctctataccttagacgatcaaacaatgtatgacatgctgggctggctggcgcaggaggaaggaattcgactggagccatcagctctggcagggatggccgggccacagcgcatttgcgccgccaccgagtatcagcaaaggcatggattcagtcagacgcagctcggcaacgcgacgcatctggtatgggcaaccgggggcggcatggtgccggaggatgaaatggaacaatacctggcaaaaggacgctaa

SEQ ID NO: 381804 - DNA, 1338 bp, Salmonella enterica
atgcacgctcaaatctgggtagtgagcacgctgctgatcagcatcgtgttaatcgtattgaccatcgtgaagtttaaattccaccccttcctggcgttactgctcgccagtttctttgtcggcgcgatgatgggcatggggccgctggagatggtcacggcgatagaaaacggaataggcggtacgctcggttttctggccgccgttatcggtcttggcaccatcctcggcaaaatgatggaggtttccggcgcggcggaacgcatcgggcttacgctccagcgctgccgctggctctcagctgacgtgatcatggtactggtagggctgatttgcggaatcacgttgttcgtggaagtgggcgtcgtgttgctcatcccactggcgttttctatcgctaaaaagacccatacctcgctgctgaagctggccattccgctgtgtaccgcgctgatggccgtccattgcgtggtaccgccgcatccggctgcgctgtttgtcgcaaataaactgggggcggatatcggctcggtgattgtctacggtctgctggtcggactgatggcctcattggtcggcggcccgctgttcttaaagtttctgggtaatcgtctgccgttcaagcccgtaccgacagagtttgcggatcttgaagtgcgcgccgaaaacaccctgccatcgctgggcgcaacgctgtttaccgttctgttgccgattggcctgatgctggtgaaaaccgtcgctgaactgaatatggcgaaagacggcacgttgtatacgctgctggagtttatcggtaatccgatcaccgcgatgtttatcgctgtctttgtagcgtattacatactcggtctgcgccagcatatgggtatgagcacgctacttacccacaccgaaaacggctttggcgccattgcgaacatcctgctgattatcggcgcgggcggcgcgttcaacgccattctcaaaagtagcgggctggcggacacgctggcggtgatcctctcaaatatgcatatgcacccgattctgctggcatggctggtagcgctgattctgcacgcggcggtcggctctgcgacggtggcgatgatgggcgccaccgcgattgttgcgcccatgctgccgctctatcctgacgtcagcccggagatcattgcgattgccattggttccggcgccattggctgcacgatcgtgaccgattccctgttctggctggtcaagcagtattgcggcgctacgctgaatgaaacgtttaaatactatacgacggccacgtttatcgcatctgtcgttgcactggctggcacattcctgctttcctttatcatctga

SEQ ID NO: 381805 - DNA, 924 bp, Salmonella enterica
atggaaccccttcgcgatacccgaaaccgcttactcaacggctggcagttatccaaactctatacttttgaagtcgcggccagacaccagtcctttgctctggcggcagatgagctgtcgttaagccccagtgcggtaagccatcgtatcaatcaactggaagccgagttgggaatccagctatttgtccgctctcaccgtaaagtggagcttacccatgaaggcaaacgggtattctgggcgctgaaatcgtcgctggatacgttgaatcaggaaatcctcgatatcaaaaatcaggaactgtccggcacgttgaccgtgtattcacgtccctctatcgcccagtgctggctggtgcccgcgctgggggactttacccgtcgctatccgtcaatttctctcactatgctgaccggcaacgataacgttaacctacagcgtgccggcattgacctggctatctattttgacgatgcgccgtcggcgcagctcacgcaccattttttaatggatgaggcgattttgcccgtttgcagcccggattacgcccatcgtttcgccttgcaggacaacctgaataacctgcggcactgtacgctcttacacgacagacaggcgtggagtaacgattcgggcaccgatgagtggcacagttgggcgcagcattttgcggtaaatttgccggattcatccggcattggcttcgatcgttctgatttagcggtgattgccgcgatgaaccacattggcgtggcgatggggcgtaaacggctggtgcaaaagcgtctcgacagcggcgaactgattgcgccttttggtgacatgaggctgaaatgtcatcagcattattatgtcaccactctgcctggcaggcagtggccgaaaatcgaggcatttattcgctggttgcaggaacaggtgtga

SEQ ID NO: 381806 - DNA, 1062 bp, Salmonella enterica
gtgtttaaaccgcttattgcctctctcatgctgaccagcgcggtcgtctatgcgaaaccgatgcctttgacggcggcgcgctatgcgcagcagcttggcgttgggatggatgttgactgggcgcgaacggaacggggtattcgcgagtttgatccgctggtcgtgcgggattttaaggcaaaagggttaacgcatgtccgtattcgtgtggcaggcgcgccgacggaagcgcgcctcattcatttgcgtaagctggtagaagcctgcgaatactatggtgtcatacccattattgcctatcaggcggatgcgtataaaaccgatcccagcgccagccatgaaaaggagctgatcaactggtggagcgtggtcgcgcgctattttggtcagacatccccgcttctggggttcgatctcatttatgagcctgccgacaaactcaatcataatatggcgtcgctgaatcgcgtatatgacaaaaccatccgcctgattcacgccattgacccacagcggatgattttcgttgccccccgaatgcgcgccgcgccggaggatttgtcggcgcttaaactgccggcgcaaagccagaactatgtactggcggagtggcacatcttcccgtggggacccctgaaaagcggcggtaaatatccgtggacgtcaggcacggcggcggaaaaagcggcgattcgggcacggattaacgctgcagttcgctggcagcataagaccggccatgcaagctgggtgggcggatgggcgccgggagagtcgataaaaatgacgccggtcgcttcacagttcgcgtttgcccgttttatggcctgcgagctgaaaaaagcgcatattccgtatgcgataaacgcggacacacagttttatgacggcgaagaaggagcgtggcgtccggcgcaagagtccctgctcaatgcgatgatcgcgccggaatgtgaaacgcccggcaaaaagccgggcgaggggaacgttaaaccgtctgtccctgatgcgatatccgtgacgccagcggcagccagcacgccaggatcagtaatcccataa

SEQ ID NO: 381807 - DNA, 1185 bp, Salmonella enterica
atgaaaaggcagagaaacgtcaatttgttgttgatgttggtgttactagtggccgtagggcagatggcgcaaaccatttatattcccgccatcgccgatatggcacaagcgctaaacgtccgggaaggcgccgtccagagcgtaatggctgcttacctcctgacctacggcgtctcgcaactgttttacggcccgctttccgaccgggttgggcgccgcccggtaatcctcgtcggcatgtctatttttatggtagcgactctgttcgccatgaccacgcatagtttgacggtgttgattgccgccagcgccatgcaagggatgggaaccggcgttggcggagtaatggcgagaacgctcccgcgcgatctgtatgaaggaacgcaacttcgtcacgccaatagcctgttaaatatggggattctggtcagcccgctgttagcgccgctgattggcggtctgctggacaccctgtggaactggcgcgcgtgttacgctttcctgctggtgctttgcgctggcgtcaccttcagcatggcgcgctggatgccggaaacccgccccgccggcgcgccgcgcacacggctgatcgccagctataaaacgctgtttggcaacggcgcatttaactgttatctgctgatgctaatcggcgggctggctggcattgcggtctttgaagcctgttccggcgtgctgatgggggcagtattaggtctcagcagtatggtggtaagcattctgtttattctgccgattccggcggcgttcttcggcgcctggtttgccggacgcccgaataaacgcttctcaaccctgatgtggcagtcagttatttgctgtctgctggcaggccttatgatgtggattcccggctggtttggcgtgatgaacgtctggacgctactcatccccgctgcactgtttttcttcggcgccgggatgttatttccactggccaccagcggcgcgatggagccgtttccgttccttgcaggcaccgctggcgcgctggtcggcgggctgcaaaatattggttccggcgtactggcgtggctttcggcaatgttgccgcaaaccggtcagggcagtctgggactgttgatgacccttatgggattactgatcctggcgtgctggctgccgctggcgtcacggatatcgcatcagggacagacggtttaa

SEQ ID NO: 381808 - DNA, 834 bp, Salmonella enterica
atgaccctttccgttttctgcattttgctgttcgccgcgctgctacatgccagctggaacgccattgtcaaagcgggaaacgataagctctacgccgcgatcggcgtcagcggttccgcggcggtcatggcattgatccttttgcccttctcgccgcagccagctcacgccagtatcccttttttagcggcctctaccgcgctccaggtggtgtataccgtcctggtggcgaaaacctatcagatctcggacatgagccagacctatcctcttatgcgcggcaccgcgccgctgctggtggcgctcattagcgttctgtttcttggcgacagcctgtcgtcgctagcctgggtcggcatcgcagtgatctgcatggcgatacttgggatggcctgtaatggccgcgccagctctcaacgtggtgtcgtgctggcattaactaacgcctgttttattgccggatatacgctggtggacgggaccggcgtaagactctccgaaacggcgctgggctatacgctatggtcattttttctcaacggcgcctgcctgttaacctgggcgatgattgcgcggcggcgggaagcgtcgcgttatctggcgcaacagtggaaaaaaggcatttttggcgggattggcactatgggatcttatgggctggcgctatgggccatgacccaggcgccgctggcggtggtcgccgcgctgcgtgagacgtcgattttattcggcgcgctgatagcctggctgctgcttaaagagaaagtggccgggctacgtctggtggcggctggcgggattgccctcggggcgattttactccgtctgtcataa

SEQ ID NO: 381809 - DNA, 1689 bp, Salmonella enterica
atggcaagttcgggcacaacatctacacctcagcgctttacgggcgcggaatttattgttcattttctggagcgccaggggattcgtatcgtcaccggcattcccggcggttcgatcctccccgtttacgacgcgttaagccaaagcacgcaaatccgtcatattctggcgcgccacgaacaaggcgcggggtttattgcgcaggggatggcgcggacggagggtaaacctgctgtttgtatggcctgtagcgggccgggcgcgaccaatctggtcacggccattgccgatgcgcgcctggattccattccgttaatctgcattaccgggcaggttccggcgtccatgatcggtactgacgcgtttcaggaagtggatacctacggtatctctatccccatcaccaagcacaactatctggtcagaaatatcaacgagctgcctcaggtgatgagcgatgcttttcgtctggcgcagtcggggcgtcctggcccggtgtggatagacgttcctaaagatgtgcagacggcgacaattgagctggatgcgttgccgtcgccggcggaaaaatcacccccgccggagtttagcgcagagagtatccgcgaggccgccgcaatgattaacgcggcgaagcgtccggtgctgtatctgggcggcggcgtgatcaatgcgccgacacgcgtgcgcgaactggcggaaaaagcgcaactgccgacgacaatgaccttaatggcgctgggaatgctgcctaaggcgcatccgctgtcgttaggaatgctggggatgcacggcgcgcgcagtaccaattttattctgcaagaggccgatttactgattgtcctgggcgcgcgttttgatgaccgggcgattggcaaaacggagcagttttgtccgaacgccaaaatcatccatgtggatatcgatcgcgccgagttaggcaaaattaagcagccgcatgtggctattcaggcggatgtcgatgatgtactggcacagttaattccccatatcgaggcacagccgcgggaagcatggcatcagttggtggcggacttgcagcaagaattcccctgcagtattccccaggaaaataacccgcttagtcactatgggctgattaacgcagtcgccgcctgtgtggacgacaacgcgattattaccactgacgtaggtcagcatcagatgtggaccgcgcaggcttatccgctcaaccgtccgcgtcagtggctgacttccggcgggctgggcaccatggggtttggtctgcccgcggcgattggcgcggcgctggcgaatccgggcaacaaggtgctgtgtttttccggcgacggtagtttgatgatgaatattcaggagatggctaccgccagcgaaaaccagttggatgtgaaaatcatcctgatgaataacgacgcgctgggactggtacatcagcaacagagtctgttctataaacagggcgtttttgcggcaacctatccgggaagcatcaattttatgcagattgccgccgggtttggtctggacacctgtgatttgaataacgaagccgatccgcaggcggcgttgcaggctatcattcgtcgtcctggaccggcgttgatccacgtgcgcattgatgcggaagaaaaagtgtatccgatggtgccgccgggcgcggcaaatacagagatggtgggggaataa

SEQ ID NO: 381810 - DNA, 291 bp, Salmonella enterica
atgcagaaacaatcacatgataacgttattctggagctgaccgttcgcaaccatcctggcgtgatgacccacgtctgcgggctgttcgcccgacgcgctttcaacgttgagggtattctctgtttaccgattcagggtagcgatcagagccgcatctggcttctggtcaatgacgatcagcggcttgaacagatgatcagtcagatcgataaactggaagacgtggcgaaggtggtacgaaaccagtccgatcccaccatgttcaataaaattgccgtcttttttgagtaa

SEQ ID NO: 381811 - DNA, 786 bp, Salmonella enterica
atggagaccaagcaaaaagaacgtatccgacgcttgatggagttactgaaaaagaccgatcgaatccatctgaaagacgccgcgcggatgctggaagtttcggtgatgaccattcgccgcgatctcagccaggatgatgaccctttaccgctgacgctgctcggcggctatatcgtcatggtaaataagcctacgtcttcaaccaatatgccgctgccggcgaaaaagacgcatcatcgggacgaccttcccgttgcgatcctggccgccggcctggtgcgtgaaaacgatctggttttttttgataacggtccggaaatgccattagttatcagcatgataccggatgatattacctttaccgggatttgctactcgcatcgggtatttatcgcgctgaatgaaaagcctaatgccacggcgattctgtgcggcggcacctatcgggccaagagcgatgccttttatgatgccaataatccttcggcgctggattcgctcaatccgcgcaaagtgtttatttccgccagcggcgtacatgaacattttggcgtgagctggtttaacccggatgatcttgccgccaaacgtaaagcgatggagcgcggtctgcgcaaaattttgctggcgcgtcacgccctgtttgatgaggtcgcgcctgccagcattggtccgctttctgcctttgatgtcctgattagcgatcgcccattaccgacagattatgccgttcactgtcggaatggttccgtcaaagtcatcacgcctgattcggaaagtgaataa

SEQ ID NO: 381812 - DNA, 921 bp, Salmonella enterica
atggatatcgcggttattggctctaacatggtggaccttatcacttacaccaaccagatgcccaaagaaggggaaactctggaagcgccggcgtttaaaatcggctgcggcggaaaaggggcgaaccaggccgtggcggccgctaagctcaattcaaaagtattgatgttgaccaaagtgggcgacgatatttttgccgacaacaccattcgtaatctcgaatcctgggggatcaatacgacgtatgtagaaaaagtaccgtgtaccagcagcggcgtagcgccgattttcgtcaacgccaactccagcaacagcatcctgatcatcaaaggcgctaacaagtttctctcgccggaagatatcgatcgcgcagcggaagatttaaaaaaatgccagcttattgttctgcaactggaagttcagcttgaaacggtttatcacgcaatagaatttggcaagaaacacgggattgaagtgttattaaaccctgcgccagcattacgggaattagatatgtcttatgcctgtaaatgcgatttctttgtacccaatgaaaccgagctggaaatattaaccggtatgccagtggatacctatgaccatattcgcgcagcggcacgttcgctggtggataaagggctgaacaatattatcgtcaccatgggtgagaaaggcgcgctgtggatgacgcgtgaccaggaagtccatgttccggcgtttagagtgaacgctgtcgataccagcggcgcgggcgatgcctttatcggctgttttgcgcattactatgtccagagcggggatgtggaagccgccatgaaaaaagccgtcctctttgccgctttcagcgtcaccgggaaaggcacccaatcctcttatccaagcattgagcaatttaatgagtatctttcgttgaacgaataa

SEQ ID NO: 381813 - DNA, 1317 bp, Salmonella enterica
atgaacgataaaaacatcgttcagatgcccgacgggtatctgaataagacacctctgttccagtttattttgttatcctgtttattcccattatggggatgcgcagccgcgttaaatgatattctgatcacgcaatttaaaagtgtattttcgctgagcaactttgcttcggcattagtacaaagcgccttttatggcggttattttttaattgctattccggcctcgctggtcattaaaaaaaccagttataaagtggcgatacttatcggcctgacgctatacattgtcggctgtacgctctttttcccggcgtcgcacatggcgacctacactatgttcctcgcggcgattttcgccattgcgattggcctgagtttcctggaaacggcggcgaacacctacagttcgatgatcgggccgaaagcctacgccacgctgcggctgaatatcagccagaccttttatccgatcggcgcggcggcaggcattttattgggtaaatatctggtcttttccgaaggggaaagcctggaaaaacagatggcgggcatgaatgccgagcaagtccacaacttcaaggtgctgatgctggaaaacactctggaaccctataagtacatgattatggttctggtagtggtgatggtactgttcctgctgacgcgtttcccgacctgtaaagtcgcgcaaaccgcgagtcataaacgcccctcggcgctggatacgttacgctatctcgccagcaatgcccgtttccgtcgcggtattgtggcgcagttcctgtatgtgggaatgcaggtggcggtctggtcgttcactatccgtctggcgctggagttaggcgatatcaatgagcgcgatgcctcaacctttatggtctacagcttcgcctgcttttttatcggcaagtttatcgccaacattctgatgacacgcttcaacccggaaaaagtcctgatcctttactctgtgatcggcgcgctgttcctggcctacgtggcgctggcgcccagctttagcgcggtatacgtggcggtgctggtcagtgttctgtttggcccctgctgggcgaccatttatgccggaacgctcgataccgtcgataacgagcataccgaaatggcgggggcggtgatcgtgatggcgattgtcggcgcggcggtggttcctgcgattcagggttatgtggcggacatgttccactcgctacagctctcattcctggtttccatgctgtgctttgtttacgttggcgtttacttctggcgcgaaagcaaagtgcgcggcaacctggctgaagtcgccgcgtcctga

SEQ ID NO: 381814 - DNA, 1014 bp, Salmonella enterica
atgacaacacgtattacattatggcgggagctttttaacgagcagccgcgtatcttgctggaaaatgacgattttacggttacggcgtttcgttacgccagcggcgtggaaggattgaaaatacaaaacagccgcggtcatctggtgattctgccctggatggggcagatgatttgggacgcgcagtttgacggtcatgatctgactatgcgcaacatgttccgccagccgaagccagctgcggaagtggtggcaacgtatggttgctttgctttccattccggactattggcgaatggctgcccgtcgccggaagatatacatccgctgcacggcgagatgccctgcgctgccatggacgacgcctggctggagttagagggcgacagtctgcgcgtgaccgggcgctacgagtatgtgatggggttcggtcatcattatcaggcgcaacctacggtggtaatgcgtaaagcaagcgcgctgtttgatattcagatgacagtgactaacctagcttcagtcgccatgccgctacagtacatgtgccacatgaactatgcctatgtgccgaacgccacgttccgccagaatatcccggataccgcgctgacgctacgcgagtcggtgccggcgcatgtcaaacccacggcgcagtggctggcgtttaatcaacggcttttgcagggtgaagcctcgctggcaacgctcaacgcgtctggcttttacgacccggaaatcgtgttcttcgccgatgaactggacagatacacggataccccggaattcagtatgatcgccccggatggcaccacgttcgtgacacgtttcgccagcgcggagctgaattacgtgacccgctggattctttataacggcgatcagcaggttgccgcctttgccctgcccgcgacctgtcggcctgaaggttttctcgcggcgcagcgaaatggaaccttgcttcaactggaaccgcagcaaacccggacgttcaccgtcacgacaggcattgtctga

SEQ ID NO: 381815 - DNA, 591 bp, Salmonella enterica
atgatcaccgttgcccttatcgacgaccatcttatcgtccgctccggctttgcacagctactggggctggaacctgatttgcaggtggtcgccgaatttggttccgggcgcgaagcgttggcaggcttgccggggcgcggcgtacaggtgtgtatctgcgatatctcaatgccggatatttccggactggagctgctaagccaactgccaaaagggatggcgacgatcatgctctcggttcacgatagcccggcgctggtggaacaggcgttgaacgctggcgcgcgcggttttctctctaaacgctgtagtccggatgaactgatcgccgcggtgcatacggtggcgacaggcggctgctatttgacccccgatattgccgtgaaactggcggcgggtcggcaagatccgctgaccaaacgcgagcgtcaggtggcggaaaaactcgcccagggtatggcggtaaaagagattgccgccgagctggggctgtcgccaaaaacggtgcatgtccatcgcgcgaatctgctggaaaaattaggcgtcagcaatgacgttgaactggcgcatcgcatgtttgatggttggtaa

SEQ ID NO: 381816 - DNA, 1503 bp, Salmonella enterica
atgaacacctttttttcccgtttaatcaccgttgttgcctgcttttttattttctccgccgcgtggttctgcctgtggagcatcagcctgcatctggtagagcgcccggagctggcggcgctgctctttcccttcggcctgcgcctgggacttatgctgcaatgcccgcgtggatactggccagtattgctgggcgcggagtggctgctggtgtactggttggcgcaggaagttgcgctggcccatctgccgcttttgatgatcggtggtgtgttgacgctactgcccgtggcgctgacttcgcgttaccgccatcagcgcgactggcgcacgttattgcttcagggcgcggccctcaccgccgcggcgctactgcaatccctgccctggctggggcagggggaagcggcatggaacgcgctactgctgaccctcacgggggggctgacgctggcccccatctgcctggttttctggcactatctcaccagcactacctggctgccgctgggaccatcgctggtatcgcagccggtaaactggcgcgggcggcatctgatctggtatctgctgctgtttatcgtcagtctgtggctgcaactggggttacctgctgaactttcgcgctttacgccgttctgcctggcgttgccgattatcgcgctcgcctggcattatggctggcagggcgcgctcattgccacactgatgaacgctatcgcgctgatcgccagccagacctggcacgatcatcccgtcgatttattactttcgctgttggcgcaaagcctgaccgggttactgcttggcgcgggcattcagcgtctgcgcgagctgaaccagtcgttgcaaaaggagctggcgcgcaaccatcggctggcggagcgtcttctggagaccgaagagagcgtgcggcgcgatgttgcgcgtgagctgcacgatgacatcgggcagaccatcaccgcgattcgtacccaggcgggcattgtgcaacgactggcggcggataacggcggcgtgaagcagagcgggcaacttatcgagcagctttcgctgggcgtgtatgacgccgtgcgtcgcctgctggggcgcttgcgcccgcgccagctagacgacttaacgctggcgcaggccatccgttcgctgctgcgcgaaatggagctggaaagccgcggtattgtcagtcacctcgactggcgaattgacgaaacggcgctgagtgaaagtcagcgcgtgacgctgtttcgcgtctgtcaggaagggctgaataacatcgtaaaacatgccaatgccagcgcggtgacgctccagggctggcagcaggatgagcggctgatgttggtgattgaggatgacggcagcggcctgccgccgggctctcagcagcagggcttcggcctgaccggaatgcgcgaacgcgtgtcggcgctcggcgggacgctaaccatctcttgtacccacggtacgcgggtgagcgtctcgttgccccagcgttacgtttaa

SEQ ID NO: 381817 - DNA, 1329 bp, Salmonella enterica
atgctttcgtttttaaaagccccggccaacgcgccgctcatcaccgataagcacgaggttgacgcccgctatcgctactggcggcggcacatcctgatcaccatttggttgggttatgcgctgttctatttcacccgtaaaagctttaacgccgccgcgccggaaatccttgccagcggcattctgacccgcagcgatatcggcctgctggcgacgctgttttacatcacctacggggtgtcgaaatttgtctccggcatcgttagcgatcgctctaacgctcgctattttatgggtatcgggctgattgcgaccggcatagtgaatattctgttcggcttctcgacctcgctgtgggcctttgcgctgctatgggcgctgaacgcctttttccaggggtttggatcgccggtttgcgcccgtttgctgactgcctggtactcgcgtaccgagcgcggcggctggtgggcgttatggaacaccgcgcataatgtcggcggggcgctgatccctctcgttatggccgctgtcgccctgcattatggctggcgcgtcggaatgatggtggccggattgcttgccatcggggtgggcatggtcctctgctggcggctgcgcgaccgtccgcaggcgattggtttaccgccggtaggcgactggcggcacgatgcgctggaggtagcccaacagcaagagggcgcagggctaagccgcaaagaaatcctcgctaaatatgtgctgttgaatccctatatctggctgctttcgctgtgttacgtcttagtgtacgtggtgcgcgcggcgatcaatgactggggcaacctgtatatgtccgagacgctgggcgtggatttggtcacggccaacacggcagtatcgatgtttgaactgggtggatttatcggcgcgctggtggcgggctggggctcggacaaactcttcaacggtaaccgcggaccgatgaatttaatcttcgctgccgggattctgctctctgtgggttcgctgtggctgatgccgttcgccagctacgtcatgcaggcggcctgtttcttcaccaccggtttctttgtcttcggcccgcagatgctcattggcatggcggcggcggagtgctcgcataaagaggcggcgggcgcggccaccggctttgtcggcctgttcgcctatctcggcgcgtcgctttccggctggccgttagcgaaagtgctggagatctggcactggaccggtttttttgcggtcatcgccatcgcggcggggatctccgcgctattgctgctgccatttctgaacgcccaggccccacgcgagaccagcgaagcgtga

SEQ ID NO: 381818 - DNA, 1392 bp, Salmonella enterica
atgctggccttcttaaaccaggtgcgcaagccgaccctggatctgccgctcgatgtgcggcgtaaaatgtggttcaagccgttcatgcagtcctatctggtggtttttatcggctacctgaccatgtacctgatccgcaaaaactttaacatcgcgcagaacgacatgatctctacctacgggttgagcatgaccgagctggggatgattggcctgggcttttcgatcacctacggcgtggggaaaacgctggtttcctactacgctgacggtaaaaataccaagcagtttctaccgtttatgttgatcctctccgctatctgtatgctcggcttcagcgccagtatgggcgcggggtcaaccagtctgtttctgatgatcgctttctatgccctgagcggtttcttccagagtaccggcggatcgtgcagctactcgaccatcaccaaatggactccgcgtcgtaaacgcggcacctttctcggcttctggaatatctcccacaacctcggcggcgcgggcgcggcaggcgtggcgctgttcggcgccaactacctgttcgacggtcacgtcatcggcatgtttatcttcccgtcgattatcgcgctgattgttggctttatcggtctgcgttttggcagcgactccccggagtcttacggtctgggtaaagctgaagaactgttcggcgaagagatcagcgaagaggataaagatactgaagaaaacgaaatgaccaagtggcagatctttgttgaatatgtattgaaaaacaaagtgatctggctgctgtgcttctccaatatcttcctgtatgtggtgcgtattggtatcgaccagtggtcaaccgtctacgccttccaggaactgaaactttctaaagaggtggcgattcagggctttaccctgttcgaagtgggcgcgctggtcggcacgttgctgtggggctggctctctgacctggcgaacggtcgtcgtgcgctggtagcctgtgtggcgctggcgttaatcatcgccaccctcggcgtctaccagcacgccagcaaccagtatgtctatctggcctcgctgttcgcgctcggtttcctggtgtttgggccgcagctattaattggcgtggcggcagtcggtttcgtaccgaaaaaagccatcggcgctgcggacggtatcaagggaaccttcgcttatcttatcggcgatagctttgccaagctgggtctgggcatgattgccgacggtacccccgtttttggtctgaccggctgggcgggcaccttcgccgcgctggacgccgccgcgatcggctgtatctgcctgatggcgatggtcgccgtgatggaagagcgcaaaatccgccgtgagaaaaaaattcagcaagtcaatatcgcttaa

SEQ ID NO: 381819 - DNA, 453 bp, Salmonella enterica
atgatttggttgattctggccacgtttgtggtggtgtttattgtgggttttcgggtgctgacatcggatactcgccgggcgattcgccgcctgagcgaacgtctgaatattgatgtagtgccgatagaatcgatgattgatcagatgggtaaaacggcgggcggtgagtttttacagtatctgcatcgccctgatgagtcgcatttgcaaaatgctgctcaggtgttactgatctggcaaatggtgattgtcgatggcggcgatcagaatttgcagcggtggcatcggttgctgcaaaaagcgcgtttagctgcgccgatcaccgatacacaggtacggctggcgctgggttttttgcgcgaaatggaacctgatatgcaggagatcaacgcgtttcaactgcgctataacgccttttttcagccggaagagggtgtccactggctgcattga

SEQ ID NO: 381820 - DNA, 744 bp, Salmonella enterica
atgaaaacattgagtaaaagttcacacatcccactgtatcaacaggttgtggagtggataagggaaagtatttatagcggagaattagttgaggatgaccggataccttcagagtttcaaatcatggatatgctggaggtgagtcgcggtaccgttaaaaaagcggttgaccaacttgtccgggaaggtgttcttgtgcaagtgcagggtaaaggaactttcgtaaagaaggaaaatgttgcttacccactgggtgaaggtttgctctcctttgctgaagccttagccagccagaagataaacttcacaaccagcgtcataacctcccgactggaacccgctaaccgctttgtagcagagaaactgagtatcaaaccgggacaagatgttttatttcttaaacgccttcgttgtattggcgatgaaaaagtcatgttgattgaaaatcgtatcaacattgatctctgccccggtattattgatgtagattttaccagggagaatttattttcagcaatagaaagattatctgataagaaaataagtttttctgaaagccgttacgcagccaaattaattggtaatgagcgaggccattatcttgatattggtgaagacgcacctgttttgcatttggaacagttggtatttttctctagtggattggccattgattttggtaacgtctggttaaaaggtaataaatattatcttggcactattttacagcgcctggatgcctaa

SEQ ID NO: 381821 - DNA, 474 bp, Salmonella enterica; identical to SEQ ID NO: 372900

SEQ ID NO: 381822 - DNA, 288 bp, Salmonella enterica
atgagtaaaatgatactatttgtttgcgcaacgggtgttgctacttccacggctgtggcagaaaaagtaatggaatattgtaaagacaatgggcttgatgttaattattcacaaactaatgtagcctcattgccaaacaataccgatggtgcagctttggttgtatcaacaacgaaagttccttatgaactggatattccggttgttagtggtctgccaatcattaccggagtaggtgaagataaagttcttgaaaaaatagtttcaatccttaaaggccaagcctga

SEQ ID NO: 381823 - DNA, 1359 bp, Salmonella enterica
atgaatgatatagcacatactctctataccgttgtgcaatatgtcctgggatttggcccaacggttttattgccgctggtcctttttttcctggcattgttcttcaaagtaaaacccgctaaagcacttcgctcatcgttaattgtcggaatagggtttgtcggaatttatgccatctttgacatacttaccagcaacgtaggcccggctgcacaggcaatggttgagcgaactggtattagccttcctgttgtcgatttaggctggccaccattggccgcaattacctggggctcaccaatcgcaccctttgtcattccgctgacgatgctgattaatgtcgccatgctggccctgaataagacacgtactgttgatgtcgacatgtggaactactggcactttgccctggctggaacgctggtttactacagcacagggagttttgttttgggtctgtccgcagccgctattgccgcgatcgtggttctcaaactggcggactggtctgcgccattagtggcaaagtacttcggtctggaaggtatttcacttccgaccctgtcatctgtcgtcttctttccgattggattgctgttcgacaaaattatcgacaaaatccctggcgttaaccgtattcatattgatccggaaaacgttcagaaaaaaatgggaatcttcggtgagcctatgatggtggggactattctgggggtcttgttgggcatcattgccgggtatgactttaaacatatcctattgctggggatcagcattggcggtgtcatgttcattcttccgcgtatggtacgaattttgatggaaggtttattacctctgtctgaagccattaagaaatatttgaatgccaaatatcctggccgtgatgatctctttatcggactggatatcgcggtagcagtaggtaacccagccattatatctacagcactgattctgacacccatctctgtctttattgcattccttcttcctggcaataaagtcctgccactcggagaccttgcgaacctggcagtcatggcttccatgattgtactggcatgtcgtggcaatattttccgggctgtgataaccgcaattcctgttattgtcgccgacttgtggattgcgaccaaaattgcgccatttattaccagtatggctaaggatgtcaatttcaaaatggctgaggggtcaagtggtcaggtatcaagcttccttgatggcggtaaccccttccgtttctggctgcttgaaatattcaacggaaatattattgctatcgggctgattcctgtgcttgcgctgattatttatggtgtttttcgcctgacaaaaggaacggtctatgcctga

SEQ ID NO: 381824 - DNA, 1485 bp, Salmonella enterica
atgcctgattaccacgcagcgcttgtcattgacattggcacaactaactgcaaagtcagctgttattcctgtcatgacgtgtcagttctggaagtccgcaagtttccgacgccaataatatcgtcggacaaaggcgaggtagatttcgatatcgaagcgctgtggcaggcactgcgactggtaatggctgaactggtggcttcagtaccgtttccggtaaaaaatatcagtattgcgagtttcggtgagtctggtgtctttgtggataaggagggcgtcattcttaccccgatgctggcctggtatgatcgacgtggtgaatcttatctctcgtcattaagcaaggcagaggctgaagaactgtattctataacgggattgccacctcacagtaattactcagcatttaaaatgagatggttgcttgataactactccttgcatgaaagaaaagatatctgctggttacatgcaccagaagtgttgttgtggcgaatgacaggtgcgaaaaagacggaaatatccctggccagtagaacgttgtgtctggacattgctcgccgtacctggtctcgtaatgctgccgggattctcggcataccgttcggtgtactggctccgttgataaagccaggtgaagtggccggatgggtgacggcaacgcttagagaggaattgggcttctctcatgaggtaaaagttaccctggccgggcacgatcatatggtcggtgcccgcgcattacagctgcaaccgggcgatgtgctgaattctaccggcacgacagagggtattttactgctgaatacacaaccaacgcttgatgtgcaggctcgcagggataagctggcaaatggttgttactccgatggtgaatttttcacgcttttcgcttctctgcctgtcggcggttatgcgcttgaatgggtgaaaaaaacctttcgtttaactgataaggaaataagcacaggcctggaaaaagccatggagcaatacctcaaaccttcctggtctgtcgagcatgtgccggtatttattcctcatttgcggggctcgggttcgccaaataaaaatcggcacacccgtggcctgctttttggtctgacggattcacttcctccggagtctctgcttgagagtgtctttattggcctggcgatggagtttgcacactgtcacgggtgctttaatatcccggcgggcaggacagtaaaagtcattggccctgcggtgaaaaacccatactggctccagttgaaggctgacatcctccagtgtccaattgaggccattgcttttgatgaaaccgtctcccttggagcattgttgatagcctgtccgaatgttgtccccccgactgttcctgtggctgagcgatattttcctgacgcggttcgttctgcaaagttgaaaatatatcagcagcaatggctgtcattttaccaatttaaactgcggcaagaaggggcgcttattggtgaataa

SEQ ID NO: 381825 - DNA, 270 bp, Salmonella enterica
atgattagacaaaaagtactcgttatgaacagtacggggcttcatgcgcggccagccgctacgcttgcgaaaattgtcaaaaaataccagtcttcattaacgctagttaataatgacaaagaaattcccattaaaggaatgatgagtattttgggggctggcgtaaagggaaacacaatgattgatttaatttgtgatggacaggatgaactggcttttatggatgaattaaaatctgcatttgctgatggctttggtgagtcagtatag

SEQ ID NO: 381826 - DNA, 324 bp, Salmonella enterica; identical to SEQ ID NO: 370998

SEQ ID NO: 381827 - DNA, 360 bp, Salmonella enterica
atgcgaatcttcaaaaccaggtggtttaacagagaagcgaagtcccacacgataaaagatgacgagttaagcgaggccatcaacgccgtactgcaaggaaaagcagataatcttggcggcggagtttataaaaaacgtctcaatcaaaatcgcgatcgcgcaatcgtgttggcaaagggaggcgagcattggttttacaccttcctgtatgccaaacaggatatggccaacattagctatcgtgaactcgcgggtttccgtgagttagcaaaacactatgcttgcctgaccgaagatcagataacggcactcattaataacaaagaactggtagaggtgcgccatgtcagcaaaaactaa

SEQ ID NO: 381828 - DNA, 1194 bp, Salmonella enterica
atgaatgaaaatatcgcagaaaaattccgcgctgatggggttgccaggcctaattggtcagccgtttttgccgtagcgttttgtgtcgcctgcctgattaccgttgagtttttgcccgttagtctgttgacgccgatggcgcaggatctggggatctccgagggcgtcgccggtcagtcggtcaccgttacggcatttgtcgcgatgttttccagcctgttcattacccagattattcaggcgaccgacaggcgttatatcgttattctgttcgccgttttgctgacggcttcttgtctgatggtctcctttgccaacagctttacgctgctattgctgggccgcgcctgtcttgggttggcgctgggcggattctgggcgatgtcggcgtcgctgaccatgcgactggttcccgcgcgtaccgtgccgaaagcgctgtcggtgatttttggcgcggtttccatcgcgttagtgatcgccgcgccgctgggcagttttttgggcggtattattggctggcgtaatgtctttaacgccgctgcggtgatgggcgtactgtgcgtcatctgggtggtgaaatcactgccgtcgctgccgggcgaaccttctcaccagaaacagaatatgtttagcctgttgcaacgccctggcgtgatggccgggatgatcgccatctttatgtcttttgccgggcagttcgctttctttacctatattcgcccggtctatatgaatctggcgggctttgacgttgatggtctgacgctggtgttgctaagttttggtattgccagcttcgttggtacttctttctcatcttatgtcctgaaacgttcggtaaaactggcgctggccggtgcgccgctgctactggcgctgagcgcgctgacgctcattgtgtggggaagcgacaaaaccgtggcggcggtcatagcgattatctggggactggcgtttgcgctggtgccggtgggatggtcaacgtggatcactcgttcccttgccgatcaggcggaaaaagccggttccatccaggtcgcggtgattcaactggcaaatacctgtggcgcggcagtgggcggttatgcgctcgacaatttcgggctgctttcgccgctggcgctttccggcggactgatgctgttgacggcattagtcgtggcggcgaaagtccgtattacgccaatgagttga

SEQ ID NO: 381829 - DNA, 1383 bp, Salmonella enterica
atgcgataccgttttcccgataacttctggtggggcagcgcctgctcagcgttgcaaaccgaaggggatagtctgaatggcggtaaaagccagaccacgtgggatgtgtggttcgagcgccagccgggtcgttttcatcagggcatcggtccagcagaaacctcaacgttctatcgccactggaagcaagacatcgcgctactgaaacagttaaaacataacagttttcgcacctcgctaagctgggcgcggctcattccagatggcgtaggcgaggtgaatccacaagcggtgagcttctacaatcacgtcatcgacgagctactggcgcagggcatcacgccgtttattacgctgttccattttgatatgccgatggtcatgcaggagaaaggcggctgggaaaatcgcgacgtcgtagaggcgtttggtcggtacgcgcaaacgtgttttaccttgtttggcgaccgcgtgaagcactggtttacctttaacgagccgattgtgccggtggaaggcggctatttgtacgacttccactatcccaatgtggtggattttaaacgtgcagccaccgtggcgtaccataccgtgctggcgcactcgaccgccgtgcgcgcctggcgcgccggacgctacgacggtgaaatcggcgtagtgctgaatctgacgccgtcctacccacgctcgcagcatcccgccgatgtgcaagccgcgcatcatgcggatctgttattcaaccgcagttttcttgacccggtattaaagggagaatacccggcggacttggtggcgctgctgaaaacctatgaccagttgcctgcctgtcagccaggcgatcgtcagcttattaccgacggcaaaatcgatttactggggattaactattatcagccgcgccgcgtgaaatgccgtgatacggcggtgaatccgcaagcgccgtttatgccggagtggttatttgactattacgacatgccggggcgcaagatgaacccttaccgcggctgggaaatttacgcgccaggaatttacgacatcatcaccaacctgcgggataattacggcaatccgcgctgttttatctccgaaaacgggatgggcgttgagaacgagcagcgttttgtgcaagcgggacagattcacgatgattaccggattgactttatctctgagcatcttaaatggctgcataaaggcattagcgagggctgtcactgtcttggctaccacatgtggacctttatcgataactggtcatggctgaacggctataaaaatcgctatggttttgtacaactggatttagccacccaaacgcgcacggtgaaaaaaagcggagaatggtttgccgccaccgcagagcataacggttttgattaa

SEQ ID NO: 381830 - DNA, 294 bp, Salmonella enterica
atgaaacgaaaaacgcttctgcttattgccgcgcttgtcgcgctaccgggcgtcacgtatgccgactctccgtttagctcgcttcagacggcacatgaaaaaaccacgattttaaaggatttgcgcaaaatgtgtacgcccaaaggcgctctaaccgatgaagcctgggagaaaaaaatcatggcgagcgaggggaaccagcagcatattcgggaggcgatgatcgcgatagagcgcaacaatcagcataactactggcaggctctcggcaaggtggaatgcccggagatgtag

SEQ ID NO: 381831 - DNA, 2799 bp, Salmonella enterica
atgagacgtattgagatcgtactgggagagctggaacggctgacgcgcgggctatgccttgccgatttggcgcaggagacggcgtttacggcggaggcgataggtttcaatcttgggctggcgcgtaactccgtcagcaaagatctcaatcagttatggaatgacggcctggcaatcaaaagccgtggccgcccggtctattttttgcatcgccaggcgctggaaacgttgctgggacgacagctggaagagtctgaacgcgaggtgcggtcggtggcggatgtgctgccgcatgaagagcattatgcgcccgacgatccgtttaccagcctgattggttacgatcgcagcctgcgcgatgcggtagaaaaaggccgtgcggcagtgctctatccgcacggtttacacgttctgcttaccgggccgtccggcgtcggtaaaaccttttttgcggaactgatgcaccgtttcgcctgtgaacaggcgagcggcgctatcccgccgctggtctactttaactgcgcggaatacgcccataacccggaactgctctcctcgcatctgtttggtcatcggcagggggcgtttaccggtgcgaatgaacataaaacaggccttgtggagcaggcggacggtggttatctgctgctggacgaggtgcaccgtctgtcttatgaagggcaggaaaagctgttctctattctggataaaggcgagtaccgtccgctcggcgtgagcagccagccgcgatcaatttcggtacgcctgatttgcgccactaccgagccggtcgggtcggcgctgttacgtactttccagcggcgtattcaggtatgcattgatttgccgggcattcgccagcgctccgttgaagaacagatcgaactgatcgtggggttcttacagcgggaaagccgcaaaatagaacgcacggtcagcattgataaaccgttgttgctctggttgctgaataaacccctggaaggcaatatcggtcagctaaaaagcgatattcagtttctttgcgctcaggcgtgggcatcgggaatgaccgagcataacgacacgctacagctggataaacggctggcggagatgtcggttaacccgacgccggaacagcgtctattggtggatactctgtttgacggtaaagcgcggctaaatatagacgcgcgcacgctgcccgcattgaagacgtcgctggcgaccggggcggaaattgaagagagcgacctcttttacagcttcctgacgcgcgaatatgttaatttgcgcaacagtaacgtccccccggcggagacgctggcgatcctgaaaaataaactcagctcgatttttgaatacggtctctacagccgcgacagcgtggcgcatccgccgcgctatggcgaccagattgaagagcgcgtgacgctgctgattggctgcgtagagcaggtgttgggcttttcgctgccggaaaatctggttaacccactgcgtaaacacttcctggcgctgataggctacgtgcagcgtggcctgatcccgcagctttactcttccagtttgatcctggatcgctgcaaagacgaatatgacaacgccgcgctgctgtgtcggaaaatcaacgaactgctgcatattcagtgtccggcgacggaagtggtctggctatgcctgttcctgaaagagtgccgccattatcgtcagcgtatcgatgccagccccgactgcggggtcattttgatcgcccacggcgcgaccactgccaccagtcaggcgcaatatgtcaaccgtgtgctggagcgcgagctgttcagcgccatcgacatgccgtttgagcagtcggtgcatgacacgctggaaacgctgacccaaatgattcaaacccgccaatatcggcggcttatcctgttggtggacatcggttcattgatccattttggcagtacgatcagtaagttattccagatagatgttttgctcatgccgaacatcacgctgaccagtctgctggaagtcgggctggatttaagctatgaaaccagcgatttaccacagctgacggcgctcctgcagagtaaaaatatcccctgccagctttgtacgccgcagcaggagaacggcggcaaagtgctggtcatctcctgtattaccggcatgggaacggcggaaaaaatcaaaaaggtgctggaggagagctttggcgaactgatgtcgcaagataccaggatggtgatccttgattataacgaggtacgaagtctggagcgcgttcagcaggcattgaatgccagcgagcggctggcggggattgtcggcactttccagccggggctgccggatattccgtttatttcgctggaagagcttttctccgaacaagggccggaactggtgttgagcctgttaacgcccgatctgtccaacgctgaacgccgtctggagatggagcgcagcgccatgcgctttatcagcgcgctaacgatggagagcatcatcaatcatatttccgtgcttaacccgcagcgtattctgaaagagatggagggcgtttttaaccatctgacgtcttcgctttccctgaaaccaagccgccaggtgacactgcgcttcctgatccactgctgctgtatggtagagcgtattgtgattaaccgaaaaccgttacagatggcgttggaaagtcagccgaatctggacgcgcgcgcgtttagtgtcatcaaatccgcttttctgccgatcgaagatgcctacgccatccgtttatcagatgcggaatatttttatatctacgaactgctctatagctaa

SEQ ID NO: 381832 - DNA, 426 bp, Salmonella enterica
ttgactaccacacaaccgttgccccacatcctgctgctgacgcatggcggctggggacaaccgctttgcaacagcctgcgtatggtcacgggcgaaattaaaggcgtgacggaaatcgcgctaatgcctgtcgatacgctgggcgagttttatcaacgcgtcgaggccgtggtgaaaacgctgccggaaggctcgctgatcctgacggattttgtcggcggcacgacgtccaacgtcgcggcgcggctaagcgccgattatccggtggcggtgattgccggattgaatgcgtcgctactgctggaggcgctggacaggcgcgaacaagggatgctaaccgcctgcgtggatgagttagttgaggccgggcgcagtagctgcctggatgtggtcgcccatgtacgtcagctacaacaatcactctaa

SEQ ID NO: 381833 - DNA, 486 bp, Salmonella enterica; identical to SEQ ID NO: 370991

SEQ ID NO: 381834 - DNA, 750 bp, Salmonella enterica
atggataccttactctttgcaagcctgatggggttgtattactggtttgcccgtttacgcctcggctacaccttctccgcgatgctgttacaaccggtggtgatcgcggtatttgtcgggcttttgcttggcaatatgcagactgcgatgattatcggcgcagggatgcagctcgtttatttgggcgtgacctcaacgccgggcggcaacgtgccgtcggatccggcgctggcggcctgtatctccattcctatcgcggtgaaggccggtatggacccaaacctggcgatcgcgctggcaatcccgtttggcgtgattggcgtgtttctcgatcagcttaggcgcacgctgaacgccgcctgggtgcatatggcggataaacacgcggaaacggcaaacatggcgggcatcatgcgttgcgcctttctttacccggcattgctggggttggtactgcgcttcccggtggtctttgccgctaactactttggccaggatgtggtggaaagtttccttaaactgatgccgcactggttaacccactcctttgaaatcatgggcggcattctgccggcgctgggctttgccatcaccattatggtgatcggtaaaaagagcctgttgccgtggtttatcggcgggttcttcgcggtgttgtacctcaaggtcgacatcatggcgatggccatcttcggcacctgtgtcgccttcctgattaaaggcctggcgaaaaatgaaggagcagcatga

SEQ ID NO: 381835 - DNA, 858 bp, Salmonella enterica
atgagcagtgacgtaatgcaacatgaactggttgagcgcgcgcgggaaagcggggcgctgaccaaagcagatatcaccaaagcctggtttatctactggctgggcgccgaggtttccagctcctatgagcgcttacaaagcctgattttctgcgcctcgatgacgccgatcatcaaaaaactctacccgcaaaaagaggagcaggtagaagcgctaaaacgccaccttaacttctttaactccgagcagaccttcggcgcggtgattcagggcatctctattgccatggaagaacaaaaaacgcgcggcgagccgattaacgactcgtctatcaccggcattaaaacgggcctgatggggccgcttgccgggatgggcgactcgattatctgggcggcggtgatgccgctgttgatagcgatctttattccgttcgcagcaaatggcagcgcgatgggcggtattatcccgctgattctctacccggcgatcaccctggcgatcagctacggtatggtccacaagggatatacgctggggcgtgattcgattatcggcctgctgcagggggggcgaatcaaagaactgatctacggggccaacgtgctgggtttgatcatgatgggcgcgctttccgccagctacgtcaaaatcaccacgccgttaaaaattagcgccttgaaaggatctgaagtggtggttcagcagatcctcgactctatcgcgccgggcttactgccactggcggcggtattcgccatctacttctatctggtaaaaaaagggccgcgctacaccaccattttgctgtcgattgtcgcactgagcatagtctgttcgttgttgggagtgctgtaa

SEQ ID NO: 381836 - DNA, 1110 bp, Salmonella enterica
atgacgccgaatatctatcaacaactggggttgaaaaaggtcattaacgcctgcggcaaaatgaccattctgggcgtctcaagcgtcgcgccggaggtcatgcaggccaccgcgcgcgcggcttccgctttcgtcgagattgatgcgctggtggaaaaaaccggcgaactggtatcgcgctatacgggtgctgaagatagctatatcacctcgtgcgcctcggcgggtattgccattgccgtcgctgccgctatcacccacggcgatcgggcgcgcgtcgccctgatgccggacagtaccggtatggccaatgaggtggtgatgctgcgcgggcataatgtggactacggcgcgccagtcaccagcgccattcgtcttggcggcgggcgcatagtggaagtggggtcgagcaatctggcggcccgctggcaactggaaaacgccattagcgaaaagaccgccgcgctactgtatgtgaaatcacaccattgcgtacagaaaggcatgttgagcattgacgattttgtacaggtggcgcaggccaaccacctgccgttgattgtcgatgccgcggcggaagaggatttgcgcggctgggtggcgagcggcgcagatatggttatctatagcggcgcgaaagcctttaatgcgccaacctccggctttatcactggtaagaaaacgtggattgccgcctgcaaagcgcagcaccaggggattgccagggcaatgaaaatcggcaaggaaaacatggttgggctggtgtatgccctggagaattaccaccagggccagacgaccgtgaccgcagcacagttacagccggtcgcggaagcgatttccgccatccatgggctttatgccgatatcgaacaggatgaggccgggcgtgcaatctggcgtattcgtgtgcgggtgaacgcatcagaattggggctgaacgcgcaggacgtcgaagcgcagttgcgcggcggcgagatagcgatttacgcccgcaaatatcagcttcatcagggggtttttagcctcgatccacgcacggtagccgaaggggaaatggcattgattgtggcgcgactcagggagattgtagaacatgcagcagattaa

SEQ ID NO: 381837 - DNA, 744 bp, Salmonella enterica
atgcagcagattaatttttatcgtcagcgggtagcgattaacgtgctggcaaaggatatcgccaacgcgaaggctatctatgaagccgccgaaggccatgcggtcattggcgtactttccgcgcagttcgctacggtagaagagggcgtaccggaggtgaaacgctggatggcggaggtaccgtctatctcggtggggctgggcgcaggcgacccggcgcagtactacaaagcggcgatgattgccgcccatactcacccggcccatgtcaaccagacctttaccggcagcggcttcgcagcgggcgcactggcggcgacaggcggcgagcaaacacatattaacgccctggtcagcccgacgggaacgcctggcgaggtggtgatttctaccggcgtcagcagcagccagggaacgccagcccgcgtttcctgtgaagcggcggtacgcatgatgcaggatatgggcgcacatgcggcgaagtttttcccgatgggcggcgaaaagtcgttaccggaactctatgcgctggcgacaaccgccgcccgccacggcatgacgctcatcgagccgaccggcggtatctcactggataatttcggtattatcctgcaaacctgcctggaagcaggcgtgccgcgcgtcatgccgcatgtttacagctcgattatcgatccgcaaaccggcaatacgcgccccgaaaacatcattcggttgatggagatagtcaaagcgctggtgtga

SEQ ID NO: 381838 - DNA, 930 bp, Salmonella enterica
atgaaaaaaagccccacgtctacgccccatgatgcggtattcaaaacgtttttacgtcatccggataccgcgcgggattttctcaatattcatcttccccattcgctaagaatacgttgcgatctgacgacgttgaaactggcgccggacagttttatcgagaaaaatttacgcgcgttttattccgacgtcctttggtcgctaaaaacgtgtgaaggcgaaggttatatctatgtcgttatagagcatcagagtacgccggacgcgcatatggcgttccggttaatgcgttacgcgactgccgcgatgcagcgccatctggatgctggccataaaacgttaccgctggtgattcccatgctgttttaccatggcgcgaaaagcccgtatcccttttcgctgtgctggctggatgagtttgacgatcctgcactggcgcgtcagctttatgcgacggcatttccactggtagacattacggtggtgccggataacgagattatgcagcatcgacgtatcgcgatgttggagctggtacaaaagcatatacgtcagcgcgacctgatgggattggtcgagcgcttagcggtacttctgattacgggaaacgctaatgacagtcagctaaaagcgctgtttaattatttgctaatacagcatggcagcacgcctcgttttggcaagtttatccgcgaggtggcgcgtcgtgttccccaacacaaggagagattaatgacgatcgtagacagaatacgtgaatcggggcgcagaaaaggtaagcgtgaaggcgtacaacaaggtatacatcaaggtaagcaggaggaggccttgcgtattgcgcatacgatgctggaacaggggatcgagcgagagatggtgctgatgattaccgggctttctgacgaagagattaaggcaaagcgccattaa

SEQ ID NO: 381839 - DNA, 903 bp, Salmonella enterica; identical to SEQ ID NO: 374077

SEQ ID NO: 381840 - DNA, 684 bp, Salmonella enterica
atgttaatgtttccttatattttaaatttactggccgctatgctattgggcgcgctgattggcgcggaaagacaatggcgtcaacgtatggcgggattacgcactaatgcgctggtggcgacaggcgccgccgtttttattctgagctccatgacgacatcgccagacagccccgggagaattgcggcgcagattgtctctggtattggctttctgggggcgggcgtcatcatgcgcgaagggatgaatgtgcgcggactgaacactgcggcaacgctatggtgttcggcgggcatcggcgtgttatgcggcttagggcagttcaaaaatgcgctggcggcgacgatcattattctttgtgccaatattttactgcgtgaagcggcgcagcgtataaatcaactcccggtatccgccgagggagaaaaacgttatatcctgaaagtaacctgtaataaagaagatgagagcgcggttcgtcagtggttactgaatatcgtaaaagaggccgcgatctgtttacaagggttaggttcggtccccgctcaggaacagggctataaagaaattcgtgccgagctcgtgggtcatgctgattatcgtaaaacgcgagaactgattatatccagaataggtgataacgataatatcaccgcaattcactggagcattgatagtcaataa

SEQ ID NO: 381841 - DNA, 2727 bp, Salmonella enterica
atgactgacatgaacattgaaaaccggaaactcaatcgcccggcgtcagaaaatgataagcagcataaaaaagtatttccgatcgaagcggaagcttttcatagcccggaggagacactggcgtggctgaacagccatcgtcagggcctcacgatagaagaggccagcgaacggttgaaagtgtatgggcgcaatgaagtggcgcatgagcaagttcctccggtgctggttcagcttctgcaggcattcaataacccgtttatttacgttctgatggcactggcaggggtcagttttatcacggattactggctcccgttacgccgtggcgaagagaccgatctcaccggcgtgctgattattctgacgatggtcagtttgagcgggttattgcgtttctggcaggagtttcgcactaacagagcagcacaggcgctgaaaaagatggttcgcaccaccgccacggtgttgcgtcgtgggccgggcaatataggcgcggtgcaggaagagattcccattgaagaactggtgccgggcgatgtggtttttctggccgcaggcgatctggtgcccgccgacgtccggctgctggcgtcgcgcgatctctttatcagccagtcaattcttagtggtgaatcattacccgtagaaaaatacgatgttatggctgatgtggcaggtaaagacagcgagcaattgcctgacaaagataaaagcctgttagatttgggcaatatctgtctgatgggaaccaatgtaaccagcggcagagcgcaagcggtcgtggttgcgacgggaagccgtacctggttcggctcgctggcgaaatccattgtgggtacgcgtacccagacggctttcgatcgtggagtcaacagcgtgagctggctgttgatacgctttatgctgatcatggtgccggttgtcctgctgatcaatgggttcagtaagggagactgggtagaggcttcgctgttcgcgctggcggttgcggtggggttgacgccggaaatgttgcccatgattgtcagttccaacctggcaaaaggcgcgattgcgatgtcgcggcgcaaagtgatcgtcaagcgcctgaacgctattcaaaacttcggcgcgatggatgtgctgtgtacagataaaaccggcaccttaacccaggacaatatttttctggagcatcatctggatgtgagcggtgtaaaaagcagccgggtattgatgctggcctggctgaatagtagcagccagagcggcgcccgaaatgtgatggatcgcgccatactgcgttttggcgagggtcgcatcgcgccatcgacaaaagcgcgcttcgttaaacgcgatgaactgccattcgactttgtacgtcgccgggtatcggtcctggtggaggatacgcagcatggagacagatgcctgatctgtaaaggcgctgttgaagagatgatgatggtagccacccatcttcgcgaaggcgatcgtgtggtggcgctgacggaaacacgccgcgagctgctgctggcgaaaaccgaagattacaatgcgcagggattccgtgtattgctgatagcgacacgtaagctggatggttccgggaacaatccgacattaagtgtggaggacgagaccgaacttaccatcgaagggatgctcacttttctcgatccgccgaaagagagcgccggaaaagcgattgccgcgttgcgggataacggcgtggcggtcaaagtcctcaccggcgataatccggtcgtgacggcgcgtatctgtctggaagtgggtattgatacgcacgatatcctgaccggaacccaggttgaggcgatgtcagatgccgaactggggtctgaagtggagaaacgcgcagtattcgcccggctgacgccgttacaaaaaacgcgtattttgcaagcgctacagaaaaatggtcataccgttggttttcttggggatgggatcaacgacgcgcccgcgcttcgtgatgcggatgtggggatttccgtcgatagcgccgccgatattgctaaagagtcatcagatattattctgctggaaaaagatctcatggtgcttgaggaaggtgtcatcaaagggcgggaaacctttggtaatatcattaaatacctgaatatgaccgccagctctaatttcggcaatgttttttcggtactggtagccagcgcgtttattccgtttctgccgatgctggcgattcatctgttgatccagaatttgatgtacgatatttcgcagttgtcgttgccgtgggacaaaatggataaagagttcctgcgtaagccgcggaaatgggacgcgaaaaatattggtcgttttatgctatggattggcccaacgtcttctattttcgatatcacaacctttgcgttgatgtggtacgtctttgcggctaataacgtagaggcgcaggcgctctttcagtccggctggtttattgagggtctgctctcgcagacactggtcgtgcatatgctaaggacgcagaaaataccgtttatccaaagtcgggcgacgttgccggtattattgacgaccggcttgattatggcgataggcatttatattccattctcacctttgggtgcgatggttggactggagccgctgccgctgagctacttcccgtggttagtggcgacattattgagctactgtctggtggcgcaaggcatgaagcgcttttatatcaaacgctttggccagtggttttaa

SEQ ID NO: 381842 - DNA, 480 bp, Salmonella enterica
atgaataatcgtcgtggtttaaccgccgtcctggcgacgttgattacgttttccctgagcgctacgcctgtgctggcgaatccgggaaatggcaatggcggcggacatggtaataacgcggctaatcagggtaataacggtaacggccataaaggaaatgccgggcaaaaaacggaacaccgtaaaaatggcggtaaaccggatcacgtcgagtcggacattagctatgctgtcgccaggcaactggcagtgaatttagggctgacgggttatcagtctttacctccggggattgcgaaaaatctggcgagaggaaaaccgctgccgccgggaatcgctaaaaaaacggtgccggcgtctatgctgggacaattaccttattatccgggctatgagtggaaaatcgttggggataatctggtgctgatcgcgctcagtaccgcggtggtcacggcgattattaatggcgtatttgattaa

SEQ ID NO: 381843 - DNA, 681 bp, Salmonella enterica
atgtctacacccgcgaattttaacggtcaacgccctgccattgatgctaacgacgcagtaatgctgctgattgaccaccaaagtggcctgtttcagaccgtcggcgacatgccgatgccggaattacgcgcgcgcgccgcggcgctggctaagatcgctaccttatgcaatatgccggtcattactaccgcatccgtaccacagggaccgaatggtccgctgattccggaaatccatgcgaatgcgccacacgcgcaatatgtcgcgcgtaaaggggaaattaatgcctgggataatgccgattttgtacaagcggtaaaagcgacaggccgtaaaacgctgatcatcgccggtactattaccagtgtctgcatggcttttccagccatcagcgccgtcgcggaaggttacaaggtatttgcggtaattgatgcctccggtacgtacagtaaaatggcgcaggaaattacgatggcccgcgtggtgcaggcgggcgtagtaccaatggataccgcggcggtagcctctgagctgcaacgtacctggaatagggaagatgccgcagaatgggcggatgtatataccaaaatattcccggcctatcagctactgattgaaagttataccaaagcgcaggaagtagtaaaaaataatgaactgctggattctcagcgcgcataa

SEQ ID NO: 381844 - DNA, 414 bp, Salmonella enterica; identical to SEQ ID NO: 381786

SEQ ID NO: 381845 - DNA, 606 bp, Salmonella enterica
atgcgggttcctctggcgactgtccaccccgaacaaggcgacttctttgccatagtactgctcatacgtgagcttgccgcccagctgcggcagcgacggtacccaggcctgcccccggacatcccagccgtttgctggccgctcctgataatcctccaggtccggagagtctttccatccagacagacgcaggtaactattgacacccaacttcaggaagtttcgccagtactcaagaccggcgccggcacgcgcatggtcccgggacaggtcgaaatccccgaacaggttgccgcccagcatgtaggtggaggtggagtgacgccagccggcgccgaggctggcctgggtacggctgtcggtacggtgcaggctaccctgggtgaacacaaggttatcgccctggtcatacagcggcagcagcaggtcaaactgcgagtttttcagggagaagtttttgtccgcgtccagctgcacgcgggcggtgccgaagtggctcagccactgctgaaatgctccgccggcctcgacggtgaccatattgcgggccatggacgcggcggcgtcactttttgcactgctggccaggaagctgccagcctgtga

SEQ ID NO: 381846 - DNA, 3363 bp, Salmonella enterica
atgggaaagggcggcggaaaagggcacacgccccgcgaggcaccggataacctgaaatccacgcagctgctgagcgtcatcgatgccatcagcgagggaccgatagaaggcccggtgaacggtctgcacagtgttctggtaaaccagacgccggtggtggaccgcgacggcaacacgaatatccacggcgtgaaggtggtataccgcgtcggtgagcaggaacagaccccgctggagggatttgaatcgtccggcgccgagacggtgcttggtgtacaggtcagacacgacaatccggtgaccaggaccatcacggctgcaaatattgaccgcctgcgttttacgttcggtgtgcagtcactggtggaggccaacagcaagggcgaccgcaatccgacatccgtcaggctgcaaatccatcttgagcgctatggtcagtgggtggtggaaaaagagattacgattaccgggaaaaccaccacgcagtatctggcctcggtgatagtggataatctccctccccggccattcggtatccggatggtacgtgtgacggcagacagtaccactgaccagttacagaacaatacggtctggtcgtcgtataccgagattattgatgtccggcagcgctatcccaataccgcggtgattggcctgcaggtggagtctgagcagttcggcagccagcaggtgacgcgaaattaccattttttcgggcggattattcaggtgccgtcgaattacgatccggtagcgcgaacctacagcggcatctgggacggcacgttcaagcctgcatacagcaataatccggcgtggtgtctctgggatatgctgactcatccccgttatggcatgggacagcgaatcggcgcggcggacgtggacaggtgggcgctgtatgcaataggccagtactgcgaccagatggtccctgacggattcggcgggacagagccgcgtatgacctttaatgcgtatctggcgcagcagcgtaaggcgtgggatgtgctgaccgacttctgctccgccatgcgttgtatgccggtgtggaacgggcagaggctgaccttcgtgcaggacaggccctcggatacagtctggacctatacccgcagcaatgtggtgatgccggatgagggtacaccgttccgttacagcttcagtgcacggaaggaccgccataatgcggtagaggtgaactggatcgaccctgataatggctggcagacatccacggaactggtggaagacacggtcgccatcagtcactacggacgcaatctggtaaaaatggatgcgtttggctgtaccagtcgcgggcaggcgcaccgcgccgggctgtggctgataaaaacggagctgctggaaacccagacggtagattttagtgtgggggcggaggggctgcgccacgttcccggtgatgtgattgaggtttgcgacgaggattatgccggggtcagcctgggcgggcggattctgtccgttgaccgcgcccgtcgtattctgacccttgaccgggagattaccctgccgtcgtccggcaccacgctgataagcctggtggatggcgaaggtttgccggtcagcgtggacgtgcagtctgttaccgacggtgtgcaggttcaggtcagccggataccggacggcgtggcggaatacagcgtctgggggctgaaattgccgacgctgcgccagcgtctcttccggtgcgtggctgtccgggaaaacgacaacggaacgtatgccatcaccgccgtacagcatgtgccggaaaaagaatcgattgtggacaacggggcatcgttcgacccgcagtccggaacgattcacggcaccgtccccccggcgatacagcatctgaccacggaaattctggcggaggagggacagtatcaggtactggcgcgctgggacacaccgcgagtcgttaagggcgtctctttttcgctgcgtctgaatgtggcggcggaagacggcagtgaccggctggtcagcagcgcaggaacgccggatacgcagtaccggttccgggggctgacgccggggcgctacaccctgtccgtcagggcggtgaacagccagggacaacagggagacccggccagcacacagttcagcatcgccgcgccggcggcaccatcatttatcgaactcacccctggctatttccagattacagccacaccgcgtcaggcagtatacgacccgacggtgcagtatgagttctggttttcagacgcgcagattacggatatccatcaggtggaaaacgccgcacgatatctgggaacggcgctgtactggatagcggccagcgtgaatatcaggcccggcagagattactatttttatatccgggcggtaaatcaggtcggtaaatccgcattcgtggaggcgaccgggcaggccagcaacgatgccgcaggctatctggattttttcaaagggaagataactgaaagtcacctgggtaaggagctgctggaaaaagtagatctgacggaggataacgccagcaaactgcagcagttttcgaaggagtggaaggacgctaacgataaatggaacgccatgtggggcgtcaaaatagagcagaccaaagacggcaaatattatgtggccggacttggactgagcatggaagacacgcctgacgggaagataagccagttcctggtggcggcggatcgcattgcttatattaacccggcaaacggaaacgagacgcccggattcgtcatgcagggcgaccagataatcatgaacgaggtattcctgaaatatctgagcgcgccgaccattaccagtggcgggaatcctccggcattttccctgacgccggatggaaagctgactgcgaaaaatgcggatatcagcggccatatcaacgctgtatctggctcgtttacgggagaaatcaatgccacctccggtaagttttctggcgtgatagaagcaagagagtttgtcggtgatatctgcggctcaaaagtcatgcagggcgtgagcatcagggcgacgaacgacgaacgcagcacctcaacacggtataccgacagcgccacctatcagatagggaaaaccatcacggtgatggctaactgtgagcgtaatggtggctccggtgccatcaccgtcacgataaatattaacggccaggtgaaaacggcggaggttatgccgtataccgcagggattccggccatgtatcagaccgtcgttttttcggtctacaccacttcaccggtcgtggatatcagcgtctctctgagggttggcgggcagtacaccactgaagcttccgtctggccgctggtgatggtttcccgatcggggaacaacttcacaaactga

SEQ ID NO: 381847 - DNA, 2373 bp, Salmonella enterica
atgccagtacttatttccggcgtactgaaagatgctacgggaacagcagtgcagaactgcaccattcagctgaaggccatccggaccagtacgacggtggtcgtgaatacggtggcatcggaaaatccggatgacgccgggcgctacagcatggatgtggagcaggggcagtacactgtcacgctcctggtggaagggtatcctccgtcacatgccggcgttattacggtctacgatgattcaaagccgggaaccctgaatgattttctgggggccatgacggaagacgacgtccgcccggaagcgctgcggcgttttgaggcgatggtggaagaagttgcccgccaggcatcggaggcatcgcggaatgccaccgccgcagggcaggcatctgaacaggcgcagacatcagcaggtcaggcagcggaaagcgccacggcagcagtgaatgcagccggagcggcagaaacatcagctacacaggcagcctcatcagttgcgtctgcagagagcagcgcaggtacggcgaccacaaaagccggggaggcatcagccagcgcggcgtcggctgacacagccagaacggcggcagccgcatcggcagccgcagcgaaaacatctgaagcgaatgcagatgcctcccgtactgccgccggcgattcagcagttgccgcagccgccagcgcgacggcggcgcagacatcagaagagcgtgccggagcatccgaaaccgccgcgaaggcgtcagaaacgcaggccgcttccagtgccggtaatgcaggtgcgtcagccactgcggcagcagcgtcggaaaaggcggcagccacatcggcagccgaagcaaaagcatctgagacaaacgcagcaacgtcagcaagtacagcagcggccagcgcaacagccgcctcgtcatcagcatcggaggcatccagccacgccgccgcatctgataccagcgcatcactggcggcgcaaagcagtactgctgccggagcagcagccaccagagctgaagatgccgcaaaacgggcagaagatatcgcggacgtgatttccctggaagatgccagcctgacgaaaaaaggtatcgttaagttaagcagcgccacggacagtgacagcgaagcgctgtcagccacgccaaaggcggtccatgctgtcatggacgaggtacagaccaaagcgccgctggacagcccggcattcactggaacgccgaccacaccgacaccgccagacgatgctaaagggcttcagacagcaaacgcggagtttgtccgcaaactgattgccgcgctggttggttccgtaccggagtcactggacaccctgcaggaactggctgacgcgttaggaaacgatccgaactttgccaccacagtactgaataaactggcgggcaagcagccgctggacgaaaccctgacggcgctgtcaggaaaaggggctgatggccttatcgaatacattggtttaaggaacacaattgataaggctgccggtgctttgcctgctggtggtacagctgttgcggcaaacagactggtatcacgcggcgcgcttccggcactgactggtacgacaaggggcagcgatagcggcctgattatgggcgaggtttacaataacggttatccaacgcaatacgggaatgttttgcgactgaccggaaccggtgatggggaaatcctcattggctggagcgggacaaacggtacgccagcgcccgcatatattcgcagccatcgagataccgccgatgctgagtggtccgaatgggcgatgctctatacctcactcaatccgcctccggactcgtatcctgtcgggtcggcgatagcgtggccgtctgacaatatccctgccggttatgccctgatgcaggggcagcccttcgataagtctgcttacccgctactggctatagcgtatccgtccggcgttattcctgacatgcggggatggaccatcaaggggaaacccgcaagcgggcgtgcagtactctctcaggagctggacggcaacaaatcgcacagtcacagtgccagggcgcaggataccgacttagggacaaaaaccacctcatcctttgattacggcacgaaatcgaccaatacaacaggcaaccatactcaccagttcggcggttatatcaactcatactggggtgattcaaatcacacctcatttcagcctggaaatggtgcctggacacaggccgctggcgaccatgcgcatacagtttatatcggaggacacgagcacaccatgtatatcggtccacacggccacgttgtgattgtggatgcggaagggaacgtcgagaccactgtaaaaaatatcgcctttaattatattgtgaggctggcatga

SEQ ID NO: 381848 - DNA, 885 bp, Salmonella enterica
atgattaaattaattctttcagcacccgtgccagcaatggcggcggcatttgaactttattttcagaataccgaaaatgtggaaattatccgcggaccatttgaaaccgtaccggaatttgattgtatggtcagcgcagccaacggctttggtctgatggatggtggcgtggatgccgctataacgacgtatttcgggacacaattacaggaacgggtacaacaacatatcctccgtgaatatctgggagaacagcccgtcggcaccgcctttgttactggaacggggaacagtaaacatccgtggctggttcacgctccgacgatgcgcgttccgctgattattgacggcaccgatgcggtttatagcgcaacaagagcggcgttactggcaatttttcagcacaataaaagcgccagggaagaccgaaaaattaaatcagttgtatttcctgcgatgggggccgggtgtggtaaggtatcctcggacagtgttgcccggcaaatgaggctggcatgggatagttttattaactgcgccacggaaattaactggcaatacgccagcgcccgccagaatgctgtattcagcacaacggcatactgtccgtcaaagacgctttgtccgaacgtcagaacggaatatatcggttttggtgattacagaacgtattgcaaaaaatcaggtaactgctgcatcagtacccgtcatcaggttgatgatatttatatcggcgcacacacgcacaccatagatatcggtgcgcacaaccacgccattcatacaggtgcatacgcgtatcttcatgccgtttcccctggtattcattctcacggctatcacctgaatccagaatatttatccggagtaaaaaatgacgtttaa

SEQ ID NO: 381849 - DNA, 696 bp, Salmonella enterica
atgttcttaaccttttctaatgtggcaataacttcagataaccggatagacaaattatctgaaaatgatttagagcttattcgtgacacagctatacagagtggcggaaggaaagtacagatacaattacgtgatttagtatatgaagtaagcaatcgttctgttgcaggtgatttattcgatgttactccttcagttaattctgatacagaccgagccttgtatagggagcgttgtccggaatggcttggaaacgctataaggttagcaaggcaattaaatgatggactgaatatttcgcatggaaatgattcaaatatgtcgaccacatcattctcaaatggcagacaagggttagttgctcaaagtttaccaggagcgcctgctatttttcataagcaacaattagtagataaggttgatttatgcagtttctcaccaaacgttgatgaactttcatgttcggaagacgatttaacatgccctttaatgttaattattcctgaaaaaggcgtttttatgaaaccaaacccagagtcagatatatgtcaattatttgatgaaacagcacttatccaacttattattgacggttccgtacatcctttaagtagggttccgctatcagcagacatgataatacataaaaatgaatgttatttcgatactacaaaaggtaattttgtaattccataa

SEQ ID NO: 381850 - DNA, 219 bp, Salmonella enterica
atgaatgcgatcagagttgttggtatcgatattgccaaatctgtttttcaggtctgcgtctggatgaatgatggctacgtcgcatggaataaaaaatctcacgctccagattgcaggataccgttcgacaattcgagcccggaatgcttatcgctatggaggcttgttcaacctgtcatttttggggaagaacgttcagtgctatgggataccccgtga

SEQ ID NO: 381851 - DNA, 291 bp, Salmonella enterica
atgggataccccgtgagactgattcctgcacaacatgtgaaagcctttgtccgcagccagaagaacgatgccaacgatgatctggcaatttgcgagacagcgcttcgcccggatattcattttgtttctgtaaaaaccacagaacagcaggatatcaaggcacttcgaaacacgtgtcaactaatggttgagcagagaacggctctggccaaccagcttcgttccctgctcgttgaatatggcttcacaattcctgtcgggatcctgcgcctccagcaactgttctggtaa

SEQ ID NO: 381852 - DNA, 795 bp, Salmonella enterica
atgaatgttggacatgtggctacagaaaaattctgtacaactgaagtgagcgcctgtaacagccaacagaatacttcaattgatttatcctcctgtattattaatgctgcttcagaatgtacagtttttgtcagaacaataataaagaaatcggacagttatgatgctatgcaaattgacaggcttaaaattaacatgcaggaaaaatacgatactcttaatttacaaagagaacatcacaagaaattcctgcaagctataaaagcaaactcttttgacagatctatgattgaaagaccagaaaacccaatacctctgagtctaatatattcttccattgattcaataaaatataacacagggaactgtgctgatatgtcgctaattttaggtgcgattattgcaaaatatataccacaaaggctaactggaataggcttttcgaaaaataatgtgtttgatgccagaataagcacatcccttatgtataatagcgcgtcaggagggaatcatgtggtcgttcttttgacttttactgattcaaaaggaatatcggagtatatacttgacccctggctagatgcgcgcattttcaaaaaagaagagtcatatgaaatttataaaaacaatagcaacaaatatatcaatgaaaatcattgcttcgaagtatacgataaattttctgctataatgaatagcgctgaatatatagaagctatcgcaaagacaataaataatttatatggagttaatcttgataaaattcagttaaccaatccatttgagtttatataa

SEQ ID NO: 381853 - DNA, 201 bp, Salmonella enterica
atgaaacgatttaaagagatggctgtgattttattttttgcattactggcagcaggttttacgtcgtcggcgatggcggataatcctttttcacatgttcttgatcatgtttttgatacagtccctgcctgtcacattcttcctcctggagtggggcaaccagaacatcttggatatcagccttggccttggtgttggtga

SEQ ID NO: 381854 - DNA, 1494 bp, Salmonella enterica
atgaatttgcatcataaagcgctcaggcactttatctcggcaaacgtcatcgttttgacatcgtccttcctgatttacgaacttattgccagcgacagggcaatgaatgcctatatgcgttatatcatggagagagccgattcgtcgtttttgtacgataagtaccagaatcagagcatcgccgcacatttgatgcgaacttttgaagcgccgggagaccccgtcaccgcagaaaaacgccgcgcgttttgcgacgcctttgaggctattaacggtacgcacggcgtcaacctgacccggcataattatccggcgctacatggtaccctgcaaaccgccgctacacagtgtaccgataatcttgatgacgcccttttactgcctgcatttgatcaggcggtaagcatcaaccgttcgcaggacgaccacagtcacgggctgggcacactggaacttaaattccgttattacgttgatttaaataaacattatgtctatttctatgatttaatcaactcacggcgcttcgccatgcatcgttggacttttttacaaaaaggtacaatgggtattaacagaaaagatatagataaactttttaccggccgtacggttatttcaagtatttacatggatgatattacccaggaaaacgtcatgagctttttaacgccagtctatctggcgggaacgttaaaaggtatcgtgatggtggatgttaaccaggataatttaaaaaatattttttatacccaggaccgtcctctggtttggcgttatcttaacgtaacactaaaggatctggattccggaaaagaaattattattaatcaaagcaaaaataatctgtttcaatatgtgaattatagccatgatatccctggtggactgcgcgtttcgttgtcccttgatttaacctatttccttgtctcgtcctggaaagcgctggccttttacttactggcaacggcgatcctgcttaatatggtacggatgcactttcggctttatcgcaacgtcacacgcgaaaatattagcgatgccatgaccgggctttacaaccgtaaaatattaacaccggagctggaacagcgattgcaacgcctggtcaataccgggacgccggtgacatttgtcgctattgattgcgataggttaaaactgatcaacgatacccaggggcaccaggaaggcgaccgaattattaccctgttggcgaaagcgattaaaacatcgattcgtaaaagcgattacgccattcgcctcggcggcgatgagttctgtattattcttgttgattacgcggcggatttggctatccatctgccggagcgtattattcgtaacctgcaaattatcgcaccggataagacagtccatttttctgccgggatttataatatgcagcccaatgatacgattaatgatgcctaccaggcttccgatgcgcagctctatctgaacaaacaacaaaaacaacatcgttcatcatag

SEQ ID NO: 381855 - DNA, 372 bp, Salmonella enterica
atgaaatggttaatattagttactttcagcataagtggaatgctggtatggcagccatcttttgcacaagaagcattgaccacacaatattcacagtcggaactcttaaaaaattgggcgctgagtcattgtctggcattagtatacaaagatgatgtcgttaaaaacgatgccagagctacggccagtgcttaccttgaatatggtaaacaatctgtggagatttatcatgaaattgatgagattgcgaaaaaatattcagggttgaaatataatggctcgatatcatcagattttaataccatgaagtgcatagattttatccacgacagtgaattaaatgaattaattgaaaggcgtgtcgagaagtaa

SEQ ID NO: 381856 - DNA, 486 bp, Salmonella enterica
atgaacagaccttcattcaatgaagcgtggctagcttttaggaaggtgaatcattccgtcgctgatgtgggtagcattattggtggaaacgttgggaaaaatataactggtggttattttcaaaatgcctgtcctattcgaatgagctatgttttgaatgcgacaggattcccaatagcccgtaactccccgtatgcaaaggttagtggtgccgataataaattctatatttatcgtgtgaatgatatgattgatcatcttactcataatatgggcaagcctgatcttattgttaataatccaaaacagagtgactttatagggaagaaaggaattatcgtagtaaaagggcatggctggagcaatgccagaggacacgttacattatggaatggcagtatctgttcagatcagtgccacttattaaatgacccagataatggaccatttgttcctgaagttgggactctgtggatactgccatga

SEQ ID NO: 381857 - DNA, 3159 bp, Salmonella enterica; identical to SEQ ID NO: 376826

SEQ ID NO: 381858 - DNA, 384 bp, Salmonella enterica
atgaaagtattaattataaatgatacaggtaactcttatcattggggatgttatggaacatcgactgcgataaaagaaagtttaaggtttcgtggtattaatgaaatagtcactttctcgtgcgaagaaggtagtaagatagaaaactcacccaaaaaaattctgcttgtgtacagtaagaataagttaataaggaggttagctagccattattatagcaaacatcttcgcaggaaattacctgatttatgggattcattattaaaaagtgattgcgttataataaatggtgaaggaactattaatagtattcatacggcaacaagatttatattttttataattcacgttgcaaaagatatacttaaaaaaaggtttatctaa

SEQ ID NO: 381859 - DNA, 348 bp, Salmonella enterica
atggtggcaagttactcgcaggctaagctgcaaattgacgatttcttgattaaaactcgttataacattgattcacaactttcaaaatacaccgctgcaaaagagacttactcagtggcggaacgttcacatacaaacgcgttacagcttactgaattatatgagcaggagtttcagttagggcaaaaaagtttgcttgatttaatttcaagccgtaatgaagcatttcaggcatatgtaagcatgatcgacagcaaatatagcctgtatattttaaagctacagcaactctcattgatttttcatttaatggattatttaaaaagtgagttaaatgtaatgaaatga

SEQ ID NO: 381860 - DNA, 156 bp, Salmonella enterica
gtggcgtttcagcgccgggttcatgcgcaggtaatggcgtatctggagcagggcattcctgaacgtccggcccgcttcatcaaagcgctacagaattactatcacacgcccgaacttaaggcggaacagttcccgtggccggaagcgcttaattaa

SEQ ID NO: 381861 - DNA, 1350 bp, Salmonella enterica
atgacagagatcgttgtttccaaatttggcggtaccagcgtcgctgattttgacgccatgaaccgtagcgcggatatcgtactttccgacgccaatgttcgtttagtcgtgctttccgcgtctgccggcatcactaatctgctggtggcgctggccgaagggatggagcccggcgaacgtttcgctacgctcgacgccatccgtaaaatccagttcgatatccttgatcgtctgcgtcatccgaatgtcattcgcgaagagattgaacgcctgctggaaaacatcactattctggcggaggcggcatcgctggcgacatcggcagccctgaccgatgaactggtcagccacggcgagctaatgtctaccctgctatttgttgagatcctgcgtgaacgcgacgtacaggcccactggttcgacgtgcgcaaagtgatgcgtaccagcgatcgctttggtcgtgcggaaccggacgtcgcagcgcttgcggaactggccgcgcagcagttgctcccgcgcctgagcgaaacgttggtcattactcagggctttatcggcagtgaaagcaaaggccgcaccacgacattaggccgcggcggcagcgactatacggcagcgttgctggctgaagcgctccacgccgcgcgggttgatatctggacagatgtgcccggtatttacaccaccgacccgcgcgtagtgcccgtcgcgcagcgaattgatgaaatcgactttgaagaagcggcggagatggcaaccttcggcgcaaaagtactgcatccagccaccttactcccggccgtgcgcagcgatatcccggtcttcgttggctccagtaaagatccgcaagcgggcggtacgctggtgtgcaataaaacccaaaacccgccgctgttccgcgcgctggcgctgcgccgcaatcaaacgctattgacgctgcacagcctgaatatgctgcactcacgaggtttcctggcagaggtgttcggcattctggcgcggcataatatttcggtagatctgattaccacttcggaggtgagcgtcgcgctgacgctggatactaccggctccacctccacgggcgatacgttactgacccaatccttattgatggagctttccgcgctgtgtcgggtcgaagttgaagaaggactggcgctggtcgcgctgattggcaacaacctgtcaaaagcctgcggtgttggtaaagaagtgtttggcgtcctggaaccgttcaacattcgcatgatttgttacggcgcctccagccacaatctgtgcttcctcgtgccgggagacgatgccgagaaagtggtgcaaaagctacatcagaacttatttgaataa

SEQ ID NO: 381862 - DNA, 1332 bp, Salmonella enterica; identical to SEQ ID NO: 377163

SEQ ID NO: 381863 - DNA, 369 bp, Salmonella enterica; identical to SEQ ID NO: 381619

SEQ ID NO: 381864 - DNA, 297 bp, Salmonella enterica; identical to SEQ ID NO: 33615

SEQ ID NO: 381865 - DNA, 609 bp, Salmonella enterica
atgagtaattcgttgttaccaccatcagccagcaatttcatgcgttgtgccgaagccgtcggaacacgcattacagacattccggtagacctcaacacgctgtggtcgccggacacctgcccggtgcatctgctgccttatctcgcctgggcgttttccgttgaccgctgggatcgcaactggccggaagagacaaagcgacaggtgattcgtgatgcatggctgatacaccgacacaaagggaccatcagcgcactgcgaagagccgtggagcctctcggctacctgattgaagtaaaggagtggtggcaactcaacgaggagccgggaacatttcgcattgttgtcggagtacttgatcagggcatcaccgatgaaatgtatcaggaacttgagcgccttattgcggatgcaaaaccagtaagtcgccatctgacggggctggcgatcagcctgagtgtgaacggaaagattttcgttggtacgggatgctatcacggcgatgccctgacggtttatccctacaccccggagtccattattgtcgaaggggattatttccctgccccagccattcatttaattgataatctgagagtaaacgcatga

SEQ ID NO: 381866 - DNA, 837 bp, Salmonella enterica
atggctaatgaaaaaaagacatcccgcaaaaagtttcgcgtggctgtctccggtgtaacggcagacgggcgcgaaatcaacggcgacatgctgaaagctgccgccaccagttataacccgtccgtttatggtgcacgtgtgaatattgagcacatcctgtcaccactccccggtagcgagttttccgctatgggcgatgttgtggggttgagcaccgaagacataaccgatggcccgctggcaggtcgcacggcactgtatgccgaaattgagccgaccgctcgcatgatgtccctgcttaacgatggtaaaaaaatttactccagtattgagctggaaccacagtcaaccatcacgggaggcccttacctgcgcgggctggcaatgaccgacacccctgccagcctgggcacggaacgtctggcctttgcggcacaacaacgtatgcaactgatgacattcaactgtcagcagggagacgtggcgatgtttaccgccgctatggagtcagaacttatcgaactcaccgaacaacgtcaggaagaaggcacccagtggtttaaccgcgttatggggattattggccgtggccgcaaagcggatgacgccagtttctcccgtattcaggaagcggtggaaggtgtcgcaacgtcacaggccgacattatcgaccgttttaatgtgctggaaacccgccatcagcaggacagccagaaaatcactttactgaccacagagctgacagcactgaaggaaaaactgcgcacgcaggacggcgatccgcagaaccggttcaccgcaacgggcgcagcctccgatcaactggctgacttctga

SEQ ID NO: 381867 - DNA, 408 bp, Salmonella enterica
atgaacagaaaacagaaacaagagttgaaatacttcttacgtaaagaaattgccaggcttgaagatgcagagtcacaatcatcagaaattccgttcggaatggatatcaacgacgccagtatgcttcaggcataccgtatagctcaggctgcactacagacaaaaccgttaaataacatacatgaaaagtatgattattttacggataccgcttgcttgctgacatctgaagaacaaaagatagcccaacttttaggcgacgcatggaacctgtatttaacgttgccagttgagcatccaatgggtagagatgaattttgccgggcaattcatcattgccaaaatatggtgttggcacgcccggccatcagggcgctggccaggaaggggcaaggctataaaagataa

SEQ ID NO: 381868 - DNA, 390 bp, Salmonella enterica
atgattgacgctcatgacttcacaagatgggtgcgcacacaggacacccgtctggctcccgttcttcagggattatttgatctctacatccgtggtcgtgacaacagagcacgcaccacaaaaccggagaatgcagacaccctttatttcacagtagacgactgctaccgcgtggacttcacaccacacgggctggcgttgcactgcctgacaccacacggagaatcactgctggcgtattacgactccccggcctccgtatttgcggcaatgctggcgcatcgcactgctggcgggtgtgcctcgctgagtgaatacaccgctgaatttaaccgcctttctgccctcttctcgcaggagtggcagcgcgtgacgggataccagccatga

SEQ ID NO: 381869 - DNA, 231 bp, Salmonella enterica
atggcaaaccgcaaacaacagcgcgcatacgctgcgcgtcgtcacatccagactgaaatcaaccgtagacttttccgcgcatcacgcgtcgcgcaaatcatgcacatcaatatgctgcatgagcgcagccacgcgctatcgaacatctattccgcctctgttttcagctatctggcggatgatctgcgcgagctgcaacaactcttccagcagcaaaacaaactccattaa

SEQ ID NO: 381870 - DNA, 300 bp, Salmonella enterica
atgagcaccaccaaccaccagaagctacgcgaactggcatttgccctgcaacgaatggcaactcctcaaaaattactggcatttcgcgcaatgctctcgccgtctgctgtgctggcactgctggatcagctggagcacgccaaaaccacggctcctgccattcgcctgacgctccatcatgaaatcgctgatttctgcgcaacgctgggggcacctggcgaaccggaaacgccggaagcgatgcagcaagagctgctgcaacgcattgacaaggtttttgatttttttctgaaccagtaa

SEQ ID NO: 381871 - DNA, 267 bp, Salmonella enterica
atgaccattctggaatacatcgctactcatccggggtgtagcggcggagagatcgccgcagcactgaatactccaaccacagccattaatgctgagttacgccaactttggcgcggcggcttagtcatcagaacaaaccgcagcacaggtggtcgcgctcgcaaaactggaggccaggcttcttaccacgtaaacccgatgccgttcgggtgtagcaatccgcttactcacatgtttaaccagctactgaaggaagccagaacatga

SEQ ID NO: 381872 - DNA, 627 bp, Salmonella enterica
atggaacctactgataaaaatagtagcgggtggaaccccaaatacgttactggtctttttttaactaccataggtggtctttggactttttttgactatacctattccgaaactataaatgatttaaataatcaaatttcagcatatgaaaaatcaaatgaatggaagctacctgagactttattaaaaataaataaatcagttgaatctcttaatttaagaatagacgaaagaaacaggttgaattatttagagttagaaaatgataagttaaaactcgaaaacaaagatatcagatccaagatgatgaaaacagaagccgctttaaactctgccaatgaatacttacaaacggttgtatcaaaacatgatgattttatattaaaaagaggcaaatcttatgcattaacagaaaataatttatatatatccgcgcaaaatgtttatagcactaccgtagaggggcaattcgataatgaaccttacactctcgaactgggaaaatccaaagattttagtgttggcaatttaacatgtaaagtggttttaacaagtattgcctatatggataacgaggcctcattttccaaaagctgttatgacaaatcaaaacagccaaaattctaa

SEQ ID NO: 381873 - DNA, 459 bp, Salmonella enterica; identical to SEQ ID NO: 379586

SEQ ID NO: 381874 - DNA, 789 bp, Salmonella enterica
gtggcagcccgttttcaacagcgcactacggacatcatgcgttatgcagtgcaaagtgagttaattaattataacccggctcaggagatagctggagctgttgcttctggcaatcgacagcatcgcccggctctggagctaaagcgtattccagaactgcttcagaaaatagatggctataccggaagaccattaacccgttgggcaaccgaacttaccctgcttatctttattcgttccagtgaactgcgttttgctcgttggtcggagattgattttgaaacgtcgatgtggacgattccaccagagagagaacccatccctgatgttaagcattctcatcgtggctcaaagatgcatacaccgcatttggtgccgctttctaagcaagcactggcgatcctgaaacagataaagcagttctgtggcaagcatgaactgatttttattggcgatcacgatccgcgtaagccgatgagtgaaaacacggtgaacagtgcactacgggtgacggggtatgacaccaaggttgaggtttgtggtcacggcttccgcacgatggcttgtagctcattgattgagtcagggttatggtcaaaggatgaggtagaacgacagatgagccatatggaacgtaactcagtgcgggcagcgtatatccataaggcggagtttatcgacgaacgtaaactgatgctgcaatggtgggctgatttcctggatgcgaatcgggagaaagggatcacgccatttgactatgcgaagatcaaccaggggcatggtgagtga

SEQ ID NO: 381875 - DNA, 1188 bp, Salmonella enterica
atggcgtttctcaccccggtacgccgcctgcgtggtagcgtggtgtacagctatgacagaagcggttacctgaccgggcgctcaggtcagatgtatgaccatgaccgttattattacgataaggcgggcaacctgctggataacgaagggcagggtccggtgatgagcaaccggctgccgggctgtggtcgtgaccgttacggttataacgagtggggcgagctgaccacgcggcgcgaccagcaactggagtggaacgcgcaggggcaactgacgcgggtcatcagcggcaacacggagacgcactacggctacgatgcgctgggcaggcgaatccgcaaggcgacgtacgggcggcacacgggccatacggcgcggagccggacggactttgtgtgggaggggttcaggctgttgcaggagaacgtgcagcagcagggctggcggacctatctgtacgatgcggaacagccgtacacgccggtggcgagcgtgacgggaaagggagaaagcaggcaggtgtggtattaccacacggacgtgacgggcacgccgcaggaggtgacggcggcggacggaacgctggtgtgggcgggatatatcagggggtttggagagaatgcggcggacatcagcaacagcggggcgtactttcaccagccgctgcggctgccggggcagtattttgacgatgagacggggctgcattacaatctgttcagatattatgcaccggagtgtggcaggttcgtcagtcaggacccgataggactggcgggagggctgaatctttaccagtatgcgcctaatccgttaagttgggttgatccgctgggtttaagtggagaaccgataggcagtgagaacaatccatttgattcttctcgtgctgctcgtcgtgaagctatgaggcaagcaggaatacccacaagccaacaaccgatcagccaatcacaaaatagctctggtcgagaatattcttacgaaacaccaaaaccaggtggcggcactggtttatcatccgtacaagagcaaacaatggatattagtcatccagataagccacattgggaagcaggacaagttaaaacagatgattttggaaatcctcgaatgaataagtatgggcgacctcaattacgtaatggtaaagggaaagcatattatggtaaaggaggatgcgaatga

SEQ ID NO: 381876 - DNA, 825 bp, Salmonella enterica
atgattaaattaattctttcagcacccgtgccagcaatggccgcggcttttgaacattcttttcagaataccgaaaatgtggaaattatcccaggaccgtttgataccatcactcagtttgactgcatggtcagtgcggcgaactctttcggtcttatggacggcggtgtggatgctgctattacggcatattttgggtcgcaattacaggaacgggtacagcaaaatatcatccgtgaatatctgggagagcagcccgtcggcagcgcctttgttattgaaacgggtaacagtcagcatccgtggctggttcatgccccgacgatgcgcgttccgctgataatcgacggcaccgacgcggtttataatgcaacacgtgcagcgttattagcgatatttcagcacaataaaagcgccggggaaggcaggaaaattaaatcagtggtattccctgcgatgggggccgggtgtggtcaggtatctccggacagtgtcgcccggcaaatgaagctggcgtgggatggttttattaactgtgcctcggaaattaactggcaatacgccagcgcccgtcaggatgctgtattcagcacaacggcatactgtccgtcaaaggcgctttgtccgaacgccagaacggaatatatcggttttggtgattacagaacgtattgcaaaaaatcaggtaacacctgcatcagtccccgtcatcaggttgatgatatttatattggtgcgcatagccatactgtttcccccggtacttatccccacagccattacctgaatacagaatatttatccggagtaaaaaatgacgtttaa

SEQ ID NO: 381877 - DNA, 570 bp, Salmonella enterica
atgacgtttaaaatgagcgacgccccgcagacaattaaaatttttaatcttcgttcagatacaaacgaatttattggcgcaggtgatgcatatatcccgccgcacactggattaccggcaaactgtactgatatcgcccctcctgatattccctccagtcatattgctgtatttgacgctgaaacccaaacatggagtctgcaggaggatcaccgcggcgagacggtttacgacacaacaaccggcaatcaggtttatatctccgaactcggcccgttgcccgaaaacgtcacatcagtttcaccagatggtgaataccagaaatgggatggcaaggcgtgggtaaaagacgaagcggctgaaaaagcagcgcaacttcgtcaggcggaagaaaccaaaagcaggctcctgcaaatggcatctgaaaaaatcgcgccgttacaggatgcagtggatctggacgaagcaaccgataaagaaaaagcttctcttctggcatggaaaaagtaccgggtacaggtgaacagggttgatacttcaatccccacctggccgggaataccatcatga

SEQ ID NO: 381878 - DNA, 921 bp, Salmonella enterica
atgaaccaactgcaagaaatcattcagatactaagtactggtgatgaaggcacaacaaatgctctcataaaaacgaagatccttcttttctctatcgggaaaaaggagcttgctgcatgggtaaatcatgagataaacggttatcctgattcagtttcccttcccaattatagaattgttggcactagaattcttgctgatctgaacaacggcgttcgcctatatagagcttttccgttaccgattggctacctaagtgaagatgaccatgaagatgctactaccagtgaagtgagactttcaatcagtcaaatcgaagacctggtaaccaatgctggtgatagccacgctattcagcaaccaattcctttagattacgcgttagttaaatattgcaaaggtatcgatagaggctatgagttaacacgctgttataaagagatcgcgctacacaactttacctccatcttaactcaggttaggtcacggctacttgattttatacttgagctttctgatcaagtttctgaaataccagatgagaaaaacatgacagaaaaacttaaaaatatcgacacgtcttcattattccataactcaatttttggagacaatactgtcataaactttggaaatgaaaactcattttctgtgaataaccatgttgtaaaaaacgacactgaatcattaaaagagtatctctcagctcaggggttccctaaatctgatgttaacgatttagaaattgctattggtgaagatggcccgatagctagcaaacgtggtgaatatggtcaatccgttagtacatggttggcaaatattgcgagtaaagcagcccatggaactttgggcataggaatagctgctgcaactcaagcagcaacagcggctctgaaaaaatactacggactctcataa

SEQ ID NO: 381879 - DNA, 570 bp, Salmonella enterica
atggaaaacacttctgatattattttatctactcttactgcattaggcactatgggttctgctatcgctgcatcttatgcagtcaaacaaacaattaagcaaagaaaaatcgcaataacgcctcagttggtaattaataacttcccggtaagaagtaaggagatttacgataattcgtatcattcattccctatttccatagaatattttatgcaacacaagcctgaaataatcaatgtaggttcaggtgttgcactaaacactacaataaccgtagagttcgattttctttctaaaatgctttattttgcagaaaatgaattcaaacttaatggcaagtataatttcctatttgaggatttaagcacccctcaagagtacaagaaaaaattcttactaaacggaatgggtacaaggctgttaaaggaagcagaaacaactttcaaccttgggtacatcccaccacaaaacaacaatgataataaagtaagtataaatttatcaatgttctacatcgaaacactagtgaatgaattattatttttaaacaaactaaactataagaaatag

SEQ ID NO: 381880 - DNA, 1176 bp, Salmonella enterica
atgggcacgacagaatcgtctaagctcccgcgcggcgtaaccatcaggaaacaccgcaacggcgaaaccatcaatattactttcacttataaaggggttaaatgtcgtgagcctctttccaatctggaagtaacaccaaagaacattaaatacgccgagcgtacactcggcgaaattcataataagatcgaaaggggaacattcatttatgcggaatattttccccattctgctcgtttgaaaatttttggtaatgctgccgcaggcaaaacggtaaaaatgtacctagacgaataccttgaaatctgcgaaacgagaaaactttcaccatccacgattggtggatataagaaatgccgaagcgccctgtcatcacttcatatttttcccgcaagtgagttgacgccggccgcattgaagacatggatccagagccagaaaacaacattgaagactatccgaaaccaactttccttcctacgttcagctttggatgaagcggtgacggatggtgtgcttcagattaaccctgtatcactggtaacagcctcacgataccaaagtgataaatcagaggcagaaagtagttatgtggttgatccgctatcaccagcagaagttgatgctttgctatctgctgctggcaataagcagtgggagaatcttttccggttcgcgatacaaacagggctgcgtagttccgaattgtgtgctcttcgttggcgtgatatcgactttgtagggaagactgcacacgttcaaaatgccagtgtagttggcgtcatcaaaggaacaaaaacaaaagccggtacgaggaaagtagaactgactgaagaggcattggcagctctagccagccagaaactgttcactttcatgaaagatgaaactatcttcgaagatccaaaaagtaataaaccgtgggctagtgctgatgcgataagaaaaaaagcatgggtgccaactctacgaaaagcaggcatccgctaccgaaatccatatcagacaaggcatacattcgccaccagccatatcagccgtggcgccaacctattctggctagcagcccaaatgggtcataaaggtcctgaaatgctattccgacactatggtcgctaccttaaagagtatgatggtaaaagttctatcatgcagttgaataataacagtaaataa

SEQ ID NO: 381881 - DNA, 207 bp, Salmonella enterica
atgctgagcctcgattgtgttcccatctcaacttattgcaaagagactggcgaaaccccggatgccatcaacaaacgtgtgcaacgtggagtatggcgtgaaggggttcaggtgctaaaggtcgacggcgttaaggaaagatggattgatcttagtgaggttgcaaaatgggcacgacagaatcgtctaagctcccgcgcggcgtaa

SEQ ID NO: 381882 - DNA, 903 bp, Salmonella enterica
atgaattcaacaataaggatattttggagtctaaaagtgaatcaaaatccattctcattctatgattttcttggatatctaatacctggtggattttttatcctgttaatgtatttctgtggtttgacattcgatttagatattgttgttgatttaactgaattgctcaaaggtcaaagtcaaatttttggtgttttaaactatgcctcaatagtcatcatatcttacatagctgggcattttatatcgatcacatcagcatttttcattgaaaaatatatgaacgaaaagttgggatacccttcccaatatctattcaataagttatcagatgacttagaaatcgtttgtacaccatcatgttgtgaacaagatgaagatattaaaagaaaaataaaataccgcataatcaaagcagtgctattacccataacaccatgggattacgccactcaaaagttatgttattcccaatcattgccatttcaattagctaatactacatggcaaataattaaagacggctatgagaaaaagttcagactagacaatgaattattaaaagttggaactggtcttcatgatgatcttttcagattggcttatcattatgtctatgagttttcgaatcaacatcaatcaaaaattcaaaactatgttgcattatatggcttttgcagaaatatttgtttggtatttataattacattttggatatccttcctaacctttatttttcgtttagtagaaggtaattctatttcttatagtttagtttcggtactacttagttttttcttcgtctatgttttctacgtcgggtttgtgaagttttatagacgatatactttagaggtattaatggcattcgcagtactacaaagaaaagacaatattaattaa

SEQ ID NO: 381883 - DNA, 636 bp, Salmonella enterica
atgagtgaagctaatttctctttagcctcattagaggttctaagtcagatcgatcctgaagttaaggggtttctcaagcggaaatttgctgccactaatgatgatttcatcaatcagctttatatagatttagatgatgcaatgtatgtactggagactcagaagcatatgtatcaaggcagccaatggggagaagacgagctcacatctgtaataatcgctttcttaaagggcagaaattatgatgctgagcacgacacacagctaggtggtcatatcgatatcttggttaagcaccagcttggaaggtttgcttggatcggagaagcaaagttatggaatggtccggcttacatttttggtggctggaatcagctcaatgagcggtatggtaccgggacagtcagagataatcacggtggcataatcatttatgtaaaacaaaagaaatcaggagataaattctctgcctggcgtgagcatttagctgaaaatgttgcaggagcaaccatcactcttgacacgacaaatgcactccgtttttctagtgaaactttgcatcctgcaacaagtcagccatattttgttaggcatatggccgtatccttatttcatgctacaggtgattctgattaa

SEQ ID NO: 381884 - DNA, 423 bp, Salmonella enterica
atgttaactaaacacgacatatactcaaaaatcagcgacgacctaactgggccagtcagtgagttatgtcgtgaagttgttgcttttttgaccagctcagaagcaaaaccactcaaacatatcacttacatcagtttagtgaatggtacgagtctcaatgttgaatgtaacgatgcaaaggtgctgttgataaaagtgaccgactacttatcaagcaacagattgcaccttcttgatatgcactttcagttcattgagacagatgacagcgacccaataccagttgatgatcaggccctctctcatgcgctgaaaactggtgaattttaccatccaaatagcggcgaattggtcgacaattttaatcatcatttatttccttatttcactcctaccgatgctttggagcaactgcatgagtga

SEQ ID NO: 381885 - DNA, 1098 bp, Salmonella enterica
atgaatgagcaaacagtcaatttgttgaaggacattactgaacgtgtgggttggaagctgacaaaaaaaattgttggtgaacctcttggagttacatctgtaggcctcgatccatttatcgccaggttacaagcgacagtagaaacagagcaagaagccgtagctgcgcatattggcggggtttggcgaaacttgttactaagtggaacacgtttagtcaaattgtacaaactacaagccaatgaaatacaaacgctccgtaatgcgattgtatcgcttaacagagatgattccttattctgtcagaattacccctatcctctttctagggaagaactgctgacagctgatactgatctccactatttagaaactgtttcgacagtcttcaatggggtatcccttgagacgagcatacttacctccaaagcgtactacactgaaacaatcgagttggacgcgtcacatctaagtgactccggcttggtgcttcgttcgaatggcggcgagatcaagtgtaaaactagagaagtcacacaatgtttcaatactgtgatgattctacccgagctgcaactcgtagccctaactatcgatttgtcagtgatgccccgttcagaatctgaacgacagcaatttttgttagaccaattcgtaagaaatgtttctggccttacatttccatctcccatcgatctctttggcttggtacaagaaatgtacgagcaagtcgatggaagaatttctcaaatggcatttctgacatcagatggtaacacaagctctttaaaactgcgtccaggtgaaagctgcttacgtaccgatagctatcatcatgggggcgaagaggctagtcctatattgacaaaatacaagcttggtaaaatttgggatctaaccgattcagcttctcaaattttccctatagaattaatattacctggtaaacgggctatgattgataagccaaattcacatctttatgatgcaattatagacagatgttcatcagttgaacatatactctttgtaatcaacaagatgcttgaatcgttaacaagcttacaaagaaaacggggcgcagctgaagctgcataa

SEQ ID NO: 381886 - DNA, 318 bp, Salmonella enterica
atgcaaaacagcagatcgcactggagtcacagagaacccgggaagatatcaaagtggctgttgcggatgatgattgtgctgtacgccctgtgcctgccgctgctgctgaccggttgcggaagtacgaggacagtttacgtacaagttccggcaataccactaccggcgagtctgaccgctgaaaccccacaaccggttattcctgatccactgacctacggtggcagcctagatttgaatgccagtctgttatcagcgttggggcagtgtaaccgggataaagttgatttaagggaaattaataaacggaaattataa

SEQ ID NO: 381887 - DNA, 858 bp, Salmonella enterica
atgttaaatcctatcagcctattttcagtaaaattaacctgctaccacaatgatagagaaattatggttggaacaggttttctttatagtcatgacgattataaagacccaatcttaataacaaactaccatgtcctaacctgtagagagcccaaaaacccagcatccttaatggagggtataggatcctcaccaaataaaataaaatgtcacatttgggctcctgatgggaagtcagcccatacattttccattgaaataaatgatgagtccgaatggcttgaacacccatccagagctgatggtgtagatattgttggaataccaataatatttcgtagtgatgtagcttatacaactcaaaatgacattaaaaatactgacaccatacctcttcatgttgcatcagacctatctattgtgggttatccattcggcttaactattaataaatacttgccaatatggaaaaaagggctggttgcaagcgaaccagatgttaaagtttctgggcttgattgtttttatattgatgcaacaacaaaagaaggcatgtcaggatctcctgtattttctcatgaatactcaactgaaatattagtttcccctgaggtacatgccatgtttcagcagagggagcaaggagaaatatctgccttggaattaatcaatgcaatgcctcaaaacttaatgaataagactattcaagttaaaaaattcaaactcgtaggtgtttactcaggtagagtgacgatcggcacatctatgccagatataggtatagtttggaagcttagtctaattgaggaaatgctatcgtcccgaaactttgtaaaatcagaatatccgcctttctaa

SEQ ID NO: 381888 - DNA, 15483 bp, Salmonella enterica
atgggaaataaaagcatacaaaagttttttgccgatcaaaattctgtaattgatttatcttctttgggtaatgccaaaggcgcaaaagtttctctttccgggccagacatgaacattacgacgccgcatgggtcagtgatcattgtcaatggcgctctttattcaagtatcaaaggtaataacctcgctgttaaatttaaagataagactattaccggcgctaaaattctgggcagcgtagatttaaaagatattcaactagagagaattgacagctcattggttgattctgctcaggtagaaaagaaaggtaatggcaaacgacgaaataagaaggaagaagaggaattaaaaaagcagcttgacgaggctgaaaacgcaaagaaagaagctgataaggcgaaggaagaagctgagaaagctaaggaggctgcagaaaaagcgctcaatgaagcgtttgaagtacagaactcgtcaaagcaaattgaagaaatgctgcagaactttttggctgacaatgtagcaaaagacaatctggctcagcaaagcgatgcttcccagcaaaatacacaggctaaagcaacgcaggcttctaaacagaacgatgctgaaaaagttcttcctcaacctattaataaaaataccagcactggcaaaagtaatagcagtaaaaatgaggaaaataagctcgatgccgagtctgttaaagagccgcttaaagtcacattagcgcttgcggccgagagtaacagcggtagcaaagatgatagtataactaattttaccaaacctcagtttgtaggtagcactgctcccaatgccacggtcattattaaaattaatggtattgctgtcggtcaggctgtagcggatagtttgggtaacttcaccttcactgcgcctgaaacattgactgatggaacatacaatctggaggcagaggccaagactgctgatgggagcggtagcgccaaacttgtcattactatcgattccgttaccgataagccaacatttgaactttcgcctgaaagtagtgtgtctggtcataagggcttaacgccgaccttgacgccttcaattgttggtacggcggaagagaatgccaaggttgacatttatgtagataataaactggttgccagcgttgatgtcgataaagatggaaactggagttatgaatttaaagataatgaattatctgagggcgaaaatagtataaaagtcgttgccgtagataaggcaggtaataaaaacgaaacgacggatagtatcataaccgacaccattgctccggaaaagccgacgattgagctggatgatagtagtgattccggcattaaaaatgacagcattacaaatagcaccctgccaacatttattggtgtggcggaacccggttctacagtctctatttatcttggacttaaacatcttggtgaggtcattgttgctaaagatgggacatggagctatacgcttactacgccgctcaaggatggcgaatacaatataacagcaacagctactgatattgccgggcatacctcagcgacggcaaatctgccttttactattgatacccgtatcagctatttcagcgctgagattgaaactactgatgatagcggtattgttggagataacgttactaacaatactcgcccaacctttacaggtaaaactgagccaaatgctattatcagtgtcataaatagtgagactggcgaagaggttatttttaaagcgaatgacaagggcgaatggacgttcaatttcacttccgactcagtggaaggggttaacaatcttacgttcactgttgaagatgtcgctggcaacaaaaaggatttttcctttagttacgttatcgatactgttgcccctgtacctccgacagtttctttggaggattttgttgttttaccgaatggtataattttatcagggaatgatttaccggctttagtcggtacggcagagccaaagtctaccatcttattgatgcgagatggtaaattatatgacagcattgaggttgactcaaacgggacctggaattatcagtttagtaataaatttcttcagggtgcctatgatattgaaatcatttctcaggatgccgccggtaataaatcctctactgttaaatattcttttactattcaaactgaagttgtacctccaaaagcggaactcgatgccagtgatgattccggtgcaaaaggcgactggattaccaataaacataatgctctgacattactgggaacagcggataggtttgctaccgtaaatatccttatcgatggtaaaacgataggcgtgacgactgcggatgcagacggtaactggaattttgatatttcccgaaatctgtctgacaatgtttataagattacggttgaatccatcgatcctttaggaagaacgtcatctgtagattatcagcttaccattgatagctttacgccgatccctactgttatgttgcatgatagcgctgattctggcgttaaaggcgatatgattactaaaattaatacgccgttgtttaccgggatggctgaagctaatgctaaggtttccatctatgttgacggtgtgttaagtggcgaggctattgctggcgatgatggtgtatggaattttcaatttaccacagcgttatccgatggctcgcatgacgtaacggtaaaggtagaagatattgccggtaatactgcctcctcatcagcgtataatttccaaatcgtaacgcaaacacaaaaaccaacaatagagttggtcaacgatacgggggttgataatacagaccatattattaatgaaaagaatcctgcactgacaggaaccgctgcaccctattcaacggttaaactctatattgatggtgcgctgatcgctgaggtcagaacaaataaagatggcagatgggagtatactctaaaagccgatcaaggtttggttgatggcgatcatagaataaccgcttcagttgaagatatcgctggcaacattgcccattcggatcctttcttaattagcgtcgatactgctatttcaataccgatagtttcattgagcccggattcagattcgggaatttcagatgataatttaacgaatatcgttaaacctaccttgcacctaaaagatattgatccggacattatcagtgtgcaggtatgggatgccgcgtctgatacgcagatcggtgttgccacgcaacaacctgatggttcatgggcctatacctttacttcagatttaacggaaggcttgcatcaggtttatgtcaaggttgaggacattgcgggtaataaagcgaacagcgcggtattcgattttactatcgataccacagtatcaacgccggtgatttccctgctttctaaggatgatacgggggttacaggcgataacctgaccaacatcaataagccaggttttgctatttccggtgttgatgccgatgcgcatcgggtcgtcgtacaggtgatgcacaatggcgtgagcgaagagatcgaactttctcacctcaatggtagttggttatttacaccagggaatacgtgggcggatggcagctacacgttaacggtgaaagtagaagataaggcaggaaataccaactactcagcaccgctgacggtcgttatcgatacccaaatcgccattgatggggtggaactggtcaacgatagcggcgtgaaaggcgataatatgaccaacgacgaccgtccccactttcgtgtgacggtaccgaccgatgtcaatgaagtccgtctgagcattgacggtggtaattcgtgggttcaggcaactccgggcgtggcaggaagctgggagtatatctggccgacagacctggcagatggtcaatacacgctaacggtggaagcgactgataaagcaggcaatacagtgacgaagaccatcgatttcgcggtggataccacgctgtcagtgccggtcatcgtactgaatagcgcggacgataccggtgtccagggcgataacatgacgaatagcacccagccgacattcgccctgcagcatattgatgatgatgccgttcgcgttacggtcagcgtggagcatggcggcgtcaccaccacatttgacgccacgaaaggcgtaggcggatggagctttacgccgacaggggcgtgggcggatggtgattataccctgagtgtgtcagtcgaagataaagcgggaaacaccagccattcggcatcgctgacggtgacggtggacacgcaaatcgccattaataacattgaactggtcaatgacagcggtattcccaacgataatctgactaataacgtgcgtccgcacttccaggtgacggtaccgacggatgtcaacgtggtgcgcctgagcattgacggcggcaagacgtggttcaacgctacccagaacgcgacgccgggcgtctgggattatatctggccggatgatgtggccgacggaggctataccctgacggtagaagcgaccgatgaggcgggaaataagacaacacagacgctcgatttcaccatcgataccactctgtctgtgccgaccctctcgctggacagcgcagatgacagcggcatcgcgggcgataatatcaccaatgttaaaacgccgggctttaccctcaacaatattgataccgatgtcagccgggtaacagtggaggtaatgcacaatggcattaaacaggaggtgccactggttcagaccggcggacagtggcgctttgcgccgaccagcgactgggcggacggcgactatatcctgacggtgaaggtagaagatagggccggaaatgtgaagcagtccgcgccgttgacggtgacagtggacacgcatatcgccattgaccgtattgaactggttaacgacagcggtatccccggcgataatctgaccaatgaagcgcgcccgcactttcaggtgacagtaccggcggatgttaacggtgtaagactgagtattgatggcggcaaaacgtggtttgacgccacgcagagcgcgacgtcgggcgtctgggattatacctggctgacgaatgtggctaacggccctcacaccctgatggtggaagcgtccgacaaggcgggaaacaaaacgacgcagaaactggacttcatcatcgataccatgctgtcagaaccgacgattaccctggacagtgcggatgacagcgccgctggcgataacatcaccaacgttaagatgccaggctttaccctcggtaatatcgacgccgacgtgaccaaagtggtggtgacggtggcgcatgatggtaagaaccaacagatagagttgattaagaacggcggtgtgtggcgctttacgccgggcgcagcctggaccgatggcgactatacgctgacggtaaaggtagaagataaggcgggtaatacaaattattctgcgccgctgacggtgactatcgatacgcaaacgtctattgatcgcattgaacttcttaatgacacgggtattgtcggggataacctgaccaatgaagcacgtccacagtttcatattacggtaccgacggacgtgaactctgtgcaactgagtcttgatggcggcatcaactgggttaacgcaacgctgacgcccgacggcgtttgggagtatatatggccgacagatctggtcgaaaatacgtataccctgacagtgaaagcaaccgatgttgcaggcaacacggcgacggaaacgctcaattttatcattgataccacattgtcgacaccgaccatcacgctggatagcgcagatgatagcggcaccgccaacgataataagactaacgttaaaacaccgggttttattatcggcggtattgattctgacgtgactcaggtcgtcgtgcaggtgatgcgcgatggtcacagcgaggaggtggagctgacgcagactaacgggcagtggcgttttgtacccggcagcgcgtggactgatggcgactatacgctgacggtaacggtgaaagatgaggcgggtaatattcgccactcagcgccgttgacggttaccatcgatacgcaaatcgccattgaccatattgaactggtcaatgacagcggtattcccgacgataatctgaccaatgaagcgcgcccgcacttccaggtgacggtaccgacggatgtcaacgtggtgcgcctgagcattgacggcggcaagacgtggttcaacgctacccagagcgcgacgccgggcgtctgggattatacctggctggctgatgtgggagaggggaagcataccctgacagtggaggcgaccgacaaggcgggaaaccagacgacgcagaaactggacttcatcatcgataccctactgtcagaaccgactatcgtgctggacaacacggacgacagcggaacaaaaggcgataacctgaccaacgcgaataagccgacgtttttactgggcaatattgacgcagacgcgcggtatgtcacggttgaagtgcagcatggcagcacgaaagaagtgctgacggccaccaaaggcgcgaccggcatctggagcgtgacaccgaccggcacatgggcagatggcgactatacgctgacggtgagggtggaggatgaagcgggtaacgtaaaatactcggcgccgctgacggtcacggttgatacccaaatcaccatcgatgttattgaactggttaatgataacggtattcccggcgacaacctgaccaatgacgttcgtccacacttccgcgtcacggtgccaggggatgtcaacgaggtacgtctgagtatcgacggcggtaatacgtgggttcgtgcaacacagggcacggcagggatctgggattacacctggccgaaagatgtgaccgacgggctacataccctgacggtagaagcgaccgataaggcgggaaataagacgacgcagacgctcgattttaccattgatacccggctgtcaacgcctaccatcactatggatagcagggacgatacaggtgccattggcgatcatattacgagcgtcaaaagaccgggctttaccattggcaatattgacgccgatgcgcaatcggtcattttgcggatcacacagggcggcaatagccaggaagtgatactaacccaggttggaggacagtggcgctttacgccagatgctgactgggcggacggtagctatacactgacggtagaggtaacggataacgcaggaaacgttcgtcagtccacgccgctgatagtgacggtagatacgcaaaccagcattactgatattacattggtcaatgatcatggcgtgccggatgacaatctaactaacagcacccgtccgcagtttgagatcacggtgccggcggatgtgaattctgtgcaactgagcattgatggcggcgcaaactgggtgagcgcggcgcagggtatcgaaggcgtctggggctatacctggccaacggatatgggcgatggaaaacacaccctaaccgtcatggtcaccgacagagcgggcaatacggcgacgcaaacgcttgaatttttcatcgacacccggttgtcgacgccgaccattgcgctggatagcacggatgataccggtacgcctggcgatgatatgaccaatcgcacccggccgacctttattctgcagaatatcgattcggatgttatcaacgttacagtcagcgtcacgcataatggaacgacaacctcgtttactgcgacacagggggctggaggatggagctttacaccgccagcgccgtggggcgacggtgattatacgctgacggtgacagtggaggatcgggcgggaaatacgcgtccgtctacgccgctgacggtgacagtggatacgcaaatagccattgatcatattgaattagtcaacgatagcggcgtccctggcgataatatcacaaaacatgtgcgtccgcagttccagatctcggtaccggatgatgtggaaaaggttcttctgagtattgacggcggcacgacctgggttactgcaatcaagagttcgacggctggcatttgggattacacctggccgacggatatgccagagggacagcataccctgatcgtggaagtgactgacggtgcgggtaataagatgacggggacgctcgatttcactatcgacatcacgttgttgacgccaaccattgagctagcgcccgatcaggataccggacagaataagaacgataatctgaccagtgtcactcagccggtatttgtgttggggagtatcgataaagatgttcgacacgtggaattgagtattgagcataacggcacgtttaaaacggtggtactcaccgaatcagccgacggctggcgttatcgaccggattctgctttggcggacggtagctacacattcaccgtgacggtaacagatgtggcaggcaaccagcaaacatccgcgcctttaaaggtgacgatagacggtacgttgactacgccggtgattgaactggcagctggcgaagatagcggtactgttggcgatcgcctcaccaatcacgatcggccggtgttcgacatacgccaggttgattctgacgttacgcgcgtgatggtcaaagtaacttacaacggtaaaacgcacgaggaagcggcggtattcaccaatggtcaatggcgctttacgccttctgcgagctgggctgatggctcatatcagttagccgttgtggtggaagatctggcggggaatgtaaaagaatctgcgccgttagaggtgcgtattgataccacgacaaccattaacaatatcgtattgcttaatgatactggcgtgcagaatgatcaattaacgaatgttgccaaaccgtcattcagaattgacgttcccggtgatgtcatccaggtacgcgtaaccctggatggtggcgctaactggaatgtgatacgcaaaaatgccgacggacagtggatttttgacagcccgaatactctggttgacggcacatatacccttcgcgtagaggccacggatgaggcaggtaatattgcgaataaagatttagtatttaatatcgatactaatatacaggttccgactattgctttagacgcaggacaagataccggagcgaatacagccgataatatcactaatatttcacgacccacctttacgattggtaatgttgaccccgatgttattaaagtcgtggtgacgattgatggtcatgattataacgcgactaaggttggggctggttggcaatttacaccaggcaatgccattccggatggttcttataatattaccgttacggttgaagataaggccggaaataccgcgacatcgaaaccattacctgttgtgatagatacgacggctgaaattgaaagcgtcacgttggttacagatagcggtgatagcgatgtagataacattaccaaagtcgacaagccgcagtttagtattgttaccgctgatgatattacccatgtgcgcgttaaaatcgataacgccgctaattggattgaactcacaaaaggaggggatggccgctggatatttaatgtcggttcggcattacctgatgggaaacacactctcttggttgatgtgactgatatcgctggcaacgttgcgcaagaaacgctgcagtttacgattgatacgactctgcgagagccgacaattgtactcgatcccacccatgatactggtgatgatactaatgataatcttaccaggattaacaaaccggtgtttattatcggtaatgtagataatgatgtatcacacattgtggttcatattgatggtcgggattacaccattgaaaacacaggggggaatttaacctttacgccggatcaaccgctgtctgacggtcagcatacgatctctgttaccgtaacggatattgctggtaataccaaaacatcggccgaactgcagattgaaatcgacacgcaggttcagattgacagtgttacgttaacaacagatagcggcgtcaacgatcacgataatgtcaccaatgctacccgtccctcttttgaaattgcaacgcctgatgatgtgacatcggtgctggtttctttcgatggcgtaaactggacgcctatcagtaaaaatgcggccgggcagtgggaatttactgcaggtagcgcattgcctgatggtcattatactctccatgtccaggcgacggatcgggcaggaaatacggcaaattccacgctgggcttcaccgtggatacgcagattgacggcctgagcgtcgtgatgctggatgacgccggaaaggattctacggatggtattacgaatattacctctccacgttttgaaatttcagccagagaaccgctgcagagcgtgacggtaattttaaacgggaaatccagcacactgactcagggggcaggtaataaatggctgtttacccctgatacaccgttagtggatggaacttacaaaatagaaatagtggctgaagatatcgcaggtaataaaattagcaaagaggtatcattcacaatagacactattgtttctgatcccagtattgatttgctggatgcggatgatactggcgaaagcgctgttgataatattacgagtgtcactaaaccacgtttcgttattggcaatgtacccgccgatattgatactgttgtaatcagaattaacggcgtttcttatccggttacggcaaatggcaataacctctgggaatttcaggttcccgttgcgttaaacgatggcgtatatgaagccgttgttgtcttcagagatattgccggaaatacttctgaaactaagctgccctttaccattgataccacgacaagcgtcagtgtcagaatggagccagcgtctgataccggcagctccaatagcgataaccttacgaataagcaaaatcccaaattcgaaggtactgcggagcctaatgcgaaactggtgattaccattgttgatgataagtcaggtcgggaggttctaaaacacacgattacggttggcgccgatggcaactggagtgtgacgccgaatatactgccggatggcatgtataccatcaacgtcgtcgcaacagatgtcgcgggaaatactgcgcaaacgcaggaaagattcactatcgatacggttacgatcgatcctaccattcgcctttcggatccatctattgatgatcagtatgaagcaaccagcctgcgtcctgagttcaaagggctagccgaagcgttctcgacgattatgattcagtgggatgggaaagtggtcggctcggcaaacgccaatgcgaatggcgaatggagttggacgccgccatcagtattagcgccaggctcctatgttgtgagcattgttgccaaagataaagcgggtaatgaatcgtcgcaggtcgactttcctgtcgtaatacctgttattgatgtcacgcctccaaccataaagctcagcgaggagagcgatagtggtgccttaggagactttaccacgaataataaaacgccgaccctggttgggaacacgttacctaatgcgattgtgagtatttatgtggatggcgtgaaggtcggcgaggcgacagcggatacagcgggtcgatatactttccagttatcggaaatgaaagatggccattatgtcgtccaggtgggtatcgtcaaccctcgcgataatagcgaactgcgttccaccgccgttgatgtcactatcgataccgaggttgctgaactggtatggaatatatctggaatgcatgagggcggatatatcaatacggtgacgccggagattggcggcaccagtgagccaaacagcaaaatcactatctttgtgaatggcgttgaaaaagcgattgcttatacgacaggcgcaggacattggggcgtagtattacctgctttgggtaatgacggtaattatgtattaacgtttaaagttgaagatgttgccggcaatatcagagagtttggtccgcagaatgtgatactggatacggtaatttcgccgttaaccgtggtattacgcgaagctgatgacagtggcaaagttggcgactggatcaccaataaatctcatgtcaccatcgatggtactgccgaagccggaagtactttaaccatcaggaatccgcagggggtggttattgctaccctggtggtaggcaatgatggtcgatggagcgcagaattagatctgcgtgaaggtagtaatgcctttgtcgtggtatcggaagataaagcgggcaacagccaacaaaaagatatcctgatagaacatgatacgcagattgaaatcagcgatatttcattaagtcgggatactaatagcggtgataaatatgatctgattaccaataataagtctccggtactggttgccatgaccgatcccggcgcgacggtacaggtttatattaatggtgtgttacaaggcacagtagaggcgagttcgtcaggtaatattagctataccatgccggcaaatagcgccgacggcgagtatcaggtgcaatttgttgctacggatactgctggtaaccgggttgagtctgcgattacaaccgtgacaatcgattctcaaattgctgtctttgacattgatgaagattcattaccggccctctctaataaccgggcgttgtcagtctcaggtgtcggggaggcaggttctcaggtcagcatctttgtcgatggtaaattagtcaacgttgttatggttgaggctgatggcacatggcgcgcgccgatactgttgcaagatgatggtacgtttaatattcatttcagcattactgacgttgctggcaacactgaagtgagcaaggattatagcgtggatgtcgattcatcaaccgacttcccaacgctcaaccttgaagatgcgagcaactctggttcacttgacgatctgattactagtcacaacaagcctgtgttagttggcaccgcagaagcgggagccacaatccatatttatgtggatgaaaagatcgtggcaaatgttcttgtgcttgaagatggaacctggtcctatcagtttgataatgcgttaaaagatggtgaatattctatccgagtggttgccgaagacccggcaggtaatacggcagaatcgcctcgcttactcgtcacgatagataccagtacgtttatcgataatcctgttatgatggcaggttctgataacggtattttcagtaatgatagtataacgagtcaaacccggcctgcgtttagtatttatggagaaatgaaccagagtgttcagattttcattgatggggtgttagtcgatacgatcacggtgacggacagaaatcaagtttatcgacctgagtcaccgttgggcgatggttcccatagcatttattatgttatcaccgataaagcaggcaacacggctacctcgaaaacgctaaactttactatcgataccttaaatacgacgcctgtcgctattgattctatcggcggacaaacgttagcagagatgaccggtagtgatggcaaaatatatataacggacacgacacgtaacttattgtttagtggcagtgccgagcccaatagcaaaatagaaatcatcattaatggcttaaatgtgggggaagtttgggttaatgacaaaggccactggcagatgccggtgaacccgctttatttcacagaaggccagctggatatcactgttaaatctacggaccgtgctggtaacgtaaatcaggaaaagtattccatttgggtcgatacgcatatccaggtatttaccagcgagcttgatgacaataaatcatcatcgaaaacggactggtggagtaatagctccactattaccatgagaggtatgggggaaattggcgctacggtatcattaatcgtggcaggggtcacgctggcaaccgctgtcgttgcggctaatgggcagtgggagttatcgaccgatcagcttccggaagggaaatacgatatcactttgagtattgaggataacgcaggcaaccgtaaggaagaggtacatgaaatatttattgatcgaacgccgccaaacgctccggtcgtaacgtattcagatattgtcaacgatctaattattatgcaggggacggcggaagccaaatctcagctaataataaccgatagtaatgggaatacttatacgctaaccgttcctgataatggtaaatggagtatggcgatcccgtatccatcggaagggaagtttaccattacgagtgtggatgcgattggtaaccggagtgatgatgtccctctcgatatcatgaaagaggttcccgttatttcattatctccagactcagacagtggtacggtgggcgataatattacgcgagataatcagcctacctttattatcgggaatctggaaagcgatgttgtggtcgttcaggtcgatatcaatgggaccgtatataatgctgaaaaaaatgccgatggcgtttggttctttacgccaggtacaccgttagctgatggttcctatacgatatcggtaatcgcaagcgatgccgcgggtaatcagaaaaactcgttacccattaccgttacgatcgacagtacgctgaccgtgccggagattgcgctggcagcaggtgaaggcaatggcgcttcagacagcgataacgtgacgaatcacaatcacacccagcctaagttcacgctgcagcatattgatgctgacgtgaccggggtgaccgtaaacgtgacgcataatggcgtgacagacatctatcaggcgacgcaaggcgcggatggctggaccttcacgccgccagccgcctggaatgatggtacctacacgctgagcgtgacggtggtggatcgcgcggggaactcactgcaatctgcttcgctggaggtgacggttgactcaacggtgacggtaacagcggatagccagcatgacgatgcgagcgatgacgccacgccaacagcggttactccaccggagtctgaaacagtgaatgccgaaagcgctacgcatcttcgtacagtgccgtctgcggcggaagaaagcgtggtgaaggagacagcctatagtattacattgttaaacgctgactctggggatgaaatagatcgttcaattagtcagacaccttcttttgaaatatcagtacctgagaatattgttaatgtcagtgttatgtttgaaggagaagagtttactctgccgataactaaccagaaagcaatattcgaagttccgctatctttggaagatggtgaatatactatggacgtgaaattccttgataaggacgatgatttcctgattaaggagaaaacattctcagtcgatcactcctcggcggatattgtgaacgcaatgaatgcaagaggaaagaccgaggatgatattaatgattccccttcaacgagttctgtagggcacaacaataacggcgctattgaagttttcgccgttaatgaagttacgttacctgtagataatcaagaagaacacgcataa

SEQ ID NO: 381889 - DNA, 774 bp, Salmonella enterica
atggacatgaaaaacaagtcagccattatcgacatgaaacaggccaaaataattgaaaagaaatataatgaaattaaaatcaatattaataatgttgattctcaatttaaaagatacaagttattaagcttaaacgaaaacattttaatatgtaatgataaagatagtcaaacaatagtagacaaacgaataggtgcccatttttggatacctgtcccacgaaaattattaactacacttcaggctttaatagacttagagcttatcactaacatttcatttagaatagataacataaccgactacattccattttttgaagacatggaggttggttcacctctaaagttgaatgtggcagatctcccctcactttcaaaattttattctattgataactacgcgaatagcttttgggttcatcatgattcaagagagagaagtatcacttttgaagaattaagagatgactttcagatggtaaatgatgatgtcattacacaggttattcaccttgagtatttcaaccttaataatgtattttatatacaacatttagaccatgaactcatatcctatacgttagaacaatatgaggaaaaattattagattccaaaatcaaaggctataaaaaaacaaagtcatttaaaattgataatgccaaaatcccttttatgtttaagaacaataacgagtttttattatttcaggttctagactcatattttaaaaactccgacttaatttcagaatatttcaacaacattcaataa

SEQ ID NO: 381890 - DNA, 573 bp, Salmonella enterica
atggctactattgggtatattcgggtgtcaacaattgaccaaaatatcgatttacagcgtaatgcgcttactagtgcaaattgtgaccgcatttttgaggaccgtatcagtggcaagattgcaaaccgccccggcctgaaacgagcgctaaagtatgtaaataaaggcgatactcttgtcgtctggaaattagacagactgggccgcagcgtgaaaaacctggtggcgttaatatcagaattacatgaacgtggagctcacttccattctttaaccgatagtattgataccagtagcgcgatggggcgattcttttttcatgtaatgtcagcactggccgagatggagcgagaattaattgtcgagcgaacccttgccggactggctgccgccagagcgcaaggacgactgggagggcgccctcgggcgatcaatagacatgaacaggaacagattagccggctattagagaaaggccatcctcggcagcaattagctattatttttggtattggcgtatccaccttatacagatactttccggcaaatcgtataaaaaaacgaatgaattaa

SEQ ID NO: 381891 - DNA, 516 bp, Salmonella enterica
gtgcgccgggctggtggtgtaagagagcgtgccctgggcgtgtgcgccgtggctgcgcaccgcctgcagggcggctttcatattgcgcgggtcgttcatggcatcaaacacgcggaacacgtccatgccgtttttcaccgcgcgttcgacaaaacgctccaccacgtcatcggcgtagtggcggtagccgagcaggttctggccacgcagcagcatctgcagcggggttttgggcatggcttttttgagttcgtgcaggcgcagccacgggtcttcgccgagaaagcgaatgcaggcgtcaaaggtggcgccgccccagcattcgagggagccgtagcccacgtcatcgagcgcggcggcaatgggcagcatatcgtcaaggcgcaggcgggtggcgaacagggactggtgggcgtcgcgcaggacgacatcggtaatggcaatagtcatggatccctccgggaattaagcgttaaggcggtgatggtgaatggcggcggcaatcaccggctttaa

SEQ ID NO: 381892 - DNA, 333 bp, Salmonella enterica
atgatatatgtgcttaatgccgatacctgtattcttcaggccaacaataaaagaataacagatatctttatgacaaagcataaaagcggtgtagtaaaatattgtggtaaagatatggaacggtttcagttgttcttcgaagctgctttgttcgcagtagctgaatggcagatacaggttgaggcagaaataatacattatgatgaaatcgaagtgatggatttttttgaacgtctcgattcatatgaggcagggaaactggcggaatcaattttgatattcaatgatatcattgtcatgagcggtaatgaaaaagtgtgtacgtatttttaa

SEQ ID NO: 381893 - DNA, 342 bp, Salmonella enterica
atgaaaaagtgtgtacgtatttttaaggtgaagtatatgagtgatgaaagtaaaaaaacaagaacagaaaaaacattaaggcaaaaggtcgcttttgctcagcttgaactaaaccgccttaagtctctggaaaaatcagaacgaaagaaagttgaaacaaggctaaagattatacttggtgcagaagtggctaaggctattaattgtagtatcgaacaggtggataaagaacttgttatggggattttgctttcagcatctgacctgaatgatattgaaaaaataacgtatataaaagcaggcaggaagtttctcgcgcaaatggatggaagacaaaaataa

SEQ ID NO: 381894 - DNA, 1242 bp, Salmonella enterica
atgaatactaatgtctatgagaacaccgacagcgaaactatcaccccgctcaacaagcggcgtattttgcctgttttcctgcttgtcggcctttacgccgccagtaccgcggctgtaatgtcggtactgcctttttatatccgcgagatgggcggttcgccgcttatcattggaatcatcatcgccactgaagcttttagccaattttgtgcggcgcccctgattggccacctttccgatcgcgttggccgcaagcgaatactgattgtcacgctggctattgcggcgataagtttactattactcgccaacgcgcaatgtatcctgtttatcctgctcgcccgcacgctttttggcattagcgccgggaatttgtcagccgccgcagcctatattgccgattgtacgcacgtcagaaatcggcgtcaggcaatcggtatcctcacaggctgcattggtttaggcggtattgtcggggcaggcgtttccgggtggttatcgcgtatcagtctgagcgcgccgatctacgccgcctttatacttgtccttgggtctgccctggtcgcgatttgggggttaaaagacccttccacaacatcacgtaccacagataaaatagcggcgttctctgcccgcgctattttaaagatgcctgtccttcgcgtcttaatcatcgtaatgctttgtcatttcttcgcctatggcatgtactcttcacaattacctgtttttctttctgacaccttcatctggaatgggcttccctttgggccaaaagcgttaagctatctgttaatggcggacggggttattaatattttcgttcagctatttctgttaggttgggtgagccaatatttttcggagcgaaagctaattatcctcatcttcgcccttctttgtactggatttctcactgcgggtatcgccacgaccatacctgtgcttgtttttgctatcgtttgtattagcatcgctgatgcgctagccaaacccacttatcttgccgccttgtccgtccatgtatcgcctgcccgacaaggtatcgtcatcggaacggcgcaggcattaatcgcaatcgctgattttatatcccccgtattgggcggatttgtcctgggttatgctctgtatggcgtctggatcggtatagctatctctgtcgccattattggtctggtgacggcaatgatttacctttcaaaaagttcagtgctaatagtgaaaccagaaacagaataa

SEQ ID NO: 381895 - DNA, 528 bp, Salmonella enterica
atgttcccactcaatggagaatataattcgtgtcagatatcagctagcgaagatatcataattattattgatggacgagttttgattcagggggtctggaaaggttttaaggcgctcatgcagcattatccacatgctcgtcgaatctggctcacgcgcagagatattggaaaactttatccacatggctgcgatagagatcctgatatcgatcccgatttggcaaagcctgtttttattgagcatttcattaaatacgcttgtgcaaacgatgtagcggtcggtgaaattgcgccgttgacaaaaaaggaggaggagttgttatggcactttttatataaaaagtcgatgagtcagatcgccagtagctatggcatgagtcgtaagactttgtacattcatagattgcgtatctgtcgtaaatatggcttcaaacgcttttttcatttgctatttatttaccaaagaagtcgccatatcttcgcatctaaaatttgccgtgtagacaaaaacgccgatcaggcttga

SEQ ID NO: 381896 - DNA, 1458 bp, Salmonella enterica
atgaagatcacttttacaggctatcggcagaccgccacgctggcgacgcttgctttcgtcaccacgcttgctggctgtacgatggcgccgaagcacgaacgccccgcatcgccgactgcgatggtctatccctacgcaacgtcaaccgtttctggcgcgccggatgccgctgacattggctggcgtgatttcttccacgatccgcttctacaggaactgattgcgatcgcgttacgcaataatcgggatttacgcaaggcagggctcaatgttgaagccgcccgggcgttataccgcattcagcgcgcggagatgctgccgacgctcggcatcgccaccgccatggacgccagtcgcactcccgccgatctcagcgtcatggacgagtctgagattaaccgacgctacgaggcggctggggcgacgacggcctgggaactggatctctgggggcgagtgcgaagccttagcgaccaggcattagccgcctatatggcgcttgatgagacgtacattgcggcgcgaatgagcctggtttccgaagtcgccagcgcctggctgacgctacgggctgaccgggagctgctgcgcttaaccgaggatacgctggccgcgcaaaaaagttcatacacattgacgacccagcttgcccggacaggtaacgccacacagctcgatctgcgtatggcggagatcgcgctgcgttctgccgaaatcaatcgcgcggcgtatacgcgacagttggcgcgggatcgtaacgcgctggaattgctgttgggccagccgctcacgcctgaactgtcgcgtcgactaaacgaagcggtcacgcttacagaaggcgcgatcccgaccacactgccaggcggattaccgtcagatctgctggtacgccgcccggatattcgcgccgccgagtacaggctgcgcggcgcaaacgcccggataggcgcagcgcgcgccgccttcttcccgaccatcagcctgacaggctcggcgggaacggccagcgcgtctcttagcggactctttgaaccgggatcgggaagctggcgttttctaccgcaaatcaccttgcctctctttcacggcggcgcattacgcgctgacctggatagggcgcatgtccaaaaacagattgaaatcgccaggtatgaaaacgttattcagcaagcctttcgcgacgtggcggatggtctggcgggacagcgtacgctgaatgaccaggtgcaatcagaacaacgcgcggttgaagccagtcaaatcgcctatgagctggccggactccgttttcaggaaggcgtcgatgactaccttacgctgcttgatacccatcgtatgctttatggcgcacaacagcgcctggtacgcacacgtctcatgcaacagttaaatatcattaacctgtataaagcattaggcggcggttggcgggaatacagtgagaaaaagcaaggttag

SEQ ID NO: 381897 - DNA, 567 bp, Salmonella enterica; identical to SEQ ID NO: 375953

SEQ ID NO: 381898 - DNA, 708 bp, Salmonella enterica
atgatagccggtggcaagctgaataaaaaacagctgactgaattacgtaaggcgctggccagtatggagttgccaccgcagaagcgccagcggctgatctggcgtctggcgaaatatggcgtaattgctgcggcaaaaagacatgttcgtaaccaggaatccccggacggccagaaatggccgggacgtaagacaaaacgcaaagggaagatgctgcgtaacctgccaaagctacttcatatccgtgaaatgcctgagattcaggccgtacggatctatttgcagggcggcgggtaccggaacggggaaacgccggttccggcaggaaccgtaggttatgcgcaacaaaacggaatgcgggtaaaggtcagccgcagcagtcagccacgtaaggcggacgccggaaaaatggcgacacctgcccaggctaaaaaactgcgtgcgctggggtatcgggtgagaaccggaaaacgctggaaaaagcccacgctgggcgatatcacgcggacgatgccatacagccaggccggattactgattcgaaagctgagtggtaaagcagtgaaaaccagctggactgtggatcttcctgcccgcgtatttctgggcatgaatgacgatgaatttgataaagcgctggcgcgtcagcttcaggctataggctttggctggaatgtaaaggcgcaggatattaaggggaaaacatga

SEQ ID NO: 381899 - DNA, 507 bp, Salmonella enterica
atgagccagacgcagatccaaagcctgaccgctttttttcaggagaacgttccgccgcgggcgatgcagtcatttgacagcgtactggatgaaatgaagttcatccccgccgcgaaggattacgggctggggcaatatcgccaggcggttattcggtatgacgcagttctgagctgggcgcgttttccctatcgcctgtgtccgccgcagttacttatgtccttactggcggcgtggctggacgatgcagacagagacctgctggatgaagtcgggctgagtgaagccgaacctgactgggatgtgtcggtggaagatgaggaaaccgccactgtggtgctgaccgttccgatggtggaagaactggtgatcaggcaggacgaaaacggggctattccgtggcgtggtgaacgctggtcactggcagatcctgaaatctggacggcgttaactgccagcattttcagtgtggatgaaaccggggcgccggtgagcggggaaatatga

SEQ ID NO: 381900 - DNA, 387 bp, Salmonella enterica; identical to SEQ ID NO: 377287

SEQ ID NO: 381901 - DNA, 1350 bp, Salmonella enterica
atgacagagatcgttgtttccaaatttggcggtaccagcgtcgctgattttgacgccatgaaccgtagcgcggatatcgtactttccgacaccaatgttcgtttagtcgtgctttccgcgtctgccggcatcactaacctgctggtggcgctggccgaagggatggagcccggcgaacgtttcgctacgctcgacgccatccgtaaaatccagttcgatatccttgatcgtctgcgtcatccgaatgtcattcgcgaagagattgaacgcctgctggaaaacatcactattctggcggaggcggcatcgctggcgacatcggcagccctgaccgatgaactggtcagccacggcgagctgatgtctaccctgctatttgttgagatcctgcgtgaacgcgacgtacaggcccactggttcgacgtgcgcaaagtgatgcgtaccagcgatcgctttggtcgtgcggaaccggacgtcgcagcgcttgcggaactggccgcgcagcagttgctcccgcgcctgagcgaaacgttggtcattactcagggctttatcggcagtgaaagcaaaggccgcaccacgacgttaggccgcggcggcagcgactatacggcagcgttgctggctgaagcgctccacgccgcgcgggttgatatctggacagatgtgcccggtatttacaccaccgacccgcgcgtagtgcctgtcgcgcagcgaattgatgaaatcgactttgaagaagcggcggagatggcaaccttcggcgcaaaagtactgcatccagccaccttactcccggccgtgcgtagcgatatcccggtcttcgttggctccagtaaagatccgcaagcgggcggtacgctggtgtgcaataaaacccaaaacccgccgctgttccgcgcgctggcgctgcgccgcaatcaaacgctattgacgctgcacagcctgaatatgctgcactcacgaggtttcctggcagaggtgttcggcattctggcgcggcataatatttcggtagatctgattaccacttcggaggtgagcgtcgcgctgacgctggatactaccggctccacctccacgggcgatacgttactgacccaatccttattgatggagctttccgcgctgtgtcgggtcgaagttgaagaaggactggcgctggtcgcgctgattggcaacaacctgtcaaaagcctgcggtgttggtaaagaagtgtttggcgtcctggaaccgttcaacattcgcatgatttgttacggcgcctccagccacaatctgtgcttcctcgtgccgggagacgatgccgagaaagtggtgcaaaagctacatcagaacttatttgaataa

SEQ ID NO: 381902 - DNA, 1950 bp, Salmonella enterica
atggatatgaactttaaaaaatacaagaccgtaagctttgatatctttgatacattggttagccggaggatttaccgtcccagagatttgttttcattaatgcaatcaactttagcaactgagaaattttttatatcagcgtacgagattggtattattgataatttcccagagataagagttcaggcggaagtaagtgccagagagaatagggtcaggcgttttggcggcgagccggaaatacttatatctgaaatatacgatgaaattttaaaaaagcatccgcagctttcaccagcgacagtaaaaaagataatcgatctggaaatacaaatggagaagattgttttatataaaaatgcgcgtggaagctgtttgtttgaaaaggctattagtgatggttgcaaagtcattttaattagtgacatgtaccttccatcagcaatattaaaggagttgttaacatcatgtggctatgatatcagtaacattccagtttattcatctggcgaagagcggtactctaaaaatagtggtaaattattttcaatagtcaagaaaaatgaaaatgtagatattgcatcgtggatgcatgttggcgacaatgttcatgctgatattctgaatgctaaaaaactcggcataaatactctccatgctgattggtcagagtataatcatgggatatctaatcattggaaagctaaagatattattggtgaatctatttgtaagactttattacttaaacaagtttctgctttccatcaaaatgatcctttaaacgagataggatttaaagtatttggtccattattattaggttatgtatcctggttagcgaatcagttaaagattcataaaattgataaagcgctttttttagcacgcgatgctcacttaatctataaaatttataatgaatacttttcagaagaacatgtaaaatgtgaatatttatatatatcccgcgcatcagcttatatggtggggatgactgattggccgatgcacaggatttggcatctttttggtggtaagaataagaaaagtattaaaaagatacttgctatcgcggggttagatgcgagtgagcatatttcagatatacatcatgttggttttcctgacgaggagtatattcctgtttcaggagaggaacataaggttcactggcttataaataaattatttccatatattttattaaaaaatactcagcacagggaagtttacgctgattactttaaaacggcctgtgaaggttataaaaatatagcacttatcgatgtaggatggatgggtaatattcaatcagtatttgctcgttctttaggtgcgcaatgggcagaaaaacaaatacatgggttttatttggcaacttttgctggcgccaatgataaccgatctatttataataagatgtttggttggctaaccaactatggccatcccaacgataagtgtgatcttttcttatcaggaggggtggaaataatggagttcgctatggctgacaatactgggtcaacaattggctataaaaaaacggataatggaataattcctgtacgtgaagatagcagtggttctgaaattgagtatttaaaaaaagcagcaagattgcaatcagggattatttctttttttgagtacgtcaaaccgctcatacaaaaaggaaattatgcagcacttagtagtgttgtattgtcagaacctttttttgaattgatagccagaccctcaagcgctcaactggacgccttatcttccctcacacattcagagtccgcgggatctaacgcagaaagaatcgtgctagccaagaaactgcctttaaaggataaactttttcccggagaaaattatatcaaagagttgaatgccagttattggaaagaaggctttaaaaggatcaacagaaaaaaattttgggcaaaatataactaa

SEQ ID NO: 381903 - DNA, 1134 bp, Salmonella enterica; identical to SEQ ID NO: 375958

SEQ ID NO: 381904 - DNA, 693 bp, Salmonella enterica
atgatcaaagaaatagtagccaacatcaaaacagatgatttagagattttatttcgaatggatagtggctactttgatgaaaaaattattgaaacgatagaatctcttggttgcaaatatttaattaaagccaaaagttattctacgcttgcatcccaagcaacgaattcatcggttgtattcgttaaaggtgaagaaggcagagaaactacagaactgtttacaaaattagataactgggagaaagatagaaggtttgttgtgtctcgtgtactgaaaccagaaaaagaaagagcacaaatatcacttttagaaggctctgagtacgaatactttttctttgtgacaaacactacattgctttctgaaaaagtagttatatcctatgaaaaacgtggcaatgctgagaactatattaaagaagccaaatacgacatggcggtgggtcatcttttacttaaatcattttgggcaaatgaagcggtgtttcaaatgatgatgctttcatataacctgtttttgttgttcaagattgattccttagagccttcagaatacagacagcaaataaagacctttcgtttgaagtatgtatttcttgcagccaaaatcattaaaaccgcaagaactgtaattatgaatttgtcagaaaactatccgtacaaggaagtatatgaaaaatgtctggtataa

SEQ ID NO: 381905 - DNA, 393 bp, Salmonella enterica
atgagtcaagttgtagattttttaaatgaagcaaaaacatattatattgctacggttgaggagggtcagccaagagttagaccgtttggtgcagctgcagaacatgatggaaaggtttacttaggtacatacaaaaaaaagaaagtgtatcagcaattattagcaaatccaaaaacagaagtctcgggaatggcaaaaggaaaatggatcagactttcgggagaagctgtatttgatgaatcagttgaagcaaaacaggcaatgtttgatgcaaatccagagttgaagaatatgtaccggatggatgacgaaaatgttgtggtattttattttaaagatatgaaagcaaccgtttattccttttcaggtgaaacggttgaattggaagattaa

SEQ ID NO: 381906 - DNA, 252 bp, Salmonella enterica
atgctgatcgttttattcacctatgccggttttgaaatcatcggactagctgccagtgaaacagaaaataaacaaaaaaatgtgccccgtgccatccacttaacggtgttctggctcgtgacattttatattctgtgtatttcagttcttttgctgctggttcccaccggatccttaagcaaaaacatcaaccctataattacggccttaaaccgctatcagatgacctgggccggcatcgccgtatcttga

SEQ ID NO: 381907 - DNA, 297 bp, Salmonella enterica
ttgtattattatttcagattacggaaagttattcggacggtagataagcaagccagtatcgcgtatcagggcatggcaatgatgagcgtacttagcgtggtgtcgcaaacgcatttggtcgctattgcgccgcgttggctggctgaagagttcgctgaatccttagaattacaggtattaccgctgccgttaaaacaaaacagcagaacctgttatctctcctggcatgaagctgccgggcgcgataaaggccatcagtggatggaagagcaattagtctcaatttgcaaacgctaa

SEQ ID NO: 381908 - DNA, 1287 bp, Salmonella enterica
atgaaaagaaaaacaatgggatggcttatcgtttttcttctatttatagtttacatgctcaactatatggatcgttcagcattgtcgataactgcccccttgatcgaaaaggagttaggatttaacgccgcggagatggggatgatcttcagcgcgttttttatcggatacgccctgtttaattttattggtggctgggccagcgataaagttgggccaaaaacggtttttctcatcgcagcgttactatggtctgtattttgtggcttaactggtttagtcaccggattgtggacaatgcttatcgtgcgcgttcttttcggtatggctgaagggccggtcagcgctgccggaaataaaatcatcaataactggatttcccgaaaggagtctgccacggcgatcggaatttttagcgccggttccccgctcggcggcgcggtgtccgggccgattgtgggcctgttggcgttatccttaggctggcgccccgcatttggcattattttcttatttggcctggtctgggtactactgtggtactttatcgttagcgataagccaacaatgagtaaacgcctggcgccggaagaacgcattgattttgaaaatcatgaggacgttattttatctgatgatggccgggctacgccttcactcggctattacatgaaacaaccaatggtatgggcgacaactctggcttttttcagctacaactatattctttttttcttcctgacctggttcccaagttacctgaaccattcgttacatctcgatattaaagaaattagtatcgccacggtaattccctgggtcatcggcgccattggtatggtactcggcggcgtctgttccgatgtaatttatcggattaccggtaatgctctgctctcacgtcgacttattctgggcgtatgtctggcaggcgcagcggtatgtgttgccgtttccggtactgttagcactattggtagcgcaattacgctcatgtcagtttcactcttcctgctctatttaacgggcccaatttattgggcggttattcaggatgttgttcataaagataaggtagggagcgtcggcggagccatgcatggcctggctaatatatccggcattatcggtccgcttgtcaccggttttatcgttcaatttagcggtaaatatgactatgcgttctatctggctggtgctatcgctatcgtttcaagcctgttggtcttcgtgtttgtaaaaagtaaaggattcaaagccaatgaaagtcaaagctgtgttcattaa

SEQ ID NO: 381909 - DNA, 450 bp, Salmonella enterica
atgaaccactactcaattaaccagttcgctgaaggaagcctcgttccatttattaaccggtttcaaagtaaaaaaacattaccacagttgatcgaccttattcaccaccaccttcttacggtctatttctcagaagcgccggtaaaagtcgttcgctggacagccaacaatccaaatgcgcgtgattttcgttatgcctgtggtatccgctatcagccgcttacaatagatagtcccgtcaacaataagatcagtattacgctaaatgaaccgaagacaggttgggaagctacctatatcgaagcaacttttaatgatggctatgtcgccacgagtcaggtttatattacgcccgatgaaaaatacccacagacagcgccaccttccgttaacgccgcatgtcaaactttaccggggcgtggattaggggaaaacgatagctccgattga

SEQ ID NO: 381910 - DNA, 219 bp, Salmonella enterica; identical to SEQ ID NO: 376342

SEQ ID NO: 381911 - DNA, 303 bp, Salmonella enterica
atgttcgtaatcagggttacggtcagtcttattgccaccgccagcgttggcgccgctttcagtgcgttgaatagccgatacacggttgcctttcgcccactccttaacgagcaaaccgcgatcgatatgctccgtctcgaaccatgttttaaggaactggataacagtcgccagttcaggagtttttccatcgacagggaatacttttttaacggcattcactattttgtgaatgtcatgttcaatggctttcttgaacgcttcaacattctcggcggcaagcagcaggttctggacatatga

SEQ ID NO: 381912 - DNA, 759 bp, Salmonella enterica
ttgtacaaaccgatcccacggtttcaccagtttagtggccatctcctgcgtacgtttcagaccgtcagatccgcccagttcggtgatgttcctctggagaagcgccacattaccgtaaaggtgtttgaccacagccgaactgtcaccgaatgccgcatccagttccgcctgggctttcagattcccttccaggctcttgccgtatttgccctgcaatttaatcagcatctcaggcatggacagcattttgccggtggcatccgtaaaggacagacccagtttttttgccccttcaactgcccccgtcataaagccttcgtaagcgctgctggcttccgttcccagcgtgcggttaagctgccccagtacggccagctgttcatccagtccgacgccgtagttggtaccgacgccccgcgccccttccatcaggtctttgatagtgcccatttcggtaccgaagaccttgcgcatatacaccatttttccggccagctgctcagcgaactgaaccttgcccagacgctccgcatcggcggaaaaattaccaaacatctgccccataaattccgccgtttctgcggcggtggatttcagggcaaacgccagggtattagcaacttttgtcactttcggcagttcattaccggtcagcccggcaatggcggaattaatactttcagtggactgaacaaattccaccgcactggcgccataagttgtactgaagcgcagcgcatcccgctgtacggcttttaa

SEQ ID NO: 381913 - DNA, 243 bp, Salmonella enterica
atgactatgtcgcgcgtaatttctctggcggcagggctttccctgtccgttttattttccactgctgccgttgccgataacggaagaggaagcggcaacagcaatattgaaaaccagacccggatttataccggcaccgaccgtgggcagaaacagcaccgcgaggcaaagggacaaataatcacgcggagcgtccagtgttcgctgccggcatatttacgtgacccggataatcagtgctga

SEQ ID NO: 381914 - DNA, 294 bp, Salmonella enterica; identical to SEQ ID NO: 7755

SEQ ID NO: 381915 - DNA, 210 bp, Salmonella enterica; identical to SEQ ID NO: 113266

SEQ ID NO: 381916 - DNA, 615 bp, Salmonella enterica; identical to SEQ ID NO: 113267

SEQ ID NO: 381917 - DNA, 2169 bp, Salmonella enterica; identical to SEQ ID NO: 113268

SEQ ID NO: 381918 - DNA, 678 bp, Salmonella enterica
atggcaggcgcacacgagttcagacagcacggtttccatgcgcgccgtcgtgcggagatcatcagtccgttggcgcagtcggagacggtcgggcacgaagcggccgatatggcggctcaggcgctgggcttgtctcggcgccaggtatacgttctgatccggcgtgcccggcaaggcagcggcctcgtgacggatctggtgcccggccagtccggtggaggtaaaggtaaggggcgcttgccggaaccggtcgagcgcgtcatccacgagctactgcaaaagcggttcctgaccaagcagaagcgcagcctagcggcctttcaccgcgaagtcactcaggtgtgcaaggctcaaaaactgcgagtgccggcgcgcaataccgtggccttacggatcgctagccttgacccgcgcaaggtcatccgccggcgggaaggccaggatgccgctcgtgacctacaaggtgtgggcggcgagcctcctgccgtgaccgcgccgctggagcaggtgcagatagaccatacggtcatcgacctgatcgtggtcgatgaccgcgaccggcaacctattggccgcccgtacctgaccctcgccatcgacgtgttcacccgctgcgtgctcggcatggtcgtcacgctggaagcgccgtctgccccgatttattgttcacagcgatag

SEQ ID NO: 381919 - DNA, 354 bp, Salmonella enterica
atggctcctgagaaaattcagcaggccttgcgggatatccgggagtatgtggacagttttgattacccgcgacttcaggctctcgtcagcagcccagatgaaataaaaaacctgtaccgtcgctgtcgtaacggctatgaaaaactgcaggtattccgtttactggaactggatcaggaccatccggtaatacgaaaattcgttaacgaaacgtaccacattgaaaatgagttcatctgtcaactagatccgtccagattcgatctcatcccggagtacgtgattatggaatgtgacaagctcatcgccctgccaccggcagcaaaccagagctcggttgcccgtatcgcttga

SEQ ID NO: 381920 - DNA, 291 bp, Salmonella enterica; identical to SEQ ID NO: 113255

SEQ ID NO: 381921 - DNA, 900 bp, Salmonella enterica; identical to SEQ ID NO: 113256

SEQ ID NO: 381922 - DNA, 2226 bp, Salmonella enterica
atgaagatactgaggcagctgtggaaccagaaagggcttgatgcggcagttgaagatgtacctgaggatcgatacggtttcggtaatatcgcagaaaatatatcccgttccatccttactcttcctctggaggcttcaaatgttgtcggaatagaaggtgcatggggatcgggtaaaacaagcctccttaatctgatcctgagaaaccttgccctgaaaaaagatgctcacacgcatgtgctgcatatttctccctggctgagtggcggcagtccggttgaagcgctctttcttccggttgccacggttatccagcaggaaatggaaatacgctatcccccgaagggcttcaaaaagctctggcgtaaatatctgttgtcaccggaagctcaaaaagtgattgagtatgctcaggatacttcatcgcgcgtccttccactggttcaatatatcggacagttttccagcattattaactggatagcaggcggaataaaggtattttcagacagccgtctggctgttgatcagaaaaccacgacaaagattcgggctgaaattgcaggacaactggtgagtctggatctgaagttcattgttgtcatggatgatctggaccgactggagccatcccaggtggcggaagtgttcaggcttgtgcgtgcagtagccgatctgccccgctttacccatattctctgttatgacaggcagattatcactcatgccgttgaacatgcgctgaatatcgaagatggcagccgttatctccagaaaatcattcagcttagttttaaattaccccgacctgaagcctttgatttacgtaatgaatttcgccagcgggctgaggctctatatcagcaaattaataatcaaccgccagactctggaatggtaagggatctcatcgcggtgactgatacctatggtgccgcactttcgacgccacgggaaatccatcaggccattaattccctgatttttctttatccggggatgcgggattttgtttatttccctgatttgtgcctgcttcagcttatacgggtgacaaacccggctctgtatgactggacagagcattacctgacagaacggtccgtgattgaaaccggtcagggtatgctttctgacggagagaaagcagacttccgggaggggcttatcagatgtatgaagacgttcagggcatcaaatgcagactcgtttctgacacttgcagactggatcccaggtatcagtggacataatgatgaatatctgaatctttttgagcccgtcagtgaggattttcgtcatatccagacgaccggtaaacgactcagcagcctgacgcactggcgatattattttgccttctcctcaccacagaatgttctgccacctgaattcttcagacagctttttgaacaggctggcgtatcggaaaaacagcagcagctttctgaattgctgctctcaaaaatcaacagtgtgggcagtctgtccggaacctggtttgaacatatactgagcagactgactccaggcctgataagagaacgtaatttcgaagagtgcgcaggactggttcattttttcttcgatcacaccgatgaggtgagcactcgcttcagtatccgtaacccatggttttccctgcgtgaaatggccattaatgaggttgtacggcatctgctgaagcatatgcaggatattgatgagaccagaacgatcacgcttatggaaaaactgatcgttacgggtgcttcgccgttctggatagccgattttatgcgggatcttatctgggaacatggacttgctcagaatgcagtaccttcgccttcagacgctcttttcagtcgcgatattacggaacggttgcgtgacaggtttgcggaacgtatgaatcaaccagaacttcagcaacagcttctcctgcgcaagtctcttctcgggtatctctacgcctggagagacatgagttcaggtgaaaccgtgaagcaatgggtcagagaagttactaccactgatgaaggccttgttaacctgttgatacgattacagaccagtgtcttcagctcccaccgaggggcatatcgccggattgcgcgtgaccaggtcagtccgttctttgatgactggccagcagtcgaagagaagttgaaggttatgctgtccggcaacgagctgactccggagcaggaagcgctcaaaacagcgctggaaaatgacgactga

SEQ ID NO: 381923 - DNA, 1089 bp, Salmonella enterica
atgctaagccagcttaacctgcgttttcacaaaaaacttatcgaggcgctgaaaacgcgtgccggtcgggaaaatacttcggtcaacgccctagccgaacgcttcctcgatgacggcctgaaaacggtcgcgcccggtgacgggtattttcagctcattgccgatccggaggccacggtccggcagctgtaccggcatatcattctgggccagaccttcggcacgtcagcgctctcccgcgacgaactgcgctttgtcctggttcacgtcagggaggccttcctgcgcgggcataataggctggccacactcccggccctggacacgctgctggacatcactggcaacctgctggcctggcaggtggagcacgatcgccctgtggacggtcactacctgaaggggattttccgcctggccgggaaaaactggacggaagagtttgaagccttccgggcagcgctgcgccccgtggtggatcagatgtatgccgaacacctcctgcgtccgctcgagagcgactgttttggcctggcggaggtgccggacgcggtgctggcagaaatcttcaccctgccgcggctgaaagctgttttcccgttgatgctgcgcggcctggactggaacacagaacaggcaagaacgctggcacaggagctgcgcccggttatttctgccgtcacggaaaccattgaggccggcacgctgcgcctggagatccgcgttgacggccagcaccccggagaacgcccgggggcctggtacaccacaccccgtctgcacctgctgatcaccggccaggacttcgtggtgccgtacggctgggaagcgttatccgaactgctgggcctgttcacgctgtatgcccggcatccggaagccctgacacacggtcaccagggggagcgagtgatgttctccccgcccggaaacatcacgccggagggcttcttcgggatagacggcctgcggatttttatgccggcggaggcctttgagacgctggtccgggagctcgccacgcggtgtcaagaaggcccgctggcggaggccctgaccgggctgcgctgcctgtacggagatctgtaa

SEQ ID NO: 381924 - DNA, 1731 bp, Salmonella enterica
atggacattgaaatacgccactgcaataacatcgtacgagcacatatcaccctcactgccgataaactgaacattaagtttgcgccaaatggtactggaaaaagtacgctgtcacgggccataagctgtgcggcgcgggacgacattcagggactacaggcactgatgcccttccggctgcgcggagaaaaccccgatagcaccgggcccattgtcatcggtgctgacgggattggggacgtgatgtgcttcaacgaggagtacgtcagtcagtttacgttccaaccggacgagctcatcagtgatagctttaatattcttatccgcaatcaagcccatgcggaaagagagcgtgaaatagaagaaatgacgcaaaagatccgggctgttttcacggatcacactgagctgaactctctgatagaccatctacaggaactcagtaatgctttcagatcaaccagttccgggatttcacgttcttcaaccggcatgagaggtctgtcaggcggaaataaaatacaccacattccggctggtcttgagaactatcaaccctacatccgcagtgaacgccgcgtggaatggattgactggcagacaaagggactcgagttttcgcccctttcggatggctgctgtccgttctgtaccggtgatatcacgggaaaggaagcacaaattcgccaagtcagagaggaatacgataaatccaccattaaaaacctgaccgctatcatcagactggtggaaaacctcggtaattacctgacggagagcgccagagaacgccttctggccattactatgcttcagaacggtccggaagccgaacatatcgagtacctagtggcgttgaaacgccagaccgatacgctgacagagaaactcactgcgctgagaggcctgaatgttttcagcctgcaggaacagcagaacgttcgggaggtgctcactgccaggttgattgacctgcagttcttccctgatctgcaatccgaactcatgcaggggatcaccgacagactgaacgcggcccttatggacctgataaaccttgccggaccgctgcagggaaaaattaaccggcaccgggacagcatgatccggctgatcgcacagcacaaaacaaacatcaataatttcctcacttatgcaggctataaatacagggtggatatagccggcgagggagagcagagaaaactcaggctacgacacatagattttggcgggtacgtcagcggcggtagccagcatctcagctatggagaacggaacgcctttgcgattgtgttattcatgtatgaatgcctgtcaaaaaacccgggactgattatccttgatgatcccatatcttcttttgataaaaacaagaagtttgccattcttgaaatgctgttcagacgtgcaagtggtgaatgcctgaagaaccggactgtacttatgctgacgcatgacgtggagcctgtgattgacacgctgaagtcagtcagaaggttgttcagtaatcaggtgaccgcctcctgcctgcgcctgtctgctggagtcatagaagaattacctgttaacgacggcgatatcatgacattcatgcagatctgcaaatccatcaccgcgtcagcagactgtgaggagatcattaagctcatctatcttcgtcgctactttgaaatcgttgacgaacgtggtgatgcttatctgaaccgccccgggaatcctggagactaa

SEQ ID NO: 381925 - DNA, 498 bp, Salmonella enterica; identical to SEQ ID NO: 15298

SEQ ID NO: 381926 - DNA, 780 bp, Salmonella enterica; identical to SEQ ID NO: 15299

SEQ ID NO: 381927 - DNA, 1206 bp, Salmonella enterica; identical to SEQ ID NO: 6029

SEQ ID NO: 381928 - DNA, 306 bp, Salmonella enterica; identical to SEQ ID NO: 6030

SEQ ID NO: 381929 - DNA, 906 bp, Salmonella enterica; identical to SEQ ID NO: 6034

SEQ ID NO: 381930 - DNA, 1239 bp, Salmonella enterica; identical to SEQ ID NO: 6033

SEQ ID NO: 381931 - DNA, 585 bp, Salmonella enterica; identical to SEQ ID NO: 6032

SEQ ID NO: 381932 - DNA, 642 bp, Salmonella enterica; identical to SEQ ID NO: 105789

SEQ ID NO: 381933 - DNA, 501 bp, Salmonella enterica; identical to SEQ ID NO: 38943

SEQ ID NO: 381934 - DNA, 888 bp, Salmonella enterica
atgccactgctggataagctgcgtaagctgtacggggtcggaccggtatgcagtgaactacatattgccccgtcaacgtattaccactgtcagcaacagcgacatcatccggataaacgcagtgcccgtgcgcagcgcgatgactggctgaagaaagagatacagcgcgtatacgatgaaaatcacaaggtatacggtgtgcgtaaagtctggcgtcagttgttacgggaaggtatcagagtggccagatgcactgtggcacgtctcatggcggttatgggacttgccggtgttctccggggtaaaaaggtccgtacgaccatcagccggaaagccgttgccgcaggcgaccgcgtaaaccgtcagttcgtggcagaacgacctgaccagctgtgggtggctgattttacttacgtcagcacatggcggggcttcgtctatgtggcgttcatcattgatgtgtttgccggatacatcgtggggtggcgggtctcatcgtccatggaaacgacattcgtgctggatgcactggagcaggcgttatgggcccgtcgaccgtccggcacggtccatcacagtgataaaggttctcagtatgtatcgctggcctacacacagcggcttaaggaagccggattactggcatcaacaggaagtacaggcgactcgtatgacaacgcgatggcggagagcatcaatggtctttacaaagcggaggtaatacaccgtaagagctggaaaaaccggacagaagtggaactggccacactaacgtgggtggactggtataacaatcgacgattgctggaaaggctgggccatactcctccggcagaagcagaaaaagcttattatgcttccatcggaaacgatgatctggcagcctga

SEQ ID NO: 381935 - DNA, 327 bp, Salmonella enterica
atgactaaaaatactcgtttttcccccgaagtccgtcaacgggcagtccgtatggttctggaaagtcagggcgaatatgactcacaatgggcgacaatttgttccattgctccaaagattggctgtacgccggagactctgcgtgtctgggttcgccagcatgagcgggataccgggggcggtgatggagggctcaccaccgctgaacgtcagcgtctgaaagagctggaacgtgaaaatcgtgaactgcgccgcagtaacgatatccttcgccaggcttccgcttattttgcgaaggcggagttcgaccgcctctggaaaaagtga

SEQ ID NO: 381936 - DNA, 498 bp, Salmonella enterica
atgaactctattagagtgattgaacgtcaacatgaaatagatatgattgaaggtgaagcaaaacataaagcagaacttgaaagaataaaatctgaatctcaatacaatacgagcgagttaaaagaaaaacttgaacggcttgatataattgtcaaaaaccaagaagcgcgaaataatgaactattagaagagcgaaaaaaattagatgatgatctcaataatatattcatttttgtagatgatcttagggaaactgtattgagagtaaataatgcttataatcggtctatgaaagaagatgatgttgtaaggaaaaacatgatattatcccctatatatgagataataaaggaatcaaaatttaaagacatagagaaatatctagaaaaagtcggtgttcttgaaaatagtttaaaacgtctccgagactccgaaagaaaaacattttcaatggatgaactggaaaataacgactataatgcaataaatgccgattaa

SEQ ID NO: 381937 - DNA, 1203 bp, Salmonella enterica; identical to SEQ ID NO: 370179

SEQ ID NO: 381938 - DNA, 249 bp, Salmonella enterica
atgaataaattctcccttgctacagcaggtattatcgtggcagcgctggtaaccagtgttagcgtgaatgcggcaacagatactactaaaacaaacgttacgcctgaagattttaaaggcggggactacgtagatttccaggaaactgagacgacagcagtgccgctagccgttgagctttgtaagaaaaacccgcagagtgaattaagcaaaataaaagacgaaatcaagaaagaactctcaaaataa

SEQ ID NO: 381939 - DNA, 528 bp, Salmonella enterica; identical to SEQ ID NO: 370662

SEQ ID NO: 381940 - DNA, 1575 bp, Salmonella enterica; identical to SEQ ID NO: 370658

SEQ ID NO: 381941 - DNA, 276 bp, Salmonella enterica
gtgcgcggtcgccgtgtgaaactgaaatatgcccacgctggcggctataacccgccgattgtggttattcacggcaaccaggtaaaagatctgccagactcctataagcgctatctgatgaactacttccgcaagtcgttggaagtgatggggacgccgattcgcattcagtttaaagaaggggagaacccgtatgcgaacaagcgtaacacactgacgccaacgcaaatgcgcaaacgtaagcgtctgatgaaacatatcaagaaaagcaagtaa

SEQ ID NO: 381942 - DNA, 1491 bp, Salmonella enterica
  misc_feature (1444)..(1453): n is a, c, g, or t
atgtatcaggacaccgccagcccgtgcgatcggctggggttgccgacggtaaatgatttacagacgctatataccgattatcccaatggcgcactcacgacaacgcttggcctaccggtggcatcaggaaaatattggggggcgggtaactcagtaccggatgccacgcactcagacagtcagttccagtatgtcagactcagcgataataatacgctgacaaccaaagccaataccgccacggcgcagctttgtctggcaaagcgccgggacttgtcgatagaactcacctccagcgccatggatgcggataaaggcgctccagtggcgaagaagggcgagagcctgccgttgaccgtcactgtgagggatggttccggcacgccgcagcccaataccactatccgtttgggacgaacgctttcgatagaccgggcgggtgtcgttgatggcagttccggcggaggcatggtactcacatcggttgcgccgtctacgggctcaatgacgtttaactgcacggtatcttcgtgcacaagttattggtatggcattacggatgaggatggtaaagcgcaactcgaagtgacgcaggatgattcccgtggcctgagaacaccgctgcaggcgatgcttgtcgacgatccgctgacagttagcgatatggacgtcattttcaccgtcattaccagcccggacagcgataaagccaaatactggggacacatgccggaaaccgtgaccaacagcgcgggcgtgaagttccggcgtccgctgctggcggcggagatgacgtcgaatagcggtacttacctggttaacaatgaaacatggcccttagtcaccgcagcgaacactgaaaaagctggcgcaaccggctgtgatgcggaataccagccgttgtcgggcgatctgcaaacgttgtatagcgacaatcctaacggcgcaatcggtacaaattacggctggccggtggcggggaacaaatcctggtgggcggcggatcgtgcgccgaataccggatattaccaatttataaacctgaatagcggcggtaagggcaccgccagttcatcgactgccaccggtgctcaggtgtgtctggtcgagccgcgtacttctactcctgccagtattacgctgacctcgacggcgatggacagcgcgaaaaatgcggcggtagtgccgaagggaagcgcgatgccgttaacggtgacggtaaaagatagcagcggtaacccggtcgccaacgttggttttacgttgtcacgtggcgattcgaaaaatcgggcaggtatggtgataacggatggcgacgtggcagcggatgccggagcagacgatctcatgcttaaagagctgactcccgcaagcgccagccaaagtatgaccaccaccgggattgtctttaccggcactaccggcagcgacggtacggcaacgnnnnnnnnnnaacgtttacgcttaatcaggataaaagcctggggttga

SEQ ID NO: 381943 - DNA, 1044 bp, Salmonella enterica; identical to SEQ ID NO: 369011

SEQ ID NO: 381944 - DNA, 372 bp, Salmonella enterica
  misc_feature (315)..(324): n is a, c, g, or t
atgcgtagcaaacatctggatgaccgcctcatcccgtgtttcatagtcgcctttcagctcagcgctcaatttcgccatgtacgacaccagaaaatccgcattacgctgcgccaggtacttgccccgttcggtctgcatcgtcagcggcagtttcagcagtttggtttgaaaatggtcgagcgcgaattgcttatcgttaagaggccgtctgtcggcaaagggatcgtcggcatcaaacagcgcgacgcccagcgcgccggagaccgcgaagactgtctcttatacacatctgacgctgccgacgactccttacgnnnnnnnnnncctccagcctgtctgcatcctgcacgatttttgcctctggcgtggtag

SEQ ID NO: 381945 - DNA, 1692 bp, Salmonella enterica; identical to SEQ ID NO: 370381

SEQ ID NO: 381946 - DNA, 2529 bp, Salmonella enterica; identical to SEQ ID NO: 370384

SEQ ID NO: 381947 - DNA, 336 bp, Salmonella enterica
  misc_feature (285)..(294): n is a, c, g, or t
atgagccagaacaacgataaagagaagcctgcggggagtcagagcctgtttcgtggcctgatgttgatagaaattttgagtaactacccgaacggttgcccactggcgcacctgtcggagctggcggggttgaacaagagtaccgtccatcgtttgttgcaggggcttcaatcctgcggatacgtgacgccagcgccggcggccggaagctaccgtctgacgacaaagtttattgccgtcggccaaaaagccctgtcatcgccgagcagtacagcggcatatgcnnnnnnnnnngtcatcgctgaatatcatccacgttgcggcaccgcaccttga

SEQ ID NO: 381948 - DNA, 783 bp, Salmonella enterica
  misc_feature (30)..(39): n is a, c, g, or t
  misc_feature (616)..(625): n is a, c, g, or t
ttgcctcagtttcgtcgctccattcctgtnnnnnnnnnntccattctcacgctggccactttgctggcgtttgcacatcccgttttcgctggcaagctcgccatcgtgattgatgattttggctatcgcccgcacacggaaaaccaggttctggcgctgccgccaaacatctccgtcgccgtactgcccaacgcgccgcacgcgcgcgaaatggcaactaaagcgcacaatagcgggcatgaggtgttaatccatctgccgatggcgccgctaagcaaacagccgctggagaaggatacgctgcgaccagatatgagcagcgatgagatcgagcgcattatccgcgaggcggtaaacaacgtgccgtatgccgtcgggcttaataaccacatgggcagcgcaatgacctccagcctgttcggtatgcaaaaagttatgcaggcgctggaacattacaatctctattttctcgacagcatgacgattggcaatagccaggcgatgcgcgcggcatccggtacgggtgtgaaagtgatcaagcgtaaagtgttcctcgacgatacgcaaaacgaggcggatatccgccgtcagtttaatcgcgctatcgaactggccnnnnnnnnnngctatcgcgattggtcatccgcatcccgcaacggttcgcgtgctgcaacagatggtttatcgcctgccggcggatatcaccctggtacgtccaggcagcctgctcaacgaaccgcaggtagatacgtcccgacctggtgtgacgccgcagaaaattga

SEQ ID NO: 381949 - DNA, 336 bp, Salmonella enterica
atggcccagattaatcaggtaactatcgtggggaagaatttgcgccgccgagaaatgatacttttcacaggcgattttaaagtcatcaatgacctggggagtaaggggggcggcacgccactgacgctggttttttgtgaaaagcgcaaaggccgttgcgccaatttcagccgcgcgggcaggggcgttagccagaccgccagcagcgctgacgtgcgctccgatgtatttcataaaagactcctgttaaacccgctaacggttcattacgaacgctatgataacgggttaacaggcgtgaaacgtaataatttatgcgataaggctatggattag

SEQ ID NO: 381950 - DNA, 924 bp, Salmonella enterica; identical to SEQ ID NO: 368099

SEQ ID NO: 381951 - DNA, 594 bp, Salmonella enterica; identical to SEQ ID NO: 368096

SEQ ID NO: 381952 - DNA, 330 bp, Salmonella enterica
atggtgcgcactgaaatgggcgaaccggatgccaaaggccgtcggcgggcagagatcgtcgccggttccgagcatgtggttccggctgatgcggtggtgatggcgtttggttttcgtccacacagcatggaatggctggcgaaacacagcgtggaactggactcgcagggacgaattatcgcgccggaacgcagcgataatgctttccagaccagcaacccgaaaatcttcgccggtggcgacatcgtgcgcggttccgatctggtggtgacggcgattgccgaaggccgtaaagcggctgacgggattatgaactacctcgaagtataa

SEQ ID NO: 381953 - DNA, 138 bp, Salmonella enterica
atgtttggccatcagcgccacgaaagtctcgggagcgtttttgctgacataagcgcttttcagaccgcaggcgacaaaattaagttgcttatccttcagcagttcgccaatcacaatacgcgattcatgttgggttag

SEQ ID NO: 381954 - DNA, 249 bp, Salmonella enterica
gtgaaacaactgcttgccatgttcatacaccagcgcgccattttctgcgacaaaggaaatttcgtctttcagctcggggaagaaggagatcaactggtagtactgattaccgctggcgactacaaattcgatattacgttttttcagttcctggtattgcgccatgaagcgtacacgatcgtactgcttggcatcgtcgagaaaagtgccgtccatatcggtaacgacaacgttaacggtcatacttaa

SEQ ID NO: 381955 - DNA, 1266 bp, Salmonella enterica; identical to SEQ ID NO: 370861

SEQ ID NO: 381956 - DNA, 714 bp, Salmonella enterica
ttgttagccgtgaaagcctccagccgtcagaacccgttcatccgttttgagcaggataaaaaactgttccgtaacgctctggaagtggaagcgttgacgaaaggttttgataacggtccgctgtttaaaaatgtcaatttgctgctcgaagtcggggagaagctggcggtactcggcaccaatggcgtgggtaaatctacgctgctgaagacgctggttggcgatctggacgccgatcacggcaccgttaaatggtcggaaaacgcgcgtattggttactacgcgcaggaccacgaatatgaattcgaaaatgacctgacggtgtttgaatggatgagtcagtggaagcaggaaggcgacgacgagcaggcagtgcgcagtattctgggccgcctgttatttagccaggatgatatcaaaaagcctgcgaaagtcctctccggtggcgagaagggccgtatgctgttcggcaaactgatgatgcaaaagccgaatatcctgatcatggacgaaccgactaaccacctggatatggagtcgatcgaatcgctgaatatggcgctggagctgtatcagggcacgctgatctttgtttcgcacgaccgtgagttcgtcagctcgctggcaacccgcgtcattgaaattacgccggagcgcgtggtggacttcagcggcaactacgacgattatttgcgtagtaaagggatcgagtaa

SEQ ID NO: 381957 - DNA, 2475 bp, Salmonella enterica; identical to SEQ ID NO: 369610

SEQ ID NO: 381958 - DNA, 564 bp, Salmonella enterica
atgaccggttttcgcgtagcgctggccggagcccaggattactacggcgtcgtgcctgacctgacctgtctgggtaaaatcatcggcggcgggatgccggtaggcgcgtttggcggtcgtcgcgatgtaatggatgcgctggcgccgacgggcccggtttaccaggcgggcaccctttccggcaacccgattgcgatggcggccggtttcgcctgcctgaatgaagtcgcccagcccggcattcatgaaacgctggatgagctcaccacccgtctggcggaaggtttgctggaagctgccgaagaagcgaatattccgctggtggttaaccatgtcggcggcatgttcgggattttcttcaccgacgctgagagcgtaacctgctatcaggacgtgatggcgtgcgacgtggaacgctttaagcgtttcttccacctgatgctggaggaaggcgtatatctggcgccgtccgcgttcgaagcaggctttatgtccgtggcgcacagtgaagaagatatcaataacaccatcgacgccgcgcgtcgggtgtttgcgaaactgtaa

SEQ ID NO: 381959 - DNA, 618 bp, Salmonella enterica
  misc_feature (593)..(602): n is a, c, g, or t
atgaaaacagacacttccacctttttagctcagcaaattgtgcgtttacggcgcagagatcagattcgccggttaatgcagcgggataaaacgccgctggccatcctgttaatggcggccgttgtcggcacgcttaccggactggttggcgtcgcctttgaaaaggcggtttcctgggtacaaaacatgcgcattggcgcgctggttcaggtcgcggaccatgcgtttttgctttggccgctggcctttatcctttcggcgttactggcgatggtcggctactttttggtgcgaaaatttgcgccggaagccggcggctcgggtatcccggaaattgaaggcgcgctggaggagttacgtccggtgcgctggtggcgcgtgttgccggtgaagtttatcggcgggatgggaacgttgggcgcaggaatggtattagggcgcgaagggccaacggtgcaaatcgggggcaacctggggcgcatggtgctggatgtttttcgtatgcgcagcgccgaagcgcggcatacgttgctggcgaccggcgcggcggcggggctctctgcggcgtttaacgcgccgctggcgggtatccnnnnnnnnnntcctgtttattattga

SEQ ID NO: 381960 - DNA, 405 bp, Salmonella enterica
  misc_feature (376)..(385): n is a, c, g, or t
atgccttcaattcgactggctgacttagcagaacagttggatgcagaattacacggtgatggcgatatcgtcatcaccggcgttgcgtccatgcaatctgcaacaacaggccacattacgtttatggtaaatcctaagtaccgtgaacacttaggtttatgccaggcttctgcggttgtcatgacgcaggacgatcttccttttgctaagagcgcggcgctggtagttaaaaatccctacctgacctacgcgcgcatggcgcaaattttagatactacgccgcagcccgcgcagaatatcgcgccaagcgccgtgattgatgcgacggcaacgctgggtagcaatgtttcagtcggcgcgaatgcggtgattgaannnnnnnnnnggcgtacaactgggcgataa

SEQ ID NO: 381961 - DNA, 639 bp, Salmonella enterica
gtgctgaccgaaggggcgaaagggatgaaaggcgctattcagaaagccgaagaaattgtcgccagcgatccgcaaaaatatctcctgctccagcagttcagcaaccctgccaacccggaaatccatgaaaaaaccaccggcccggaaatctgggaagacaccgatggtcaggtggatgtgtttatctccggcgtcggcactggcggtacgttaaccggcgtcacgcgttatatcaaagggacgaagggtaaaaccgatcttatcaccgttgcggtagaacccactgactccccggttattgcccaggcgctggctggtgaagagatcaaaccaggcccgcataaaattcagggcatcggcgcaggcttcatcccgggcaacctggatctgaaactgattgataaagtggttggcatcaccaatgaagaagccatttctaccgcgcgccgtctgatggaagaggaaggtattctggcaggaatttcttccggtgccgcggttgctgcagcgcttaagctgcaggaagatgaaagctttaccaataagaatattgtggttatcctaccttcatcaggtgagcgttatctgagcaccgcgttgttcgccgatctctttactgagaaagaactgcaacagtga

SEQ ID NO: 381962 - DNA, 972 bp, Salmonella enterica
  misc_feature (9)..(18): n is a, c, g, or t
gtgcggcgnnnnnnnnnngaagcgctgaacaaacgcgatgcgtatgacgtgctgattgtcggctccggcccggcgggcgcggcggcggcggtctactcggcgcgcaaaggcatccgtaccggtctgatgggcgagcgcttcggcggtcaggtgctggataccgtggatatcgaaaactatatctcggtgccgaaaaccgaaggccagaaactggcgggcgcgctgaaagcgcatgtcagcgattacgacgttgacgttatcgacagccagagcgcaagtaaactggttccggcagcggcagaaggcggcctgcatcagattgaaacggcgtccggcgcagtcttgaaagcgcgcagtatcatcatcgccaccggcgcgaaatggcgcaatatgaatgtgccgggcgaggatcagtatcgcaccaaaggcgtcacctattgtccgcactgcgacggtccgttatttaaagggaagcgtgtggcggtcatcggcggcggcaactctggcgttgaagcggctatcgatctggcaggtattgtagaacacgttacgttgctggagttcgcgccggagatgaaggcggatcaggtgctacaggacaaagtgcgtagcctgaaaaatgtcgatatcattttgaatgcgcaaacgacagaagtgaagggcgacggttcgaaagtggtggggctggagtatcgtgaccgtgtcagcggcgatattcatagcgtcgcgctggcagggatttttgtgcagattggtctgttgccgaatacccactggctggaaggcgcgcttgagcgtaaccgcatgggcgagatcattattgacgccaaatgtgaaaccagcgttaagggcgtcttcgctgcaggcgattgcaccaccgttccttacaaacagattatcatcgccacaggcgaaggggcgaaagcctcgttgagcgcctttgattatctgattcgtaccaaaatcgcataa

SEQ ID NO: 381963 - DNA, 651 bp, Salmonella enterica
  misc_feature (613)..(622): n is a, c, g, or t
atgctcgacacaaatatgaaaacccagctcagggcttaccttgagaaactgaccaaacctgttgagctgattgccacgctggatgacagcgctaaatcggcggaaatcaaggaactgctggctgaaatcgccgagctgtccgacaaagtcacgtttaaagaagacaatactctgccggtgcgcaagccgtctttcctgattacgaatccaggttctcagcaagggccgcgctttgccggttctccgctgggccacgaatttacctcgctggttttggcgctgctgtggaccggcggtcatccgtcaaaagaagcgcagtcgctgctggagcagattcgcgatattgacggcgattttgaattcgaaacttattattcactctcctgccataactgcccggacgtagtgcaggcgctgaacctgatggcggtgctgaacccgcgtattaaacatacggcaattgatggcggcaccttccagaacgaaatcaccgaacgtaacgtgatgggcgttccggcggtgtttgtcaacggtaaagagttcggccagggacgtatgactctgaccgagattgtcgctaaagtggatactggcgcagaaaaacgtgcggcgnnnnnnnnnngaagcgctgaacaaacgcgatgcgtatga

SEQ ID NO: 381964 - DNA, 579 bp, Salmonella enterica
atgtgtataagagacaggtccttaattaacaccaaaatcaaacctttcaaaaaccaggcgttcaaaaacggtgaattcattgaagtcaccgagaaagataccgaaggccgctggagcgtcttcttcttctacccggccgattttacctttgtttgcccgactgaactgggtgacgttgccgaccattacgaagaactgcagaagctgggcgtagacgtttattccgtctcaaccgatactcacttcacgcacaaagcatggcacagcagctctgaaactatcgcaaaaatcaaatatgcgatgatcggcgacccgactggcgccctgacccgtaacttcgacaacatgcgtgaagacgaaggtttggcagaccgtgcaacctttgttgttgacccgcagggtatcatccaggcgatcgaagttaccgctgaaggtatcggccgtgacgcgtctgacctgctgcgtaaaattaaagcagcacagtacgttgccgctcacccaggcgaagtatgcccggcgaaatggaaagaaggcgaagcgactctggctccatctttagacctggtcggtaaaatctaa

SEQ ID NO: 381965 - DNA, 1176 bp, Salmonella enterica
atgttgattccgtctaaattaagtcgtccggttcgtctcgaccataccgtggttcgtgagcggctgttggctaaactttccggcgcgaacaatttcaggctcgccctggtaaccagtcctgctggctatgggaaaaccacgcttgtctcacagtgggcggcgggcaaaaatgaattaggctggtactctctcgacgaaggcgataaccagcaagagcgattcgccagttacttaattgccgctatccaacaggccaccggcggacactgctctaccagcgaagcgatggcgcaaaaacgtcagtacgccagcctgacgtccctcttcgcgcagctctttattgaactggcgcagtggcatcgcccgctttatctggtgattgacgactaccatttgattaccaatccggtgattcacgacgcgatgcgctttttcttacggcatcagccggaaaatttcaccctggtggtgttatcgcgtaatttgccgcaactgggcatcgctaatctgcgcgtgcgcgatcagctgttggaaatcggcagccagcagttagcttttaaccatcaggaagcaaagcaattttttgaccgtcgcctttcgtcgcccattgaagccgctgagagcagtcgtatgtgcgacgatgtggccggttgggccactgcgctacagttgatcgccctctccgcgcgccagaaccatacctctgcgcatcactccgcccgccgtcttgccgggattaatgccagccacctttctgattatctggtggacgaagtactggataacgtggatgtcagcacccgacattttttacttaaaagcgcgatcttacgctcaatgaatgacgcgttgattgtgcgcgtgaccggcgaagaaaacggccagatgcggctggaggagattgagcgccaggggttattcctgcaacgcatggacgacacgggcgagtggtttagctatcacccgttgtttggtagctttctgcgccagcgttgccagtgggaactggcggcggaactgccggagatccaccgtgcggccgcggaaagctggatggaacagggttttcccagcgaagctattcatcatgcgctggcggcgggtgacgcgcaaatgctgcgcgatatcctgcttaaccatgcgtgggggctgtttctgtctcttatacacatctga

SEQ ID NO: 381966 - DNA, 180 bp, Salmonella enterica
atgaaaacgcgtggcgttgagatccgccagtttgtcgctaattcccatcagcctggaaatttgcggcgccgaaagctggcgggcctgttgaataagctgctggctgtgatccaacagctccggctgggtatagcgggtcgtggccagcgggctttgataatcaagcgtttttgcaggtga

SEQ ID NO: 381967 - DNA, 1596 bp, Salmonella enterica; identical to SEQ ID NO: 369437

SEQ ID NO: 381968 - DNA, 942 bp, Salmonella enterica; identical to SEQ ID NO: 370986

SEQ ID NO: 381969 - DNA, 366 bp, Salmonella enterica
atgccagcgcggctgccccagcgcggcggtatattccaccaatgctttccacaacggcgcctgccagttttgcgcctctcccagaccttccacggtttttcccgcttcccactgcgtaagccagtcaggccgataaaccagatactgatcgaacaggtcggcggcgcgcgcggaaagctgaaagagtttgcgtttatcggtgtcgtcggtcagataatggcgcagcagtacaaactcatccttatccagcaactgcggcagcaaggtcatcagtttccagctcatgctttgtttgctgaaagcgctttctttggggatatccggcaacacgcggacaaacatctcccagataaaactcgccggtaa

SEQ ID NO: 381970 - DNA, 720 bp, Salmonella enterica
gtgcaaacgcccttttacgtagttaaaagtggtttcatccggggcgaccagaccggctttggcgcccatctcaatcgccatattgcacagcgtcatgcggccttccatactcagcgcgcggatcgcgtcgccgcaaaattcaaccacgtgcccggtgccgccggcgctgccggttttaccgatgatcgccagcacgatgtctttggcggtaatgcccggcgcggcgttgcccgtgacttcaatcttcatggttttagcgcgcccctgtttcagggtttgcgtcgccagtacatgttctacctcagaagtgccgatgccgaaggccagcgcgccaaacgcgccgtgggtggcggtgtgggagtcgccgcagacgatggtcatgcccggcagggtgacgccctgttccggccccatcacatggacgatgccctgatatgggtgattcaggtcatacagctcgacgccgaactcgttacagttcttaatcagctcctgcatctggatacgcgccatttcaccggaagcattaatgtctttagtctgcgtcgagacgttgtgatccatcgtggcgaaggttttccctggctgacgtaccggacgatggtgcgcgcgcagaccgtcaaacgcctgcggagaggtgacttcatgcaccaggtggcggtcgatgtacagcagcggcgtttcgtttggcgcctcaaagaccacgtgggcatcaaataa

SEQ ID NO: 381971 - DNA, 534 bp, Salmonella enterica
  misc_feature (522)..(531): n is a, c, g, or t
atgaaaaacaaatctatacctcaagctgcgtcgcccctggcctcgtggctttcttatctggaaaacctgcacagcaagagtatcgatttaggccttgagcgcgtaagccaggtggcagcgcgtctggacatcctcaagcctgcgccgttcgtttttaccgtggcgggaaccaacggtaaaggtacgacctgtcgaacgctggagtcggtgttaatcgcggcgggataccgtgtgggcgtctatagttcgcctcatctggtacgttacaccgagcgcgtgcgcgtgcaggggaaagaattagcggaatccgcgcataccgcgtcctttgcggaaatagaagcggcgcgcggcgatatttcattgacctattttgaatatggtacgttgtcggcattgtggctgtttaaacaggctaaccttgacgtggtgattctggaggtcgggttgggcggccgcctggacgccacgaacattgtggatgccgatgtagcggtaattaccagcatcgcgcttgaccatacnnnnnnnnnntga

SEQ ID NO: 381972 - DNA, 1428 bp, Salmonella enterica; identical to SEQ ID NO: 369330

SEQ ID NO: 381973 - DNA, 1221 bp, Salmonella enterica
gtgatccgctttgaacggcccttccggcatgttatcgaggcactgctgaagaatgcgcagactctggcgcagctcttccactttcagcatcacgcgggtatagcagtcggaaacgccgccgcccaccggcacttcaaagtcaaagttttcgtagccagagtatggacgccatttacgtacgtcgaagtcgatcccggtcgcgcgcagccctgcgccggtggtgccccactccagcgcctctttcgcgccgtaagcggcaacgccctgcgaacgccctttcagaatagtgttacgcagcgcggctttctcgtaagaatccagacgcttcggcatccactcaaggaactctcgcagcaggcgatcccaaccgcgcggcaagtcgtgcgcgacgccgccgatacggaaccaggccgggtgcatacggaaaccggtaatggcttccaccaggtcataaattttctgccggtcggtaaaggcaaagaagaccggcgtcatcgcgccgacgtcctgaataaaggtcgagatgtacagcagatgactgttaatgcggaacagttcggagagcatcacgcggatgacgttcacacgatccgggacggtgatccctgccaacttttctaccgccagcacgtacggcatttcattgacgcaaccaccgaggtattcgatacggtcggtatagggaatgtagctatgccaggactgtcgctcgcccattttttcggcgccgcggtggtgatagccgatatccggcacgcagtcgacgatttcttcaccgtcaagttgcaggataatacgaaacgcaccgtgcgcagacgggtggttcgggccgaggttgaggaacataaagtcctcgttgtcagtcccgcgcttcatcccccagtcttccggcttaaaggtcagcgcttccatttccagatcctgcttggctttggtcagctcaaacgggtcgaattcggtcgcgcgcgccggataatctttacgcagcggatggccttcccaggtttgcggcatcatgatgcgcgtcaggtgcgggtggccttcgatatcaataccaaacatctcccaggtctcacgctcgtaccagttggcgttagggaaaagtttagtgaaggtcggcacgcgcaggtcgttttcagacaacgccaccttgagcatgatatcgcgattacgctcaatggaaatcaggtggtagaaaacggaaaaatccgcggcgggtaa

SEQ ID NO: 381974 - DNA, 615 bp, Salmonella enterica; identical to SEQ ID NO: 372299

SEQ ID NO: 381975 - DNA, 558 bp, Salmonella enterica
  misc_feature (12)..(21): n is a, c, g, or t
gtgataaagccnnnnnnnnnngataaagccgcattgaccgcgccgtcacgcgatacctttgtgcgcctgctgaacgcaacgccgaacggcgtgatccgcaattcagacgtggcgaaaggcgtagtggaaacatcgctgaacgttggcgtggtcacaatgtctgatgcgaatgtcgaaattcactgcctgattcgctctcttatcgacagcggtaaagattatgtggtgagtatgctggattcgctgggcaagctggctggcgcgaaaaccgaagcaaaaggcagctatcctggctggcagcccgatgcgaactcgccggtcatgcacctggtgcgggaaacctatcagcgtctgtttaacaagacacctaacatccagattatccacgccggcctggaatgcggtctgtttaagaaaccctatccggatatggacatggtttctattgggcctaccattaccggacctcactctccggatgagcaggtacatatcgaaagcgtcggccactactggactctgctgaccgaattgctgaaagcgattcctgcgaagtaa

SEQ ID NO: 381976 - DNA, 393 bp, Salmonella enterica
  misc_feature (259)..(268): n is a, c, g, or t
atgaaatgcgtggatggtacgaagtcattacagtacagggatgtaataataaagatcgacaatggattcattactctgttgcttttggacggatgccaaatggaagtattcaatatcttctccttctctcctgataagattcagttttggcaatatacacatatatattgtattggaaaattgttgatattgttctttatgaccaacgaaatggaattttgcatatttaccacattttattaccctcgacatgggtatnnnnnnnnnncatcgacggaattatgttccataccaaaaaaactgcttacggcgatgacctggtctttggtattatccggcttaaaagacgagagacaatacacattttcgccccacgttctgagcgtctcatga

SEQ ID NO: 381977 - DNA, 732 bp, Salmonella enterica
  misc_feature (687)..(696): n is a, c, g, or t
atgattatcttcaccctgcgtcggttattgctgttgctggtgacgctattcttcctgacctttatcggctttagcctgagctattttacgccgcacgcgccgctacaaggcgcatcattatggaatgcctgggttttctggttcaacggtctgctgcactgggactttggcgtgtccagcattaacggccagctgatctccgaacagcttaaagaggtgtttcccgccacgatggagctgtgcattctcgcctttggttttgcgctgatggtcggcatcccggtcgggatgctggctggcgtgacgcgtagcaaatggccggatcgttttatcagcgcgctggcgctattaggtttctcaattccggttttctggctggcgcttctgctcacactgttcttttcgctcacgctggggtggctgccggtatccgggcgatttgacctgctttatgaagttaaaccggttaccggtttcgccatcattgacgcctggatttcagattcgccatggcgtgatgaaatggtgatgagcgccatacggcatatggttttaccggtgctcacgctctccgtcgcgccgaccacagaagtgatccgcctgatgcgaatcagcactattgaggtctacgatcagaactacgttaaagcggcggccacgcgcggcttatcgcgctttacgattttnnnnnnnnnnttccccgtcttggtctgcagttttcaaccatgttaa

SEQ ID NO: 381978 - DNA, 213 bp, Salmonella enterica
atgttaacgctggcgatgattaccgaaatggttttcagctggcctgggctgggacgatggttaattcacgccattcgtcagcaggactatgccgctatttccgctggcgtgatggtcattgggtcgctggttattgtggtcaatgtgatttccgatattttgggtgctatggctaaccatctgaaacataaggaatggtatgccttacgatag

SEQ ID NO: 381979 - DNA, 1119 bp, Salmonella enterica
ttgctgttcatcgccggttttcactttttccgccgtttcctgctggcgggtatcgcgcgcttccgcattttgctgctgcgtctggcgacggttacgacgattatcgtcgcggctctcgccgccgtcacgtccggcacggttatcacgggtgtcgcggcgttcgttacgatcgcgacggttgttctgccgtggcttgcgacgatcctgctgacgctccgctttttcttccgctttcggcgcggctgtttcgacggctttcgtttcttcaccgctgaacagttgtttcagcgcgttaaggaagcggctaaacagacccggctgggcaggctgcgcggcggcaacattatcctttttcgccgtggcgacgctaaccgccggttcgacaggcgtcggcgccggaggcacatctggcatagcgaatgtcgccagcgcaggctgttccgggcgtttacgctcggcgtactcttcttcagaaggcagcgccatcgcttcttcgtgcagcttcggcagcatgtagctcagggtcggcgtttcttcccctttgcgtacgcgcagcacggaatagtgcggcgtttccatctgatcgttcgggacgatgacacagcggacgccatcctgacgcgtctcaatagcgttaactgccgtccgtttttcgttaagcagataagaggcgatcggcaccggaacaatggcatggacttcctgcgtattctctttcagcgcttcttcttcaatcaggcgcagaatggacagcgacagagattcgttatcgcgcacggtgccggtaccgctacagcgcggacacacgtgatggctggattcgcccagcgacgggctcaggcgctgacgcgacatttcgagcaggccgaagcgggaaatatggctaatctgaatacgcgcccggtcctgacgcaccgcttcacgcagacggttttctaccgcgcgctggtgacgtaccggcgtcatatcgataaagtcgataacgatcaggccgcccaggtcgcgcagacgcaactggcgggcaatctcatcggccgcttccaggttggtattaaacgccgtttcttcgatatcgccgccgcgagtcgcgcgggcggagttgatatcgatggcggttaa

SEQ ID NO: 381980 - DNA, 255 bp, Salmonella enterica
atggctgaacaacgggatttcaccggtgtacagcttaattttgctgctaaaatccgggcggcccaacgcggcgatatgctgacgcgccatttccatcacttttggattgtcgatcaggatttcaccgatatcctgacgcagatagtcgcgaaacgcgcgtacgatgacgttgctttcctgatggatcaggaacggcgcgggacggctttcagcggctttctgaatggcctcccagtgtttcaggcggaagcttaa

SEQ ID NO: 381981 - DNA, 183 bp, Salmonella enterica
gtggcgttctgcgccgtaatcaacaaaagccgcttccaggctcggttcaatacgggtaattttgcctttatagatgttcgcttttttctgctcgtgtccggggctttctatatccagatcgtacagacgctgcccatctacaagggcgacgcgcaactcttcctgctgagtcgcgttgattaa

SEQ ID NO: 381982 - DNA, 345 bp, Salmonella enterica
gtgagcgtaccgtcgcactgcgcgctgatgaaaccagcggcagataagctggcggttgaattagccaaaattacctttaacgtgccaacggtgccggtagtaaacaacgttgacgtgaaatgtgaaaccgatgccgccgctatccgcgatgcgctggttcgccagttgtacaatccggtacagtggacgaagagcgtggaatttatcgcggcgcagggcgttgaacatctttatgaagtgggtccaggtaaagtcctcactggtctgacgaaacgtattgtcgacaccctgacagcgtcggcgctgaacgagccggcggcgctgtctgcggcacttacgcaataa

SEQ ID NO: 381983 - DNA, 1242 bp, Salmonella enterica; identical to SEQ ID NO: 368566

SEQ ID NO: 381984 - DNA, 912 bp, Salmonella enterica; identical to SEQ ID NO: 368589

SEQ ID NO: 381985 - DNA, 165 bp, Salmonella enterica
atggtgactattgtctttagcgcgggcgcagaggcgttggacatcggtgctgaacagcgtcggcaattagaagagcggctggtattgcaactgcgcatgattgcgaaaggggcgtattactggtatcgccgtgagcaagagaaaatagcacatcattccgaataa

SEQ ID NO: 381986 - DNA, 1845 bp, Salmonella enterica; identical to SEQ ID NO: 370154

SEQ ID NO: 381987 - DNA, 345 bp, Salmonella enterica
gtgcgcaaggcgcgcttaccgggcggacagctggagcaggcgcgtgagatcctgcgcgatatcgaatctctgctaccgcacaatgaatcgctgttccagaaggtgaacttcctgatgcaggcggcgatggggttcatcaacatcgagcagaaccgcattatcaaaatcttctcggtggtttccgtggtgttcctgccgccgacgctggtcgcttccagctatgggatgaacttcgagtttatgccggaacttaagtggagctttggttatccaggcgcgattatctttatgattctggcggggcttgcgccgtatctgtactttaagcgtaagaactggttgtaa

SEQ ID NO: 381988 - DNA, 648 bp, Salmonella enterica
atgtgtcgcatctatgacggtaaagaagaggtgagctcggcggagtatatgccgatggtgttgcaatttggtttatcggaagagtatgacagattacaaattagccgcctgattacgttgctgggctactggccggatgaaaatctggcaatgcagttgacggtcgagtcgctgattcgtccgcgttttcagcgctggttgcgcgatacgttaatgcagtgtgaaaaatcacagcgaaatcgcataattattgaacttgcggaggcagatgtttgtcaacacatctgtcggttacaacccatccttcgcttagtcaatgcgcttggcgttcgggtggcggtgacacaggcgggtttgacgctggttagcacgagctggattaaagcgctcaatgtggaattactcaagctgcatccgagtctggtcagaaacattgagaagcgaacggaaaaccagcttctggttcaaagtctggtagaggcctgcgcgggtacgcctacgcaggtttacgcgacgggcgtccgttcgcgcggcgagtggcagacgctgacaaaacgcggcgtggctggcgggcagggtgatttttttgcctcctcccaactacttgacacaaacgtgaaaaaatattcgcaaagatactcggtttaa

SEQ ID NO: 381989 - DNA, 1005 bp, Salmonella enterica; identical to SEQ ID NO: 371957

SEQ ID NO: 381990 - DNA, 2160 bp, Salmonella enterica; identical to SEQ ID NO: 369858

SEQ ID NO: 381991 - DNA, 228 bp, Salmonella enterica
atgccgctggaggatttggtgcagtacgtgccgctaccgctggatgaaaaacgggaataccatacgattgccggattattgatggaatatttgcagcgcataccgcaaaccggtgaagaggttcaggtgggtgattatttgctgaaaacattgcaggtagaaagccatcgagtgcagaaagtgcagttaattccgctgcataacggcgagccagaccaggagatgtaa

SEQ ID NO: 381992 - DNA, 708 bp, Salmonella enterica; identical to SEQ ID NO: 368861

SEQ ID NO: 381993 - DNA, 753 bp, Salmonella enterica
  misc_feature (693)..(702): n is a, c, g, or t
ttggatgctgcaacaattattagtctatttattttaggttccatccttgtaaccagcagtatcctgttaagttcattctcatcgcgactgggtatcccgattctggtcatttttctcgccattgggatgttagcgggtgtggatggcattggcggtattcctttcgataattatcctttcgcttatatggtcagtaacctggcgctggcgattattttactcgatggcggcatgcgcacccaggccagctctttccgggtagcgctgggccccgcgctgtcgctggcgacgctcggcgtactaatcacgtcggggttaacaggtatgatggccgcctggctgtttcatctggatcttatcgaaggtctgcttatcggcgcgatagtcggttccactgacgccgcagcggtcttttctctgcttggcggcaaagggctaaacgaacgtgtaggctccacgctggagatcgaatcgggaagtaacgacccgatggccgtttttctgaccattacattaattgagatgatccagaagcatgaaaccggcctggactggatgtttgccgtccatattatccaacagttcggtctcggtattgtttttggcctgggcggcggttacctgctacagcagatgatcaaccgtatttctctgcccagcggcttgtatccgatgctggcgctcagcggcggnnnnnnnnnncgcttgaaggcagcggcattctcgcggtctatttgtgcggattcctgttag

SEQ ID NO: 381994 - DNA, 1386 bp, Salmonella enterica
  misc_feature (1325)..(1334): n is a, c, g, or t
atggaattattaatggatccctcaatttgggtgggtttactcacgctcgtcgtcctggaaattgttctgggtatcgataacctggtctttatcgcgatcctcgccgataaattgccgccaaagcagcgtgacaaagcgcgtcttatcgggctctcgctggcgctgattatgcgtctggcgctgctgtccattatttcgtggctggtgaccttaacaaagccgctctttaccgtctgggattttaccttctccggccgcgatttaattatgctgctgggcggtatattcctgctgtttaaagcgaccaccgagctgcatgaacgtctggaaaaccgcgagcatgacaccggacacggtaaaggctatgcgagcttctgggtggtagtcacgcagattgtcatcctggatgcggtcttctcgctggacgccgtgattacggcggtaggtatggtaaaccatctgccggttatgatggcggcggtggtgattgcgatggcggtgatgctactggcgtcaaaaccgctgacccgttttgtcaaccagcatccgacggtggtggtgctctgtctgagtttcctgctgatgatcggcttgagcctggtggcggaagggttcggtttccatattccgaaaggctacctgtacgcggcaattggtttctcgatcgttatcgaggtgtttaaccagattgcgcgccgcaactttattcgtcatcagtccacgttgccgctgcgcgcgcgtactgcggacgctatcctgcgtctgatgggcggtaaacgccaggcgagtacgcaacatgaaacggatagcccggccgcgatatcggtgtcggaaggcgccttcgccgaagaagaacgctacatgattaacggcgtactgactctggcgtcgcgctccctgcgcggcattatgacgccgcgaggcgaaattagttgggtggatgcgaatctcagcgtagctgaaatccgtcagcagttactctcttctccgcatagcctgttcccggtatgtcggggcgagctggatgaaattatcggtatcgttcgggcgaaagagttgctggtggcgctggaagagggcgcggacgttgcggctatcgccgcgtcttccccggcgatagtggtgccggaaacgcttgatcctatcaatctgttaggcgttttgcgccgcgcgcgcggcagtttcgttatcgtcactaacgagttcggcgtggtgcaggggctggttacgccgctggatgtgctggaagcgattgccggtgagttcccggatgccgatgaaacgctggaaatcgttgccgatgccgagggctggatagtgaaggnnnnnnnnnntagtgaagggcggcaccgatctccatgcgctacagcaggcgctggaagttga

SEQ ID NO: 381995 - DNA, 453 bp, Salmonella enterica
atgataagcgtggcgcaaccgatagctaatgcggtagcgatgatgtttacctgcaaaaacgccagaccgacgccaaccgccatcgcatcgaggctggtcgcgatagccgtcgtgactaatagccaaaagctgtggcggcgtaacggtgtttcatcttcatcactaccgccgcggataccttcgatgatcatgcgtccgcccagaaagatcagcagaacaaaggctatccagtggttccattccagaacgaatttactcgccaatatccccagcccccagccgattaacggggtcagcgtttcaaccgcgccaaagataaggccggtacgcaacgcttctgagaatttgggtttatgtagggtggcgcctttgccaattgatgccgcgaaagcatccatcgacataccgaaagcgagaagaacagtagcagtaaagtgcatgacaacgtcctga

SEQ ID NO: 381996 - DNA, 684 bp, Salmonella enterica; identical to SEQ ID NO: 369623

SEQ ID NO: 381997 - DNA, 507 bp, Salmonella enterica; identical to SEQ ID NO: 368849

SEQ ID NO: 381998 - DNA, 429 bp, Salmonella enterica
gtgctccagcatgccgccgatattggtcccggcctcgccggtgacgttgtcgagcttgccgcagccgtccaccgctttcatgatagcttcggcaccggcggcaacatccacgcgcacggtacgaccctgagcctgcagctccaggttaccggcgggtattgcgcgcgctttgacgtcgccggatggcgttttaaccaccacggcggaacggttgccaatcagcgcgcgcgccatcgggacgatgtttttcgtctcatcggcgttgaggttgaatacggtggcgatgccgtaagggttggagagggtctcgaggtcgatgtagagcacttcgtcaacgatcggcagcgatttttccagccggttgctgaccagcacgccatcgtcgcgctgcaaaatgacgccggtaatctggtatccggcgcgcattga

SEQ ID NO: 381999 - DNA, 936 bp, Salmonella enterica; identical to SEQ ID NO: 371732

SEQ ID NO: 382000 - DNA, 1527 bp, Salmonella enterica
atggtgctggggctttccgccgtcacgggaggcgcgattgggttactgtttgaaaacatattgctggtgctgctaaaaccggtattgcccgccgatttgccgcccgccagcctgtggccctggctgtgggcgctgggcgcgatgacggtcatctctttgctggtcggtttacggccttatcgattgttgctggcgacccagccgctacgggtgctgcgccgcgatgttgtcgctcgcgtctggccgttaaaaatttatttgcctgtcgcctgcgccgtcgtggtggcgctgctcgccggattgatgggcggaagtatgctgttgtgggcggttctggcgggtgcagtgatactggcgctgctgtgcggtctggtgggctggatgctgcttaacgtgctgcgcggcatgacgttgacgtcgctaccgctgcgtctggccgtcagccgacttctgcgtcagccgtggtcaacgttgagtcagctttcggcgttttcgctttcgtttatgctgctggcgctcttgctggtgctgcgcggcgacctccttgatcgctggcaacagcaactcccgccggaaagtccgaactatttccttatcaatattgcttcagagcaggtcgcgccgctgaaagcctttttggcggaacatcaggtgattccgcagacgttttatccgattgtgcgggcgcggttaaccaggataaacggtaatccgacggaaggtcagcaggatgagtcactcaaccgtgaactgaatttgacctggcaggatacgcgcccggcgcataacccgctggtcgccggtcactggccgccaaaaccgggcgaagtctccatggaagaggggctggcgaagcggctgaacgtcaaactcggcgatagcgtaacctttatgggcgatacccaggcgtttagcgctaaagttaccagtctgcgtcaagtggactgggaaagcctgcggcccaactttttcttcatttttccttccggggcgctggacgggcaaccacaaagctggttgaccagttttcgctgggagaatggcaacggcatgttaacgcagcttaaccgcgagtttcctaccgtcagcctgttggatatcggggcgatcctgaaacaggtgggacaggtgctggagcaggtcagtcgggcgctggaggtgatggttgtgctagtcaccctctgcggcatgttgctattactggcccaggtacaggtcgggatgcgtcagcgccatcaggagctggtggtgtggcgcacgttaggagccggaaagaaactgttgcgtaccacactctggtgcgaattcgccatgctgggattagttgccgggttggtcgccgcgattggcgcggaaacggcgctggcgatcttacaaatcaacgtttttgatttcccctgggagccggactggcgtttatggggcgcactgccgttttgcggcgcgctgctgctttccgtatgcggcggctggcttggcgttcgtttgctgaaaggcaaagcgctattccgacagtttagcggatga

SEQ ID NO: 382001 - DNA, 357 bp, Salmonella enterica
atgagacaccagttgctgtgtgaaagcgtgttgcgggtgggcaaacacatcaaacacctcgcccgattccacaaccttaccgcccgacatcaccgccacgcgatcgcaaatagatttgatcacgttcatttcatgggtgatcagcacaatagtaatcccgagctgtgcgttgatctgtctgagcagagccagaatcgtggcggaagtttccagatccaaagcggaagtcggttcgtcacacagcaaaacatccggatggttagcgatggcgcgggctatccccacccgctgtttttgcccgccgctgagctgtaccggaaaacggttcgctttatcggcaaggcccaccagcgttaa

SEQ ID NO: 382002 - DNA, 837 bp, Salmonella enterica
  misc_feature (668)..(677): n is a, c, g, or t
atggcaaaaatgagagccgtggatgcggcaatgtatgtgctggaaaaagaaggtatcaccacagcattcggcgttcctggggctgcaatcaaccccttctattctgcaatgcgtaagcatggaggcattcgccatatactggcgcgtcatgtggaaggcgcttcgcatatggctgagggctacacacgtgcggcggcaggtaatattggggtctgcctgggcacttccggcccggcgggaaccgacatgatcaccgcgctctattccgcttctgccgactctatcccgattttatgcattactggtcaggcgccacgagcgcgtctgcacaaggaagatttccaggcagtcgatattgaagcgattgcaaaaccagtcagcaagatggcagtgacggttcgtgaggcggcgctggtgccgcgcgtattacagcaggcttttcatctgatgcgctcaggccgcccaggtcctgtgctggttgatttaccgtttgatgtccaggttgcggaaatcgaattcgatccggatatgtatgagccgctgccggtatataagccagccgccagccgcgtacagattgaaaaggcgctggagatgctgattcagtccgagcgtccggtaattgtcgcgggcggcggggttattaacgccgacgccgcgccactgcnnnnnnnnnnttgccgaactgaccaatgtaccggtgatccctaccctgatgggctggggctgtatcccggacgatcaccccctaatggcggggatggtcggcctgcaaacggcgcaccgctacggcaacgccactctgctggcatccgatatggtttttggcatcggtaa

SEQ ID NO: 382003 - DNA, 618 bp, Salmonella enterica
atgacaacccagtatggattttttattgattccagtcgttgcaccggttgcaaaacctgcgaactggcctgcaaggactacaaagatctcactcccgacgtcagtttccggcggatatatgaatacgcaggtggcgactggcaggaggataacggcgtctggcaccagaacgtctttgcctattatctctccatttcatgcaaccactgcgaagacccggcctgtaccaaagtctgcccgagcggcgcgatgcacaagcgcgatgacggttttgtggtggtgaacgaagaggtctgtatcggctgccgctactgccacatggcctgcccgtacggcgcgccgcagtacaacgccgccaaaggtcatatgactaagtgcgacggctgtcatgatcgcgtcgccgacggcaaaaagccgatttgcgtggagtcctgcccgctgcgggcgctggactttggcccgatagacgaactgcgtaaaaaacacggagagctggctgccgtcgcgccgttgccgcgcgcgcatttcacgaagccgaatattgtgattaaaccgaacgccaacagccgcccgaccggggacactaccggttatctggccaatccgaaggaggtataa

SEQ ID NO: 382004 - DNA, 423 bp, Salmonella enterica
  misc_feature (151)..(160): n is a, c, g, or t
atgagtagcgtagatattcttgttcccgacctgcctgagtccgtagcggacgcgaccgtcgccacctggcataaaaaaccgggtgatgcggttgttcgtgacgaagtgctggtagaaatcgaaactgacaaagtggtactggaagtaccgnnnnnnnnnncggcattctggatgcggttctggaagaggaggggacgactgtcacctctcgccagatcctgggtcgcctgcgtgaaggcaacagcgcgggtaaagagaccagcgccaaatctgaagagaaagcgtctacgccggcacagcgccagcaggcgtcgctggaagaacaaaacaacgatgcgctcagcccggcgatccgtcgcctgctggctgaacacaatctggaagccagcgccattaaaggcactggtgtgggtgggcgtctga

SEQ ID NO: 382005 - DNA, 588 bp, Salmonella enterica
  misc_feature (500)..(509): n is a, c, g, or t
atgcccacccatttagtctggttcaggcgcgatctgcgtttacaggataaccttgcgctggccgccgcctgccgcgatgcatccgcgcgggtgctggcgctttatatttccacccccgcgcagtggcaggcccatgatatggcgccgcggcaggcggcattcatcagcgcgcagctcaatgcgctacagacggcccttgcagagaaaggcattccgttgctgtttcatgaagtggcggattttaacgccagtattgaaacggtcaaaaacgtttgccgacagcatgacgtcagccatctgttttataactatcagtatgagtttaacgagcgtcagcgtgatgcggcggtggaaaaaacgctgccctctgtcatctgcgaaggctttgacgatagcgtgattctggcgcccggcgcggtgatgaccggcaatcatgaaatgtataaagtttttacgccgtttaaaaatgcctggttgaaacggctaaaagaagatatccnnnnnnnnnnatatcccgccgtgcgttccggccccgaagatccgggtgagcggcgcgctttctacacccttaacgccagtctcgcttaa

SEQ ID NO: 382006 - DNA, 759 bp, Salmonella enterica; identical to SEQ ID NO: 369382

SEQ ID NO: 382007 - DNA, 816 bp, Salmonella enterica
  misc_feature (766)..(775): n is a, c, g, or t
atgtcagtaagtgcatttaaccggcgctgggcggcggtcatcctggaagccttaacccgtcatggcgtcaggcatgtttgtatcgcccctggttcccgttccacgccgctcacgttggcggcggcagagaatcctgcttttattcaccatacgcactttgatgagcgtgggcttggtcatctggcgttagggctggcgaaagtcagccaacagccggttgccgttattgtcacttcaggtaccgccgtggcgaacctctatccggcgctgattgaggcggggctgacgggcgagaagctcattttacttaccgccgatcgcccgccggagctgattgactgcggcgccaaccaggcgatccgtcaggcggggatgtttgcctcgcacccctcccaaactctgtcgttgccgcgtcccacgcaggatattccggcgcgctggctggtgtcgaccatcgacaatgcgctcgccatgcttcatgcgggcgcgctgcacattaactgtccttttgccgaaccgctgtatggcgatatgaatgacaccggtctggtctggcagcagcgtctcggcgactggtggcaggatgaaaaaccctggctgcgcgaagcgcgtcgactggaaagcgacaaacagcgcgactggtttttctggcgacaaaaacgcggcgtcgttgtcgccgggcgtatgagcgcggaagaaggcaaaaaagtggcgcagtgggcgcaaactctgggatggccattaattggcgacgtattgtcgcaannnnnnnnnngccgtgcgccgacctgtggctcggcaacgccaaagcggtga

SEQ ID NO: 382008 - DNA, 237 bp, Salmonella enterica
atggatggctttacgttaacgcgtaaaattaaaaccgatgaacggctgaaaaagatcccggtcgttattcactcttccctttccggcagcgccaacgaagatcatatacgtaaggtgaaggccgacggctacgtggccaagtttgagattaacgaactctcttcggtcattcaggaagtgctggagcgcgcagcaacaaacagccagggaccactgatcagccgcaaaagcgcctga

SEQ ID NO: 382009 - DNA, 1791 bp, Salmonella enterica; identical to SEQ ID NO: 369375

SEQ ID NO: 382010 - DNA, 630 bp, Salmonella enterica
  misc_feature (596)..(605): n is a, c, g, or t
atgagtgaattttcccagacagtccccgaactggttgcctgggccagaaaaaacgacttttccatctcgctgccggtagacagactttcctttctgctggcggtcgccacgttgaacggcgaacgccttgacggcgagatgagtgaaggcgagctggtggatgcattccgccatgtgagtgatgcgtttgagcaaaccagcgaaaccatcggcgtgcgcgcgaacaacgcgattaacgatatggtgcgtcaacgtctgctgaaccgctttaccagcgagcaggcggaaggcaatgcgatttaccgattaaccccgctcgggattggcatcaccgattactacattcgtcaacgcgaattctctacgctgcgtctttctatgcagttgtcgattgtggccggcgaattgaagcgcgcggcggatgcggcagcggaggggggcgatgagttccactggcatcgcaacgtttacgcgccattgaaatattcggtggcggagattttcgacagtatcgatctcacccagcgcatcatggatgaacagcagcagcaggtgaaagacgatatcgcacaactgctgaataaagactggcgggnnnnnnnnnnggcgggcggcgatttccagctgtga

SEQ ID NO: 382011 - DNA, 816 bp, Salmonella enterica
atgctgggacagcttcaggctgacagcgggcgcatccacgtaggaacgaagctggaagtcgcctacttcgatcagcatcgcgccgaactggacccggaaaaaaccgtgatggataacctggcggaaggcaagcaggaggtgatggtaaacggtaagccgcgccatgtactgggctatttgcaggacttcctgtttcaccccaaacgggcgatgacgcccgtccgcgcgctttccggcggcgaacgtaaccgtctgctgctggcgcgactgttcctcaagccgagcaatcttttaattctcgatgaaccaacgaacgatcttgacgtcgaaacgctggaactattagaagaattaattgatggctatcagggcacggtactactggtcagccacgatcggcaatttgtcgataataccgtgacggaatgctggattttcgagggcggcggcaaaatcggacgttatatcggcggctaccatgatgcgcgtgcgcagcaagagcagcatctggcgacgaaacagccgatggcgaaaaaaaatgaggaagttattgcccctaaagcagaaattgtaaaacgtggcagtagcaaactaagctataaactgcagcgcgagctggagcagttacccggtcagcttgaagacctggaagcgaagctggaagcgctacaggcgcaggttgcggatgcggccttttttagccaaccccatgagcaaacgcaaaaagttctggccgatttaagtcaggcggagcaagaacttgagcaagccttcgaacgttgggagtatcttgaaggcctgaaaaacggggcataa

SEQ ID NO: 382012 - DNA, 1188 bp, Salmonella enterica
  misc_feature (971)..(980): n is a, c, g, or t
ttgttgtctgaatatggcttatttttggcaaaaatcctcaccgttgtggtggccattgccgtcattgtgctgctgatcgtgaatgctacgcaacgcaaacgtcagcgcggcgagctgcgcgtgaccaatttgagcgagcagtatcaggagatgaaggatgaccttgctgcggcgttgatggatggccatcagcaaaaactgtggcataaagcgcagaaaaaaaagcataagcaggaggcgaaagccgccaaagcgaaagcgaagctgggggacattgcgacatcggacaaaccgcgcgtatgggtgatagatttcaaaggcagtatggacgctcacgaagttaatgcgttacgcgaagaggtcacggcggtgctggcagtggcgaaacccggcgatcgggcggttgtgcgtctggaaagccccggtggcgttgtgcacggctatggcctggcggcatcgcaattgcagcgcctgcgcgataaaaatattccgctgaccgtgacggtggataaagtcgcggcaagcggaggctacatgatggcctgcgtggcggaaaaaattatcgcggcgccgttcgctattgtggggtcaattggtgttgtcgcgcaaatcccgaactttaaccgctttctcaaaagtaaagacattgatattgaactgcataccgcagggcagtacaaacgtaccctgactttgttaggcgagaatacggaagaagggcggcagaagtttcgtgaagatctcaacgaaacgcaccatctgttcaaagagtttgtgcagcggatgcgtccggctctggacattgaacaggtcgccacgggcgaacactggtacggtcagcaggcgctggagaagggactggttgatgagattaacaccagcgatgaggttatcctcggcctgatggaagggcgcgaggtgctgaatgtgcgctatatgcagcgtaaaaaactgatcgatcgtgttaccgnnnnnnnnnngtgttaccggcagcgcggcggaaagcgcggatcggctgctgctgcgctggtggcagcgtggacaaaagccgttgatgtaaaccgctattgccggatggcattcagcgccatccggcatggattaatcaaccaggtgatacttctcagacagcacatgcgccaggtgtttaaacatgttaaacaccgcggtgcttttaggggtcggtaa

SEQ ID NO: 382013 - DNA, 663 bp, Salmonella enterica
  misc_feature (428)..(437): n is a, c, g, or t
atgcattaccaaccgaaacaagatctattgcaaaaccgcattattctggtcactggcgccagcgatggcattgggcgggaagccgcgcttacgtatgcgcgttacggcgcaacggtgattctgctgggacgcaacgaagagaaactgcgtcgggtcgcgcagcacattgctgacgagcaacatgttcaaccacagtggtttacgctcgatctgctgacctgcaccgctgaagagtgccggcaagtggccgaccgcatcgccgcgcactatccccgcctggatggcgtcctgcacaatgccgggttactgggggaaatcggtccaatgagcgaacaagatccgcagatctggcaggatgtcatgcaggtaaacgttaacgccacctttatgctcacccaggcgctgttaccgttattgctgaagtccgnnnnnnnnnnggcggacgaataccagaatcgttctctgcgtgttaactgcattaacccgggcggcacgcgcaccagtatgcgcgccagcgcctttccgacggaagatccacagaaattaaaaacgcctgccgatattatgccgctttacctgtggcttatgggcgacgacagtcgccgtaaaaccggtatgacctttgacgcccaaccgggccgtaaaccaggaatcgcccaatga

SEQ ID NO: 382014 - DNA, 2214 bp, Salmonella enterica; identical to SEQ ID NO: 369912

SEQ ID NO: 382015 - DNA, 165 bp, Salmonella enterica; identical to SEQ ID NO: 371553

SEQ ID NO: 382016 - DNA, 3267 bp, Salmonella enterica; identical to SEQ ID NO: 371577

SEQ ID NO: 382017 - DNA, 660 bp, Salmonella enterica
  misc_feature (296)..(325): n is a, c, g, or t
gtgaagctttatatttacgatcattgccctttctgcgttaaagcccgcatgattttcggcctgaagaacatccccgttgaacttaacgtgttacaaaatgacgacgaggcgacgcccacccggatgattggtcaaaagatggtgcccatcctgcaaaaagatgatagtcgctaccttcctgaaagtatggatattgtacattatgtcgacaacctcgacggcaaaccgctgttaaccgggaaacgcaatccagccattgaagagtggttgcgcaaagttaacggttacgttaatcnnnnnnnnnnnnnnnnnnnnnnnnnnnnnnttgcaaaatccgctttcgatgaattttctacccctgcggcgcgtcagtattttatccgcaaaaaagaagcctcatctggcagttttgacaaccatcttgcgcactctgcaggactgattaaaaagatcggcgatgatttacgtttgctggataaactcatcgtacagcctaacgccgttaacggcgaattatcggaagatgatattcatctgtttccgcttctgcgtaatctgacgctggtcgccggtatccactggccgacaaaagtcgcggactatcgcgataatatggcgaagcagacgcaaattaatttactctcctcaatggctatctaa

SEQ ID NO: 382018 - DNA, 192 bp, Salmonella enterica
atgaacgcgctggcgcactttgaagcgttctgttcactgaatggcccgcaattctatggcctgccggtgaatgcggggtgggtggaactggttcgcgatgaacaacaggtaccggaaaatatcgcgctggctgatgattcgctggtgccttttttagcgggtgaaacagtacgctggtcagtaaaaaaataa

SEQ ID NO: 382019 - DNA, 1215 bp, Salmonella enterica; identical to SEQ ID NO: 368524

SEQ ID NO: 382020 - DNA, 375 bp, Salmonella enterica; identical to SEQ ID NO: 368523

SEQ ID NO: 382021 - DNA, 210 bp, Salmonella enterica; identical to SEQ ID NO: 368303

SEQ ID NO: 382022 - DNA, 1746 bp, Salmonella enterica; identical to SEQ ID NO: 368304

SEQ ID NO: 382023 - DNA, 768 bp, Salmonella enterica
atgtcgtttacctgtccgctttgccatcagccgcttacgcagattaataacagcgttatatgtccacagcgccatcagtttgatgtggcgaaagagggctacatcaatctgctgccggtacagcataaacgttcgcgcgatccgggcgacagcgccgaaatgatgcaggcgaggagagcgtttcttgatgcgggccattatcagccgctgcgcgatgcggtgattaacctgttgcgcgagcggctggatcagtcggccacggcgattctggatatcggctgcggcgaggggtattacactcatgcttttgccgaggcgttgccgggagtcaccacgtttggactggacgttgctaaaacggcgatcaaagcggcggcgaagcgctattcgcaggtgaagttttgtgtggcgtcaagccatcgactgccctttgccgatgcgtcaatggatgcggtgatcagaatctacgccccgtgtaaggcgcaggaattggcgcgtgtggtgaaacctggtggttgggtcgttaccgccacgccagggccgcatcatctgatggaactaaaagggctcatttatgatgaggtgcgtttacatgcgccgtataccgagcagctcgacggattcacattgcagcagagtacccgccttgcttatcacatgcagctcaccgccgaagcggctgtagcactgttgcaaatgacgccatttgcctggcgcgccaggcaaatggcgtcatttgcaacagtgctacagccgcttcggcggtga

SEQ ID NO: 382024 - DNA, 156 bp, Salmonella enterica
atggtagcgaacaccgcctttacccggacctcgggagaggttgtgctgcacgcgatatccttcgaaatgacgaatagtgccatcatccatttgtaccggaatatcgacgatcagagcgcgttttgggtggcgcagagtatccacccagggggataa

SEQ ID NO: 382025 - DNA, 1137 bp, Salmonella enterica; identical to SEQ ID NO: 368345

SEQ ID NO: 382026 - DNA, 1488 bp, Salmonella enterica; identical to SEQ ID NO: 370611

SEQ ID NO: 382027 - DNA, 1344 bp, Salmonella enterica; identical to SEQ ID NO: 370613

SEQ ID NO: 382028 - DNA, 300 bp, Salmonella enterica
atgacaaaaccagcatcaaccaccaaaaagccacgcaagcagcacacgcctgaatttcgtcaggaagctatgaaactggctgaacgcattggggtggccgctgccgcccgcgaacttaacctgtatgaatcgcagctctacaactggcgaagcaaacagcaaaatcagctctcttcttctgaacgcgaacaggagatgtccgcagaaatcgtccgtctgaagcgtcaactggcagaacgggatgaggaactggccattctccagaaggtcgcgacatacttcgcgaaacgcctgaaatga

SEQ ID NO: 382029 - DNA, 759 bp, Salmonella enterica
  misc_feature (715)..(724): n is a, c, g, or t
atgagtcatgatccaaaaccgctgggcggaaaaatcatcagtaaaccggtcattatttttggaccgttaatcgtcctgtgtatgctccttatcgtgaagcgtctggtcttcgggttgggctccgtttccgacctgaacggcggtttcccatggggcgtctggattgcctttgacctgttgatcggcactggctttgcctgcggcggttgggcgttggcatgggcggtatatgtctttaaccgtgggcaataccatccgttggtgcgcccggcgttgctggcaagcttgtttggttactcgctgggcggcctgtcgatcactatcgacgtcggtcgttactggaacctgccgtacttctacattccaggtcacttcaacgtgaactcggtactgtttgagacggcggtctgtatgaccatctacatcggcgtgatggcgctggagtttgcgcctgccttgtttgaacgtctgggctggaaagtgtcgctcaagcgtctgaataaggtgatgttctttattatcgcgctgggcgcgctgttgccgacgatgcaccagtcctcaatggggtcattgatgatctcggcgggctataaagtgcatccgctatggcaaagctatgaaatgctgccgctgttctcggttctgaccgcgtttatcatgggcttctccattgtcatatttgagggttcgctggttcaggcaggcctgaaaggannnnnnnnnncggtccggatgagaaaaatttgtttgttaagctga

SEQ ID NO: 382030 - DNA, 444 bp, Salmonella enterica
ttgtttgttaagctgacgaataccatcagcgtgctgctggcgattttcgtcgtcctgcgctttggcgaactgatttatcgcgacaagctgtcctatgcgtttgccggcgatttttactccgctatgttctggattgaagtcgtcctgatggtcttcccgttagtggtgctgcgtgtggcgaaactgcgtaatgactctcgtatgctgtacctgtcggcgctgagcgcgctgttgggctgcgcgacgtggcgtctgacctattcgctggtggcattcaacccgggtggcggctaccactacttcccaacttgggaagaattgttgatttctattggttttgtggctattgagatttgtgcatacatcgtactcattcgtctactgccgatacttcctcctttaaaacaaaacgatcataatcgtcatgaggcgagcaaagcatga

SEQ ID NO: 382031 - DNA, 777 bp, Salmonella enterica; identical to SEQ ID NO: 371245

SEQ ID NO: 382032 - DNA, 792 bp, Salmonella enterica; identical to SEQ ID NO: 369400

SEQ ID NO: 382033 - DNA, 249 bp, Salmonella enterica; identical to SEQ ID NO: 381954

SEQ ID NO: 382034 - DNA, 138 bp, Salmonella enterica; identical to SEQ ID NO: 381953

SEQ ID NO: 382035 - DNA, 552 bp, Salmonella enterica
  misc_feature (368)..(377): n is a, c, g, or t
atgagcgacaataaaacagaatactcatattatattaaggttaaaaatgaaagcgcccggaaacgtctcggcttcccttttgctttctggtggaaaactgaaagcagcgaagccgctgccacagcacgccttgccgtatcaatgcttgacgccggattcgaaccgacagattttgcaaaaccggttcgcgttaattcccccgctgttaacgaacttccgccggagggaagttttgataccaccttctgtcagaaatatgagctgggcggcgaagatggcaaaacatttatgctcatccccggcacgcccgctactgacgcccacgacgaaaaaacggaggaatgcgccgacgacgctggcaccgaagnnnnnnnnnngcgcgtgttgcacatttttacttacgctgccacagacaaaaaatatttgcatcacgccacccgcgctcaacgcaggcatattaccgttctcgaaatggaacaggaaaacagctatatccagaacctgttaatggtattgcggaagtctgaacaggttcatgcccaggatgagtaa

SEQ ID NO: 382036 - DNA, 1554 bp, Salmonella enterica; identical to SEQ ID NO: 369731

SEQ ID NO: 382037 - DNA, 486 bp, Salmonella enterica
gtgaacggctacgcgtttggcggcggttttgagctggcgctggcggcggactttattgtctgcgccgaaaacgccagcttcgcgctgccggaagcaaagctaggcatcgtgcctgacagcggcggcgtattgcgtctgcctaagctgctgccaccggctatcgtcaacgaaatggtaatgaccggcagacgaatgagcgccgaagaagcgctgcgttggggagtcgtgaaccgcgttgtcagccagagcgaactgatggatagcgcgcgcgaactggcgcaacaactggtcaatagcgccccgctggctatcgcggcgctgaaagagatttatcgcgcgaccagcgaaatgccggtagaagaaggctaccgctacatccgcagcggcgtgctgaagcattatccgtcggtactgcattcagaagatgcgctcgaaggaccgcaggcatttgccgaaaaacgcgatccggtgtggaaaggtcgttaa

SEQ ID NO: 382038 - DNA, 1380 bp, Salmonella enterica; identical to SEQ ID NO: 368657

SEQ ID NO: 382039 - DNA, 639 bp, Salmonella enterica
  misc_feature (557)..(566): n is a, c, g, or t
atggaagacaatgatcatatcggcgccagactagaccgcttaccgttatcccggtttcattttcgtatttttggaataattagttttggcctgctattaacggggtttttgagttattcaggaaatgtggttctggccaaattgataaacaatggctggtcgaataattatcttaatgccgcgttcacatcggcactgatgcttggctattttattggttcgcttaccggcggttttattggggattacctggggcgtcgaaaagcgtttcgcattaatttgttgcttgtgggcatctccgcaacggctgccgcatttgttcccaatatgtactggctgattttctttcgttgtctgatggggacaggcatgggggcattgattatggttggatatgcttcttttaccgagtttatccctcccattgtacgaggaaaatggtccgcgcgtctctcttttgtagggaactggtcaccgatgctgtctgcgggaattggcgtagtggtcattgcgtttttaagctggcggatgatgtttcttcttggtgggatagggannnnnnnnnnggatagggatgctgctggcgtggtctctttcggggaagtactttatcgactcgcccaggtggttaccaggtaa

SEQ ID NO: 382040 - DNA, 1044 bp, Salmonella enterica; identical to SEQ ID NO: 368668

SEQ ID NO: 382041 - DNA, 1908 bp, Salmonella enterica
atgcggttgtttattgccgaaaaaccgagtctggggcgcgccattgcggatgtgctgccaaaaccgcaccgtaaaggcgatggttttattgagtgcggaaacgggcaggtcgtcacctggtgtattggtcatttgctggaacaggcgcagccggatgcgtatgacagccgttatgcgcgctggaatctggctgacctgcctatcgtgccggaaaaatggcagcttcagcctcgtccttccgtcaccaaacagctcaatgtgattaagcgctttttgcatcaagccggtgaaattattcacgccggcgacccggatcgcgaaggacagcttctggttgatgaagtgctggattatctccagcttcctgccgaaaagcgccagcaggtgcggcgttgtctgataaacgaccttaacccgcaggcggtcgagcgtgctattgacaggctgcgggcgaacagcgacttcgtgccgctgtgcgtctccgctctggcgcgagcgcgagcggactggctgtatggcattaatatgacccgtgcttacacgatcctgggccgtaatgccggctatcagggcgtgttatccgtgggacgcgtgcagacgcctgtactggggctggtggtgcggcgagacgaagagattgagaacttcgtcgccaaagaccgttttaccgctatctggcagccgagcgaggcgtgcgaaccttatcaggatgaagaggggcgcttgcttcatcgtccgctggcggagcatgtagtgaaccgaatcaacggtcagcccgcgctggtaaccagttataatgataaacgggaatcagaatccgcgccgctgccgttttcgctctcgacgctacagattgaagccgccaaacgctttggcctgagcgcgcaaaacgtgcttgatatttgtcagaagctatatgaaacccacaaactgattacctatccgcgttccgactgccgttatctgccggaagaacactttgccggacggcaggcggtcatgaacgcgattagcgtccacgccccggatttactgccgcagtctgtggttaatcctgacacgcgcaatcgctgctgggatgacaaaaaagtggatgcgcaccacgcgattatcccgacggcgcgcagttcttctgtccatttgacggaaaacgaagcgaaagtgtacaccctgattgcgcgtcagtatctgatgcagttctgcccggacgcggtgtttcgtaaatgcgttattgaactggaaatcgccaaaggaaaatttgtcgccaaagcgcgttttctggcggaggccggttggcggacgttactgggcagtaaagagcgcgacgaggaaaacgacggtacgccgctgccggttgtcgccaaaggtgatgagttgctgtgtgaaaagggggaagtggtcgagcgccaaacccagccgccgcgtcatttcaccgatgcgacattgctttccgcgatgaccggaattgcccgcttcgtgcaggataaagatctgaaaaagatcctgcgcgcgaccgatgggctggggacggaagccacgcgcgccgggattatcgagctgctgttcaaacgtagctttctgaccaaaaaagggcgctacattcattctaccgatgctggcaaagcgttaatacattcgctgccggaaatggcggcccgtccagatatgaccgcgcactgggaatctgttttgacgcaaatcagcgaaaagcagtgccgttaccaggattttatgcaaccgctggtcggcacgttatatcagctgatcgatcaggctaagcgcacgccggtgaagcgtttcagagggatagtcgcgccaggcggtggagaaaagaaaaagagcgcgccgcgtaagcgagcgggcaaaaaaagcccgcctgctgaggagacaggccgtcagaccgaataa

SEQ ID NO: 382042 - DNA, 606 bp, Salmonella enterica
  misc_feature (536)..(545): n is a, c, g, or t
atggatcagacatgttctctggaatcgttcctcaaccatgtacaaaagcgcgacccgcatcaaaccgagttcgcgcaagccgtccgtgaagtcatgaccaccctgtggccgtttcttgaacaaaacccccgttaccgccacatgtctttactggaacgtttggttgaaccagagcgcgtaattcagtttcgcgtagtgtggctggacgacaaaaaccaggtgcaggtaaatcgcgcctggcgcgtgcagttcaactctgctatcggcccctataaaggcggtatgcgcttccatccttcggtaaacctttccatccttaagttcctcggctttgagcaaacctttaaaaatgccctcaccacgttgccgatgggcggcggtaaaggcggcagcgatttcgatccgaaagggaaaagcgaaggcgaagtgatgcgtttctgccaggcgctgatgactgaactgtatcgccatttagggccggataccgacgtgcctgccggggatatcggcgtgggcgggcgcgaagtgggctttannnnnnnnnnctttccaataacagcgcctgcgtcttcaccggcaaagggctttccttcggcggcagcctga

SEQ ID NO: 382043 - DNA, 1836 bp, Salmonella enterica
atggctttcttccacctgacgcatattcttccgggcgatagcgccctggttgagctgcagggcgcgattgccaaaagctatagcagcaaaggacaggatctggttgagcgtaactggcaggcattggctctggcgcaggaatcgctggcggaagtgccgttgcaggcggttaatccgcatagcgcgcatcgcccgccggtcgtctccgacgccgcgccggatttcgtgaaaaccgttaccgccgccatgttggcgggcctcggcgacgcactgcctgtttccgccctgccgccggacggaacatggccaatgggcaccacccgctgggaaaaacgcaatatcgccgaagagattcctgtctggaaagaggaactgtgtacacaatgtaatcactgcgtcgccgcctgccctcactcggcgattcgtgcaaaagtcgtttccccgcaggcgatggagaacgcgccagccagtctgcattcgctggacgtgaagtcccgcgatatgcgcggccagaaatatgtgctgcaggtcgcgccggaagactgtactggctgtaatttatgcgtagaggtctgcccggctaaagatcggcaaaatccacagatcaaggctattaacatgatgtcgcgcctggagcatgtggaagaagagaaagtgaattatgactttttcctcgacttaccggaaatcgatcgcagcaaactggaacgaattgatatccgcacatcgcagcttattacgccgctgtttgaatattccggcgcctgttccggctgcggtgaaacgccgtatattaaactgctgactcagttatatggcgacagaatgttaatcgctaacgccacggggtgttcctctatttacggcggtaacttaccctctacgccttataccaccgatgccaacggacgcggcccggcgtgggcgaattcgctatttgaagataacgcggaatttggcctcggtttccgtctgagtgtggatcagcaccgggcgcgcgtcatgcgtttactggcgcaattcgccgatcgcattccggcggaattaaacgatgcgctgcatgccgaagcaacgcctgacgttcggcgtgaacaggtcgccgcattacgccaacatctgaaatcggttgcgggcgcagaggaactgttaaaggatgctgatgcgctggtagaaaaatcaatctggctgattggcggcgatggttgggcatacgacatcggctttggcggtttagaccatgtgttaagcctgacggagaatgtcaatattctggttctggatacgcagtgttattccaatactggcggccaggcgtcgaaggcgacgccgcttggcgccgtcactaagtttggcgaacatggcaagcgtaaagcccgtaaagatcttggcgtcagcatgatgatgtatggtcatgtttatgtcgcgcaaatttcgctgggcgcgcagttaaaccagacggtgaaagccatccaggaggccgaagcctggccaggaccgtcgctgatcattgcctatagcccctgtgaggaacatggttacgatctggcgctaagccatgaccagatgcgccagttaacggcgaccggtttctggccgttataccgctttgatccccgccgtgcggatgaaggcaagccgccgctggctctggactctcggccaccgtctgatgccctggcggaaacgttgcttaatgaacagcgtttccgtcgcctgaatgcgcaacagcctgaagtagctgaacaattatggcgagatgccgcattggatttgcaaaaacgctatgactttcttgccttgctggcaggaaaagcggaaaaacccggcgcagattaa

SEQ ID NO: 382044 - DNA, 153 bp, Salmonella enterica
atgtcgcgtatggtacggattacggcgacgaatgccagcacgtttttatggcaagatacgcaatggttcaaaagcgtctttattctgtcatccgtattacttaagatatcatcacgccccgaaaaatattggaacgaagagatgtatgactaa

SEQ ID NO: 382045 - DNA, 735 bp, Salmonella enterica; identical to SEQ ID NO: 370656

SEQ ID NO: 382046 - DNA, 588 bp, Salmonella enterica
ttgctcgccagtccgcttatcggcggtattgcgctgcttggcggtctggtgacgatggcaagcgcggtacgcgtcctctatccggcgctggcgatgagctggcagatgtcggcggcgcaaatcggtttgctgtatgcggcaattccgctgggggcggccattggcgcgctgaccagcggacaactggcgcatagcgttcgtccggggctcattatgctggtttcgacagtcggttcttttctggcggtggggctgttcgccatcatgccggtctggatcgcaggtgttatctgtctggcgctgtttggctggcttagcgccatcagttcgttattacaatacaccctgctgcaaacccagacgccggaaaatatgctggggcgaatgaatggcctgtggaccgcgcaaaacgtcacgggagacgctatcggcgcggcgctgttaggcggtcttggcgcaatgatgacgccggtcgcttccgcgagcgtgagtggattcgggctggtgattatcggtttgctgctgctgttagtgctgggcgagctacgccgttttcgccagacgccgccggttagcgatgctggctga

SEQ ID NO: 382047 - DNA, 786 bp, Salmonella enterica
gtgtataagagacaggttcagcacgtctttcggggtcgggccgtcgatgacgaagtattccagatactcgctctcgacgctgaactgaactttggagactttctcggagccaatttcaaacgacacgcactgcggatgattcaccagcacaccgtagccacggttggtgatatagaacgggatattcttgtacgattgctcggtgctggtgccgccgtcgcggttccaggtctccaccgtctgaccgttacgcaccagcgcggtaaagcgctcgcccagcccgtagacggtttcgcccacgccgagatccagacgctcgaacatgtagttgcgcccgctgttggtatcctgcacatagccgttattcttcaactggctaccggtgatacgtacaccgttgcgcagaaaatccagagaccagatctcgcctttggtgacgcgcacgctcaggctgccgctcttgagttcggcaaattcggcgttgttctgcatctccacgttgatatcttgcaagacattgagcggataatgtgggccgttatccaaagcgccctggaagtgttccatccgtacacctatcactccttcctgcggcgagaaaaagcgcagggtaaacaacggggtatccagttgccaggttcgttcgcggacatcacgcggcgcggcatagatcaccatctcattcccgtgctgttcaacgtcgaacacctgaaccgggtgaatcaaattaaggccaggctggatcagccagtttccgtcgctaattttcatagtctgttcctttag

SEQ ID NO: 382048 - DNA, 273 bp, Salmonella enterica
  misc_feature (251)..(260): n is a, c, g, or t
atgctcaaacctatctgccatagtggaagtataaaggttccggaatatctggaaacagataaggaaaaaaatgccggacgtactccactgtcttcagacattcagcaagttagaaatgttgttgaagatgttccgccatttccagaaagcagaacggcgagaggttctgtgagcgcagcgtacaggctttcttttgacgaagtgttttgcggtctcagcaatgaagagcgtaaaaaggtgtatggtcgccnnnnnnnnnngacgctgacataa

SEQ ID NO: 382049 - DNA, 741 bp, Salmonella enterica
atggtggatattttacaaaatgcccggctgacaataaattttaatgcggcaaaaattgactttgcctctctcttaaaaaataaagaatatctgaactcttatgcattaggttgcagaccaggagatttacctgcttataatgtcggacgtgattcagttgaaactaaagcatttgaactggagaggcttgcagattcaccttatgccccatatggtcagacaggcggtttttccgtagcatatactcccaacagtagaacttttagccctacaagcagaccaatttatgctgcactggactttctgaacggtgaaaatggaggtgccagcgcctatgggaaatcattttttgaattaaatgataatgtaaaaacaaattgtacattatcaccttttgatatctacggccacagatttggtctggatacgagtaaactatcaacattttggcatatggagaacctgattgcatcctgtcaaaatgatttttttggttataattgctttaagagtttggttaaaatggctaagggcgaaaaatttttagctcattctaattatggtaaaggctatgaagggaattatatagaagctcatattcatggtgatgtatgtttattcagagatataaaacacgtttatttgtctttgcaagaaaactcttactcggaaagtcaactatatgattatgcaaaacaaataaacctggtgcttaatagagactgcataatattatattga

SEQ ID NO: 382050 - DNA, 1059 bp, Salmonella enterica; identical to SEQ ID NO: 369501

SEQ ID NO: 382051 - DNA, 177 bp, Salmonella enterica
atgatgaaaaaagtactgtatggcatttttgccataaccgcgcttgcggcgacatctgtctccgctaccagcgttagcaccgtaagttcggcggtgggcgtcgcgttagcggcaaccggcggcggcgatggttccaataccgggaccacgaccaccacgaccaccagtacccagtag

SEQ ID NO: 382052 - DNA, 552 bp, Salmonella enterica
atggatgaaaccccatccctggtttcaatggcggcggggaatgttgcgcacaaaggtgaaaaatttggtgatgaagatgatgttgtcctaatcacccttgagtttgaaagcggtcgtttcgcgacacttcagtggggatcatcgttccactaccctgagcactatgtattaattgagggcacgacaggtgcaattctcattgatatgcaaaacacggctggttatctaataaaagcgggcaaaaaaacacactttcttgtgcatgaaagccaggcggaggatgatgatcgtcgcaacggtaacatatccagcgagatggatggcgcaatcgcttatggtaaacccggtaaacgtacgccgatgtggctctcatcaattatgaaactggagatgcagtacttgcatgatgtgataaacggtctggagccaagcgaggagtttgctaaattgctaacgggagaagcggcgacaaatgctattgctaccgctgatgctgcgacgctttcctcaaacgaggggcgcaaagttaaactcactgaaattcttggctaa

SEQ ID NO: 382053 - DNA, 1710 bp, Salmonella enterica
  misc_feature (1568)..(1577): n is a, c, g, or t
atgtgttctattttcggcgtattcgatatcaaaacagatgcagcggaactgcgtaaaaaagcccttgaactgtcacgcctgatgcgccatcgcggcccggactggtccggcatctacgcttgcgataacgcgattctcgcacatgaacgcttgtcgattgttgatgttaacgctggcgcccagcccctgtataacgccagaaaaacccacgtactggcggtgaacggtgaaatttataaccatcagacgttacgcgcggagtatggcgatcgttacgcgttccagacaggctccgactgcgaagttattctcgcgctgtatcaggaaaaagggccggatttccttgacgatttacaggggatgttcgccttcgccctgtatgacagcgaaaaagacgcttatctgattggtcgtgaccatatcggtattattccgctctatatgggctatgacgaattcggcaacttctacgtagcgtcagaaatgaaagcgctgaccccggtctgccgcaccattaaagagttcccggcgggcagctacctgtggagcaaagacggcgaaattcgtcagtactatcagcgcgactggttcgattacgatgcggtaaaagacaacgtcaccggcaaaaacgcgctgcgccaggcgctggaagaatccgtgaaaagccacctgatgtccgacgtgccctatggcgtgctgctctccggcggtctggactcgtcggttatttcggcaatcaccaaaaaattcgccgcccgtcgcgtcgaagatcaggagcgctccgaagcctggtggccacagttgcactcttttgcggtcggtctggaaggttcgcctgacctgaaggcggcccaggaagtggctaaccacctcggcaccgtgcaccatgaaattcacttcaccgtgcaggaaggccttgatgccattcgtgatgttatctatcacattgaaacctatgacgtgaccactatccgcgcctcaacgccgatgtatctgatgtcgcgtaagatcaaagcgatgggcatcaaaatggtgctctccggcgaaggttccgatgaggtgtttggcggctacctgtacttccataaagcgccgaacgccaaagagttacatgaagagacggtccgtaagctacaggcgctgcatatgtatgactgcgcccgcgccaacaaagcgatgtccgcctggggcgtggaagcgcgcgtaccgttcctggataaaaaattcctcgacgtggcgatgcgtatcaacccacaggataaaatgtgcggcaacggcaagatggaaaaacacgtgctgcgcgagtgcttcgagtcttatctgccagcaagcgtcgcgtggcgtcagaaagagcagttctctgacggcgtaggctacagctggatcgatacgctgaaagaagtgacggcgaaacagatttccgatcaacaactggaaaccgcccgcttccgctttccatacaacacgccgtcgtctaaagaggcgtacttgtaccgggaaatttttgaagaattgttcccggtgccgagcgcggcggaatgcgtacccggcggcccgtccgtggcctnnnnnnnnnngccaaagccattgagtgggatgaagcattcaaaacgatggatgacccgtcaggccgcgcggtcggcgtgcatcagtcggcgtaccagtaaattaacgatgacgaaagagcccttaggggctctttttttatag

SEQ ID NO: 382054 - DNA, 753 bp, Salmonella enterica; identical to SEQ ID NO: 369269

SEQ ID NO: 382055 - DNA, 1980 bp, Salmonella enterica; identical to SEQ ID NO: 370409

SEQ ID NO: 382056 - DNA, 1485 bp, Salmonella enterica; identical to SEQ ID NO: 368518

SEQ ID NO: 382057 - DNA, 543 bp, Salmonella enterica
gtgaagccgtttatcgagcactgcgctctggcgccgctgccgggagaaggttcgttcgccggatcgattctttcccacgactttgtggaggcggcgctaatgcgtcgggcagggtggggcgtctggattgcctacgatctccccggctcctatgaagagctgccgccaaacctgctggatgagcttaaacgcgaccgccgctggtgtcacggcaacctgatgaactttcgtctgttcctggtgaaaggaatgcacccggtgcatcgcgccgtgttcctgacgggggtaatgtcatatctgtccgcgccgttatggtttatgttcctcgcgctttctaccgcgctgcaggtcgttcatgcgttaacagagccgcaatatttccttcagccgcgccagctttttccggtctggccgcagtggcgtccggaactggcaatcgcgctgtttgcatcaacgatggtgctgctgttcctgccgaagctgctcagtattatgcctgtctcttatacacatctgacgctgccgacgactccttacgtgtag

SEQ ID NO: 382058 - DNA, 1212 bp, Salmonella enterica; identical to SEQ ID NO: 369441

SEQ ID NO: 382059 - DNA, 384 bp, Salmonella enterica
gtgaatgaatggctggcgcaggaaataaatgcaagactgtccgtcgaggtgagcggcgaaccgtggtacttttttggtcattgtacggaagtcacggctttacccggcgcgcctgcgcagtgggccgccatctttgcccattttggcgcgaagctggaaaatgtcagcgtaggctgctgcggtatggcgggcacttatggacatgaactcaccaatcataaaaattcgctgggaatttatgagctatcctggcatcaggcgatgcaacgtctaccgcgaaaccgctgcctggcaaccggctattcctgccgaagccaggttaaacgcattgaaggtacgggcgtgcgtcacccgttgcaggcattactggagattataggttga

SEQ ID NO: 382060 - DNA, 834 bp, Salmonella enterica; identical to SEQ ID NO: 368509

SEQ ID NO: 382061 - DNA, 177 bp, Salmonella enterica
atgcgtgaaacttttggcaagcggtttacgttgattatcgagcctggtttctctcccgatcaggctgaactttcctcaacacgatatgccgttgagttttcactttctcgtcatttcaacgcgttactgaaatggttacgtaatggtgaagataaaagaggtagcgatgaatattaa

SEQ ID NO: 382062 - DNA, 435 bp, Salmonella enterica
ttggtcgatatcttctgcgtgctgcgtagagagaaccacggcgtcgataccgacgattttgccgtcgtcatactggaaagtgacctggctttttgcatccggacgcaaccatggcagggtgccatttttacgcacttcagcctgacgctgtaccagacggtgcgcgtaggtgattggcgcaggcatcagtacgtcggtttcatttgtcgcgtagccaaacatcaggccctggtcgcccgcgccttgttccagcgggtctgcgcggtcaacgccctggttgatatccggagactgtttgccaattgcgctcagtaccgcgcaagagttggcgtcaaagcccatgtcggaatgcacatagccaatttcgcgcaccgtattacgggtaatctcttcgatatcgacccaggcgctggtggtgatctcaccgccaactaa

SEQ ID NO: 382063 - DNA, 240 bp, Salmonella enterica
gtgttgcttttccagcacctcaagcgcctggccgaggctggcgacggttgcggtgtcgagtttattgaccgagcctggagcatcgaacaccagttcggcgatgccatcttccagccagtcgaggtacagggtgtcgcctttataaagcatgtcagtctcctgaatccacaaggtgatctggtcgtaccagatgaagcgaagtgtgtattttgtgttaataaaatgcaaataaatgattga

SEQ ID NO: 382064 - DNA, 2910 bp, Salmonella enterica
atgaacggtatcgataacctgatgtatatgtcctctaccagcgactctgctggtagcgtgaccatcaccctgaccttccagtccggaaccgatccggatatcgcgcaggttcaggtgcaaaataaattgcagctcgccacgcctttactgccgcaagaagtccagcagcaggggattagcgttgaaaaatccagcagcagctttttgatggtcgccgggttcgtctcagataatccgaacactacccaggacgacatctctgactatgtcgcctctaacattaaggattctatcagccgtctgaatggtgtgggcgacgttcagctatttggcgcacagtacgccatgcgtatctggctggatgcgaatctgctaaataaataccagctcacgccagttgacgtcatcaaccagttaaaagtacagaacgaccagattgcggcaggccaactgggcggcacgccagcattaccgggccagcagcttaacgcctcaatcatcgcccaaacgcgtctgaaagatccggaagagttcggcaaagttacgttgcgcgtcaataccgacggctctgtcgtccatctcaaagatgtcgcgcgtattgagcttggcggtgaaaactataacgttgtagcgcgcattaacggtaaaccggcctccggtctcggtattaaactggcgaccggcgctaacgcgctggataccgcaaccgcaatcaaagcgaaactggcggagctgcagcctttcttcccccagggaatgaaggtggtttatccttatgacacaacgcccttcgtaaaaatatctatccacgaagtggtaaaaacgctgtttgaagcgattattctggtgttcctggtaatgtatctgttcttacagaatatccgggcaaccctgattcctaccatcgctgttcctgtcgtgttgctaggcacttttgcggtactcgccgcctttggctattccatcaataccctgacgatgttcggcatggtactggcgatagggctgttggttgacgatgcgatagtggtcgtagaaaacgttgaacgtgtaatgatggaggataaccttcctccccgagaggcgacggaaaaatccatgtcgcagattcagggagcgctggttggtatcgcgatggtactgtctgcggtatttatcccgatggccttttttggcggctcgaccggggcaatttatcgccagttctctattactattgtttcagcaatggcgctatccgttctggttgcgttgattctgacgccagcgctgtgcgctacgctgcttaaacccgtatctgctgaacatcacgagaaaaaaagcggcttctttggctggttcaataccaggtttgaccacagcgttaaccactatactaacagcgtaagcggcatcgtgcgtaatacgggtcgctatctcattatctatctacttattgtagtcggaatggcggttctgtttttacgcctcccgacctccttcctgccggaagaagatcagggggtattcctgaccatgattcagctcccctctggcgctacgcaagaacgtacgcagaaagtgctggatcaagtcactcattactacctgaataatgaaaaagcgaacgtcgaaagcgtgtttaccgtaaacggctttagctttagcggtcagggacaaaactcagggatggcatttgtcagccttaaaccctgggaagagcgtaacggtgaagaaaatagcgtcgaagccgttatcgccagagcgacacgcgccttcagccagattcgcgacgggttggtgttccccttcaacatgccagcaattgtcgagttaggtaccgcgacaggtttcgactttgaactgattgatcagggaggactcggtcacgatgcgttaacaaaagcgcgtaatcaactcctgggtatggtcgcgaagcatcctgacctattagtgcgcgtacgcccgaacgggctggaagacacgccacagttcaagctggatgtcgatcaagaaaaagcgcaggcgctcggtgtttcgctgtctgatatcaacgaaaccatctccgcggcgttgggcggctattacgttaacgactttatcgatcgcggacgagtgaaaaaagtatacgttcaggctgacgctcagttccgtatgctgccgggagatatcaacaatctttatgtacgcagcgccaatggcgagatggtgcccttctctacctttagctcagcacggtggatttatggttcgccacgcctggaacgctataacgggatgccgtcaatggaactgctcggtgaagcagcgcccggacgaagtaccggtgaagccatgtcgttaatggaaaacctggcttcacagctgccaaacggtattggctatgactggacaggtatgtcgtatcaggaacggttgtcaggtaaccaggcgccggcgctgtacgcaatctcactcattgtcgttttcctctgccttgccgctctgtatgaaagctggtcaattccgttctcggtaatgctggtcgtaccgctcggcgtggttggcgctctgcttgcagcgtcattgcgcggtctgaacaatgacgtttacttccaggttggcttgttaaccactattggcctttctgctaaaaacgccatcctgattgtcgagttcgccaaagatctcatggaaaaagaaggacgtggattgattgaagcgacgctggaagcatcccgtatgcgtttacgtcctattctaatgacctcgctggcctttattctcggggtaatgccgttagttatcagtcgtggcgcaggtagtggggcacagaacgcagtaggcacaggggttatggggggaatgttaaccgcaaccttattagctatcttcttcgtgccagtattcttcgttgttgtaaaacgccgatttaatcgccatcatgattaa

SEQ ID NO: 382065 - DNA, 297 bp, Salmonella enterica
atgatcccgatgattaacgaagtggttcgctgtctggaagaaggcattatcgcaagcccggcggaagccgatatggcgctggtctacggcctgggcttccctccgttccacggcggcgcattccgctggctggatacacagggcagcgcgaaatatcttgatatggcgcagcagtatcaacacctcggcccgctgtatgaagtgccggaagggctgcgtaataaagcgcgccataacgaaccgtattatcccccggttgaaccagcccgtccggttggttctctgaaaacggcttaa

SEQ ID NO: 382066 - DNA, 384 bp, Salmonella enterica
atgatgatcgagctgttcctgtacgcgcgccatttcattgaggtttttctcgctgggatcggtcatcaccagacgggaaatctcatgatagcgcttgaggtattccgcttgttcttcgataccttcggcgacaaagtcatagacgctgcccgcaatattacggggcgggtcctgttgcagacgcgcgacgatcagatcctgctcataaataatacgcccatcgtccagaccctgttcgcggttgaggatcttcatcaaggtggatttcccggcgccgttacgccccaccagacagacgcgttcgttatcttcgatatgcaactctgcgttatcgagaagcggcgcgtcgctgaacgacagccatgcgccatgcatactgattaa

SEQ ID NO: 382067 - DNA, 1248 bp, Salmonella enterica
gtgaaagatgtggcgcaactgagtaatccattgccgaaaggcccgtatggtacggtgatcagtaacccgccttacggcgaacgtctggacagcgaaccggcgctgattgcgttgcacagtctgctgggccgtaccatgaaaaatcagtttggcggctggaacctgtcgctgttcagcgcttcgcccgatctgctgggcagcctgcaattacgtgccgacaaacagtttaaagccaagaatggcccgctggactgcgtgcagaaaaactatcatattgcggaaaccacggcggacagtaaaccggcgacggtggcggaagattacgctaaccgcctgcgtaaaaatcttaaaaagctggagaaatgggcgcgccaggaagggattgaatgctatcgcttgtatgatgccgacctgccggaatataacgtggcggtagaccgttacggcgactgggcggtgattcaggaatatgcgccgccgaaaacggtggatgcgcaaaaagcgcggcagcgcctgttcgatattattgcggcaaccttgtcagtgctcggtattccgccgaataaactggtgttaaaaacccgtgaacggcaaaaaggaaaaaaccagtatcagaaaatgagcgagaagggcgagttccttgaagtcagcgaatataatgcgcgcttatgggtaaatctgacggattatctcgacaccggtctgttcctcgatcaccgtattgcccgcaggatgctgggagaaatgagcaaaggcaaagatttcctgaatctcttttcttataccggcagcgccagcgtacatgcgggtctgggcggcgcgcgcagcaccacaacggtggatatgtcccgcacctatctggagtgggccgaacgtaatttgcgtctgaacggactgagcggccgcgcgcatcgcctgattcaggccgactgcctgggctggctgcgcgaggcgaatgaacagttcgatttgatctttatcgatccgccgacgttctctaactcaaaacgtatggaagagtcgtttgatgttcagcgcgatcatgtcgcgttaatgaaagatttaaaacgtctgctgcgtaaaggcggcaccatcatgttctcaaataataagcgcggattccgtatggatctggaagggctggctgagctggggcttaccgcacaagaaattacgcaaaaaacgctttccccggattttgcccgtaaccgtcagatccataactgctggctgatccgcgccgcctga

SEQ ID NO: 382068 - DNA, 825 bp, Salmonella enterica
  misc_feature (771)..(780): n is a, c, g, or t
atgaattctctgtttgccagtacggcccgcgggctggaagagctgttaaaaactgaactggaaaaactgggcgccgtagggtgtcaggttgttcagggtggggtccattttcagggcgacacgcggcttatttaccagagcctgatgtggagccgcctggcctcgcgtattatcctgccgatgggtgagtgcaaggtctacagcgatctcgatctttacctcggcgttcaggcgataaactggacagagatttttaatcctggcgcgacgtttgcggtgcatttcagcggcctgaacgacaccatccgtaatagtcagtatggcgcgatgaaagttaaagacgcgattgtcgatgcgtttacgcggaaaaatcttccgcgtccaaatgtggaccgcgaatcgccggacctccgtattaacgtctggctgaataaagaaactgccagcattgcgctggatctcagtggtgatggcctgcacctgcgcggttatcgcgatcgcaccgggctggcgccaattaaagagacgctggcggcagcgattgttatgcgttccggctggcaaccaggtacgccgctgctcgaccctatgtgtggttcggggacactgttgattgaggccgcgatgtgggcgaccgatcgcgcgccgggactgcaccgtggtcactggggatttagcggctgggcgcagcatgacgaaactatctggcaggaagtgaaagccgaagcgcagacccgggcgcgtaaggggctggcggagtattcctctcannnnnnnnnnttcctctcatttctacggttccgacagcgatgcgcgcgtcattga

SEQ ID NO: 382069 - DNA, 282 bp, Salmonella enterica; identical to SEQ ID NO: 370388

SEQ ID NO: 382070 - DNA, 441 bp, Salmonella enterica
atggccgggaaagttataagggccgaataccgccagcacaccgtgaggacgatggcgcaacgtcgcggcgccatcgacaagttcgcttttttgttcgcctgttctggcatggtaagccttaatcgagatggcaatcttattgatcatcgccgtcacttccgttgccgcctcccagcgcggtttaccggtttcacgcgcgatgacctccgtgagctcggctttatgcgcctccagcagggcggcaaatttctctacgatagcctgtcgtgccgcaaaaggctgtctggcccaacgaggaaacgccgcgcgcgccacctggcaggcctcggcgacctgtgccgcattagcgtcattcccctgccaaagtatctccgcactcaccgggttcgttttgcggcggcgttcgccctgaccggttatccagtcgccgtttatccatag

SEQ ID NO: 382071 - DNA, 285 bp, Salmonella enterica
gtggcctttgagcgtgcgcccttcggcgatcttgatattgacccattcacgctgtacggcataggcatcttcaatagtgatgttgggataatccagcgacactgcgcgaatttgttcacgctgtttttcagcctgattaagtcgctgggcgatcagggtatgggtctgtttatcgagcatagtgtttcctgttacgtcattcggtgctgctgtgccgggtggcgacgcgggtgcgtcttacccggcctacggttcggtattgcttcgtgcatcgtttttttgtag

SEQ ID NO: 382072 - DNA, 954 bp, Salmonella enterica
atgtccgagctgtcgccgttgactgccgacaggttgggcgagttggcgctggaggcaggaattccggcaggcgtgctgaacgtggtgcagggctacggcgcgacggcgggcgatgcgctggtacgccaccatgacgtgcgtgcggtgtcgtttaccggcggtaccgccaccggtcgcaatatcatgaaaaatgccggcctgaaaaaatactcgatggagctgggcggcaaatcgccggtgctgatttttgaagatgccgacattgagcgcgcgctggacgccgcgctgttcaccatcttctcgatcaacggcgaacgctgcaccgccgggtcgcgcatctttatccagcagagcatttaccctgagttcgtgaagcgctttgccgaacgcgcgaatcgcctgcgtgtcggcgatccgaccgacccgaacactcaggtcggcgcgctgattagccaacagcactgggaaaaagtctctggctatattcgcctcggcattgaagagggcgcaacgctgctggcgggcggtgcggaaaaacccactgacctgcctgcgcatctgaaaggcggtaacttcctgcgcccaaccgtgctggccgatgtcgacaaccgtatgcgcgtcgcgcaggaagagatctttgggcccgttgcctgtctgctgccattcaaagacgaagcggaagggttacgcctggcgaacgacgtcgaatacggtctggcctcttatatctggacccaggacgtgagcaaagtattgcgcctggcgcgtgggattgaagccggcatggtcttcgtcaacacccagaacgtccgcgacctgcgccagccgttcggcggcgtgaaagcctccggtaccgggcgcgaaggcggcgaatatagcttcgaagtgtttgcggaaatgaaaaacgtctgcatctcaatgggcgaccatcctatcccaaaatggggagtttga

SEQ ID NO: 382073 - DNA, 180 bp, Salmonella enterica; identical to SEQ ID NO: 372403

SEQ ID NO: 382074 - DNA, 591 bp, Salmonella enterica; identical to SEQ ID NO: 370264

SEQ ID NO: 382075 - DNA, 492 bp, Salmonella enterica
atgggaatgctaacgctcgctgccgcgttagcattgatgatgtggataaaaacacccacccataatcgctatcttatcgcgtatgctttacttatgacgttcagcttttacacccattatttcaccctatttacacttattgcccactggatcgcagtaacaatattatcctgccaaagccataaaacggcctgctaccttaaacttcctggctggtggtttgctaacctggcgattgctgtcgcttatctcccctggttgcccgtattgtttaatttactgactcatctggcgcagttgagagccggtaatgatatcggttggattccccccgtaacatggcgtgacctgcctgcgatgtattggcattttttaccggaaacaacggacagggttttccgtcgttcattctgtggctggctgtgggaggttttatcggtactgtggggcgaatatctttatgcaacggagaatatgaaagatatcagctga

SEQ ID NO: 382076 - DNA, 1080 bp, Salmonella enterica; identical to SEQ ID NO: 370939

SEQ ID NO: 382077 - DNA, 318 bp, Salmonella enterica
atggctgcacgtatcttcaacactaaggatcgcagcctcatcatgtttcgtgatttcaccatcaggacgataaaacttgaggccgttccgctcgaatggaatatgacttcccgtaaccattatcgcaggcatattgtcagacatagactgaaaggccaaagctggggttggtaccactccataaaaaatacagttaacgcctttatccgccaatgcagcagcacacgcctgagccatcccataactacttggacgattatctattgccaatgctacggtatcaaaggaaaaatgttcctgcataacggcaacaaatga

SEQ ID NO: 382078 - DNA, 267 bp, Salmonella enterica
atgcagcttgcgtccggccagatgatggcgacgcagaatatccgctaccgagcaggcgcactggaagtattgctgcatcaggcgcagttttttgcccgccgtgtggttatcgttgggataaagcaccttcgtcagtttttccgcatcgataccctgctgttccgcccgcaggaaagcgccgtcgttgaatttggtcagatcaaacggatgggcgtgggtcgcctgccacaaacgcagcggttgcgcgacaccgttacgatagcctaa

SEQ ID NO: 382079 - DNA, 216 bp, Salmonella enterica
atgtaccacaccacaaaccagcttcctgtcatcaccacaaaccagaataattccctgaaaaaagatgcgctgaatgttatgtttttcatcatctttccactgtcagcatccaccgctgacaccggcaccaatgccggccggcttcacgcggcgaattttacttcaccttccacgccgcctcatcctcaggacgaagccgtgcgggtgaagcggtaa

SEQ ID NO: 382080 - DNA, 333 bp, Salmonella enterica
  misc_feature (244)..(253): n is a, c, g, or t
atggagctggataaatatcttctttttttcctggcaggaggatcaaccttcaaccagggaaaggcattttcatttcgttgcgctcaggacagtattgtcctgacgaaagtgcatcagacagagatgcatttttaccggcggtaccatcatgtggtgataacaagggaaacgctgtgccggtttgcccggcagctggatgtggatgttcttaaattttatatcccgaaagacatcccccggtacnnnnnnnnnnccccggtaccttgtgcagccttgcccggaggactctgtgttccgtccgttgatggtgagactctgtgccggaacggataa

SEQ ID NO: 382081 - DNA, 723 bp, Salmonella enterica
atgagtaacgcgattacgatgggtattttctggcatttgataggggcggccagtgcagcctgcttctatgccccgttcaagcaagtgaaacagtggtcatgggaaaccatgtggtcagtgggcggcatcgtctcatggcttattctgccgtgggcaattagcgctctgttactgcctgatttctgggcctattatgggcagtttaacctctccacccttttaccggtttttctgttcggcgccatgtggggcatcggcaatattaattacggtctgaccatgcgttatctcgggatgtccatgggtatcggcatcgctatcggcattacgcttatcgtcggcacgctgatgacgcctatcatcaacggtaacttcgatgtgttaatccataccgaagggggacgcatgacgctacttggcgtttttgtcgcgctgatcggcgtcgggattgtgacgcgcgccggacagttaaaagaacgcaaaatgggcattaaagcggaggagttcaatctgaagaaagggcttctgctggcagtgatgtgcggtattttctcggcggggatgtcttttgccatgaacgccgcgaaaccgatgcatgaagctgctgccgcgcttggcgttgacccgctctatgtcgcgctgccgagttacgtggtgattatgggcggcggcgcgctggttaacctctgtctcttatacacatctccgagcccacgagactaa

SEQ ID NO: 382082 - DNA, 306 bp, Salmonella enterica
atgacaagtttggcgctaccgctcccatcagcagtcttggcctctgcctccagattatatgctccatcagtcaatgtttcaggcgctgtagagcttattttcctcatttttactgctattacttttgccagtactggtatttttattaataggttgaggaagaactttttcagcatcgttctgtttagaagcctgcgttgctttagcctgtgtattttgctgggaagcatcgctttgctgagccagattgtcttttgctacattgtcagccaaaaagttctgcagcatttcttcaatttgctttga

SEQ ID NO: 382083 - DNA, 357 bp, Salmonella enterica
  misc_feature (40)..(49): n is a, c, g, or t
atgctggcagttttaaaaggcattgcattaattcaggatnnnnnnnnnnctattgatgggcatcctgccagaggagaaattttctcagaagcattttctatttctttgttcttaaatgacctggaaagcttacctaagccttgtcttgcctatgtgacactactgcttgcagcacacccggacgtccatgattatgctatacagctcacagcggatgggggatggttaaacggttattataccacaagtagtagctctgagcttattgctattgagatagaaaaacacctggctttaacttgcattttaaaaaatgtaatacgcaatcaccataaactttattcgggtggggtataa

SEQ ID NO: 382084 - DNA, 267 bp, Salmonella enterica
atggaatctcatattggcgacattcgtgattttgaaaagctgcgcaattctattgcagaatttaagccagaaattgttttccatatggcagcccagcctttagtgcgcctatcttatgaacagccaatcgaaacatactcaacaaatgttatgggtactgtccatttgcttgaagcagttaagcaagtaggtaacataaaggcagtcgtaaatatcaccagtgataagtgctacgacaatcgtgagtgggtgtggggctatcgttag

SEQ ID NO: 382085 - DNA, 426 bp, Salmonella enterica
atgtttacaattcataacaaccctaaccggacgacggcagcatctgatacacatgtaaaccatgctaatttagaggataagtctactgtcgttacctcgttaacttcagttaaaaacatcccggcaaacatgttgaaatcaaaaaattcttcgcaatgcgttattttaaataaccttcatgttccacaggatgcattagctactgatattgctagttacaacagaggattacaggcccgtattaaccttgagtacacgccccaggaaaatacagtgtttttactcggtacacctgaagtcttagatactaacgagtcactatcgttaccagtttctccacatattctaactcaaaaacttttgagcattagcaacaataaaaaccacgaattttcagtaaaatcaaacggatatgtttgcctttaa

SEQ ID NO: 382086 - DNA, 1221 bp, Salmonella enterica
atggatgagaaatccctctatgcccacattctcaacctgtccgccccgtggcaggttgaatctctttcccttgatgaaaacgctggctatgtcaccgttgttgtcgggatcgccaaaaatacactgctaatctgcccgacatgcgggcagcaatgccctgttcacgatcaccgacaccgcaaatggcgtcatctcgatacctgccagttcatgactgtcgttgaggcgagtgtcccccgggtcatgtgtccagaccatggatgccagacgttacctgttccatgggccggagctggtagccggtatacgttattgttcgaatcattcgtccttacctggctgaaaattagcacggttgatgcggtaagaaagcaacttaagcttagctggaatgccgttgacggcattatgacccgggcagtcaaacgtggtcttgggcgaataaaaaagccgctatcagcccggcatatgaatgtggacgaagttgcattcaaaaaggggcaccagtatatcactgtgatatcagatcgtgagggcagagcgctggcattaacggatgatcggggaacagaaagtcttgccagctatcttcgcactctcaccgacggtcagctggaggcaatcaaaacgttctcaatggatatgaatgccggatatatcagagcggcacgcatccatcttccgcgcgctgtagagaaaatagcctttgaccgcttccatgtggcaaaacaactgggtgaaatcgttgataagacgcggcagaacgagcatccccggcttccgttggacagccgccgccaggcaaaaggaacccgcttcctgtggcaatacagtgaaaaatggatgacagaatcccgacaggaaaaactggcatggctgagagagcagatgcagctgaccagtcaatgctgggtactgaaagagctggcgaaagatatctggaatcgcccatggagtgacaaacgccgtgcagactggcagcaatggatagcgcttgcgagaagctgtgatgtgccggtaatgagaaacatggcaggaaccatcatgaaaaggctgtacggaatacttaacgcaatgcggcactgcgtatctaacggtaatgccgaagcgcttaacagtaaaataatgctactgaggataaaggctcggggataccggaacagggaacgcttcaaagtagctgtcatgtttcattacggtagattaaacatggccttttaa

SEQ ID NO: 382087 - DNA, 309 bp, Salmonella enterica
atgaagcggtttgcgcagcaggcgggcggcagccataaaaccgttcatgaccgcattaagctggcgcagcggttttgtgagcgtctggtgctggcgcagagtgagcggctgaacaaccgttctcttggtctgtctggcgcatcccgcaacggtacaaagcaggcgatcacgccggagcattatcgtgacgtgctggagacggcccgcgtaaaagatccggggatggcggcagcgctggaactctcaaggctgatgggattacgttcgcaggaggcggtgcagagcgtacagtcgctgaaaacgtggtga

SEQ ID NO: 382088 - DNA, 1005 bp, Salmonella enterica
atggatgcggagattaatattttggaaactaattttgaaataaccctagaaggtttcgctactgaagaagaagcaaataatatcggtaggttcacgctagaagccatccgagctttaaataacaatctcaaccttgaaatctcaaaattaaaatgcattgttatttcctataactttagcgaagcccttcaaaatataacatccacttaccaacataaatctcctagttcatacaccaatagcaaacagggtgcagccgtcggacaattagtatcaaaaattggcaatgatgggctatgtgaagaatatacccttgtactatctattgaattttttgctgagcttttcaatgatggaagcttcttaaaattgaacgaagaaggataccgcgcagtcatccatcgtattcaccatgaattagtgcacgtacatgaaaaaaacttactaacatgcttagcccaaaactttacggtcaacgagtatggcagcgcgcttcttatctcagccacgcgtgcatggtctgaatatctcgctaattacatgtcttcagggtcagcccctcaagagactatcgatttatttctagagaatcttgataccgttgtaaatgaagtatctgacgagattggaaaactcatctgggactataaacgctataatactcctctgagtgaaatgtatctcgaagtaaaaaaacgcatcaggcttatcatcaactcttatgcttatgcgatgggttatgtccactctctaaatatcaacattaaagaatacgatccaaagctatcccttacactatccaactcaaagataagatatcaattatcagaattaggtattgcttttcagaatctttatggcaagtttaatgaccagcacattacaggttttgatgattatcgggaaataacaatagtcattagtgaaatattcaagcagtttgggcttgttttagagtgtcccgattggtctagtgactgtgaactctacatacatgtaaattag

SEQ ID NO: 382089 - DNA, 522 bp, Salmonella enterica
atgactaccagaccactaagccagctcaagaaagcggtgcgtatttgggataaagcccatcgaggcatcgcggcgttttggctgcgtcagcatgccacatccaaacagggtgaatatcacccgaaagaatcgaagctacaaattttgaaaaaacttcgggaacagcaaaaagctcagtcgacatcggtaaatgctggggatttccagagcgataaaactcaacagtccgccgagtacagcgagccgacacatgaatatctgtcgatagttcttcccaggtctgccagtcatccagttgagatactggggtatccaaataacgtcgatttaaaatttgtaaggcgtgccgaacatgtgttgaccattcttcgcgtggtttccagctatgtggacaattccactcaattttccgacctagctcatgccgaccagctattgaaagaggtagccggtctgctatgtggcattgagtctcagaaagaaaagcatcgcaaatgcccagcatgtcggatgcggaaatga

SEQ ID NO: 382090 - DNA, 264 bp, Salmonella enterica
atggcttctgaaatcgcaatcatcaaagtgcctgcacccatcgtcaccctgcaacagtttgcagaacttgagggggtgtcataccgcaccgcacgccgctggactaccggggataacccgcgtttacctatcgaacctcgcgttatccgtaagggctgtaaacgtgctggcggtcaagttcgtatctactatgcccgctggaaagaggaacagatgcgtaaggcattgggccattcccgttttcaactcgttattggtgcgtaa

SEQ ID NO: 382091 - DNA, 579 bp, Salmonella enterica
atgagaatagattctttaggatggaacaacgttgatgtactggatcgcatctgcgaggcttacgggttttcacagaaaattcagctagctaaccatttcgatattgcgtcgagctccctctctaacagatatacccgaggcgctatttcgtatgactttgcggcacactgcgctcttgagacaggggccaatctgcagtggttacttacaggaaaagggcaaccgttcacatcttctgcgtcagccgaggacacaataagcattgagtcattcacattaagtgaagaaatactcaaaaacgatggttctattacagtcgatgctcattttttcacaaagccgcttacagatgcgatggctataagagcggaaggaaaactccatttcattgataagcaggcatcactctctgacggcctttggctggtcgacatagagggtggaattagcattcgagagctaacaaaactcccgggtagaaaactgcacgttactggtggaaaggttccttttgagtgcggtattgatgacataaagacgctgggtagagtggtaggtgtgtacagcgaggttaattga

SEQ ID NO: 382092 - DNA, 1038 bp, Salmonella enterica
atgactgtccgtaaaaaccccgctggaggctggatttgcgagctttatcctaatggggcaaaaggcaaacgtatcagaaaaaaattcgccaccaaaggtgaggcgttggcctttgaacaatacaccgtacaaaatccgtggcaggaggaaaaggaagacaggcgaacgctaaaggaattggtcgacgcatggtatagcgctcatggtattaccttgagagacggactaaaacgccagctagctatgcatcatgcctttgagtgtatgggcgaaccactcgcacgcgatttcgatgcccagatgttttcccgctaccgggaaaaacggctaaagggtgagtatgcccgttcaaatagggttaaagaggtttccccccgcacgcttaatcttgaacttgcttacttccgcgcggtgttcaatgaattaaatcgcctcggcgaatggaagggtgaaaatccgctaaaaaatatgcgtcctttccgcacagaagaaatggaaatggcctggttaactcacgaccagattgcgcaactgctcggagagtgcaaacgccatgaccaccctgatttagaaacagtggtgagaatctgtctcgccactggcgctcgatggtcagaggcagagagcctgaaaaaaagccagctcgcgaaatacaaaatcacttacaccaatacaaaaggcagaaaaaaccgcacagttcccatcagtaaagagctttatgactccctacctgatgacaaaaaaggccgactgtttagcgattgttatggggcgttcaggtctgctctggaaaggacaggcatcgaattacctgccgggcaacttacccacgttttacggcacaccttcgccagccattttatgatgaatggtggtaatattctggtcttgcagcgcgtgcttggccataccgacataaaaatgacgatgcgatatgcgcattttgctcctgaccatttagaggatgccgttaaacttaatccactggcggtgagtggcgataaagtggcggtagaaatggctcaaactggcccttag

SEQ ID NO: 382093 - DNA, 1029 bp, Salmonella enterica
atgactatggaagttcacgggtttattatttcgtctccgttcgtgttcgtctgcgatggtaaggtttatcgcagccaatcggggaaaaactggacggtcatatttagccgttatggtacgcaagcctgggggaatgatacctatgcttcccagcgcgttgaccgtgcctgcccgccaaatcgtaacgaagaagttcgtttggctttccgtggcgcagttatgcgccacttcaagctgaactacacccaaattgaggcgttcttccagcgtcagatcgacgagggcaagcaaatcctggttgaaggaaattcggttaaacgccatgtgggtggccgtagcagctacagcacaggcagtagcagcacgactgtatctgctcccgcgcccgctccagtcaaaaaggaatccccccatccggcgcttaaacatggttgcccagcgagtcgcttggaagaattcctggcctgggaaaaagcgcaccttgggattttgaatcgtgtcaaaatgccccagcgcgttgccatgttcttgggaacttgggaagaaccgaaagcggtcgaacctgaacccgtggtggtcgaagaaccccaggctgaagaaccgcaagccgaacggtcgctggctgaagaacgcgaacacaaagaagatgtaccgttctatggccgtcgccgtcgtgatcaggggaaattccgtgaagatgtgatgcttaactgcggtggccgttgcgtctacacgaatgccattgcggtacgctgtgaagccgcgcaccttaaagcccacgctcgcaaaggtggcgcgagctttaaaaacggtctgctgctgcgcgctgatatccacaagctctttgacgcgggactatgcgccatcgatccacacacgcttaaactctggtttgcgccagacctggtaaaaaaagacgcagatctcgcggccattgatgggataacgatgcgcaaaacgctgctccctatcaacaaagacaatatcgaaggccgctgggatgccttcgttaagatcttgctggcatga

SEQ ID NO: 382094 - DNA, 771 bp, Salmonella enterica
atggaatacgtggcttttggtgatgagagtggtacgacagggagtgaccgctgttatggcattggtttgctgtgtgtgcgtaaagacacgttacacatcttcaatgagcgcgtccagaaattaaaagataagtacgggattgtcggtgagttgaagtggtccaagattaagaacagtgcagggcaggcaaacatctgcattgagctgctggctatggtgctcaagaactcgtgctgcttccactcaattgttgtagttaagaacatttacaacaactggcagacggacagggagttggctttttaccagacgtacacaatgctcgttaagaacgttgctaagcagattaagagtgacgttgaggtgatcatcgaccagaagattgataaatacaaaaagaacgatgaagtgacaggtattgttgctaacaacatgctggctagggcagggatgaagaagctgattaagtctgtgacgatgcacgactctaagcatcatcttggattacaggttgtcgacattctgaccggagctgtgaattctgggtacttaaagtaccttaatcctcggctagaactatcagtggctaaggagcttgcctttgaacgtatggctgctctgcttggctgggattttttccattacgatacattcccgaataaggattttaatatctggcatttcccgcaagaaatgcgagctatgccgggttcaaagagtattcgacctgattacagcgttccattggttaagcgggaagagctgtcctaa

SEQ ID NO: 382095 - DNA, 156 bp, Salmonella enterica
gtgtccgggcaggatattgatgaaaactacagattagtctcgaatgatgcctgtcctgaaggaatgccctcactttcgttttttttagtgatgaaagagtggggcaaacagttaaaaaaatttttggtgtggatattccagtccatccagatgtga

SEQ ID NO: 382096 - DNA, 933 bp, Salmonella enterica
atgagcagatataatgagatatctcagtattttaatagtgataactctgcaagtatggatgtggaacgatatactcatattacagaaagaactatttccactgaccttaaaataataggtaagtatggtgaggaagaaatattatcctctttcaatctatttttccttaataattcaaggacttttctttacctttacgcttggaatgtctattttaaaaataaaataaaaaataatttactatgtgcttctgttgcatttgatgcgatgggattgttttgtggctattttgaacaaccagataaagtatttgtttctgatgaactgctatataatcagggaattcccttacttcttcagattgctaccaataaaattgatgttgcccgtcgcttctatcctctttttattaaaggattaaagaactttgaagcagaacgagcgagaaatctattgcctcaaaagaccattgttctggcaattgaaatgctagccagtgaacataagcagacggttgactggcagtcgcatggtattccggttgagcgtttctattatgattttgtgaaagaagctctttactcacaggatgaagcggtactaaaagagtggttggctgagctttgtgactgccatctgaaatggtctgcgcgtacagagactacagaaaatgaatatgctcttaacggttatgaaatagagccacaggaacttttgctctggccttttgaatatcaggcagtgaaaaaatttcgtgcagcacatggtcttaccacgccagaaattgatcatccattattaaagacaccattagccatagaacatcaggctgatttcagtaaatgggatgcgccagagtggttctgtccactggttgacaggttgatatcagcaaatactgaactggcttttaccagagaactctttaaataa

SEQ ID NO: 382097 - DNA, 1449 bp, Salmonella enterica
atgcacaatctcagtcgggaacagaagattgagttggtaaaactcctggaagaaaagaagcgtagagagtttgtctatcgctaccgtggctattacgaaacccgatacgaatggcagcgtaagttcatttctgccacagcagaatatcgtcagtgcgctttgattgctgctaaccgagtgggcaagacagatacggcaacctacatcgacgccgttcacttgcttggtgaatatccagatggctggacagggcaccgcttcgaccacgcgccgctgatgtggtgtcttggttactctggtgagaagtgtcgtgacttactccaggctgcaatcatcggcaagaaggtaaatggtgaatttactggcggattgataccacctgagagaattgtctctactgagccaatgacaggtacgccaaatgctgttcgttctgcttacatccgccacagcagtggtgatctgagcaaaatacagttctggtcatacacacagggtcagcacgcactgatgggtgatgacatcgactggtttcacatcgatgaagaaccagaagatccgaccatctatcctcaggtattaacccgaactgcaaccggtgatcgggggaatggcggtcgcggcattctgacattcaccccagaaaacggacgtacagagctggtaatccagttgctggacaagcctgctgattcgcagttctgcatgaatgtaggctgggacgatgcgcctcacctcaccgaagaaacaaagaaaagcctgcttgagtcattccctactcatcagagagacatgcgtaccaaaggcatccctatgcttggacacggtcgcatattcgatttcagcgaagacacgatcacttgtgaaccattccctatacctaagcattacatggttatcgacggtatggacttcggttgggatcacccgcaaagtcgtgtccaactggcaatcgacatggaagcggaaatcttctacgtcactaaagcgtggaaggctagcaaaacttctccagcagaggcatggggcgcaaccaaagcatgggctaacaaagtacctacggcatggcctcaggatggattgcagacagaaaaaggtagcggacttcagcaaaaagagtactacaaggatgctggattcctaatgctccccgagcctgcgcaatggcctgatggctctcgctcggtagagccagggcttttcgagctccacgatctgatgagtactggtcggttcaaggtgttcgccggacttcgtgactggttcgaggagttcaacttctaccatcgtgacgagcgaggacgcattgttaagaccagagatgacttacttgacgctacacgttacgcctacatgatgcgccgcttcgccaagcgatatggcgacatcgggacaatcaaagaaaagaaaatccccgcaccgattagaccagtacgcagaggacgataa

SEQ ID NO: 382098 - DNA, 504 bp, Salmonella enterica
atggcggctgaagagaagaaaattggtcgcccatctgattacacagaagagcttgccgaagtcatctgcctaagacttgcagagggggaatcgttacgctctgtctgtagggatgatgggatgccatcaaagcaagctgtattgcgctggctggctcgcaatgagtcatttcgtgcccaatacgtgcgagcgaaagaagaaggcgcagaagccatcgcagaagagctattcgatatcgctgatgacggaacgaatgactggatggagaagttggataaagatggcgaagccattggctatcagctcaatggtgagcatgttcagcgctctaagctgcgaatagataccaggaagtggtatctgtccaagataatgccgaagaagtatggcgatcgcatccagcacgagcagaagataactatcaccgacctgtctgatgaagagcttgaccgccgattaatggagcttacaaatgcacaatctcagtcgggaacagaagattga

SEQ ID NO: 382099 - DNA, 405 bp, Salmonella enterica
atggcaaatccaaatttcacgccatcatggcctctctacaaagatgctgacggtgcatatgtgtctgctcttccgattaaagctatcaaatacgctaatgacggaagtgcaaacgcagaattcgacggcccgtatgctgaccagtacatgtcagcgcaaacagtagccgtattcaagccggaggttggcggatatctgttccggagccagtacggcgagctgctctatatgagcaagacagcatttgaagctaagtacacttccgcaagcggttcagtaacgaatgcagagactgcggataagttatctactgctcgcactatcacactaaccggcgctgtcacaggttcaacgtcatttgatggttcggctaacgtgactatcgcaactacccaaggaagctaa

SEQ ID NO: 382100 - DNA, 519 bp, Salmonella enterica
atgaatcatcaattggctaatctcgatttccgggacatggtggttgtttctggtgatcgcgtgatcacaacctcccgcaaggtagcagcttacttcgacaagcagcatcaccacatcattcagaaaatcgaaaagctagactgttcggatgaatttctaaccagcaacttttcgcgggttacctatgaacacaagggtaatcagtatgttgaatatgaaatttccaaagacggtgcgatgtacatcatcatgtcgtttaccggcaaaaaagctgccgccatcaaagaggcgtttatcaaagcatttaattggatgcgtgacaggctgatggagatggctcactcataccaaagagagcacaacgagttaatgctggagttcatgaaggaaaaggatgttgccagtatgtcaggacgcttgctgaaccgctggggcaggatcaaaaaaccgcaactcatagcaagaatcgaaaggcttgagcagcaggcgcaaatatcgatccccggactgccaaagtga

SEQ ID NO: 382101 - DNA, 672 bp, Salmonella enterica
atgcgctattacgaaagaattgatggcagcaaataccgaaatgtttgggtagttggcgatctgcacggatgctacacgaacctgatgaaaaaactggagacgataggattcgacaccaaaaaagacctgcttatctcggttggcgatttggtcgatcgcggtacagagaacgttgaatgcctggaattaatcacattccactggttcagagctgtacgtggaaaccatgagcaaatgatgattgatggcttatcagagcgcggaaacgtcaatcactggctgcttaatggcggtggctggttctttaatctcgattacgacaaagaaattctggctaaagctcttgcccataaagcagatgaacttccgttaatcatcgaactggtgagtaaagataaaaaatatgtcatctgccacgccgattatccttgtgacgaatacgagtttggaaagccagttgatcatcagcaggtaatctggaaccgcgaacgaatcagcaactcacaagacgggatcgtgaaagaaatcaaaggcgcggacacgttcatctttggtcatacgccagcagtgaaaccactcaagttttccaaccagatgtatatcgataccggcgcagtgttctgcggaaacctcacattgattcaggtacagggagaaggcgcgtgggcataa

SEQ ID NO: 382102 - DNA, 207 bp, Salmonella enterica
atgacgttctcagtaaaaaccattccagacatgctcgttgaagcatacggaaaccagacagaagtagcacgcagactgaaatgtagtcgcggcacggtaagaaaatacgttgatgataaagatgggaaaatgcacgccatcgtcaacgacgttctcatggttcatcgcggatggagtgaaagagatgcgctattacgaaagaattga

SEQ ID NO: 382103 - DNA, 591 bp, Salmonella enterica
atgaacaaataccaacttatttacgcagatccgccttggcaatatcgcgacaaagccaacgatggcaatcgcggtgctggacataaatacgatgttatgaatgttcaggacatttgccgactgccagtatgggatttagcggatccagaatcttgcttgttagcgatgtggtgggtgccgacacagccagccgaagcgctaaaggtaattgaggcgtggggattcaggttgatgactatgaaaggctttacctggcacaaaaccaataagcacaaaggcaacagtgcgatcggaatggggcatatgaccagggcaaatagcgaggattgcttgtttgctgttcgagggcggttgcctgagagaatggacgcttccatatgtcagcactttaccgcaccgagaatggagcacagtgcaaaaccaccgatcgtaagagacatgttagctaagttgcttggcgacgtgccgcgctgtgagttatttagccgcgacaaagtgaccgggtgggatatgtggggcaatcagtgcgactccgattttgaattggctcccggcatagcgattaaaccatgcaaaatggtgatcgcatga

SEQ ID NO: 382104 - DNA, 441 bp, Salmonella enterica
atgaaaaaactaacctttgaaattcgatctccagcacatcagcaaaatgccattcacgcagtacagcaaatccttccagacacaaccaaaccaatcgtagtaaccattcaggaacgcaaccgcagcttagaccagaatcgaaagctttgggcttgccttggtgacgtctctcgtcaggttgaatggcatggtcgccggctggatgcagaaagctggaagtgtgtgtttaccgcagcattaaagcagcaggacgttgttcctaaccttgccgggaatggctttgtggtaataggccagtcaaccagcaggatgcgtgtaagcgaatttgcggagctattagagcttatacaggcattcggtacagagcgcggcgttaagtggtcagacgaagcgcgactggctctggagtggaaagcgagatggggagataaaactgaatga

SEQ ID NO: 382105 - DNA, 195 bp, Salmonella enterica
atgagaaagaaacaagcagagaaattattttgtgacgctatggatgcgttggctaaggtcggagaaagcccattgaattactgtctgtcttatgcccgtggttttatggctgccgagaacaagacggagtatctgcacgaatgggaagacggaacaatgcgtctgaaagttagcgatggcgagcaggttcattga

SEQ ID NO: 382106 - DNA, 207 bp, Salmonella enterica
atgacataccaagaagcacgcagaattgtagttgctgcgcagagtgaggttgtgagacttaatgatcgcctgtgtaacatgcatcgccattggattgataatggcctttgcgattcagtaacttcattaactaagcagcatgacgctgctgttgcaaaatggaatgaagctaagttcattatgaactcactttcttcgcagaaatag

SEQ ID NO: 382107 - DNA, 624 bp, Salmonella enterica
atgtcatcaatccgcttaactacgagaatgaaagaggaaatcgctcgtaacgctttaattaagtctggggttttcactgaacttgaagaactaacaaagttaaagaaccagcttgcacttgacgccagagttattgcgtttggcggtaaaaagaaaactgaggaagtggaacagttatcatccaagttagtagctataagtgaagaacttgaaaaactgggatgttcatttaactcatacaatgttcgttttacttcaatttatctgactgtatctggcagaagggttggatggcattcatatgggaaagacggcaacggcgaagatatattgctccctactccgaccaaagataaatgcatgtttgacgcagagcacgaaataacaaaaaggtttgatgaaatctgcgcattgcaacaaaaacttgaagccaagaaaaaggatatcgaatcaaatacatgggctgttttgaactcagtcacaacagttaagcgacttattgaagtttggcctgaaagcaaagagttactaccaaaagaagcagataaagcaagtacagcacttcctgctttacgggtagaagacttgaataagatgattggacttccttccgaggccgcatag

SEQ ID NO: 382108 - DNA, 1002 bp, Salmonella enterica
atgactattaccaaagaacgcctgctcaaaattcagcattggcgcgaaacatatggagctgatagcaacgttatgctgccagcagaagaggcggaggagctggcgcgtatagcgctggcagcgctcgaagcggagaaaggtgccgaccccgttgtgttcaccgacgaacgaaatcttcgtcacattgccagtggccgagaaacctctttgatttggggtaaacaaaaccaggaggttggagatatcccgctctatcgtcacgcccagcctgtgccggtagacaaagaatttatccctaaaaatctggacaaggcgttgggtgttgttggtgttgcgttacctgaatcaaaggaagagtttaatttccagatagagcgatggatacagcgtctcattgaccgggttattcgttatgccgacgaattcaaagagcagccagtgccggtagttcctcctgccattgaacctgattacgaagtgattaagagcattttaccaacggctaacccggatgaatatgcgtgcacaattgctgctgacatgtggaacgcctgccgcgacgccatgcttcagggtgctgaacctgtaagccaaacttacgagtttccagaattaatcgaaggcatggaggtgtccattgatgtcagtacttgtgatgctgatgccgggaatcgctatttcggtactgtcaccgaggtatcagaactggacacagcaaagaatggctacatccttctggttcaggacgcggaaccaaatttcgatgtgaatggcaactctccggtaagtccgggtggttggataagctgtagtgagcgaatgccagataatgatgaatctaaacccatcgcaatttttaccggaaaatgtctgggacaggggatgttcgttgctacatacgacgatgatgggttctttgactattgggagggtatggaaattatcggtgtaacccactggatgccgctaccggagccaccgcaggaggttaaccgtggctaa

SEQ ID NO: 382109 - DNA, 138 bp, Salmonella enterica; identical to SEQ ID NO: 376494

SEQ ID NO: 382110 - DNA, 912 bp, Salmonella enterica
atgattaattcagggtcacacagcgcaggagtgcatacgggccatgccgatccggacagcgccattgaaaaataccgcgcttatatgctggaacacgaaaaccagcctttacagcccggaacaggctaccccttagtcaaagcgttgctgggtctgaaccggtaccgccagccggatgataaatcgccgttggttgaggttgttgtgatgtcgcgtaacagtcctgatacaggtatccgcgttttgaataccattcgccatgacaaactcgatattacacgttcagcttttaccgcaggcgaaaccgttgccgattaccttgatgcctttgatgtggatctgtttttaacaactaacgttgaagatgcgcaaaaggtgattgattcccgattctgcgccgctgcaatcctgaaagatccaccttctgacgcatctgatatcccggaagggcaagtgcgcattgcttttgacggcgacgcggtacttttttccgatcaaagcgaactggtttataagacccaaggaatggctgcctttcatgctcaggaagacgcgcaacaggatatccctatggaagagggaccttatgccactttgctaaaaaaaatagccaagcttcaggaacgattgccgacccgcgttgagtattctcctgttcgtattgcattggtgacagccagaaatagcccttcggaaatgcgcgttattaaaacgctaagaagctggggggtatatgtcgatgaagctttttttcttggcggtgtagagaaaacaaaagttctgaaggcgtttaaaccgcatattttcttcgacgatcaggacgtgcatttgatcgcagcggccaaggttgtatcttctggaaaagtcccttatgccagtaactccgaacttgcagaacgtgaagcatcgtaa

SEQ ID NO: 382111 - DNA, 342 bp, Salmonella enterica
atggacacaaatgaaacacaatccacgccagtatggggactacggaacgatgtcttcccatcatttggcgcccggttagttcaggaaggtaatcacctgcactatctggctgaccgggcgggtatttacggtgaatttaccccggcgcaactaaagactctgaatatcttatttccaatgtttattaaacgaatggaggtcgctttacgcactggcgcacttaatccgcgcgaagccagacgctttacgactgcactccggggcataacctgcgaagccgacactcgcggatcgttcggttacgtttatctttcgctttacccaaccgtcgttaaaaactga

SEQ ID NO: 382112 - DNA, 342 bp, Salmonella enterica
atgcaaacccaatacaaccacccacaccgggcaaccccgtcacagccgtcgcctgtcgaaatctggcaaaaactgctgacccatttactggctaaacattatggcctcgaactcagtgacacgccgtttagcgtagagaaggtgattcaggaacacattgacgccggtatcacgctggctaatgccgtgaactttattgtagagaaatacgagctggttcgtattgatcgcaagggatttagctggcaggaacaatcaccctatcttcgggctgtagacattctgcgggcccgacaggctacgggtctgttgcgacgtcaacgctatctcgcggcacactga

SEQ ID NO: 382113 - DNA, 276 bp, Salmonella enterica
atggaaatttactggacgcttaaagctcaggatgacttggagcgtatctaccgttttgcccttcagtatagccgccagcacgccgatgacgttttggatcgcctgattactggatgcgctgatcttacagcacatccagcaattggcgtacagcagactcggtatgaacctcggcaagtccgaaaagtgttgtttgatgactacgaggttcactacgaactccgtgacaatgatatctatatcgtggatctctggcatacgaaagaagaacgatga

SEQ ID NO: 382114 - DNA, 156 bp, Salmonella enterica
atgcgtgaagaggcccaattactactgatttccggcatcgatccgagtgcgcaccgaaaggctgaacgccttgctataacgccggaacatacgtttgagcctgtgggtggcacgcgaatgggtaaccagcaacgtgaactagtcggtagaacataa

SEQ ID NO: 382115 - DNA, 1041 bp, Salmonella enterica
atgatccaatattggtggaaagatctttttgatcgcaataataactggcagggtctggagttgacactcaagagcagccagaggaccgacgtggcaatggaaatgctaagtggtcgttatgggcggatggcgctacaggtctccgggaagacattattctgggcatcgatgttggaagatcattctggtgtctggttggtgtttaatgccgatcattccgcttgccagacattattaccggctgtcacatctgaagatattgagggtattaaaaacaaaggcgaacgggcctggacaggtgaatggtgtcgctatttttcccggcaattaatgaatgcgccagtgcctcttctgtctcctcgccgatggctgataaggccgatggaggccaaatattcattaccgaaattatccggacagcgtgttcctgcaaatagctggcgttttgaatctccagaaagcagcgggaatatcggttgtagctggacgctctacggcggagattttcctgatttggttaatcctgccaaagtcagattagtggattggtggtggggtggtagcctgctattcggacgttatcctatacaacctgatgccggaaggttaaaatggtggcgtaaaaaatgccgtgagggtgcgctgcctccagttcttgtctggtatatagcagggctgggttcatttgttattcttgatggtcattatcgtttacaggcagcgattgcagaagatatccctccttcatttctggtgctcagcgaattacaggaacgggattttgctaccgatcaagaacatcgggcccgtattgtccgggctttagaacagcagctcaaaaatccgaagtgcaaaatcgatagtgtaaatcagacgctgattaatctttatgatacacgttatctttatgcctcaacccatagccgcgcgacgctcggcgaaggaactcgctgggcacaggagttagaaagctatctgcagcggcatcagctggaagactatcgggacagggtacttaatggcgttaacgatcaatgttga

SEQ ID NO: 382116 - DNA, 546 bp, Salmonella enterica
atggcggcattttttagggaatacagagatactcttctcgccttcaccggaattattatcgcgctgctttccctgtggtttacctggtcgcaaaggcaggagcaaataaagcataaccatatttctgttgagccgcggatgaacgcttatttttcaaatgacgggcgggtgaacaaatcgggtatttacatcatcaataatggaatgggaactgcatttgtctctgctatatctgtaacggtcaatggcaaaaaagttgaacctgttgccgggaatatttttgtcggagcagtgcaggcgttaggcctggatatccagtgctttgtgattggcggacccagacctaatgattcatttaaagttggcgaggagattttcttaattgaagcaagggggactgacgagcgctgctcaggcgattcacttatccttcggtctgcggctttagactctgcccgcttggattttgtcctggatattgaatcaatatacggggacagattccggtatgtttattcccagaataaacaaattaagcgtgattaa

SEQ ID NO: 382117 - DNA, 324 bp, Salmonella enterica
atgaatacaagtaaccattacaacgatattttttgccgtcgcctgaagcaggcgcgactggcaagtgggctttcccaaaaacgactggggatcgcagcgggcattgatgaatttgtcgccagtacacgcatcaatcggtatgaaaagggtgtacatgaaccgggaacggagatagtgcaaaaactggccgaggttttacgggtgccgttggcttacttttatgctgaagatgatgatttggcggagttgatgctagttttctgggcattatccgaatcagaacgtgttgatattattgcttatgcgaagaaaaaggttatttga

SEQ ID NO: 382118 - DNA, 492 bp, Salmonella enterica
atggaaatattagctaagagccctaaaaattgtagtgcagatgaactgaaactatttgaggaactcgtattcatgggtgacgaagtcgatcccaacggtctgaaagatagaatattaaatgctgagcaacttttttttatcaaagaagataaatatgttggtattgctgcacttaaacgaccgaaaaaatcttataaatcagatgttttttataaagcaggttcttctgatgaagataagtatgagtacgaaataggctggatctatatcattgaagaagagagagaaaatggatatggaggaatgttaatggattccatatctaattatttatctaataactcatctagcaaagcttgctttggtactgttcgcgaaaataatactggcatgcaacgtttattcgccaagcatggtttttcaaaagtaggccattcatacaacagtaccagaggggaatattcccttgtcctatacgtaccctatgtatag

SEQ ID NO: 382119 - DNA, 315 bp, Salmonella enterica
atgttatacaaattaacactactattatccataacgttatataacattctggattttgtaatcgcttccccagaatccacccaactcgcccttgcgcagaagcaactcgacggcgtaaaaacctcgctggagcgcgcccaaacgagtgccagcaccgatccgcagtcacgctacgtcttcgactacttacaggcgcagcaggatctcaccaccgttgaacagggcatccgccgctaccttagcccggcgagagcgcagccgcgcgctctccagccactgagcgccagctaccagcgggagaaccctgatgactga

SEQ ID NO: 382120 - DNA, 792 bp, Salmonella enterica
atgttaaaaacacacatgaatgcaaccgagaatcatttggtttctatctcacagattcctgctaatgctggacatacattacatagaggtacaccgagagaagcgtttattaaagagtttctttccgggcacttaagctctaatgtggcaattggttcaggggaaattatagattctaactctcaaccaagagtacaaagaaatcagtatgatattgtcatctataaaaacaattatccaaaattagattttggcggtggagttaatggttttttaattgagtcagtaattgctacaatagaagtaaaatcattattagaccaatctgcaattgaccagtcggttaaggcagctcacaacgcgaaagttttaaacccaagcataaataaaagtttcagcactggatgggtgccacctaaaattataaattatgttgtggcatatgatgggccagcacaaatgaatactgtgtataactggatcttaaatagtcatcaaacgaataggatcccgttgccatcatggaatcagcaaacgaaatatcaaacaccaggtacagcacttgatggtgtggttttattaaataaaggatttataaagcttgataatacaccattatcgttaaactcttctcagcaatcaggaactcatatagttgttgacagtaatgatggtaatctattaatgatgtttttggctttacaggaagcgtgtgacaatatccaaggcgcttggttgaatgcaggaccatatgtaagaaatgtcggatttaacaatgtaagaataatataa

SEQ ID NO: 382121 - DNA, 726 bp, Salmonella enterica
atgagtgagcagcgaacgcctccgtcacgcccactacagggaccgattggctggttgctatcgctggccggacgacttatagggctggttattagagcgctggttctacggatcgtactagagctggctgggctgtatttctggtggccacaggaggggagcaggcatgtttttcaggtgatgagccaagagcgggcggaactggttattgcattgcagccgcaccctctggggaatgaaattctggtgctgctggaaaaagggggaaatcgcgtacttatggccaacaggctcctgcagaaaccgttcaccgccctggcttatacgctggtgagttttatgcttcgcctggtatggctttccgccatgctcccactgatttgcctgtgtgttgtaatcgggctgaccgatggtctggtgcaacgggatttgaggcggtttggctctgggctggaatctgtttttctacatctttatattatcagattcgctaaatcagttacctgtgtgcttgggtggttttacttggttcagacgttctattcacgatctgtaagtattttactacctacaatagtattttccggagtaataatatatagctgtaggcagtttcaaaaagtggttataatattatattattcttacattgttaaatccgacatttcttacatatggtcctgcattcaaccaagcgccttggatattgtcacacgcttcctgtaa

SEQ ID NO: 382122 - DNA, 564 bp, Salmonella enterica
atgaaacgcctgattctcctgttactgttcaccgccagcgcgtgggcgcaaccgcttgaggtgcagaccggccagaacgcgggctccactctcagaccgctgaccaccctgggcgtggaggctgaaagcgatcatgaacgccagcgcttcgccgaactgctggtcaggcaggaataccggcggctggagaaagaactcgctttccagcgcgcgtatgacgcagcctggcagcgtctgtatccgggcctgacgccgctgaaaaccacctccgccagcacttcccgcgtttcgctgttcgtccaggaggactgccctccctgcgacagcctgctgcgtaccctgctggcacaacagcgcccactggatatctggctcgtcggaagcgaaggcgatgataaccgggtgcgccgctgggcgatggcgcatggcattgacgcaaaactggtgagtgaacacagcatcacgcttaaccatgacgcgggccgctggctgctgttgggccagagcaaaatcccggtggcgctggagcgtaagggggagcaatggcgcgaggtcctgccctga

SEQ ID NO: 382123 - DNA, 2046 bp, Salmonella enterica
atgagtaaggtttacgatgttaatagaatcattaatatagccaaggataccaatgagttttgttgtttctttggtgaatatataaaaagaaaagatgtcaatgttaatatggctctggatgttttaagaatatcttctatttatttaaatagatactcatttcagatcgaggaagaatataataatacgtttaaattatgcgttaatggattgatgaatgtgtttcctgaatatattgatttaatatctgaatttgaacgccaatgtaaaataatgcatgatgtcaataacgctttctttaagtctgcgaaatgtaataatatttggcgtaaagatattaagagaacacactcattaacacttaatcttatcctgttttgtgaaatgtttttatcttcactatcatcactaataacggtaaaagatataaacaaagtaaagaaaaatttccccttgtttattatctctgaaaatatagatattaatgctgaacctgatattgagtatttcagaacgttgaatagagcatttgatgaggtggcgacttattctgggagaatattctctcatttacgtactaatgaacccttaaaattaaattgtcgtatagataaagaaactctgctttcaatgagaaaatatcttgatgaatggaatgtttttgactcattaagtagggtaagtgacttttttagattgagtaatgcggaatttactaaaaaagataatgatacatattctcttgatgtcaatggttcttgtttatatcaggactatgaaattgcccgaaatagattgatgatgagagaatctaatttatatagtgagatgcacacttcaagcaaaaaaggtcttaaattaaggcaatgggctaagaaccgtatgccttcttatttaaatcctgaaggtatttatagctcacatcatttaagtgagttagaaaatatgtcacctgacgatctacatgaagaatatggtaatgtatcactatataattgggtacatgcttatcaatgtttagttgagttatccaaagaagagttgaggaaaagattttcctccaaaaaacctataccattacaggtagacagatggctgataataaagagtcgtgaaaattggttatctttttttaaacggaaaggtatggcggaggatgtggcgaaaaaagttattggttattttacttttaattcaaagtcacatgatcttaatgattgtccattcattccctgtgtagatggattatgcttaatgccagcattaatagcacatagttctgctacacgttctttaatgtcgttatttggatcaaaaaaaatctctcaggcaggtaaggggcgattccatgaacagcaatttttaagacaggttcgtgcagctgggattaaagcatctcccattgaaacacatgctaattttcagtgtgattgcgtaatgcttattgatgatcatttgatttttacagagcttaaatcaaatgggcagccgatttattatggcaagtattatcaacaattgtgtaatattattggagatagttcattaatttatgatggtaataataaattattgcggtcttatattgaacaaatcgacagaatttcaacacactatcttaaccatcttgatatcattattaatgagttcaatctcccggtagattggcaaccgaaaggtgttcataaaattattgtcacaacaactatgcttggagggaaatatcattccgataatgtgtttgttgtcgataaatattcgttatctagttttcttcaacgtgtgccaggggtgattttccaaaacaatgaagaaggagatagaataaaaaatattattgatggttatgagcattgcacaggggagataacaattgaaaaatttcttaactatctttattgtttgcctagtgtaagcgcagtgcgtaaaaacattaaaaaattaacctatagtgttcggtttgatgaaacactcatttatcatccttattatgattcttgggcttttggtccatatattcgtaaagaagatgagcagattaactag

SEQ ID NO: 382124 - DNA, 1761 bp, Salmonella enterica
atggcggtggaaaaactgattgtcgaccatatcgatacctggactacggcgctgcaaacccgttccaccgccggacgcggcagctcgggtaagattgacctgtacggcattaagaagctgcgcgagctgattctggagctggcggtgcacggcaagctggtgccgcaggatccgaacgatgagccagcgtcggtgctgctggagcgtattgcggcggaaaaggccgagctggtgaagcaggggaaaattaaaaagcaaaagccgctgccggagattagcgaggaagagaagccgtttgagttgccggtggggtgggagtgggtgcgactgggagacattggtgaaactaatatcggcttaacttattcacctaataacataaaagaaaccggcactccagtattaagatcatctaatatacaaaatggcatattagattttacggatctagttcgtgtttctggcatggaaataaaaaattcatcttatgttgaagatggagatctattaatttgtgcaagaaatggaagtaagacccttgtagggaaaaatgctctaattaattcactttccgaaccaatggccttcggtgcctttatggcaatatttagatgtagctataataattacgtcaaaattttcttagattctccatcatttagacgtaacctagacggagttgatacaaccacaataaatcagattactcaatcaaatctgaagcatacattaattccttttccaccagagatagaacaagaaaagataaaaaatacagtatttgagttaatatccctctgcgaccaactggaacagcactcactgaccagtctggacgcccatcaacagctggttgaaaccctgctaaccacgctaaccgacagccagaacgccgatgaactggccgaaaactgggcgcgtatcagcgagcatttcgatacgctgtttaccacagaagccagcattgacgccttaaaacagaccattctacaactggcggtgatgggcaaactggttccgcaggatccgaacgacgaaccggcctctgaactgctcaaacgtattgcgcaggaaaaagcacagctggtaaaagacgggaaaattaaaaagcaaaaaccgttaccaccgattagcgatgaggaaaaaccgtttgaattgccggaggggtgggaatggtgctgtattaatgacttaacgtttgtttccggcggaatacaaaaacaacccaaaagacggcctgttaagaaccattttccttatttacgggttgctaatgtccaaagaggtaatattaatattgatgagcttgagagattcgaactagaatctcatgagttaactttttggtcgttgaaaaaaaatgacattctaattgttgaaggtaatggtagtgctgatgaaattggtcgttgtgctatttggttggctccaatagaaaaatgtgtttatcaaaatcatttgataagagttcgaggaataatggaaggatatcaagaatttattgcattatatcttaactctccatctggtattaaagaaatgcagcggctcgctgttaccaccagcggtctatataatctcagtgtaggtaagatcagagatataaaaattccattaccacctcttaatcaacaaaatttgattttgtcaaaaataagagaatatatttttatctgtgataacctaaaaatatctatccaatccgcccaacaaacccagctccacttggccgacgcccttaccgacgccgccaccaattaa

SEQ ID NO: 382125 - DNA, 2334 bp, Salmonella enterica
atgaaaatgaacgtaacagaaacggtaaaacaggcgtgcggccactggccgcacattctccctgcgctgggtgtgaaggtgattaaaaaccgccatcagtcctgcccggtgtgcggtggctctgaccgctttcgctttgacgataaagaggggcgcggcacgtggttctgtaaccagtgcggcgcgggtgacggactgaaactggtcgagaaggtgttcggtgtatcagcctctgaggccgccgggaaggtgaacgccgtgaccggcaatctgccgccggttgccccggaagtgattgcggccgcagaagcagaaacggaggctgaccgcaaagcggcggccgcgctggccgtcaggcttatggataaaacccgaccggccaccggcaacgcctacctcacccgcaagggtttcccagcgctggaatgtctgacgctcacggctgtgcataaaaccggcggcgtgacgttccgcgccggggatgtggttgtcccgctgtatgacaataccggcgcgctggtaaaccttcagctcatcaattctgagggtctcaaacgcaccctgaagggcggtcaggttaaaggggcatgtcatgtcatcgaagggaaaaaacaggcaggaaaacgcctgtggattgcggagggctatgcgaccgcgctcaccgtgcatcacctgaccggggaaaccgtcatggtggcactgtcgtccgtgaaccttctttctctggcgagccttgcccgtcagaaacacccggcctgtcagattgtcctcgccgccgaccgtgaccttaacggcaacggccagagtaaagccgctgcggccgcagacgcctgcgagggcattgtcgccctgccgccggtgttcggtgactggaatgatgcgtttatgcagaaaggcgaggaggccacgcggaaagcgatttatgacgccatccggcctccggctgacagccctttcactaccatgagcgaagcggaatttaccgccatgagcaccagtgaaaaggcaatgcgggtgcatgaacattacggcgaagcgctggccgtggatgcgaacggccagctcctgtcccgatatgaggccggaatatggaaaatcattcccccgtcggattttgcccgcgacgtggccgggttgtttcagcgtctgcgcgccccgttctcgtcggggaaaattgcctcagtggtggagaccctgaaactgattattccgcagcaggacgcccctgcgcgccgtctgattggctttcgcaacggcgtactcgataccgccaccggcacattcagcccgcaccataaatcacactggctgcgcacgctatgtgatgttgatttcaccccgccggtggagggcgaaacgctggaaacccacgcccctcatttctggcgctggcttgaccgcgctgccggtggcaaaccggaaaaacgcgatgtgattctggccgcgctgtttatggttctggcgaaccgttacgactggcagctctttctcgaagtcaccggccccggcgggagcggaaaaagtattctggccgaaattgcgaccatgcttgccggggaagataacgccacgtcggctaccatcgaaacgctggaatcaccacgtgaacgtgctgcgctgattggcttctcgctgattcgtctgcctgaccaggaaaaatggagcggtgacggggcaggactcaaggccatcaccggcggggatgcggtctcggtagacccgaaatacaaggatgcatattccacccatattccggcggtgattctggccgtgaacaataacccgatgcgctttactgaccgcagcggcggcgtctcacggcgccgggtgatcctgcatttcccggaacagattgccccggaggaacgcgacccgcagctcaagaacaaaatcgcccgcgagctggccgtgattgtgcgccagctaatgcagaagttcagcgacccgatgaccgcccgcaccctgctccagtcacagcagaattccgacgaggcgctcagcatcaagcgcgacgccgacccggcatttgatttttgtggctatctggaggcactgccggatcctgacggtatgtatattggcaatgctaacatcatcccgcgtcagccgcgtctgtatttgtatcatgcctatctggcgtacatggaagcccacggctacaggaatacactcagccttaccatgttcggtaaaggactgccagccatgctgaaagagtacgggctgagttatgaaaagcgccgtaaaaatcagggcatacagaccaatctcacactcagagaggaaagcaacgccgactggctaccaaaatgcgatgaccccatagcgaaataa

SEQ ID NO: 382126 - DNA, 894 bp, Salmonella enterica
atggcaagggcaaaaaaattaacttacggggctgtgaatataaccatgcacccccactcgccagaaaagtatgtcgagttattcaggatggcaagaaaaaatgcgagcaatgttaatttaagaggagactcattcgcaactttatcatatttttacccttataagaaaggtcaggtaattagtgaaccttttgagggggaaattctaaagtatacagatattgacgttaatggcgattggttcgatatcgtaaagaaagatatagcttcagatgaggaaaaggaaagaataaatatacctgataatttaaaaccaaatgtagctagattctcatttgtttttctacccgcaagtcatcttttagtttacgaaatgcaggacaagagccggcatcttacatcaagacaaatagaaagctttctgaatgggatattttctcatgagagaattatagagaaatttggaaaggttaatgttacaatattgactgagccagatagtgtagaacgtatgctttctttaaaaggtattacgtgtataaatatggtcactcgacgtcctaatccggatgatctcgcttctgcagaaagtgttatgcaaaagcgcttcaagcgtattggggttattgaagaggataaaacatataagtctgagcgaggtcaggaaattaaacctgatggtgagttaaaacaggatgctcttattgcttcgagaaatggtgaagttagtatacgcaggattaatgaggcgggattagtagaggttcatgcctcaagtgacgtaccacttcaaagggttgaaccatatgattctgacgtaacatcggtttctgagctattgttattaagggcaaaatcattagcagatgaatttaagaggcttctgagaaagtaa

SEQ ID NO: 382127 - DNA, 606 bp, Salmonella enterica
atgagtgaagaaaaagaatcaaccagtgcattggctagatactggaaaatctatggtggcgctggggctgtgtttaaaagtcgctatttttggtgtgcttttttaatgacagtgattctttatccatcttggtctcatcaggggtggtggaatgatatcctgtcattgatgccgaaccttctgggcttttcattaggtggttttgctatgtggatagctattggtgatgaggcctttaaaaaaataataactggtgatgaaaaaagtgaaagtggagaagtagaatattctccttatatgtcagtcaatgcaacttttgtccattttatattgttgcaattactaactattattacggccttggttaccaaggcctatagtagtattctcataaataatgcttttatgtattattatttaggtgttttctataagtatgctttattaacttttagtttttttgcttactttatatttgtttactcagtgttctctgcattagcagctgttcttgctatattccgtgtttcaagttggtataatacctttatgacttttcaaaataaacaggatgctgataattcgaaagataatgcagggaaataa

SEQ ID NO: 382128 - DNA, 870 bp, Salmonella enterica
atgatgtttgatattcatggtaagaaattaactacacatggttataataaatttgtatttatcggcctaataatctgctctgctatatttatagcgattggtattttttgtctgacacttatgaatatgccaacctcaagagaggaagctggaggtggtatttattttactgttgagccagggggggtgagtccgatgatgctgttctcactcattggcggcgggctaatcatcctggggttggttgctgcagcaatagcattaatgcaaaaaaatgtccccacatttaccatcaccgaaaagggtattatttgtaaatataaaggtaaagaaactctttccctttttaaggacatttctgatgtttatctcttttcagtgggcagaaccagctatacaggttctataaactctctggcatatagaaaaaataaaagtgatgcctggactttgatttcaccacgaaattcaggttatgacaaactaatctccactttcaggagcctgtattcagaacaaagagtacaggcattacgtgcgcaactggaacatggggctacattagaatttaattatgtagatgcaaagatgatctggtttaaaagagcattttcgcttaacgttgcgggcgcagcaaatatagattcctcactgcagaagttttatctgactaaagacaatatcatcaaagatgataaaagcatcattatcaacaaatctgataagattaacaccgctagctgggttgataatttacatcttattgatagagacggtaataaaaaattctcaatgatgttcccgtctatcatatcggcagatgtgttttgtacgctattacaggaagccatcgatcgggcggaaatgtaa

SEQ ID NO: 382129 - DNA, 222 bp, Salmonella enterica
atggtagtgttttgccatcagggtaacgagtgcttctggcgcattttcgctgacatatgcactttgcagaccgcaggcgacaaaattaagttgcttatatttcagcaactcgccaataacaatccgcgattcatgtcaggtcagttcgccgtggaacagttgcttgccatgttcatacaccagcgtgccgttttccgcgacaaaagagatctcatcctttag

SEQ ID NO: 382130 - DNA, 486 bp, Salmonella enterica
atgaatctgttacctgtattacttaaaaaatactggttgcaactctcagtgactttgctgattgctgcacttgcatgggcaacagagcattaccgcaataacgctatcacttacaagtaccagcgtgatactgctactcacaacctgaagctggcgaacgagacaattaccgatatgacgaagcgccagcgtgacgttgccgccctcgatgcaaaatacacaaaggaactagctgatgcacaaaacaggaatactgatttgcagcgccgccttgctgctggtagccgggtgcgtgtcgaaggacgctgtacagtgccaaccacaaccacaaccaaaaccgccagtacccgccgcgtgggcaatgctgccaccgtcgaactctctccagttgctggacaaaacgttctcgatatccgcgccggaatcatcagcgatcaggaaaaactgaagtatttgcaggagtacatccggacgcagtgcaaataa

SEQ ID NO: 382131 - DNA, 627 bp, Salmonella enterica; identical to SEQ ID NO: 375641

SEQ ID NO: 382132 - DNA, 141 bp, Salmonella enterica; identical to SEQ ID NO: 375644

SEQ ID NO: 382133 - DNA, 261 bp, Salmonella enterica
atgtacttcagtttgaaaacctttgtaattattactgcatgtttattatccggatgcgctgccgttcagtacaacgatggcgacaaagtaagcatccagtctgatgggtggtacggccttgatagtcttcacgacaccgccgttaaagcttgtcagcaatatggaaagtcaaaagccgtgtacatccatagcgctaacatgaatcccaacctaccaaaaggaagcggggttcaaaatacaatatggaaatgcgagccttaa

SEQ ID NO: 382134 - DNA, 501 bp, Salmonella enterica
atgaaagagcgcggaatgatttttaacggcgaaatggtgcgggcaattattgacggcaggaagacgcagacgcggcgtcctatcaaatggaaacagacgcggtttactgaagtggccgagcgtgatgatggctcgctgtggccatgggcggaggattgcgaacgcggcggtgatatctggtttacgtgtccatttggtgaggtcggcgatcgcatctgggggcgcgaaacattctcctgcattggtaacgaagacggacatccagtggacgctaacagcaatctttgcagcagagaggatgcacagcgcatttaccgggctagcgcaattcaaaaccccggtaattatggtctgtggacttctccagacggcttcgattttgaggggtcgtggacaccatcaatccatatgccgcgccgccatgcttcaggctggaaaccataccgagcaacacctcgaaatggtagaccattctggcgatgccaacgaaaagggcagtga

SEQ ID NO: 382135 - DNA, 696 bp, Salmonella enterica
atgaccccggatctttatcgtgcaattcagaatcgcgatggcgaaatgctggcgcgcatggctggcgattcttacgagggccgtaaggttgttaacgcagatgctgaaaagctggtggatatgctttttgaaaacctcatgcaggtatttccggcatccactcagacgaacctccgtactggcgatgatattcgcgttgcaaagcagcaatggatcgccgccttcgcagagtcaggcatcacatcccgtgaacaactttccgccggtatgcaaaaagcccgctccagccagtctccgttctggccttcgccaggtcagtttatttcgtggtgccgtgaggagagtggagcactcggggtcagtgttgatgacatcatgagcgaatactggcgttggcggaagcttgttttccgttatccgaccagtgagcagttcccatggagagataaaaatccgctgtattaccacgtctgcctggagctgcgccgccgtggaactgaggggcaattaagtgaaaaggaacttatccgggccgctggtgacatcctgcatgactgggaaaagcgagttctttcaggtaaacccataccgcctgttcgtcgcgctttatccgcgccgtcgcgggatcgcggtccaacgccagccgagatgttaatggcgaaatacaaacaacgtaaagacgccggtctgatttaa

SEQ ID NO: 382136 - DNA, 918 bp, Salmonella enterica
atggagaaccagaagaccggattcatcccgttgtaccggagtgtactgaagaagccctgggcgaaagatgtattcctgcgcactctgtgggagaaccttctgctgggcgcggccagagatccgtatacagcattcttcaagggcaggcaatggcgcctgcaacccggtcaactggtcgtcacagcagcagatctcgggcttcagttgtgtgatcgtcatggcaatccgacaagtcgcgatgcagtggaaaggatgctgtctgtttttgtccgcgaaggaatgatctccatcgagggagagaaacgaaaaggcagggtgatcacaatcacaaattacagtgaatatgctcaaaaaatgaaccattcgcccgcacataaagccgcacatacaagcgcacatgatgaagccagtaacggcgcgggtttgtcggtaggtgccgcacatgaaggcgcacatataagcgcacatcatgaacaatatatattaaatactaacgtatttaatgtacgtcagagaatttcaaaagttgttcccgacgcggctgtccagactccgagaggtgacaagtgggggacttctgacgatctccgctgcgctgagtggatgctggcactgcgcaatatcactaaaccatccctgaaaaaaccgaacatggctggctgggctaatgatatacgcctgatgcgtgagctggacgggcgcacccacaaagagatttgtgagctgttcaggtgggcctgcaaagactcgttctggtacaagaatattctctcccccgcaaagctccgcgccaagtgggacacgctaacccttcatcgcgaagacacaactcgcaagccacgcgcagatttcagcgcaagaaaatccgaaactggcccgcactggaacagtgctgaagcatgggagaaatttatatga

SEQ ID NO: 382137 - DNA, 321 bp, Salmonella enterica
atggagaacgcaattgcacgaaagttagacccaccagaaatcaacccgattgagatagagagtgtcctgctcaaccggcttgcatcagtagggcagaaatcatacgccgagcatatgggcatcagcgagtcgacagtcagcagacgtaaagctgagggatatttctgcaacatggcgaaagagctggcttttcttgggattcaggccgcgccacctgaggcggtactggtatccagaaactatctcacagccgtagagattctcgctgatgcagggttaagggctgaacgagccaggccggatgcgctggggtgggactga

SEQ ID NO: 382138 - DNA, 237 bp, Salmonella enterica
atgaacgcattagaaaaagccatacaagttgccggcaattcttcaaagctggcagaaaagctcggtgtttcgtcaatgacaattagtcactggaaaaaacgttacggtggtgttgtacctaaaggccgagttttccctatttttcatgtaactggcatcaccccacacgaacttcgccctgacatgtatccaaacccaacagatggattaccaaaccaagaggcatcagccaaataa

SEQ ID NO: 382139 - DNA, 291 bp, Salmonella enterica
gtgagcgctcaatcggtcaacaactggtttgtcaggggagcaataggtaaaagctctgcaataaaacttgccgatgcgcttggcgttagcctggaatgggttttaggacaagacgtggatgccaaagatggtttgaggcacgacgaacggagactgttggaactctacaaccaactaccaaatgaagaagaacaacagaacatgttgcgaatcgtatccctgcgcctgaaggagctcgacgaactgtacgcgaagtatatggggcggcggattaaaggggatacggagtaa

SEQ ID NO: 382140 - DNA, 849 bp, Salmonella enterica
atgtcttctttgtggggtaaaaagcagatgacagaagaacaagatccaaacaatagcgaaccggacccggaacaaggaagtttatttgaattagagttcaatgaatataccccatcgaacttgggtactgtgcatctttctggttttgccattgccactgatgagatggagtatgcggttaaaagtatgaaaactgcacctccttttcctgtacaaaacccaactcaagtacctgctgcagagtggttttgcacaaatttggctgaaaggtgtggtattgcaactcctgtttgtaaggttcttaagtgtattgctgatggcgagtatgtatttggctctcgcattgagttttctgcatggaagtcaggacttaacggcccgcaatggatcaatttgctggcaaacgcctctgagtcattgaaaaaacagctatgggcaatttatgcatttgaccaattcgtgtacaacattgatcgccatctcaataattatctttacatggagaatacgcgcggtcatatcatagtaaaaacgttcgattttagcttgagttcttttgttatcggttggccacgtagcaccccgcacacacttcctacggactcaagcacatcaacaaactggtctatagctaagcaatttgtcggcgatacaccagaattaagaatgtgcgcattgtcaatacttgacaagattgagaaaattggagttgctacaatctctgatatactagagtctatgcctgtcgcatggatgccaccaatgcataaagaatattttctgaagtggtgggatagtgaggaaagaattgagcgaataaacgctataagactggagataacctcttga

SEQ ID NO: 382141 - DNA, 807 bp, Salmonella enterica
ttgaaaaccttcaaatacagcttaatcagagttacgcctaatcttgagaaaggtgaaacgattaacgttggcttgatcgtttaccacgactccgacatagacgtacgcatgcttaattcagtttcaaagcttaaagcaattgataaaggtctttcacaaaattacttggaagatctttcaaactcactttttgatttgtcacacaaaataaatgacgttgaacttcttccctgcctttttaagggatcgttatcactatcttcttttggtatgtttaccattcaaagcaatgataattacgaaacaaaaattactgatttgatgaataggttagtaaatccacagaaacaatctcacaagcaactgaaaagaaaagttttctttgaaataaagtcaaccttcatgcagcacggaatcttcagcaaatactctgaagacctttatcagcacaagattgttgctaactatcctataagcgatgacgaaggtttagttgcagatttcttgcttaagaacggcaaataccatctgactgaaactttagatttccgttcagaaaattttaaaaaacaaatgggtgaggctgctgtgagtgctttaacaatttcaaaagcatgtgaaatttacaaatataatattgactcatttgttatttatgcagcggaaactacagcacaagaaaaaacagcaaaacagcaaataaatcttcttgaaaaacatgcagataaccttataaacgcgtacagtaaagaagatatgaatttttattatgagaagatgttaaacgctgcgtcaatgcttcagtaa

SEQ ID NO: 382142 - DNA, 819 bp, Salmonella enterica
atgcgcttagccagccgctttggacggattaaccagatacgccgcgaccgtcccttaacccgtgaagaattaatacaggtggtccccagcgtttttggtgaggacaaacatgcgtcccgcagtgaacgctacacctgcataccgaccatcaccatcctggaaaaccttcaacgggaagggttccagccgttcttcgcttgtcagtcacgggttcgtgaccctgctcgtcgggaatatacgaagcacatgctccgcctgcgtcgcaccggtcagatacacggtcagcaggtgccggaaatcatcatcctgaattcgcacagtggtgagtccagttttcagttattgccgggaattttccgcagcgtatgcacgaattcgctcgtctgcgggcagtcctttggcgaaatcagagttccgcaccggggcgatgtcgttaacaaggtcattgagggagcctacgacgtactcagcgtctttgaccggatggaagagaagcgcgacgccatgcagtcacttttattaccgccactggcacagcatgcactggcgaatgctgccctgacgtaccgttttggtgaagagcatcagccggtgacggcaacgcagatactgacaccccgacgttatgaagaccgcagtgatgacctgtggacaacgtaccagcgtatccaggagaacctgctgaaaggcgggcttccgggacgtactgcgaagggcaaacgcagccatacccgagccgttaacggcattgacggggacatcaggctaaaccgtgccctgtgggtgatggcggaacagatgcagcaggcgctgagttga

SEQ ID NO: 382143 - DNA, 1851 bp, Salmonella enterica
atgcacacttttgccagtctgatgtacgatgtttatcggtcttttggcttattcagtaaagggaacaggcgggctgctatacggggggctgcgaccttttccagccatcagcgctttttcggtaatcgtgaggatgaaagacatcaggaacagaaacactatgatgaaatcatcggggttcttgatgcagaacaggtgttcagcacaactcaacgaagggagattttttacaaatacgagcaactttataatgccctgatggctcgccccgtctttactgaactgagccgggaacaaataaaaaagcgatatgctctgcatataatccccagattaatcgcacttgacatatataaaacgtacaaagacgaaaacaaaaactgtttttatcaccatatacaccagttcttgctgaaagattattgcccatgctggcaggataaaaagaaagggggtttatctgctgtccagaagtatctgaaaagtttagcaagaaaacaaaagttctctcatacagattcagaaaacctggcgcctcttttcaaagtaattgaaaatatccgcccaggtaatacacagaaaaaaagcacgctggaagcatcaattatagactgcattaaggcgtattctggtattgttgacgatgatacgcttaacagcgtcagagtcagtcttgataatataaaaaaagcccattactccctgaccgtactccttaatgtcgaacgaaaactccctgtcattaacatcatatcacggtactacagaaactatgtagacaatggaataaaacccgggaatatatcagcaatgttatgcagactactgtatgagccagaaccccatgattttatccatcatgataccatgattaactcaattgcggattattatcatgagagagtaataaaaccgttctccctgaatataaacgaggaatgtttacagagtatcagcgcattaaaaaacatcattttcaacttcaatgataaaaccattatctccgaagtacagttaactgacatcgctgtaaaattaaaaaaagaaccccataaacagtttattcaaccgtatattgaactctggaaggttatagatttaatcagtaaaggcgaaacagaggaagcatttgagaaagtcaaaactatttctctggacgatttacctgcaggatatctggcatccgcttttttagttatccatattgcattacgtataaaatttgagaggaaaaacgttaaaaatggtgttttctcattatctgtaacatccatcctggaaaatcaggggatttacactgactatatccccgtcagtcaggcttatacagaaacccacagtgacgactctgttataaaaagtactctcctttctgaatccattttatcagatgccaacaatctgaccatcatccgttcggtaaggatgtataataacatggtcaggagaataagtgactggaatgaccttgagctggaaggcatttatcctgagtctgtttacgggcttctggataaagttgacactatcctgggtaagatactcaacattatcttttctgaaaaaattacttccagtcaagatttatcctgcatcctgaaaaataataaaattctgacccgaggtgaactgaatgatagccttataggcatactggttaactgtcctcttttggcgtgcgtacgggacatcgagagtctgataaaatatcttcgctgccctggggaggaaataaggaatatgattctttcagttgataaaaaattgtgggatttgatatatggagccctgacgattctggaggaagaaagaaaaatacagactgggaaaacacaggggggtggaaaataa

SEQ ID NO: 382144 - DNA, 948 bp, Salmonella enterica
atgatggaactgatcaataatcgtggtatgcgagactggatgatatttattaaagtggcggaagtagggaatctttcccgggctgcacgggaattagatattagcatttctgctgtcagtaaatcgcttagtcgccttgagaattctattgaggttactttacttcggcgcgattcacatcacttagaactgactggagctggtcagacagcctatgcaagcatgaaaaggataacatcttcctttcagtccttgctggatgaattgcgaaatccggataaaattatcagagggagtataaaattttcggctccggctattgtctgtgagtttcttgccaataagtggatatgggaatttacagctagctatccggatacaaaaatctacctggattcacgagagcgtagcgatttttttagtaaatccctggagtttgatgagctggtttttaaaagtggcataatcgaaagtgaggatctcgtgtatcgaaagataagccctttaaagttggttctttgtgcgagtccgaaatatatcagaaaatatggcaggatctcacaccctggcgatttggaaaatcacattattgtgggtcttcacaatcatggtctttccggacctcttactcttttccgtcaagatgaatcatacactattagtggcgctgttaatgttcatttatcttccaataatcttttgagtgttcttaatttggttttagaaggaaagggtatcaacctcatgactccggcctggcttgccaccaaatacttaaaaaataatgaacttgaaattatacttcctgaatggagggttccagatctccccatttatcttgtatggcgtcatcgtcagtattattctcctttatttcaacgctttctgtcttttattgaagataaatggaataatcgcccacaaattgattttctgaatgatgattaa

SEQ ID NO: 382145 - DNA, 531 bp, Salmonella enterica
gtgcaggtcaccggcggcaacggcgccggaaaaaccaccctgctgcgcctgctgaccgggctggcgcgcccggacggcggcgaggtgtactggcagggcgaacccctgcgccgcgtgcgcgacagcttccatcgcagcctgctgtggatagggcaccagccggggataaaaacccgcctgacggcgcgggagaacctgcacttcttccaccccggcgacggcgcgcgtctcccggaggcgctggcgcaggccgggctggcgggatttgaggacgtgccggtcgcccggctctcggccgggcagcagcgtcgggtggcgctggcccgcctgtggctgacccgcgccgcgctgtgggtgctcgacgagccgttcaccgccattgatgttaacggcgtggcgcgcctcacccggcggatggcggcgcacacggcgcagggcgggatggtcattctcaccacccaccagccgctgccgggggccgcggacaccgtccgccgcctggcgctgaccggcgggggggcagggctgtga

SEQ ID NO: 382146 - DNA, 528 bp, Salmonella enterica; identical to SEQ ID NO: 191913

SEQ ID NO: 382147 - DNA, 234 bp, Salmonella enterica; identical to SEQ ID NO: 8563

SEQ ID NO: 382148 - DNA, 1959 bp, Salmonella enterica; identical to SEQ ID NO: 17094

SEQ ID NO: 382149 - DNA, 438 bp, Salmonella enterica; identical to SEQ ID NO: 17093

SEQ ID NO: 382150 - DNA, 720 bp, Salmonella enterica; identical to SEQ ID NO: 8275

SEQ ID NO: 382151 - DNA, 597 bp, Salmonella enterica; identical to SEQ ID NO: 381268

SEQ ID NO: 382152 - DNA, 285 bp, Salmonella enterica; identical to SEQ ID NO: 372125

SEQ ID NO: 382153 - DNA, 1089 bp, Salmonella enterica; identical to SEQ ID NO: 380115

SEQ ID NO: 382154 - DNA, 1323 bp, Salmonella enterica
atgactctattatctgaacggcaaacatcagttaaaaacttttcaagatatattccactgtacttttgtttatgcttagctatcgcattgttattgtgtgagagtatattcactcaagcattatacgaggtgatacttaaggtggtttcatcatcattgtcagctttattaattgttattattgcttacttttatattaagagagcttattttttttcattgcagttaatgtatgcatacgccttttctttaataataggaataccttccgtatacttactcaattttggcgaagcaaagggaggttttgaattagtatgcttatggtgtatattattaaatattatattatatttttctgcatgctctagtaaagtaatagaacaaaaaaaaacggttaataaaatatttgttgtgatatttttcgttgtcggtttttgtcagttagttaaaacgttgctctattttagatttattattgactcaggcttaggtcatttggctatttatactgaaggcgaaattttaaccgcccaagtgccctttgttattagagccattagcggcctttcattaatcatgtcactagcgacgttttattttaaggcaccaagatatttaaggtggatagggtttatattattagcatctgaacttttgattgggataagaagtaaattctttttctcattgatttgtattattgctttatccttatatagtaatagacacttaattcaatcaaaattcgtaaaactttccaagatacaatatttattaattggattcatattattctccttaatttcttattttagggagggttacgaaattaatttcattaactatttagtcatagtattagactcactctcttcgacgctagcaggtttacaagatgtatttcttttaccgacagcgcagggttgggataaaatagatgcacatgttatattaacgcaaatattaccaataagcggttttggatttataagcgattctcaaatttataagcaattttctatcatagtgctcggagatatttcaagtggtattgcactatcatcttctggaattctagaagcaacagttttaaatataaagtttggtttttttatttatttattttatcttttaattatgcttgcattgatccagaaatgtctaaatagctcgcttaatttgttgaattttattgctatcgcgatgttgcccggattattatattcaattcggggagagttggttttaccttttgcatatataataaaatcactacccattatatttctatctccttttttaacttcaacaaataaataa

SEQ ID NO: 382155 - DNA, 1437 bp, Salmonella enterica
atggctgcggaaacactaatacctgtaataatggccggaggcactgggagtcgcttatggccattatcacgagaactatatccaaaacagtttctttgcttgcaaaataacctatcaatgcttcaatccactatctcacgattagatggtattaagcatgccagtcctattgttatttgtaatgaaaaacatcgtttcatcgtcgctgatcaattgcttcaaatgaatcaattaaccaataatatcatattggagcctgttggacgtaatacagcgccagctgttgcacttgcagctttagtagcaaaaaataattcttcaaaagaagatccattattattaatattggctgctgatcatgttttcaccaatgaaaatgagtttcgcataactgtaagcaaagcgataccatttgcagatagaggcaaacttgtaacttttggtattgtaccaagtaaagcagagtctggctatggctatattcttcgtggaaataaattacagttagaagatgatattatagcatttgacgttgaacagtttgttgagaaaccaagtattgaaaccgcgcaggcttacgtcgccagtggcgattactactggaacagcggcatgtttctgttccgcgccggacgctatctggaagagttaaagaaatatcgtcctgatatattgatagcatgcgaaaaatcaatatcagatcttaatattgatcttaattttgttcggattaatgaggatgatttttatccttgtccagatgtatctatagattacgccgtaatggagcatactgcagatgcggtggtgatgccaatggacgcgggctggagcgatgtcggctcgtggtcctcgctgtgggaaatcagcgcccacaccccggagggaaacgtccaccacggtgacgtcatcagccataaaacggaaaacagctacgtttacgccgaatccggcctggtgaccaccgtcggcgtgaaagatctggtggtggtgcagaccaaagacgccgtgttgattgccgatcgccacgcggtgcaggacgtgaaaaaggtggtggagaagatcaaggccgacggacgccatgagcaccacatgcaccgcgaggtttaccgcccgtggggcaaatacgactccatcgacgcgggcgagcgctatcaggtgaagcgcattaccgtcaagccgggggaaggactgtcggtgcagatgcaccatcaccgcgccgagcactgggtggtggtggcggggaccgccagagtcaccatcaacggcgaggttaagctgctcggtgaaaacgagtccatctatattccgctgggggcgactcactgtctggaaaatccgggaaaaataccgctcgatttaattgaagtgcgttccggctcgtacctcgaagaggacgacgtggtgcgtttccgggatcgctatgggcgaaaatga

SEQ ID NO: 382156 - DNA, 207 bp, Salmonella enterica
atggaacgcttcttcagaagcctgaaaaatgcgtgggtaccggtgacgggttacataagcttcagcgatgcggcccatgcaataacggactatatcgtcgggtattacagtgtactcaggccgcatgaatataacggtgggttacccccaaacgaatcggaaaaccgatactggaaaaactctaaagtggtggccagtttaagttga

SEQ ID NO: 382157 - DNA, 2310 bp, Salmonella enterica
atgcttggatttgtttctgcattatcttccgctgtggcagtaatgatattattactgtctgtattattagctaatttgctatctgtagctataacgaaagacaataagcttgattcggcaaatctagcctatgaagctgataataaagatcagattgacgcggccatgggtaaaggattttctttgtcagtcaaggatctcttaccgttacgttcatcggatgttgcagtcagactatattgtacatatggtaataatttaagtctcgaggtggccaaaaaatacaccacttataattatatcgttgccaaatcagccttaggagataaaaaaattattgtagagcaaccgatatatgaaaataaaagaaaatattgtcttgtcgaagaaattgattttgtttttaaaaataaaagcaaagagatgtgtgatgtattacagaattttaatgattatataaataataacttctttgactataaaataacgacagataactcttacgattatgccaatttaccaaaaacatttatagtagagtggacagaatcttattttttaattttacaaaaagaaaagaataagctgattaatttaacatctacagatatcgtcacacaggatgagttgcttagcaagcgagtattttatttatccaaggaattaaaaaatataaacgatgtggatgttttcgatgctatcaaaaagatgacgcctggagcgagttatttttctcttggtttggttttctttgccttgatgacgccactttattcaaacctgtttaacacacgcttaatttacagtgattcttatcattcagttttctttgttactggaatatttataatttttgttatatttgaactcattttaaaaggtattatctatgacaaaacgtcatctcagattagaagtaacaatataaaatgcaatgctttttttttatatgctttaaaagtttcaaactgcagaaatgcggcagtaaagatacgcactattgaatcttctgtagcatcactctgggaatcttatcctttaatttcagtagatttctcattaacttttctttttatagtatgcctttttgttatgatgggagtttatgctttcccactgtttatctattatatagtgttaacttttctttgtgtttacatccgtttttctgcctataaaaaaacgctgcaaacgaataccgccagttatgaaaaaatgtctacgttaatatcattagaagcaaaaagaaaagagttgaagtttctacgcagcaccttttttgaaaagctattgatggataaaactaatcgtgacgaatataccaaaatggaaatgaatattgaaaatcatcattgggctgaaatgataaaggctaactcttttgtttctatgattgtgatgtttatttcatcctattttgctgtcgtcaatggtagtttgacgacagcctctattattgccattatgattatcaactctcggctctcaggggctttagttgggggcgttaataagttatatttatcacgattacattcgtttcacatcatgaatagtttaagcgagctattaaaagataaagatacatttgtatcgcatagcggtatatatatatcacggattcaacaactatcagttgaaaaattatctatttcgtttgccgaacgaaaactgatcgaaccgctctcatttacggctgttcctggagattttattggcattgttggtgcatcaggagcgggtaaatcatctttaattaaagcactgtcaaactctattaattgctatacagggtcagttaagctaaataatgttgatataacacacatttctgaagagtatatacagagctgtatcgcttatcactctacaaacagctcttttataaagggctcgcttcgtgaaaatttcatgatatatggtgttgttgatgatagtgatatcatagagatattaactttatgctgtagaaatcttattctttcgaaagaaaacgtagacgaaaaatttgttgatgagctaaacctttccaatggggaaaaacaaaaaattttattatgtctggcattatttaaaaaaccggagatggtgttcttggatgaatcgacatcttatctttcaaccgctgacgctttagattttctggaaagaataaaacatctttactcagatagtattgtcatttttgcgacccatgatatatcactacaaaggttatttactcgaaagattgaactctcacatgaacatttaagaactgtaagttgtaatacaacgataagtattccgaaaatgaaactgaatggatga

SEQ ID NO: 382158 - DNA, 1209 bp, Salmonella enterica
atgttagcggtctttatgaccgttgctgctttgattgtttatatttgtgtggcgaaaattgatattgtctctcctggtactggcgtgataaccggtgcttcagataaactagtaatagtcagtcctgattcaggatttattaataaatttgatttaagaactggctcaaaggttaatatcggagatatacttttttcgtatacgaaccttgatgtctttcaccaggaaaaaacacttaatgagttagtattatttgcagacagacggatcgttagcctggaagaggatcagcgattgcttaaaatactcctggctgaagaaatatccgaggaaagtgagtttagtacggaaaataaagatttcttcagtcaggaacttagtgcttataagcttttgaatgagtatttttctttaagaaatgaagaaaagaatttaaagctcagagaggagaagatgattgaagaaaaaaacgatcttcacgatcgattgcttcttttgaaaaggaaaggaaatttacttaaatcggcccgtgcgccagaaatagagataataaataataaaactgaaataagtcaaattatatctcaaataactacaggggagatcagtttactctcattacagaatgacattaagctggcaaacaataggtttcgtagtagcgtccttgagcaactcaataacaatgctgaacaactggaacagttacgtagagaacgtcttgaaaatcggggacaattggaactactaagaaataaaattaaggctaatagtgttttatcaccgacgaatggcataatattaagtattgaacgtagctttgagaagggttcttatgttgaaaactcacagccagtaatgacaataaagaaaagtaatgaaagtaaagtcattgatgctcgtattttagcaaaatacaggccttttatctttatgggcacaacggcaaaaattactgtgaattcacctggctataaaaaaacactctcaggtgaaattacgaggataagtgctgattcgttctcagatgatgaaaaaaatggtgctgaacgttattacaaagttgaaataaagccagatgataaaatcatagtccctcctgagttagagggtgtccaggttaatgtatatgcgctaagtaagaaagtgactctgttaaattacattacagcgttagtcggtgataatattgtatttaatgtatggtaa

SEQ ID NO: 382159 - DNA, 291 bp, Salmonella enterica; identical to SEQ ID NO: 380124

SEQ ID NO: 382160 - DNA, 1443 bp, Salmonella enterica
gtgtacgccgtcagtgatgtctgttgtccagttgtaatcccagacacctgccgacgttttattcgcatccacccacgtcttgccgccgtcaatgctcagacgtacaacgttcacatcttccggcacctctatccggaactccggacgcagagcgttggtcaggttgtcatccggcacgccggtatcattgaccagtacaatgttgttaatctccgtctgcgtgtcgatggtcactgccagtggcgcggactggctgacgttcccggctctgtcctcgactttcaccgtcagggtgtagttgccatccacccagtcgctggccggcatgaatgtccactgtcccccgatctgggtcagttccacctcctggttcgtgccattatgcgtaaccgtcaccaccacccggctcgcatccgtatcaatgccgttgatagtaaaaccaggcgttttttcgttggtgatattgtcgccagccacaccactgtcattcgcggtatccagcgtgatggtcggtaccgacagggtggtgtcaacggtaaagtccagcgtccgcgtcgccgtgttccctgcgatatcggtcgcttccaccgtcagcgtgtgtacgccctcagtgatgtctgttatccagctataatcccagacacctgccgacgttttcttcgcatccacccacgtcgtgccgccgtcaatgctcaggcgtaccgcattcacatcttccggcaccgtcacccggaactccggacgcagagcgttggtcagattgtcatccggcataccggtatcattgaccagtacaatgttgttaatctccgtctgcgtgtcgatggtcactgccagtggcgcggactggctgacgttccccgctctgtcctcaactttcaccgtcagcgtgtaattgccatccacccagttactggccggcgtaaagtgccactgccccccgctctgggtcagttccacctcctggttcgtgccattatgcgtaacctgtaccgccaccctgatcgcatccgcatcaatgccgttaatagtaaaaccaggcgttttttcgttggtgatattgtcgctagccacaccactgtcattcgcggtatccagcgtgatggacgggaccaacagggtggtatcaacggtaaagtccagcgtccgcgtcaccgtgttcccagctatgtcgatagcttccacgacaagggtatgtttcccctcaggtaccgcgtccggccaggtgtaatcccagataccggtagaagactgtgtggcgttaatccatgttgtgccactgttgatgctcaggcgtactacgttgacatcttccggcaccgtcacccggaaatgaggatgcacctcattggttatattatcgctggtgataccgctgtcattgaccagcacaatgccgtcaatcgtgacctgtgtatccactttcaccgacaacggtgctga

SEQ ID NO: 382161 - DNA, 468 bp, Salmonella enterica; identical to SEQ ID NO: 380877

SEQ ID NO: 382162 - DNA, 1524 bp, Salmonella enterica; identical to SEQ ID NO: 380233

SEQ ID NO: 382163 - DNA, 873 bp, Salmonella enterica; identical to SEQ ID NO: 380247

SEQ ID NO: 382164 - DNA, 489 bp, Salmonella enterica
atgtcagaaaataaaaatgtgcaagatacacatatttccgagcaaatgaaggcgcttcacggtgcgttgattcgcgtggtgagcgcgcttaaccggcctcgtaatgatgagaaattaattgcagaggcggggattcaactcgatcgtgcgctattttcaatccttattagtatcgaacgtttagggccgattggcgttgttgagttagccgaacgtgccggtcgtgattatacgacggtaagccgacaggtcgccaaactggagaagctggggttgataatacggcagcataatgccatcgatcgtcgtatacgcgaggccgttatctcccggacaggaaaggcgatgacggagcgtatagacgctgctcgagagcaaatgggcaaagttgtttttaaagactggcctcaggatgaacttgatgtctttgttcggttaatgcaaaagtttgccgatgcaatggatagcgatgcttcaatgccggaataa

SEQ ID NO: 382165 - DNA, 618 bp, Salmonella enterica
atgacaacccagtatggattttttattgattccagccgttgcaccggttgcaaaacctgcgaactggcctgcaaggactacaaagatttgaccccggatgtcagcttccgccgcatttatgagtatgcgggcggcgactggcaggaagataacagcgtctggcaccagaacgtctttgcctactatctctccatctcctgtaaccactgcgaagacccggcctgtaccaaagtctgcccgagcggcgcgatgcacaagcgcgatgacggttttgtggtggtggatgaagacgtatgtatcggctgccgctactgccacatggcctgcccgtacggcgcgccgcagtacaacgccgccaaaggtcatatgaccaagtgcgacggctgttatgatcgggtggcggaaggcaagaaaccgatctgcgtggaatcctgcccgctgcgggcgctggactttggtcctatcgacgaactgcgcaaaaaacacagtgagctggctgccgtcgcgccgttgccgcgcgcgcatttcacgaagccgaatattgtgattaaacccaacgccaacagccgcccgaccggggacaccaccggttatctggccaatccgaaggaggtataa

SEQ ID NO: 382166 - DNA, 264 bp, Salmonella enterica
gtgaaaaacagcagaagaagccgtgtgattttactcgcactggcggcagcatggagccagtgcagcccggcggccgtcaatgtcgaccggacccgtattatcatggatgcgccacagaaaacggtggccatcacgctgaataacgatgacaaaaccacgccgttcctggcgcagtcctgggtgacggacgctgacggggtgagaaccgatgcgctgatggcgctgccgccgctgcagcgtattgatgccggacagaaatcctag

SEQ ID NO: 382167 - DNA, 1314 bp, Salmonella enterica
atgacggcagagtacatcagggactggcaacaaccgcgccacgcagtggggcgtgaaggaacggggatccccgctcctgaatccgcgctttcctcctggctggatgcctaccgggcagagaacgaacgccgccaggaaatggctgatgcggcgttctccgccacgccgctgggcaacctgattaataaaagcctggacgcacaggaaaaacaggacaaaaccatcacactggcaggaaacgccagaaaacaggcacgcggcgcggtggatgaagccatggcctcgctgcgcctgctgccgtcctatctgcgcaatccgcttattcgccacctctccttcctgcgcaaaaaacaggaagcagatcgccagaaaggcaaaaagagctggcaggcggaacgctatgcacgcggaaccctgcgcaaaatattcgaacgtcttgaccgcaccgacagccgctggctgacaccgggttatcgcgcccttgccggacgcgaacgcctggacgatttgctttacctgccgcagctcaacaaacaccagatacagacgctggccaccatgacggcggcgatgttcagcagcacctttgagactctctgtgatggtttcggtgccagagatggcgagctgaccatggatgtaacgctgaaggcgtatcagatgctggcccgcatggcgttacacctgcacgccatgcctccgcattataacgcactgacaacagacaaagaccgcaagaacgaaccggacacggaactgctgccgggcgcaatccttcgcctgacctgtgcggaatggtggaaacgcaaactgtggctgttacgttgcgagtggagagaagaacaactccgcgccgcctgtctggtttccagaaaaacatcgccctatctgagccaggacgcgttaagcgagtttcgcgcacagcgcgagaaaacacgcgatttcctgaaaagtttcatgctggaaaacgaagacgggttcacgattgatctcgagacagtgtattacgcgggagtaagtaacccggttcaccgtaaggcagaaatgatggccaccatgaaggggctggaacttctggccgaagcccgtggcgacaaagcggtgtttctgactgtcacctgcccgtcaaaataccacgccacaacagagaacggtcatccgaatcccaaatggaacggggccaccatgcgcgactccagcgattacctggttaacacgttttttgcggcggtccgcaaaaaactgaaccgcgacggcctgcgctggtatggcatccgcacggtggagcctcaccatgacggcaccgtgcactga

SEQ ID NO: 382168 - DNA, 1209 bp, Salmonella enterica
atgacctcaatgcaaaaatggctacggatcggcgcgacattaatgttcggcctttttgttgcttatcttgaccgttctaatctttccgttacgttacctacgattacacacgacctgaatattgatggcgcaacagccagcattgtattaaccatatttcttattggctatgccttttcaaatatttttggcggcgtatttacccagcgatacgatccgaaaaaaatagtcattctgatggtgctaatctggtcgattgcgaccgtttttgtcggatttacctcgtcagtgtacgttattttgatttgtcggctggtgcttggcattaccgaaggcatttattggccgcagcagtcccgcttcgccagcgactggttttcagacaaagaacggacgcaggcgaacagcattatccagtattatggacagttcctggcattaggcctgggatttatgattttgtccccgctggatgctgccttcggttggcgaaatgtttttattatcactggtgtgatcggcattgttgttgtggttccactttatataacaatgctgaaaaaacaggaagaagcgccttattatcgtgcgccggcgccaacagagaaaactaaacttactctggaatcgctgggcggaactcccttcctactccttatttttacctacatcactcaagggatgttgttctggggaattacgttatggatccccatggttgtcaattctctcggctataccggattcagtaaagcattggtcagttctctgccttatctgactgcggttatactggcaatccccatctcatggatcagtgataagacacaaaaacgtgtacttattgcttcactgggcctactaatccccggcgtgatgttatttctcctgccatttgtcgatgcgccgggctttaaaatcacgctcattaccctggcgatgggttattatgccgccagctttacccccaatatctggtcgattatccagtcgaacgttaaaccccatgcgattggcccagcctccggtattattaatggcatcggcgccggcggcggcggtacgttggcaggcctaatggtcggctatttttaccggacaaccggcagctatatgcagggatttatggttctcggatgcattgttatcctgggcggcgcgtcattattgatctacggcagaataagagctcaccatgcccggcgttaa

SEQ ID NO: 382169 - DNA, 1161 bp, Salmonella enterica
atgaaaaatgatatattaattaccggtggacatatcatcgatcccgctcgtaatattaatgagattaacaagttacgcatcattaacgatattatcgttgatgccgataaatatcctgtaacttcggagacccggattatccatgccgacggcatgatcgtcactcccggtcttatcgattatcacgcgcatgttttttatgatgcgacggaaggcggcgtcaggcctgatatgtacatgccgccgaatggcgtcaccaccgtcgtggatgcaggttctgccggtacggcaaactttgatgccttctaccgaacggtgatttgcgccagcaaagttcgaatcaaagcgtttctgaccgtgtcgccgccgggccaaatctggtcacaagaaaattatgatcctgacaatattgatgaaaataagatccacgcgctgtttcgccagtatcgcaacgttcttcagggattaaaactcaaggttcagactgaggacattgctgaatatggcttaaaaccgctgactgaatcccttcgtattgccaacgatttaaggtgccccgtagcaatacactcgactcatcccgtcgttcccatgaaagaacttgtctccttgctacgccgcggcgatattatcgctcatgcgtttcacggcaaaggtagcaccattcttactgatgaaggcgcggtcttagccgaagtccgtcatgcaagagaacgaggcgttatatttgatgccgccaatggtcgcagccatttttcaatgaacacggcacgccgggccatcgccaatggctttcttccggatatcatcagtagcgatctctcaaccatcactaaactcgcctggcctgtttacgccttaccatggattttatcgaaatatttagcactcggcgtcacgcttgccgatgtcattaacgcctgtacccataccccagcagttttaatgggtatggcagcagaaattggtacgctggcccctggggcatttgccgatatcgccatctttaaattaaaaaacaggcatgttgaatttgccgatattcatggtgaaacgctcacggggacgcatgtgctggtaccacaaatgaccataaaatccggtgaaatattatttcgtcaaattgattttggcacgcggccaaacggagttgaaaaatga

SEQ ID NO: 382170 - DNA, 276 bp, Salmonella enterica
ttgaacacgtttaacggcgtcagcgcccgcgtggtgtgggacagcgccggacgcgacatcgcgcgcacggaaattaagtttgatgaagccgttaccggcatcgccacaggcgaactggtagacgcgctgaagcaaggggaatacgcgatttactttcgcggatacaaagccaacgaagggattattgaagcggatgtccgcagcgtcgatcgcgcgcagttagcgattgtggcgcgtcgtattagtgaggtgattaatcaggagaaaaaagcatga

SEQ ID NO: 382171 - DNA, 132 bp, Salmonella enterica
atgtacgacaatggttcccgtaaggagtgtaaaactaagtcagtactaaaccacgagggcatgaacgccaggcaggctaatgtaccactagttatttactcgcgcccagaaattctttatcaagaagcgtaa

SEQ ID NO: 382172 - DNA, 1026 bp, Salmonella enterica
  misc_feature (887)..(896): n is a, c, g, or t
gtgaaatttaatagtaatgacaggatatttatatcaatctttcttggattggcgattatatatacatttcctttattgacacatcaatcatttttcgttgatgacttgggtaggtctttatatggcgggttgggttggtcaggcaatggtcgcccactttccgactttattttctatatcattaattttggaaccccaattatagatgcttctccgctacctttaatgctagggatagttattttagcattggcactatcctgcgtcagggaaaagctgtttggagatgactacatcacagcatctctttgttttatgatgattttggcaaacccattctttattgaaaatctatcatatagatatgattcattaacaatgtgtatgagtgtggcaatatctattatctcatcgtatgtcgcttatcaatacaagcctataaatatcataatatcatccattttaaccattgcattccttagtctttatcaggctgcgctgaatacttacgcaatattcttgttggcctttataatttcagatgtggttaagaaaaactcaatttcaaatatcacaaaaaatacagcatcttctgtcgctggtttaataataggatatttttcctattcttactttattgcaaaaagacttgtaacaggttcttacaatatcgaacatagtaagattatagagataaactcaagtttatttgaagggataatttctaacgtcttatcattttatagaatgtttagcacgatcttgaatggcgataattacttaatctactactcgctattctttgcgctaatcatttctttgatagtcatagttttaaaagtaatcaaaagagatgaaaataagaaaacaaagttcttgctagtagnnnnnnnnnntattagcatcaatgtttttcatcattggaccaatgatttttctaaaatcaccaatatacgcaccgagggtattgattggtatgggtggctttatgtttttttgttgcctatgcgtattctatgcttttga

SEQ ID NO: 382173 - DNA, 324 bp, Salmonella enterica
atgtcgcatcagcagataattcagacccttatcgaatggattgatgaacatatcgaccaaccgctaaacattgatgtggtggcaaaaaaatcgggctactccaagtggtatttgcagcggatgtttcgtacggtaacgcatcaaacattaggcgagtatattcgccagcgccgtctcctgttggcggccgttgagctacgaacgaccgagcgcccgatttttgatatcgcgatggacctgggctatgtatcgcagcaaaccttctcgcgtgtatttcgccgcgagttcgatcgcactcccagcgattaccgtcaccgcctgtag

SEQ ID NO: 382174 - DNA, 1602 bp, Salmonella enterica
atgagtcaaagcacacgacgcaaggtgttgagatttctcggaacgatcattgtggtgttacttcctgtattgctggcgatctggtttgctcatatccgggcagtctctgaaaccagaaatcagttacattcatttgcgcagttggtattagataaaacggagcgggttatcctgcaagcagatttagcccgcgatgccgctgaacaatatcaggggcaagcctgtacgccagcccatcaacagcgaatgctgaatattatccgcggtcgtttgtacattaatgagttgatttatgcgaagggccagcgttttctatgctctacggttatgacgccaacaagtccttattttattccccgcgctgactataaacgaaagcctgacatcgctatttattactatcgtgatacgccttttttcaacggttataaaatgacatatatgcagcggggaaactatgtcgcggttatcaatcccttatcttatagcgaggtgatgtcagacgatccggcgttggcctggggaatgtatgatacggtgaccaacacctttttctccctgagtgaacaggcgcaggctgatcagctattacctttggtacgacggagtgaacctgtgttccaacagggtgagcgtttttatactctggttaaatcagcaaaacgaccggttgccgcgattgtgtcaacctcaaagcaacgcttttaccagaacctctttcatcagcttacgttaacgctaccgttagggatcatctgtagcattatcgtcttatttatgtggtcacgatcccggcaggcatattactcaccgcgtcgattgctgcaacgggccattactaggcaccagctttgccttcattatcagccgatcattgatatccgaaacgggacatgtgtaggtgccgaagcgctattgcgttggccgggctatcacggtccggtgatgagcccgtgcgaatttattccgctggcggaaaaagaggggatgattgagcagatcaccgattatgtcgtcgaagaggtatttaatgatttaggtggttttctggccgcgcacccgcatctttatgtctctatcaatctctctgccgccgattttctctcttcccgactaattgtgatgattcatgaaaaaacgcgtcagcattcagtgcttgcgcaacagataaaggttgaagtgactgagcgcggatttattgatgtgcctaaaatgacgccgattattcaggcgtttcgccaggcgggatacgaggtggcaattgatgactttggtaccggctattcgaacttgcataacctgtactcattaaatgtcgaccttttaaaaattgataaatcttttgtcgacacgctaaccactaatagcgccagccatttgattgtggaacatattattgaaatggcgcaaagtttgcggctaaaaatcattgctgagggggttgaaacggctgaacaggttagctggttgctaaaacgcggcgttcaatattgtcagggatggcactttgcgaaggcgttgccaccgcaggaattcatcgcctggttacaacaaacgcccgcgcctctgacgatacgcgggcagacgccctacaggcggtga

SEQ ID NO: 382175 - DNA, 282 bp, Salmonella enterica
atggctgccataaccactggtgtcgttcttctccgttggcaactgctgagcgccgtgctcatgtttttagccagcacgctcaatatccgtttccgtaaatcagattatattggtctggcggtgatcagtagcggtctgggcgtggtatccgcctgctggtttgccaccggcttactcggtattaccatgatggatctcgctgcgatctggcataacattgaagccgtgatggtcgaaacgatgagccagaccccgccagaatggccgatggtgctgacctga

SEQ ID NO: 382176 - DNA, 2067 bp, Salmonella enterica
atggataaaaaactagaaccttattatttaagtgcggaaacggcattatctatagtgtctaaaaaattcaacataaaaattgacatcaaagaggatgatataaatttaagatttaaaaagtacgacagaaataacactgatgactctatacaaatgaagaatttctttttgtcgttagggctttctctacaggatatattatttaataatggtgaggatttactaaatgagcctatgccgattttactattaacaccagaaatgaagtggatggtgtgtgtgagcggcgggcaaaaaataaagttggtaaacgcgcgcggtgaactctgttatgttgaaattgaagatgaatatttaaaagagttatctgcatttagtatactacctttaaataaagttgttgatagtataagagtaaaaaatatcataaaaaactctttatcgatgaacaagattttttatactaaatacttcttttcatctctttttatggcaatttttgcgttaactatcccagtatttagtaatctgttctatgataagcttgttccaagcgcttcggtttcatcgttatttggcgtggctataattgttgctgtatttattgtttttgagtttatccttcgtacttcgaaagatatttatcagtctatcacagcaaggcaggatgacgtcgatattgatatcgcatttcttgaagcggtactttatagtaaaaagaaaaatggcagatccatgtcatcagcatttgtgctatggaatgagtttcagaaaattaaacccgttttattaaactcgatctttcaacgtatagccgatattccaatatttattatatttctcattgttatatatgtaaatttaggtctggtcgttattgtacctgttaccatgtttatcgtctctattattatttccctcgttaaccaccattatactaatgagttaatgaacaaacaaaaagaaggacagaagaacaggaatatttttatctcagaagttttcttatctattaaaatgatccataccttaaataatcaaggtttactttttgattgggtcaacacatcaaatgaacagtcgtatcttaacctgaagataaggaaattaaatcttatctatcaatctatattggggagtatgtcatctattacccaaataactattatggtaatagccttttttatggtaatcaagggtgatgttactactggcgcaattgtttcatctgtcattgtctctggtcgtatttccgggatcatttcgaatttttcttctacattaatctctattttatcagcagaaaaaaccggtaaggatctgctttctttttttgatgaagatcaggcagaaaaaacaccggcattacagtcaatatcaaagtgcaatggcgatatctctattcggggcgtgagttatcagtatgatgctcaatctccgatgattattaatcgactgtctatagacatacctgcggggcagcgtgtcgcagtgataggcgaatgcggtgcaggaaaaagctcattactgggaatgctatctggctacctttcgccaacagacggtgccattttatatgatggatataacttaggacatttatcgcagaactttttttctcagcatttaagtgtggtgacgacacatgatgttttattcaccggaaccattgaaagtaatttcgcgttaaaaccgcaaaacgacaggggacgagtactcaaggcgcttcatctggcgaactgtggttttatcttgcaacatcctatggggctgaagtttccggtgaattttatggctaaaaacctgtcatccggacagcagcagcagttattattagcacgtagtctgagcagtaacgccagcgtctttttattggatgaaccaacatcaaatctggatgagaataccgagaagcaaatttttgataacttagatgagtttattcatgggaaaacgttgatcatggtgacgcatcgtcgatacctgataaagtattttgaccgggtcctggtaatgaaaggtggaaaaataatccgtgattgttctccggataaattattaatgtaa

SEQ ID NO: 382177 - DNA, 13683 bp, Salmonella enterica
atgggaaataaaagcatacaaaagttttttgccgatcaaaattctgtaattgatttatcttctttgggtaatgccaaaggcgcaaaagtttctctttccgggccagacatgaacattaccacgccgcatgggtcagtgatcattgtcaatggcgctctttattcaagtatcaaaggcaataacctcgctgttaaatttaaagataagactattaccggcgctaaaattctgggcagcgtagatttaaaagatattcaactggagagaattgacagctcattggttgattctgctcaggtagaaaagaaaggtaatggcaaacgacgaaataagaaggaagaagaggaattaaaaaagcagcttgacgaggctgaaaacgcaaagaaagaagctgataaggcgaaggaagaagcagagaaagctaaggaggcagcagaaaaagcgctcaatgaagcgtttgaagtacagaactcgtcaaagcaaattgaagaaatgctgcagaactttttggctgacaatgtagcaaaagacaatctggctcagcaaagcgatgcttcccagcaaaatacacaggctaaagcaacgcaggcttctaaacagaacgatgctgaaaaagttcttcctcaacctattaataaaaataccagtactggcaaaagtaatagcagtaaaaatgaggaaaataagctcgatgccgagtctgttaaagagccgcttaaagtcacattagcgcttgcggccgagagtaacagcggtagcaaagatgatagtataactaattttaccaaacctcagtttgtaggtagcactgctcccaatgccacggttattattaaaattaatggtattgctgtcggtcaggctgtagcggatagtttgggtaacttcaccttcacagcgcctgaaacattgactgatggaacatacaatctggaggcagaggccaagactgctgatggaagcggtagcgccaaacttgtcattactatcgattccgttaccgataagccaacatttgaactttcgcctgaaagtagtgtgtccggtcataagggcttaacgccgaccttgacgccttcaattgttggtacggcggaagagaatgctaaggttgacatttatgtagataataaactggttgccagcgttgatgtcgataaagatggaaactggagttatgaatttaaagataatgaattatctgagggcgaaaatagtataaaagtcgttgccgtggataaagcaggtaataaaaacgaaacgacggatagtatcataaccgacaccatttctccggaaaagccgacgattgagctggatgatagtagtgattccggcattaaaaatgacaacattacaaatagcactctgccaacatttattggtgtggcggaacctggttctacagtctctatttatcttgggcttaaacatcttggtgaggtcattgttgctaaagatgggacatggagctatacgcttactacgccgctcaaggatggcgaatacaatataacagcaaccgctactgatattgccgggcatacctctgcgacggcaaatctgccttttactattgatacccgtatcagctatttcagcgctgagattgaaacgactgatgatagcggtattgttggagataacgttactaacaatactcgcccaacctttacaggtaaaactgagccaaatgctattatcagtgtcataaatagtgagactggcgaagaggttatttttaaagcgaatgacaagggcgaatggacgttcaatttcacttcagactcagtggaaggggttaacaatcttacgttcactgttgaagatgtcgctggcaacaaaaaggatttttcctttagttacgttatcgatactgttgcccctgtacctccgacggtttctttggaggattttgttgttttaccgaatggtataattttatcagggaatgatttaccggctttagtcggtacggcagagccaaagtttaccatcttattgatgcgagatggtaaattatatgacagcattgaggttgactcaaacgggacctggaattatcagtttagtaataaatttcttcagggcgcctatgatattgaaatcatttctcaggatgccgccggtaataaatcctctactgttaaatattcttttactattcaaactgaagttgtacctccaaaagcggaactcgatgccagtgatgattccggtgcaaaaggcgactggattaccaataaacataatgctctgacattactgggaacagcggataggtttgctaccgtaaatatccttattgatggtaaaacgataggcgtgacgactgcggatgcagacggtaactggaattttgatatttcccgaaatctgtctgacaatgtttataagattacggttgaatccatcgatcctttaggaagaacgtcatctgtagattatcagcttaccattgatagctttacgccgatccctactgttatgttgcatgatagcgctgactctggcgttaaaggcgatatgattactaaaattaatacgccgttgtttaccgggatggctgaagctaatgctaaggtttccatctatgttgacggtgtgttaagtggtgaggctattgctggcgatgatggtgtatggaattttcaatttaccacagcgttatccgatggctcgcatgacgtaacggtaaaagtagaagatattgccggtaatactgcctcctcatcagcgtataatttccaaatcgtaacgcaaacgcaaaaaccaacaatagagttggtcaacgatacgggggttgataatacagaccatattattaatgaaaagaatcctgcactgacagggaccgctgcaccctattcaacggttaaactctatgttgatggcgcactgatcgctgaggtcagaacaaataaaaatggcagatgggagtataccctgaaagccgatcaaggtttggttgatggcgatcatagaataaccgcttcagttgaagatatcgctggcaacattgcccattcggatcctttcttaattagcgtcgatactgctatttcaataccgatagtttcattgagcccggattcagattcgggaattgcagatgataatttaacgaatatcgttaaacctaccttgcacctaaaagatattgatccggacattatcagtgttcaggtatgggatgccatgtctgatacgcagatcggtgttgccacgcaacaacctgatggttcatgggcctatacctttacttcagatttaacggaaggcttgcatcaggtttatgtcaaggttgaggacattgcgggtaataaagcgaacagcgcggtattcgattttactatcgataccacagtatcaacgccggtgatttccctgctttctaaggatgatacgggggtgacaggcgataacctgaccaatatcaataagccaggttttgctatttccggtgttgatgccgatgcgcatcgggtcgtcgtacaggtgatgcacaatggcgtgagcgaagagatcgaactttcccacctcaatggtagttggttatttacaccagggaatacgtgggcggatggcagctacacgttaacggtgaaagtagaagataaggcaggaaataccagctattcagcgccgctgacggtcgttatcgatacccaaatcgccattgatggggtggaactggtcaacgatagcggcgtgaaaggcgataatatgaccaacgacgaccgtccccactttcgtgtgacggtacctacggatgtcaatgaagtccgtctgagcattgacggtggtaattcgtgggttcaggcaaccccgggcgtggcaggaagctgggagtatatctggccgacagacctggcagatggtcaatacacgctaacggtggaagcgactgataaagcaggcaatacagtgacgaagaccatcgatttcgcggtggataccacgctgtcagtgccggtcatcgtactgaatagcgcggacgataccggtgtccagggcgataacatgacgaatcgcacccagccgacatttgccctgcagcatattgatgatgatgccgttcgcgttacggtcagcgtggagcatggcggcgtcaccaccacatttgacgccacgaaaggcacaggcggatggacctttacgccgacaggggcgtgggcggatggggattataccctgagtgtgtcagtcgaagataaagcggggaacaccagtcattctgcatcgctgacggtgacggtggacacgcaaatcgccattaataacattgaactggtcaatgacagcggtattcccgacgataatctgactaataacgtgcgtccgcacttccaggtgacggtaccgacggatgtcaacgtggtgcgcctgagcattgacggcggcaagacgtggttcaacgctacccagagcgcgacgccgggcgtctgggattatacctggctggctgatgtgggagaggggaagcataccctgacagtggaggcgaccgacaaggcgggaaaccagacgacgcagcaactggacttcatcattgataccctactgtcagaaccgactatcgtgctggacaacacggacgacagcggaacaaaaggcgataacctgaccaacgtaaataagccgacgtttttactgggcaatattgacgtagacgcgcggtatgtcacggttgaggtgctgcatggcggcacgaaagaagtgctgacggccaccaaaggcgcgaccggcatctggagcgtgacaccgaccggcacatgggcagatggcgactatacgctgacggtgagggtggaggatgatgcggggaacgtaaaatactcagcgccgctgacggtcacggttgatacccaaatcaccatcgatgttattgaactggttaatgataacggtattcccggcgacaacctgaccaatgacgttcgtccacacttccgcgtcacggtgccaggggatgtcaacgaggtacgtctgagtatcgacggcggtaatacgtgggttcgtgcaacacagggcacggcagggatctgggattacacctggccgaaagatgtgaccgacgggctacataccctgacggtagaagcgaccgataaggcgggaaataagacgacgcagacgctcgattttaccattgatacccggctgtcaacgcctaccatcgctatggacagcagggacgatacaggcgccattggcgatcatattacgagcgtcaaaagaccgggctttaccattggcaatattgacgccgatgcgcactcggtcattttgcggatcacacagggcggcaatagccaggaagtgacactaacccaggttggaggacagtggcgctttacgccagatgctgactgggcggacggtagctatacgctgacggtagaggtaacggataacgcaggaaacgttcgtcagtccacgccgctggtggtgacggtggacacgcaaaccagcattactgatattacattggtcaatgatcatggcgtacctgatgacaatctaactaatagcacccgtccgcagtttgagatcacggtgccggcggatgtgaattctgtgcaactgagcattgatgggggcgcaaactgggtgagcgcgacgcagggtatcgaaggcgtctggggctatacctggccaacggatatgggcgatggaaaacacaccctaaccgtcatggtcaccgacagagcgggcaatacggcgacgcaaacgcttgaatttttcatcgacacccggttgtcgacgccgaccattgcgctggatagcacggatgataccggtacgcctggcgatgatatgaccaatcgcacccggccgacttttattctgcagaatatcgattcggatgttatcaacgttacagtcagcgtcacgcataatggaacgacaacctcgtttaccgcgacacagggggctggaggatggagctttacaccgccagcgccgtggggcgacggtgattatacgctgacggtgacagtggaggatcgggcgggaaatacgcgtccgtctacgccgctgacggtgacagtggatacgcaaatagccattgatcatattgaattagtcaacgatagcggcgtccctggcgataatgtgacaaaacatgtgcgtccgcagttccagatctcggtaccggatgatgtggaaaaggttcttctgagtattgacggcggcacgacctgggttactgcaatcaagagttcgacggctggcatttgggattacacctggccgacggatatgccagagggacagcataccctgatcgtggaagtgactgacggtgcgggtaataagatgacggggacgctcgatttcactatcgacatcacgttgttgacgccaaccattgagctagcgcccgatcaggataccggacagaataagaacgataatctgaccagcgtcactcagccggtatttgtgttggggagtatcgataaagatgttcgacacgtggaattgagtattgagcataacggcacgtttaaaacggtggtactcaccgaatcagccgacggctggcgctatcgaccggattctgctttggcggacggtagctacacattcaccgtgacggtaacagatgtggccggtaatcagcaaacatccgcgcctttaaaggtgacgatagacggtacgttgactacgccggtgattgagctggcggccggcgaagatagcggtactgttggcgatcgcctcaccaatcacgatcggcctgtgttcgacatacgccagatcgattctgacgttacgcgcgtgatggtcaaagtaacttacaacggtaaaacgcacgaggaagcggcggtattcaccaatggtcaatggcgctttacgccttctgcgagctgggctgatggctcatatcagttagccgttgtggtggaagatctggcggggaatgtaaaagaatctgcgccgttagaggtacgtattgataccacgacaaccattaacaatatcgtattgcttaatgatactggcgtgcagaatgatcaattaacgaatgttgccaaaccgtcattcagaattgacgttcccggtgatgtcgtccaggtacgcgtaaccctggatggtggcgctaactggaatgtgatacgcaaaaatgccgacggacagtggatttttgacagcccgaatactctggttgacggcacatatacccttcgcgtagaggccacggatgaggcaggtaatattgcgaataaagatttagtatttaatatcgatactaatatacaggttccgactattgctttagacgcaggacaagataccggagcgaatacagccgataatattactaatatttcacgacccacctttacgattggtaatgttgaccccgatgttatcaaagtcgtggtgacgattgatggtcatgattataacgcgactaaggttggggctggttggcaatttacaccaggcaatgccattccggatggttcttataatattaccgttacggttgaagataaggccggaaataccgcgacatcgaaaccattacctgttgtgatagatacgacggctgaaattgaaagcgtcacgttggttacagatagcggtgatagcgatgtagataacattaccaaagtcgacaagccgcagtttagtattgttaccgctgatgatattacccatgtgcgcgttaaaatcgataacgccgctaattggattgaactcacaaaaggaggggatggtcgctggatatttaatgtcggttcggcattacctgatgggcaacacactctcttggttgatgtgactgatatcgccggcaacgttgcgcaagaaacgctgcagtttacgattgatacgactctgcgagagccgacaattgtactcgatcccacccatgatactggtgatgatactaatgataatcttaccaggattaacaaaccggtgtttattatcggtaatgtcgataatgatgtatcacacattgtggttcatcttgatggtcgggattacaccattgaaaacaaaggggggaatttaacctttacgccggatcaaccgctgtctgacggtcagcatacgatctctgttaccgtaacggatattgctggtaataccaaaacatcggccgaactgcagattgaaatcgacacgcaggttcagattgacagtgttacgttaacaacagatagcggcgtcaacgatcacgataatgtcaccaatgctacccgtccctcttttgaaattgcaacgcctgatgatgtgacatcggtgctggtttctttcgatggcgtaaactggacgcccatcagtaaaaatgcggccgggcagtggcaatttactgcaggtagcgcattgtctgatggtcattatactctccatgtccaggcgacggatcgggcagggaatacggcaaattccacgctgggctttaccgtggatacgcagattgacggcctgagcgtcgtgatgctggacgacgccggaaaggattctacggatggtattacgaatattacctctccacgttttgaaatttcagccagagaacagttgcagagcgtgacggtaattttaaacgggaaatccagcaccctgactcagggggcaggtaataaatggctgtttacccctgatacaccgttagtggatggaacttacaaaatagaaatagtggctgaagatatcgcaggtaataaaattagcaaagaggtatcattcacaatagacactattgtttctgatcccagtattgatttgctggatgcggatgatactggcgaaagcgctgttgataatattacgagtgtcactacaccacgtttcgttattggcaatgtacccgccgatattgatactgttgtaatcagaattaacggcgtttcttatccggttacggcaaatggcaataacctctgggaatttcaggttcccgttgcgttaaacgatggcgtatatgaagccgttgttgtcttcagagatattgccggaaatacttctgaaactaagctgccctttaccattgataccacgacaagcgtcagtgtcagaatggagccagcgtctgataccggcagctccaatagcgataaccttacgaataagcaaaatcccaaattcgaaggtactgcagagcccaatgcgaaactggtgattaccattgttgacgataagtcaggtcgggaggttttaaaacacacgattacggttggcgccgatggcaactggagtgtgacgccgaatatactgccggatggcatgtataccatcaacgtcgtcgcaacagatgtcgcgggaaatactgcgcaaacgcaggaaagattcactatcgatacggttacgatcgatcccaccattcgcctttcggatccatctattgatgatcagtatgaggcaaccagcctgcgtcctgagttcaaagggctcgccgaagcgttctcgacgattatgattcagtgggatgggaaagtggtcggctcggcaaacgccaatgcgaatggtgaatggagttggacgccgccatcagtattagcgccaggctcctatgttgtgagcattgttgccaaagataaagcgggtaatgaatcgtcgcaggtcgactttcctgtagtaatacctgttattgatgtcacgcctccaaccataaagctcagcgaggagagcgatagtggtgccttaggagactttacgacgaataataaaacgccgaccctgattgggagcacgttacctaatacgattgtgagtatttatgtggatggcgtgaaggtcggcgaggcgacagcggatacagcgggccgatatactttccagttatcggaaatgaaagatggccattatgtcgtccaggtgggtatcgtcaaccctcgcgataatagcgaactgcgttccaccgccgttgatgtcactatcgataccgaggttgctgaactggtatggaatatatctggaatgcatgagggcggatatatcaacacggtgacgccggagattggcggcaccagtgagccaaacagcaaaatcactatctttgtgaatggcgttgaaaaagcgattgcttatacgacaggcgcaggacactggggcgtagtattacccgctttgggtaatgacggtaattatgaattaacgtttaaagttgaagacgttgccggcaatatcagagagtttggtccgcagaatgtgatactggatacggtaatttcgccgttaaccgtggtactacgcgaagctgatgacagtggcaaagttggcgactggatcaccaataaatctcatgtcaccatcgatggtactgccgaagccggaagtactttgaccatcaggaatccgcagggagtggttattgctaccctggtggtaggcaatgatggtcgatggagcgcagaattagatctgcgtgaaggtagtaatgcctttgtcgtggtatcggaagataaagcgggcaacagccaacaaaaagatattctgatagaacatgatacgcagattgaaatcagcgatatttcattaagtcgggatactaatagcggtgataaatatgatctgattaccaataataagtctccggtactggttgccatgaccgatcccggcgcgacggtacaggtttatattaatggtgtgttacaaggcacagtagaggcgagttcgtcaggtaatattagctataccatgccggcaaatagcgccgacggcgagtatcaggtgcaatttgttgctacggatactgctggtaaccgggttgaatctgcgattacgaccgtgacaatcgattctcaaattgctgtctttgatattgatgaagattcattaccggccctctctaataaccgggcgttgtcagtctcaggcgtcggggaggctggttctcaggtcagcatctttgtcgatggtaaattagtcaacgttgttatggttgaggctgatggctcatggcgcgcgccgatactgctgcaagatgatggtacgtttaatattcatttcagcattactgacgttgctggcaacactcaagtaagcaagaattacagtgtggatgtcgattcatcaaccgacttcccaacgctcaaccttgaagatgcgagcaactctggttcacttgacgatctgattactaatcacaacaagcctgtgttagttggcaccgcagaagcgggagccacaatccatatttatgtggatgaaaagatcgtggcaaatgtgcttgtgcttgaagatggaacctggtcctatcagtttgataatgcgttaaaagatagtgaatattctatccgtgtggttgccgaagacccggcaggtaatacggcagaatcgcctcgcttactcgtcacgatagataccagtacgtttatcgataatcctgctatggtggcaggttctgataacggtattttcagtaatgatagtataacgagtcagacccggcctacgtttagtatttttggagaaatgaaccagagtgttcagattttcattgatggggtgttagtcgatacgatcacggtgacggacagaaatcaagtttatcgacctgagtcaccgttgggcgatggttcccatagcatttattatgttatcaccgataaagcaggcaacacggctacctcgaaaacgctaaactttactatcgatacctttaatacgacgcctgtcgccattgattctatcggtggacaaacgttagcagagatgaccggtagtgatggcaaaatatatataacggacacgacgcgtaacttattgtttagtggcagtgccgagcccaatagcaaaatagaaatcatcattaatggcttaaatgtgggggaagtttgggttaatgaaaaaggccactggcagatgtcggtgaacccgctttatttcacagaaggccaactggatatcactgttaaatctacggaccgtgctggtaacgtaaatcaggaaaagtattccatttgggtcgatacgcatatccaggtatttaccagcgagcttgatgacaataaatcatcatcgaaaacggactggtggagtaatagctccactattaccatgagaggtatgggggaaattggcgctacggtatcattaatcgtggcaggggtcacgctggcaaccgctgtcgttgcggctaatgggcagtgggaattatcgaccgatcagcttccggaagggaaatacgatatcactttgagtattgaggataacgcaggcaaccgtaaggaagaggtacatgaaatatttattgatcgaacgccgccaaacgctccggtcgtaacttattcagacattgtcaacgatctaattattatgcagggaacggcggaagccaaatctcagctaataataaccgatagtaatgggaatacttatacgttaaccgttcctgataatggtaaatggagtatggcgatcccgtatccatcggaagggaagtttaccattacgagtgtggatgcgattggtaaccggagtgatgatgtccctctcgatatcatgaaagaggttcccgttatttcattatctccagactcagacagtggtacggtgggcgataatattacgcgcgataagcaacctacctttattatcgggaatctggaaagcgatgttgtggtcgttcaggtcgatatcaatgggacagtatataatgctgaaaaaaatgccgatggcgtttggttctttacgccaggtacaccgttagctgatggttcctatacgatatcggtaatcgcaagcgatgccgcgggtaatcagaaaaactcgttacccattaccgttacgatcgacagtacgctgacggtgccggagattgcgttggcagcaggtgaagacaatggcgtttcagacagcgataacgtgacgaatcacacccagcctaagttcacgctgcagcatattgatgctgatgtgaccggggtgaccgtaaacgtgacgcataacagcgtgacagacacctatcaggcgacgcaaggcgcggatggctggaccttcacgccgccagccgcctggaatgatggtacctacacgctgagcgtgacggtggtggatcgcgcggggaactcacagcaatctgcttcgctagcggtgacggttgactcaacggtgacggtaacagcggatagccagcatgacgatgcgagcgatgacgccacgccaacagcggttactccaccggagtctgaaacagtgaatgccgaaagcgatacgcatcttcgtacagtgccgtctgcggcggaagaaagcgtggtgaaggagacggcctatagtattacattgttaaacgctaactctggggatgaaatagatcgttcaattagtcagacaccttcttttgaaatatcagtacctgagaatattgttaatgtcagtgttatgtttgaaggagaagagtttactctgccgataactaaccagaaagcaatattcgaagttccgctatctttagaagatggtgaatatactatggacgtgaaattcattgataaggacgatgatttcctgattaaggaaaaaacattctcagtcgatcactcctcggcggatattgtgaacgcaatgaatgcaagaggaaagaccgaggatgatattaatgattccccttccacgagttctgtagggcacaacaataacggcgctattgatgttttcgccgttaatgaagttacgctacctgtagataatcaagaagaacacgcataa

SEQ ID NO: 382178 - DNA, 816 bp, Salmonella enterica
atgcttgccacttcagacctgtggtttcgttatcaggatgagccggtacttaaagggttaaatctggatttttcgctctcgcctgttaccggtttggtgggcgcgaacggttgtgggaagtctacgctttttatgaacctgagcggcctgttgcgtccgcaaaaaggggccgtattgtggcagggaaaaccgttggattacagcaagcgcggactactggcgctgcgccagcaagttgcgacggtttttcaggaccctgaacagcagattttttatactgatatcgatagcgacattgcgtttagtttacgtaatttgggtgtgccggaggcggaaatcacgcgccgcgtcgacgaggcgctaacgctggttgacgcccaacattttcgccatcagcccattcagtgtttgagtcatggacaaaaaaaacgtgtggctatcgccggagcgctggtgctacaggcgcgctatctattgctggatgaacccactgctggtcttgatcccgcagggcgcactcagatgattgctatcatcaggcggattgtggcgcagggaaatcatgtcattatctccagccatgatatcgatcttatttatgaaattagcgatgccgtatacgtgttacgccagggccagatcctgatgcatggcgcgcctggcgaggttttcgcgtgtacggaagcgatggaacacgcggggctaacccagccctggctggtcaaacttcatactcaactgggactgccgctgtgtaaaacagaaacggagttttttcatcgaatgcaaaagtgcgcattcaaggaggcgtcatga

SEQ ID NO: 382179 - DNA, 633 bp, Salmonella enterica
atggataaagagcttctgcaatcaacggtccgtaaagttctcgacgagatgcgccagcggcctattccgctgggcgtctcaaaccgtcatatccacctgtccgcgcaggattatgagcggctgtttcccggccatcccatcagtgaaaaaaaagcgctactgcagccgggacaatatgctgcggagcaaaccgtcaccctggtgagaccgaaagggcagctcaaaaatgtgcgcctgctcggcccgctgcgctcggtaagccaggtggaaatttcgcgtaccgatgccagaacgctggggattgccgcgccgctgagaatgtccggcaacctgaagggcacaccgggcatccgcctggtcagcccctttggcgaactggagctaccttccggggttatcgtcgcgcagcggcatattcatatgtcgccgcttgatgcgctgatcctgcgggtttcccacggcgatatggtttcagtggcgattgaaggcgacgatcgcgggctgattttcaacaacgtggcgattcgcgtttcaccggacatgcgcctcgaaatgcacattgataccgatgaagccaacgccgctggtgccgataacccgcaggcctttgcccggctggtaggcccgcgatga

SEQ ID NO: 382180 - DNA, 408 bp, Salmonella enterica
  misc_feature (384)..(393): n is a, c, g, or t
atgtcttttcttcccgtaattatggctggcggcacaggtagccgtttatggccgctttcacgcgaatatcatccgaagcagtttttaagcgttgaaggtaaactatcaatgctgcaaaatactataaagcgattagcttcactttctacagaagaacccgttgtcatttgcaatgacagacaccgtttcttagtcgctgaacaactccgtgaaattgacaagttagcaaataatattattctcgaaccagtaggccgtaatactgcaccagcgatcgctcttgccgcgttttgtgcgctccagaatgctgataatgctgatcctcttttgttggttcttgctgcagatcatgtgatccaggatgaaatagcgtttacgaaagcnnnnnnnnnntgtcagacatgctga

SEQ ID NO: 382181 - DNA, 945 bp, Salmonella enterica
atggaaaagttaaacgccatcacgctgtcactttttgcagcattacttatttcacccgcctgggctgaagaagaaacattcgatactaactttatgttcggtgggttgaaaggtgaaaaggtgtctcgttatcagattgatagcaccaaacccatggctggcgtttatgaaatggacgtttatgtcaataaagaatggcgtggaacttatgaggttaatattcaggatgaccccgatagcacctgtatttctccggacctgatcgccagcctgggaattaaatttactccgcagagtacaacagtagaaaatgaatgtattgcgctgaaaacggtggtccatggaggtagcgtttcttatgacactgccgcatttaacctttatctgagcgtccctcaggcttatgtgctggaatatgaagcgggctatgcgtctccagagacatgggaccgcgggattaacgctttttatacttcctactatgctagtgaatattacagccattataaaagtggtggtagtgagaaaaatacttacgcaaattttgtcagcgggttgaatctgcttggatggcaattacattctaatgctaacttttccaaaagtgaaaacttagctggtaaatggcagagcaatactcagtatctggaacgtgatttcccggcggtactggggacaatgcgtctgggggaacagtacaccagcggggatatgtttgatacggtgcgctttcgcggggtgcgcttctggcgtgatatgcaaatgctgccgcactctaagcaaaatttcgctccggttgtgcgtgacgtggcgcaaagtaacgccctggtgacggttgagcagaatggctttattgtttatcaaaaagaagttccgcctggcccctttgtatttgaagatcttcagctggccgggggggggagccgatctggacgtgagcgttaa

SEQ ID NO: 382182 - DNA, 696 bp, Salmonella enterica
atgtattttcgtttatttgctttcgattatctcagcaagaaggtaaataccttactttatttggatgccgatgttgtatgcaaaggatctttgcaagatcttctacagcttgatttgacagagaagattgctgcggtcgtaaaagatgttgattccatccagaataaggtaaatgagagattaagcgcttttaatttacaaggtggttattttaactccggcgtggtttttgttaacctgaaactatggaaagagaatgccttaactgaaaaggcatttttacttctggcaggtaaagaagctgactcttttaaatatcccgatcaggatgttttgaatattctcctacaggataaagtcatttttctaccgcgaccatataataccatttatactatcaaaagtgagttgaaagataagtcacataaaaaatatagcaagataattaatgataatactgttttaatccattatacgggcgctacaaaaccatggcatgcctgggcaaattatccttcagttatctattataaaaatgcacgactgaactcgccctggaaagattctcctgcaaaagatgcgcgtaccatagttgaatttaagaagcgatataaacatcttctcgtgcaggggcattattttaaaggccttctggctggaagcgcatatctttatcgtaaacttttccacaaataa

SEQ ID NO: 382183 - DNA, 459 bp, Salmonella enterica
atgggggacgaaaagagcttagcgcacacccgatggaactgtaaatatcacatagttttcgcgaccaaataccgaagacaagcgttctatggagagaagcgtagggcagtaggcagcatattaagaaaattgtgtgaatggaaaaacgtacgaattctggaagcagaatgttgtgcagatcatattcacatgcttctggagatcccgccgaagatgagtgtgtcgagtttcatgggatatctgaagggtaaaagtagtctgatgctttacgagcagtttggggatctaaaattcaaatacaggaacagggagttctggtgcagagggtactatgtcgatacggtgggtaagaatacggcgaagatacaggactacataaagcaccagcttgaagaggataaaatgggtgagcaattatcgatcccttatccgggcagcccgtttacgggccgtaagtaa

SEQ ID NO: 382184 - DNA, 342 bp, Salmonella enterica
atggcggtagccgagcaggttctggccgcgcagcagcatctgcaatggcgttttcggcatggcttttttcagttcgcgcaggcgcagccacgggtcttcgccgaggaaacggatgcaggcgtcaaaggtggcgccgccccagcactccagcgacccgtagcccacgtcgtcgagcgcggcggcaatcggcagcatatcgtcaaggcgcaggcgggtggcgaacagggactggtgggcgtcgcgcaggacgacatcggtaatggcaacggtcatggatccctccgtgaattaagggttaaggcggcgatggtggtggatagcggcggcaatcaccggctttaa

SEQ ID NO: 382185 - DNA, 2007 bp, Salmonella enterica; identical to SEQ ID NO: 379955

SEQ ID NO: 382186 - DNA, 465 bp, Salmonella enterica
gtgtatcgaaagataagctctttaaagttggttctttgtgcgagtccgaaatatatcagaaaatatggcaggatctcacatcctggcgatttggaaaatcacattattgtgggtcttcacaaccatggtctttccggacctcttactcttttccgtcaagatgaatcatacactattagtggcgctgttaatgttcatttatcttccaataatcttttgagtgttcttaatttggttttagaaggaaagggtatcaacctcatgactccggcctggcttgccaccaaatacttaaaaaataatgaacttgaaattatacttcctgaatggagggttccagatctccccatttatcttgtatggcgtcatcgtcagtattcttctcctttatttcaacgctttctgtcttttattgaagataaatggaataatcgcccacaaattgattttctgaatgatgattaa

SEQ ID NO: 382187 - DNA, 1110 bp, Salmonella enterica; identical to SEQ ID NO: 379980

SEQ ID NO: 382188 - DNA, 738 bp, Salmonella enterica; identical to SEQ ID NO: 380009

SEQ ID NO: 382189 - DNA, 486 bp, Salmonella enterica
atgagtaattcgaatcttataagttctatagagctaacacgtaaaaatttacgtgctcagattgaaggtttgcgtgttgaggctgaagatctcattacaaaatactggatcaagtggaaggaacgaaaccaccaagagattaaccttacccgacatagcaaagttccaaagagggagtatctgggttcttacgcaccaaaagttgagctaattggtaatgccagaaaagtaacgatcacttggcatcagttcagcccttataaaacaagagcgcctagccacatgtcaaaacgggtgcaaccaatgaaaagtggaaaatattctaagaactgttttgtaaaccatgccagctgggaatacgaaatgatttctgaaacggaagcattgctggagccttacagagaaatgcttgagctctatcattcagcatatatcgaacttggacgaaaaatccgtcaatactcaaaaactaaggtggcacaatga

SEQ ID NO: 382190 - DNA, 153 bp, Salmonella enterica; identical to SEQ ID NO: 376358

SEQ ID NO: 382191 - DNA, 804 bp, Salmonella enterica
atgtcagaatctgataatttaactcgtagcttactcggtaaacttttccgcactgagatttcgcttattcgtagttaccgtgcatttttaatgttattgcctgtgcatggatcttctgcatatcaaactgggactcctcttctccagcgtcgcctatttgggaaaggatttagtacagccgctgatttagcttttgaagtggaaacacgtccaggtagttttttggttccgcgtacactcggaaaggaaattacatgggagaggtttttttctgcggtcttggacggtgattccaatgtaattcgtgaatatgatacaaatgatattgactatggtatttacgatgccggtgaaaaagtgacttttctgaatggtacagtggatatctataatcccaagaagattcatgagttgcgttctaaatgtgttgatatacagaatgactactttatgcaggtgttctttatctcaatgctcgcaccagagtttgtaagtgttttctttggtttaaaaccaactacagctgatgctattaaagacataggttattcatcgttaaaaacaattaacgatgtcgttcttttcccacgtacaattgctttctcacaagggcatattgaagagagtgtttcacttaaaacgaaagtttttgcctgggcttatgaattgtctgctgacatccggttaggaaaagttagtgatgatttgatggaactattacgttatgacactatgttcaccagtcaccgtcaggatgtgttcaacactttaacaaatggcaaaggtcgatcaaacaaaagctaa

SEQ ID NO: 382192 - DNA, 222 bp, Salmonella enterica
atgctctattgcgagcagcaaggactatgtcgcttggggcaaataaaaatacaatacgaattttgtacggtaatcatgttgctgaaaatatcgattttgagcctggtgcaaaaacaaaactcaaaaaaggtatccggggctggagcaaacgcacagataaccgccgagccttttctgctgttattgatgtcgcagttaactattttggttttgatccaataa

SEQ ID NO: 382193 - DNA, 303 bp, Salmonella enterica
atgaaaaaacattattctgtccaatatgaaaccggggatatcgtctttacctgtataggtgccgcgcttttcggccagatatccaccgcttcacagtgctggagcaaccatgttgggattattattggtcataatggtgatgactatctggtggcggaaagtcgcgtccccctctcaaccgtcaccacgctgtcactgtttatacaacgttcagctggacaacgttacgcggttcgtcgcctgtgcggcggtctgcggtcgaacagaaactcgccatcatggaacaggttcccgcccggctga

SEQ ID NO: 382194 - DNA, 855 bp, Salmonella enterica
atgatggagatggactttaaaatgcacaatgatctgggtctcggtttcatttgtaaaaatgcaagaacatcgtcaaagccaacgttaagaaaagttacttttccggtaagcgcatatgaaacgtctaagctttctttaaccggttttcaatgccccacagcctgccgttttcctttttttgtgctatgcatgataatccataaccatctttcgtctgcatgccctatcacccaaaatgaatgttcaaatcatatctcgcaattttctatcgacattaaagtacaagattggcttagccgttcaagagtagcgtttattgatttccataatcttagaaatacagataaaaccactttaataacagtgaaccatcttgaagctttacttactgttatgtcgactactcttgtcgcttatgttccatattcaaaaaagagactaaactttagctttctaaactcattcactttgtctaaaacttctcaaagttacacattaactttcccggtagttctcagtccgcttttagatgctcttggcgacttcattcaggaatgcataaccgaaaaattgttaaaacgacgaaattcgaatttcatggtttacgagtatcttaaacgttcaggccagagctctcataaagtggaggacattaataacgacttacagcttaaaagtctaaatataagacttatgagcgtccttactggcctttctcagcaaggactcatttcatttatttgcgaaggaaagaggggcgaccggagaatagaagagcttcagtttataccttatgttcaacgaacttaccctgaggtattaacttttgaggaatggattagcctagttgattag

SEQ ID NO: 382195 - DNA, 1692 bp, Salmonella enterica
atgtcatctcttgattctgaagctaaacccgataatgcaggtcacagcgtactggctttaacaacctctcatagcctggtggttagctctcctgaaacatttcttccagatatgcgcaaagagctcggcattatcgcggatcttgttgagtcctataatgatgaactctgcttgttgaaactcatggctgtccagttcaaaacccacaatcaccagaaactttattcttatctctcaggctacaaccacagcatctcagaagcggatgccttgttcgcagaaaacgctctgagatcagaatactggaaacgcgttatggcactcactgatgttttgcctatcatgtcggatgccaaacgtaacgaatgggataagcagtttacggccgaccgttatattatgccgcctcaggtgatccctgatttcacagctgacgctgtagtgggcacagtcgttgctttgcttaatgaccgcaatcaatttattaaagaaagggtttacgacgtcttccagtctctgagccgcagtcacaagacaaacaaagcttttgggttctccacccgcatgatccctaccggagtttgcgagccgtctaaatacccctggcagaaattaagggtggattttaaagagtctggcatttcaccgctgagcgagctccgcgttatatgcgcattcttccgtggcgaacaggtgaaggcgatccataacaccaaatcattggttgaggcgttggtcgaacatgaggggttcagaaaatggatctgcatcgatggcaacagtattcgtttcagggtttacaaaaatggatcaatgcatattgacgtccaccctgatatcgccgagcggcttaacaatattttatcagctatcgtaccgctggcattacctgccgaccgtatggctcatagcaagaaatctttggaggcattccctgtacttaagcagtgcatcgactttgatacccggatgcagctttctgaactgatgtttaaaaatgacggggacaataaatggagttgctggacatctttagggtctctcgccgaacgcaaatcttcgagtgttgccgctgacacccttcggttcttaggggcaacagtaacaaaatacgatgtgacattttcctatgatccgtgtgaggttattcgttacatcggccagataggggagatgcctgatattgtatcgcatcagttttacccttcatcttgccgaatcagcgaatatgtatcttccctgcttggtgcaggggaaggggataccctcctggagcctaatattggccatgcggatttgcttaaatcattccctgccggtgtgatcgttactggcatcgagcttgatactttgaattgccttatctcccgggctaagggatacgatacgacagaagctgacttcctcacatggtctaagtctaatcaacagaagaagtttgattatgtcgtgatgaacccaccttttgccgataaccgggccaggctgcatctccaggcagctgcatctcatctcgcagccgggggatctctagcagccgttcttccattatctcttcaggggctcgataaccttttgggggaagaattccggacggaatggatggacgtttttgagaacgagtttgaaaacacgaccgtttcggttcgcatcctgtacgccgaacgtattcaacaagaggaagtcctatga

SEQ ID NO: 382196 - DNA, 2421 bp, Salmonella enterica; identical to SEQ ID NO: 376104

SEQ ID NO: 382197 - DNA, 258 bp, Salmonella enterica
atgagtagaaccgtttcacaaagtgtcacagaagattgtctttttgatacccgcacacaagtcagattacaactaagtcgaagcgttcataaaacgctggcatctgctaaagaaattttacagggaaggggggttgattcggtctctattgaagatcttgtgcgagcctgtcttgaagagaaccagccaattgatctcgcctcactttaccttgaaaatctcttaaaacagaaaggtaccagcatttgcgatttttag

SEQ ID NO: 382198 - DNA, 465 bp, Salmonella enterica
atgttaatcctgatagttgctggaggccttaactggtggttctacaggtcaaaatatggcgcagtaatcgttatcttcacagtggtttctttactgatgactcgattccgcctggtcatatataaattaagattaagaaagttagtttcagagatcagatttcgtataaaaacgggttttcgtataattcttgttttgtcggataatgaggatgagcgtaatgttctgctgtctatgcttagcaacgtattgccagagcaaacgcttattcacacgcgtgatgctctcggacctcattcagggcctatcctaaaagctcttgagctacatcatcaacagggaacaggttacatactcgtctgtgaacaacaaatctcagcgcgtacgtggttgagtatcgtagaaaatgggaaacctgatacatctatagctgttaattttcattcgatcccagaaatggagtga

SEQ ID NO: 382199 - DNA, 957 bp, Salmonella enterica
atgacacattcatctgatgataaaaactatgtccgagcagttctgagttatcttggcatagattttgatgaggcggatatagtattaagtgtttgccattgtcaaagtgacgagctttcttttacctgtaatatcaaagctattgaactcaagaatgctgttgatttatatgtcgatagtatctctgagaatgaaatagaagctttaaacagagaatctttaaaatcgcgactctgttactttcttgaggtgtttgacgcagtctctggtcagtaccttgaaatttcaggaaaacactttgcaactagtcgttttgaatatgatgatgtttgtagtgaagttcttagcatgtctaatgatgtttctcagtcgaaaggttatgaccgggatgaatataacagactgatgcaggttgatggtcaggttatgattgcccgttttgctttgcaacagttctgggatactcattttattggactaataacatttgtatctgagtctataacatcgagcctctataaagcttatgaaacttttagtgatattagtttggcttgctataaactgagtgaatattcttattcacgctctatcaacagtgaattgacccttaatatttcacttaaagaaaatgacttctgtgaggacctatctgattgctatatggaagatgaggctttaccttctggtagggtaatttctcgacgcaacaatgactccataataagtatttatgagagctatgctgcggcttcttatattccgatgattgcatctttggaagtcgttgatgaatacggcgaagtggttactgacctctgccataccgtttatgtttcagagttaaccggtgggcggattaaaatccacgaccgtaatgacttagtatctgaagttttcgataacctaagaaatttaaatcttgcagttggagattcagtttcacaagctgcttga

SEQ ID NO: 382200 - DNA, 600 bp, Salmonella enterica
atgattattaatgactgtgaagagttatctaaagctaattcttctactgatgctataagaaatctttatctcgataaaatgaaggtggatgggaaagtgttagttgcgaaatttgcacttaaacagttttttcattccgactttggtgactttatctcatttgtcgagaaaagaattacagattgtcttaatgaaactttaaggattatcaaagctgttgaacatggctttgtacgtgtagggcagcataagattaatcgccgtattaatgatgacttaaagttatgcattgatttcaatactgatgattatccggcaaatatgccagatatatatattaagtttaacgatacatttgatgggaacggggcgttatattgtgacaatgatgccctcatatccctctataccgatgttgcttcaattatcaatgtgccggtgatgatggaagtaagattgatcaataaaagagggcgtgttgtctgtgattcttcgcattcaacttacgtatctctcgaaagtaatgaccgatacagagtaactgatcgcacattactaataactgaagcttttgacgattttcgtaacgcgtctcaatga

SEQ ID NO: 382201 - DNA, 354 bp, Salmonella enterica; identical to SEQ ID NO: 380697

SEQ ID NO: 382202 - DNA, 957 bp, Salmonella enterica
  misc_feature (880)..(889): n is a, c, g, or t
atgaatggtatagagagtttattaaaacaacaagatttgtctgtgccattaagcactgctcaaggtgtttctaatgttccttttcaaagatggtttaaatttaaggaagcgttttccccaaaattcgtacatgatactatacagaagtccctcatcaaagttgataagatacttgatccttttggtggatctggaacgacagcacttacatctcaattaatgggaataaatccaacgacaatagaagttaatccttttctagccgatttaatagaaagtaaattaactgaatataacactcaaaaattaatttcagattgggtctttgtttctaaaaatgtagggttagaaaatccatcgttagagacaatgttttcaaatgccccaaaaactttatttgaagacaaagacgttgaacgatggatttttaatcgtgaaattatattcaggattgctcaatatagagaaattataaagaaacttgatgatttaaaaaattcaagattattcagagtgctacttggtagcattatgattccatttagtaatgttataattaatggtaaaggacgccggtatagaaaaaactgggagattctttcattcacgaaaagtgcattcgatgaagctttcagactaaaggttgaagaagctatttttgatatagttcgatattccaatataaagtctggaacttatgatttcttcaacggggattcccgaagtgtacttagtagcttggattgtaaacaagatttaatagttttctcgccaccctatcctaatagttttgattacactgatatttataatgttgagctttgggcattaggttatctaaatagcgcaagtgataataagctattacgctcaaataccnnnnnnnnnnaagctattacgctcaaatacattacgttcccatgtccaaataaaaatggatgcatcaccaatgcctga

SEQ ID NO: 382203 - DNA, 1128 bp, Salmonella enterica
atgaaaaaaacagtcattgccagcatgattggactggagctttgtgcgacaagtacgttatctgtcgtgcacgcggctgccgaaaaacgcccgaacttagtttttattgtggcagatgatcttggctatggtgatttggcgacttacggtcaccagatagtgaaaaccccgaatattgaccgcctggcgaaagaaggggtcaaattcactgaatactatgcgccggctcctttgtgttctccttcccgcgccgggatgttaacaggccgtatgcccttccgcaccggtgtacgctcctggatccctgaaggtactaatgtttctattggacgtaacgaattgaccatagccaatctgctgaaacagcagggttacgataccgcgatgatgggtaaactgcatctcaacgccgggggctatcgtaccgatcagccgcagccgaaagagttaggttttgattactctctggtgaacccggctggctttgtgaccgatgctacgctggataatgccaaagagcgcccgcgttacggcgtcgtccacccaaccggctggatgcgtaacggcaaacatattgatcgtgccgatagcatcagcggcgaatttgtcagttctgaagtggtgaactggctagataacaagaaagacgacaaaccgttcttcttatacgttgcctttacggaagttcacagcccgctggcctcgccgaaaaaatacctcgatatgtattcacaatacatgagcgaataccagaagcagcatcccgatctgttctacggcgactgggcggataaaccgtggcgcggtaccggtgaatattacgccaatatcagctatatggatgcgcaagtcggcaaagtactggataaaattaaagcgatgggggaagaagataataccattgtcatcttcaccagtgataacggcccggtgacgcgtgaagcgcgtaaagtctacgagctgaacctcgcaggcgagactgacggtctgcgcggacgtaaagataacctgtgggaaggcggtattcgcgttccggcaattatcaaatacggtaaacacattccacagggcgtcgttaccgatacgccggtgtatggtctggactggatgccgacgctggcaacatga

SEQ ID NO: 382204 - DNA, 390 bp, Salmonella enterica
atgaaaaaaacattaattgttattttattatgtttttgtcactcagttttagcatatccataccgtatctatactgtcccggaaggggcattagtaaaaaacatactaactaatgaatatctaggaaaaacccctgtggttgtggacgtgagcaataccgaagctggttctacttttgggatttctttatttagacatgaaaatgttgctataaagatttttacagtaatgccttcagcagaaaataattttgctgtttctggacctgacgttgcaactatgtcattgccgggcaaagcacctttaaacgtagtaaatgatgggaatggcgcttctgttcatatagaactaagaccttatatgtctgaacctgcgcacaccccatattaa

SEQ ID NO: 382205 - DNA, 1005 bp, Salmonella enterica
atgagcgatgagcaacatatcgggaatgataaatctcgatatttaaacgcaccaaagcggacagaagtcggtcaccgttcaggtcttgcgggtttgaaaacagcacctcgcataaaaaagttattcactcttcataagggccgaagacttgaagcggaacatgtgattgttccagcccagagagtggagaaggagaccttagtccatccagcaaacccacgaaatcaagaagcccttacagattattctgttagagatattcttaagcagattgaagaaagaggggtcgataccgaagggatcgctgtaaaaagagatggggtttatttattaatagaaggaagtcgcagacgtttctgctgtataaaggcagaaaaggatctccccctgtgggtactaccggatgaactaaccgaagatgatataaattcaattatatccgcagcacaaacatctcgaaaattttcatatagagaagttgggtttcaatttatcaagaaaatggaagaaaagggattttctactaatgaagaactcgcagcatatcttgggattagtcatgtatcggtagccaaaagaatccaggcggcccgtattgacgaaacattgatctctttattcccggattatgaaggaataccgaactcctattatagtcgcttgtctcgtttacagaaatatgtgcaaaaaaatctatttcctttagatgaagtaatagataatgttaaagaggaaacaaaagatttagacattggagatctccaagttgcccaaaaagttgtaatggagaaaatcacacaagctgtggaaagtgtttgtgaaaaatcttattccacaaaatgggaaacaagtgatcttattacttttgataacaaagataagtatgcaagaatcagtaaaaacaatactggaagaaaaattcgcattgaattcaataggataagtgcgggttttattaaggagctagaggagttcataaaagaaaaattaaaagtatcagaataa

SEQ ID NO: 382206 - DNA, 1254 bp, Salmonella enterica; identical to SEQ ID NO: 380005

SEQ ID NO: 382207 - DNA, 2682 bp, Salmonella enterica
atggaagctatcaataattacaatagcggtttaaatcgccatcaattaggtgggtttatccctgtttacgatcaattagcagggactcactattttttgattgatggcaacagattagggtttatgtttatctgtaatccatcacctggagtttttgataatcagcaagatgttcttgctgaaatgttcaaaatggattttcctacagatactgtctgtcaaatatctctgactgcattgccagacttgactttacagcttagtgcttggtcagctgtgcgaggtgggcgtatgactgggaacgataagcttaaagcagatctgcttaatggttatcagttggactactacgacagaagtatgcataagcctttaaaacctgatcatgataaccttatgttgagggattttcaggtatggatctcgctatcgattcctttacagtctgcccttcctaccgagctggaacattcgcgtatcgattcactttactctgaacttgtaagtaagttaattacgattggactgcatccgtttaaggtcgatgcagaaaactggctctattgtatagataaggtcgtaaaccccggaaagaactctcggtgggctgaaggttttatagacgttaacactatgaaaaggcttaatgaacaagttaacgttcccggccgaaagtatacagtcacagaaaatcatttctcatcagtcacacaaagtgacgacgaatctgagcatcgttacttcaaacaactttccgttgtaaagtttcctgaatacgtcaatttcggttgtatgtatgagttagtagttaactggatgcatggacgtaagacaattttcagcccatttatgatcactcagactgttcagtttgccgatccgctcaagttgtcaaaagaaaacgtccgctacaaagcaatcactaataaacaggcaagtataccttcagttgtcacattctgccctcgcctgcgggatatggataatgactacatggccgtaactcgcgagcttgaggatggcgcaaagcttttaagagggtatcttactttcactgttatgggtagtaatgccaattctgtgcagacagcagctaacgatctcaaatccttttacctcgaaagccgggtcaaagtagcagatgattcctttatcgttttcccgtcatttatgtcatgtctgccaatgtgcaatgacccaaagacaattttcgaccttgaccgttccgaagtagtgagcaacaccggagcggctcatatgacgccgatctttgggccctggaaaggtaatacagatagaccagtactgagtttagtttctcgtgaaggtcaactcatgggacttgatattttcaagacttctgcaagctataacatggttattggtgcaacgtcaggtgcaggcaagtcattctggacagcatatctaatcaataactatcttggagctggaccgcgatctaataacctcgttcattatcgctcaacatttaagcattttttagaaaacgaatacccagatgatgatcctgatggtgctcaagtttttgtagtggacgtggggcgttcttaccaggggattgcggaacaatatacaaacagtcaatttattgatttcggtaaaacccctgacttcaccctaaatccctttgccttcctaactgacatcactgttaacgacgatgtatttaacgaagcacctgaatttaccggtgaatcaacttcaaacgatgcagaaaaagacaaagttgctcagaccataatggttctgaatcagctaaaaattatggcttcagagaaaggccttatcgatgattatcaacaatcagtgatgcttcagcttattgcagaagagtaccaggaatccagaaaatcaggtcggaccggttcaataaccggctttgctctgcgttgcaagaagcatgaagacaaacgtataaaggatattggggagcaactcggagcatggtgcgaaggtggaatttatgggcaccggtttaccgatacgttgcctccaatcaacttcgacagcagatttattgttttggaactggaggagctaaaaggcaccccccaccttcagacagttgttttaatgtctatcattcaggctgctcagcatgcaatgttcatcaaaaaagatgggcgtcgtcgcttgttcatcctagatgaagcttgggagtacattcgtcctgataattcatcaggtgccggaaatcaatcaaaccaattcttctcttccttcctcgaagcggcatggcgtaggttcaggaaaacaaactgcgctggcatctgtatcacacagtcgtttgaagattattttacttcttctgttggccgggccctgactgctaactcgccttggaagataatcatgaaacaagaaaaagaaagcattgaagcaatgaaggctaataaatatttttctacttcagatgcagaatatgaacgaatgaaaaatattcgtacagtcaaaaaggtgttttcagagatgttagtcaggttcgaaaacttccaagagatctgtcggttatacgtagaccggaaaatggagctttgttttactacggatagtgctgacaggagtaaattatgggaaattcaaagccgcgagaattgtagctatggcgaggcaatagaaattctctatgctcaagaagtagcagcgggtttggccgcgtag

SEQ ID NO: 382208 - DNA, 1137 bp, Salmonella enterica
atggttaagcaaaaccgacttgatcaaaatgcggcgaaagaggaccgcgaaaaagcagaaaaagcccaacaggaaactaaagcccaagttgcaagtttaacttctcaacttcagcagctgtctcagcaaattaatgatatgcagactaatcgaaacggcaatcgtaacttggatgctggtagttcgcgtaaaacgattaatgagcaggcaccggcagctccttatcagcttaatgctaatgcgccgattaatggcgtaaaccctaattacgcgtctatcacacctacgcgtaatagcccgatgagaacaatcacacaaagttccattaagactaatggtaccgatggtgtcattcaggttatgcccgtgtctgaaaacagaatcaaggaaggcagagaggtcattgcaggagataaagcgcctactcggactgtacgaggtgatggtactgcgccagttgatagcaaagcgcggcatgctgcccgaaaagatgaaatgtttcttccggcaacatctattatcactggtgttctgattaccgggcttgaagcgcctacaagcctttcttccaaatcagaaccaatgccagtaacaatgcgtattaaaaaagatgtcatcatgcccaataatttcaccatggatttgcgtgactgtaaccttctgggttcagctgttggtgatttggcgtcacagcgtgcttacatacgtgccacttctatctcttgtgttaattcaaaagggaaagcttttgacgtaaaactggaagcatatgctgtaagtgaaaatgacggaaaaaatgggatccgaggcacgcttatcagccgaaatggtaacgcaattgcaggagctgcatttgccggtggactttcttcacttgccggtagcttaagccccagtaaggtatcttcacttaacatcgaccctaattcacaggctcagtatcagtcccctaattttggtgcacttggggcattagccggggctggtgcagctcaaggtggccttaatcgactcgtcgattactacaccgcaattgcagaacaacagtggccaatcgtagaaattagccctggccgagctattacatttgtcgttcagaccggaactacaattccaacgaatctgaccagtcgctga

SEQ ID NO: 382209 - DNA, 396 bp, Salmonella enterica
atgaaaatgacgaagccaaaaccggtaagccggatgaaaagaccgtttattagtgagcttgcagagctgggtttatcgggtgaaattctttcaattcgaactgacggcatgcaggggacgctcatacccgatcttaccgcaggggtgagtgaagcaggccgtgtgaaaaccggcaactgggtaatctctgacaagagaaccttcgaccatgtcgttctgtgtgttgaaagacaagatgagaaccatgatgtgtacgtaggtaaattcatccagttacatgtagccgctaataagagccttaagatcgtcgaaatgggcgatgtgaaactggtggccataaccagctcgattctgagagatcccctcataatttccccaaagcgtaaccatgtgtga

SEQ ID NO: 382210 - DNA, 822 bp, Salmonella enterica; identical to SEQ ID NO: 380003

SEQ ID NO: 382211 - DNA, 414 bp, Salmonella enterica
atgaaacttttacgtttagtatctctggtctcttctgtcgtcattggtttttccctatcgggttgtgccggtgacaccggcactacgccaggcaccgctctgaatgcgtacagtcacggccagtactggcatgctaaagcaaatgattctgtcgccaagaatgcctattcgtttgctggtttcgacgttaattttaaggagcaagaggttactcctggaggggatgccgacaactttctttctaagtatctcatcaatagttcgatgggctacgtaacaggcggtctaaaaggttttgggatcatgagcctcggctctttgtacagttcttctgacgccgaatacatccaggtcaatcaatacctagtgctgagagatcccctcataatttccccaaagcgtaaccatgtgtga

SEQ ID NO: 382212 - DNA, 144 bp, Salmonella enterica
atgattctgaaaggcgtgaaaatcacctttatgaaaaatccaaattacttaaaaatcagattttgcatacaattaattttgcagcagaaacagattatctatatacggttgaagaatataacccagatttgggtggtctggtaa

SEQ ID NO: 382213 - DNA, 387 bp, Salmonella enterica
atgagactgttaccgggcatggtgatgctgatgctggcgctggttatcgccgggtcagcgcgggcaaccaccgacgtgatgccgtttaaagatgaagcgcaggagcagcagttccgccagctcacggagcagctgcgctgcccgaaatgccagaacaacagcattgcggactcgaacgcgatgatagccaccgacatgcgtcgcagggtgtatgacctgatgcaggaggggaagagccgccaggaaatcatcgattatatggtggcgcgctacggcaacttcgtcacctacgacccgccgctgaccccgctgacggtgctgctgtgggtgctgccgctggccgccatcgtggcgggcgggtggataatcgtcgcccgcacccgctga

SEQ ID NO: 382214 - DNA, 639 bp, Salmonella enterica
atggctaaaaaccctatctcaaataaggcagataacgaccggattcagatccggtctttctggatatccgaaagaaaagcaccctatgtttatagtttcttgaaaaaaacagaactttctcataggggtgaccaactggatttaattaggtcggctattagtaccgggttggtattgaataatttatttcctgacttggcaaattttataaatggtttaaacgaaagattaacacttgcagatcttaataggtttctgaatgatggaaatactatagatactgaacctaagcctcctattaatgtattgctagagaatgtcttagatcaaaagtttaaggagtatttaacacctctacaattagataattcaaagcaagattctgtttctgtaaaagaaaccttccttgtacaaaaggaacatgcctgctttggtgtgaagattgaaaatgagggaagcgatacctctataccatctgaaagcccactttcttcagatgcatccaaaatttcaaaagaaaagtccatttccgctgtggtgccagtgctagaaaaagtatcggatgaaaatcaaaccgcctccataagcataaaatctaaagctaaggcaaacaagcgactggcaactttggcaagatag

SEQ ID NO: 382215 - DNA, 654 bp, Salmonella enterica
  misc_feature (608)..(617): n is a, c, g, or t
atggctgaactattaaaatctgaaagtcctgtttcacaatcattgcaggatatcactgaagctttaaaaatcgttgtcgatgatggaagtaaagctgcaaaactggtttgtcttaatgaaagaaacgaattagttcccttgctcacacaaaatagttttgttccagatttccgtgttcgccatgagggtctcaatccttttaactatcttattgatgggctggaaaggttttcgcatcacagcgaatctagtaactcactggaatcgactgatgtatctcaccaatacgatgaaattagccggttaaatgttcaccatgcacttcatgcttctggtttagttcctcaggatgttcacctctttgttactttacctcttagccagttctatactgctttaggggaaacgaatattgaaaatattcagagaaaaaaagataacctgatgaaaccagttgagcgttatcttgacggtaaacgctattctttcaacgttttgtctgtgactgttttccctgaatctttaccagctgtgacccgggcagatgaaattgaggatattgcttcatttgaatcaagtttggtaattgatcttggtggtactactcnnnnnnnnnnactactcttgatgttgcaagtattactgggcaattag

SEQ ID NO: 382216 - DNA, 462 bp, Salmonella enterica
  misc_feature (127)..(136): n is a, c, g, or t
atgaagatgttagctcatcaaaaccttcacctttttcaaatgagattgataattattatcttacattgcacgtcgctccgaggaacgccaaaaaagattatgactggggctcaaaccgttctgtacnnnnnnnnnnaagttatgcagatggcatctgtatttcttagaatcatgcatactttaaaaattgataagaggaaaacctcacatcatggccacgtcgtatacaaaaatataagcgttaccccaaacgagaggggcggtttgttgttatcagcagggatagttccagtcgataaagacggcttaaaacccttcatgcacatggtccccgtctcacaaatggactgcgttaaaattggcctctacatacttggatatcttgctcaaaaaacgccttgggtaagctccgagtctataattaccgcgcttcgcttatctgaagccaagaattcaaaatag

SEQ ID NO: 382217 - DNA, 837 bp, Salmonella enterica
atgaagataaaatggaagattatctcaatttcaacattacttttgcatcttcacgcagcagctgcaccacatcaagagaaagagcaaagaaaagatgctttttcttctgccgctcagaaaagtgattcacttatatctgctaaagcggagcttataaacggaaggtggtttataaatggtaaatataggcctgttctaaagactagcatgaccaaaaccaatttcttagaaatcatgaatgtttcaaataaagaatcactttttatggtgataccgaaacttgagtataatatcattgccaaaaataaaatcttactaaatgaaaaaattgcattaagcgaaggcacatccggaaaaagcattgtttgggtcgagcctaaatcaagtataactatatcgtttataaatgaccttgctaatacgccccttcaggctatcgtttcgatcacaagaaacaacaaagatgtaattgccatctttggaccggatcaggataaagggtttactcttcccggaaagacatctaatgatcaagtgtccgttcctgacgattctgatctaaatataaaaaaacttaacatacctcaaagtgttggtaattcagtaaccatcaatcctaaagagaagaattacctcttagttggacaagtaaaatataaaatcttatctcttccgaaatatcaacatttagaattttctgaaccggtttatattgagaaaagaaaagatatcctcggtggttatggttattggacgaaagaaacaattctctaccccggtgaatcattatcttttataaccagcgccaaaaacaatctaaggaagcgggatgattaa

SEQ ID NO: 382218 - DNA, 951 bp, Salmonella enterica
atgtgtcagtcagctggagtgtggcagggcttgattaagaatatctgttggagctgcatttttcccatgaggataatgggcataggggctgctccagaaggcgctgcaccttcacgtccgggttgctactgcacagatcagaacggcgtaccggaaataggttggcaattgagcttctttcagccggtgaagattgtagaagttgtaaagagcccctggtgcagcccctttcttgaaggcacgatgcttcaaaaatcgcagtttgatattggtaaaagcaacactaatcagccaatgacagcaactgaagccggattttacgatgttcatctttgggagttcccaatcatgacaatgctcaaattactgattattggcgagtgcactgctgaaccctatatagatgccagcctgacctatataagcgaagtggaccctatgtgggaaagtgatctgcttacactcgtcctgaatcccgaggcagtagtttttgcaaacccaattgcctcaatggtgtgcgctgctgactgtgtagcagtaacagcaggaaaggataatctcgctgcatacttttgtgccggatgcgatggcaacctttacccattaaccggccacatttacgcaaatgatgacgctgtaaggacgagttcactgattacccagcgtcttctgacaaaactacatcgccaaggcatgctgatgcgaacgatgggagcagacgcaatgtgtgagaaaacgtgggaatactttacaccacgttcccagtatcggctttcaatgcttttccctactcctgaggcgaagggaccggattgctgtcatcgtcttggtgattcggtacacgactggtcaacccttaaaggtgggcgcaaaaaaataggcaacgataattatgtctatatgttgtggcgttacaatgactgttgtgttcgctacgttccaggcgtttga

SEQ ID NO: 382219 - DNA, 174 bp, Salmonella enterica
gtggaatcggagccccaaatctttcagaggaaaaataatatgaaactcggatttattataggcgctctctttgcaacatggctgacgctaaattatccggaccagatgagaagttattttaccaaagccgtcgactatatcgaaagtgttgcaacatttattacatccaagtga

SEQ ID NO: 382220 - DNA, 231 bp, Salmonella enterica
atgccaatgtttacccgtatccaaaaagataatggatgggatcacctaaatgatttacgtgaaaaatttaacggtaaggtgtttaaagtaaacgaacagattatctcacgctttcagattaaaaatacacctgcgcttataactactgaccaagataaattccggatcaccctgtttagcgaggcagaagtccgtggaatcggagccccaaatctttcagaggaaaaataa

SEQ ID NO: 382221 - DNA, 684 bp, Salmonella enterica
atgccactaccgcagggcaggcatctgaacaggcgcagacatcagcaggtcaggcagcggaaagcgccacggcagcagctagtgcagccggagcggcagacgcatcagccacacaggcggcctcatccgcagcgtctgcggagagcagcgcaggtacggcgaccacaaaagccggggaggcatcagccagcgcggcgtcggctgacacagccagaacggcggcagccgcatcggaggccgcagcgaaaacatctgaagcgaatgcagatgcctcccgtactgccgccggagattcagctgctgccgcagccgccagcgcgacggcggcgcagacatcagcagagcgcgccggagcatccgaaaccgccgcgaagacatcagaaacgcaggcggcttccagtgccggtgatgcaggtgcgtcagccactgcggcggcagcgtcggaaaaggcggcagccgcatcggcagccgaagcaaaaacatctgagacaaatgcagcaacgtcagcaagtacagcagcggccagcgcaacagccgcctcgtcatcagcatcggaggcatccacccacgccgccgcatctgataccagcgcatcactggcggcgcaaagcagtactgctgccggagcagcagccaccagagcagaagatgccgcaaaacgggcagaagatatcgcggacgtga

SEQ ID NO: 382222 - DNA, 462 bp, Salmonella enterica
atgggaaaagttactttgcctgctctgcttggggccaccgtgattggttttgtcgtatttgctttaaccagcttttactacaggtcagaatatataccaaaaaggagtgtattaatcgttccggacgcacccattagtatcgaagatggcagtaacgcttttcccgttcagacagtaataatgaacgatccaactcttattgataaatttgtaggagaggacaatattaatgaggagaatgcttttgactatcacaaaagtaacgttttggaacctaattacaaacatgaaatatctagaacgagccagatagataaagctgaaatgaatcatccatctgttcgtgaaaactgggccagagcaggtgatccctatatcgttcctcagatgtctgacagcgaacgaaatctaaaaattaaacgattccagaaacctacaagtggagctaatcatggacattaa

SEQ ID NO: 382223 - DNA, 333 bp, Salmonella enterica; identical to SEQ ID NO: 31792

SEQ ID NO: 382224 - DNA, 240 bp, Salmonella enterica
atgagcgactacatacctaaaaagagagggctgcttatactggattggtatgtccccattaatattttattgctgattctcgttatgtgtgtctttttcacccgttatacatttggatacggtttattgaatgggtgcctgcctgctgatttttatatgattgatcattcggataaaactattaaaactggtgaactcatagctttcagagccgcttcattaaggctggcgttttcctga

SEQ ID NO: 382225 - DNA, 477 bp, Salmonella enterica
atgcgatcttttaatgtaaataaaaaatatttaccaatacttcctggacttgcgttatgtgcagttttaagtaatacaaatgcaagcactgagtatcaacatgatgctgacctaatcgctcagcaagcaaaagggcttggcgctcaggctaaaggtgcacagcagccagatggggctcttagccttgatgctacgctaaattcaccagatgtgcagaagtacattgcgcaagctgaagcactcaaaaaaaaccaggacctgagcaggcaaacaaaccgtggttacgtgcccggtatgaatgcggatagtgttcaagcagttatagaccatacccaggctataagggcccaaagtaataactctgatgctgtcaacgatataattagaagacgtgatgaaattcaggaaaacgccagccttaatgaagcggctctgaaagctatgagttcaccagttttaatagttttatccgaatga

SEQ ID NO: 382226 - DNA, 276 bp, Salmonella enterica
  misc_feature (121)..(130): n is a, c, g, or t
atgcctctactgattttgttttgggatgcaaaaaaaatagggcttgcattcattctggttgcatttgggaatatcttcgaatgcttcgggttttctgttgtagtagcggttgtatattggnnnnnnnnnnattggattgcgtataacaaagcagctgagtcaggaataagaggattgctaaaacacagactctggtggctcggttttttgccaggtaaagcagtttttagtagccgttatttcaacgatccatttatcagagatttgtattcttga

SEQ ID NO: 382227 - DNA, 441 bp, Salmonella enterica
gtgaccaaaggtgccttttatcatcactttaaaaataaaaaacaattactcagtgcctgttataagcagcaattaattatgattgatgcctacatcacaacaaaaactgatttaacaaatggttggtctgccttagaaagtatatttgaacattatcttgattatattattgataataataaaaaccttatccctatccaagaagtgatgcctatcattggttggaatgaacttgaaaaaattagccttgaatacattactggtaaggtaaacgccattgtcagcaaattgatccaagagaaccaacttaaagcttatgatgatgatgtgcttaaaaacttactcaatggctggtttatgcatatcgcaatacatgcgaaaaacctaaaagagcttgccgataaaaaaggccaatttattgctatttaccgcggctgttga

SEQ ID NO: 382228 - DNA, 204 bp, Salmonella enterica
atgctgtctagtccaggaaaacccccattaaaagggaatcttggacgatttgagtatataaaagttgtggttgaggaccttcgtattcgaggttacgctgattatcttcctgcgtataatcttgatgaccttcgccgttttgccttacaggacgaccgcccatcccttgtcagatacattgacaatgtcatggcaacggtctga

SEQ ID NO: 382229 - DNA, 957 bp, Salmonella enterica
atgacatccgcttctccatttcattttgcatcactggtgtgggactggcccatcgccatctatctgtttctgattggcatctccgccggactggtcacgttggcgattctgctgcgtcgcttccatccggaggcgggcggttcggacagcacgctgctgcgcactacgctggtgttagggccgggggcgattatcttcggtctgctgattctggtcttccacctgacgcgcccgtggaccttctggaagctgatgttccactacagctttacctcggtgatgtcgatgggggtgatgctgttccagctctacatggtggtgttagtgctgtggctggcaaaaatctttgaaaaagaggtgattgccctgcagcagcgttggctgccgcggttagagctcgtgcagaaagtgttggcgctaataacgccgtttcatcgcgtgctggagacgttaatgctggtactggcggttctgctcggggcgtataccggctttctgctgtcggcgctgaaatcctatccgttcctgaataacccgatcctgccggcgctgttcctgttctccggcatctcctccggcgcggcggtggcgctgatcgctatggcgttacgccatcgtagcaacccgcacagcaccgaggcgcgctttgtacatcgcatggaaaccccggtggtatggctggagatcttcctgctggcggccttttttatcgggctggcgctgggcgatgacggcaaaatgcgcgcgctggcggcggcgctgggcggcggattctggagctggtggttctggcttggggtcgtagggctgggattgattatcccgctgctgctgaagccctgggcaaaccgtagcgtcacgtttcacggcgtgctggccgtttgcggcgccagtttgaccggcgtgctgctgctgcgctttttcattctttatgcgggacagctaacggttgcataa

SEQ ID NO: 382230 - DNA, 414 bp, Salmonella enterica; identical to SEQ ID NO: 380623

SEQ ID NO: 382231 - DNA, 150 bp, Salmonella enterica
atgccgcagatacagataaaaatggaacctatgaagtcactgttgccgcagatacaggagcagttacttttgcgactacaccaacagtggttgacttaccaactgatgcaaaagcagtttcaaaagttcaacagaatgatactgaaatag

SEQ ID NO: 382232 - DNA, 378 bp, Salmonella enterica
atgttgtatcacgttgttattgaaaagaaaccagtaaaaactggcaaagatggtgctgaagaaaacaaaacagatctcaccaaagagcagctgattgctcgcttcatagaaccttacgagctaggcaacccaattacagtaaacggcacgactattcaaacatcagaaatcaacagattaactgttaaggctactgaagccagcattgaatctttcatacctgcgatagaagcagaagatcgaaattcaagtgtgattatgtttggcggaccgtcttacctagaacgtgcgatatatcgagctcctgatgtaactgatgaattcatcactggtcccgctggcagcaaaaaaccgatcgcatcaaaaaaaaccaaataa

SEQ ID NO: 382233 - DNA, 210 bp, Salmonella enterica; identical to SEQ ID NO: 373825

SEQ ID NO: 382234 - DNA, 1518 bp, Salmonella enterica
atgttgtcagtcacccttgatgatgtcgggaactataccgtaaattgccaggggtacagtgaaacccatcgcctcaccctggacacagcacagggtgaggagggcacaggacacgcggaaggggcatccgggacattcaggacatccttcctccctgccacaacggctccacagacgccagcagagtatgatgttgtctggtcagcgtggagaagggctgcacccgcagaagagtcacgcggccgtgcagcagcggtacagaaaatgcgtgcctgcctgaataatggcaatgcagtgcttaacgtgggagaatcaggtcttaccaccttgccagactgtttacccgcgcatattaccacactggttattcctgataataatctgaccagcctgccggcgctgccgtcaggactatgtaagctgtgggcctataataaccagctgaccagcctgccggtgttgccgccagggctacaggagctgtcggtatctgataaccaactggccagcctgccggcgctgccgtcagaattatgtaagctgtgggcctataataaccagctgaccagcctgccgacgttgccgtcagggctacaggagctgtcggtatctgataaccaactggccagcctgccgacgctgccgtcagaattatataagctgtgggcctataataatcggctgaccagcctgccggcgttgccgtcaggactgaaggagctgattgtatctggtaaccggctgaccagtctgccggtgctgccgtcagaactgaaggagctgatggtatctggtaaccggctgaccagcctgccgatgctgccgtcaggactactgtcgctgtcggtctatcgtaaccagctgacccgcctgccggaaagtctcattcatctgtcttcagagacaaccgtaaatctggaagggaacccactgtctgaacgtactttgcaggcgctgcgggagatcaccagcgcgcctggctattcaggccccataatacgattcgatatggcgggagcctccgccccccgggaaactcgggcactgcgcctggcggccgctgactggctggtgcctgcccgggagggggaaccggctcctgcagacagatggcatatgttcggacaggaagataacgccgacgccttcagcctcttcctggacagactgagtgagacggaaaacttcataaaggacgcggggtttaaggcacagatatcgtcctggctggcacaactggctgaagatgaggcgttgagagcaaacacctttgctatggcaacagaggcaacctcaagctgcgaggaccgggtcacattttttttgcaccagatgaagaacgtacagctggtacataatgcagaaaaagggcaatacgataacgatctcgcggcgctggttgccacggggcgtgagatgttccgtctgggaaaactggaacagattgccgggaaaaggtcagaacgctggctctcgttgatgaaattgaggtctggctggcgtatcagaataagctga

SEQ ID NO: 382235 - DNA, 531 bp, Salmonella enterica; identical to SEQ ID NO: 31403

SEQ ID NO: 382236 - DNA, 570 bp, Salmonella enterica; identical to SEQ ID NO: 373935

SEQ ID NO: 382237 - DNA, 378 bp, Salmonella enterica
ttgatactgctcgataagtttgtcgataaaattatcgaatcaggagtttctgaacaacaattgatcgagaggtcgtatgtgttttgtgctgggtattatattaagtaccagcaagaaattgaaaggctgacactctcaaataaagatgttgttttaacatttctattattttcatactacaattatattaatgagttagataataatttaattgataaagtaagaatgagaagaacgtgttcattacttattaatttcattgtcgataatggtagtcagacagaaaaaatttatgtgcaggaaaagaagaagtacaaatcttatacattgaaaagggatttatcagtaaagaataaaaggaaaaaatatggtttataa

SEQ ID NO: 382238 - DNA, 672 bp, Salmonella enterica
gtggataatcttcgcccccgggtgtttttccagaaacgcttccgccagcagcccgacgatgtagtacccctcgataaactgccctttctcatcgaacaggaagcagcggtcgaagtcgccgtcaaaggcgatgcccatgtccgccacgtgttcaataacggccttgcgggtgtcgtcgcgacactccggcagcaacgggttgggaatgccgttcgggaaggtgccgtccggggtattgtggattttgatgaactccaccggcgcgcccagcgccttcagacgcgcttcgatggcgtcaatgaccggccccgccgcgccgttgccggaattcaccaccagcttcagcggggtgagattgttaacgctgatataccccagcaggtggtcgatgtaggcgtcgcgcaggctgatttgtctgtagctgccgcgcgcggcctcgttcaccggcgggaagtcgcccgcttccgccagacgctgaacgtcgcgcagaccggtgtcgccgcttatcgggcgggcgccctcgcgcaccagcttcataccgttgtagtccatcgggttatggctggcggtcacctcaataccgccgtccacgccgaggtggaaggtggcgaagtaaatctcttcggtgccggacataccgatatccagcacgtcgacgcccgcgtcctgtaa

SEQ ID NO: 382239 - DNA, 474 bp, Salmonella enterica
atgctgatgacgaggcggctgttgcgctggccgctgctgtacttgctgacgttgctgcatttgtctcagatgttttcgctgcggctgccgatgcggctgccgccttttccgacgctgccgccgcagtggctgacgcacctgcatcaccggcactggaagccgcctgcgtttctgatgtcttcgcggcggtttcggatgctccggcgcgctctgctgatgtctgcgccgccgtcgcgctggcggctgcggcagcagctgaatctccggcggcagtacgggaggcatctgcattcgcttcagatgttttcgctgcggcctccgatgcggctgccgccgttctggctgtgtcagccgacgccgcgctggctgatgcctccccggcttttgtggtcgccgtacctgcgctgctctccgcagacgctgcggatgaggccgcctgtgtggctgatgcgtctgccgctccggctgcactag

SEQ ID NO: 382240 - DNA, 540 bp, Salmonella enterica
atgccgatggcagttcattacagtcaagaaacgcgcatgtacgcgttaatgggaatgctaacgctcgctgccgcgttagcattgatgatgtggataaaaacacccacccataatcgctatcttatcgcgtatgctttacttatgacgttcagcttttacacccattatttcaccctatttacacttattgcccactggatcgcagtaacaatattatcctgccaaagccataaaacggcctgctaccttaaacttcctggctggtggtttgctaacctggcgattgctgtcgcttatctcccctggttgcccgtattgtttaatttactgactcatctggcgcagttgagagccggtaatgatatcggttggattccccccgtaacatggcgtgacctgcctgcgatgtattggcattttttaccggaaacaacggacagggttttccgtcgttcattctgtggctggctgtgggaggttttatcggtactgtggggcgaatatctttatgcaacggagaatatgaaagatatcagctga

SEQ ID NO: 382241 - DNA, 342 bp, Salmonella enterica
atggcgctaccacaactatcaatatggcagcccggcgatgggttaagaaaaataaagtataaatatcatgtttgtctcattgtcatattctccgtccttatacggttgctgtttttaactgaccgctacctttggtgtgacgaagcgtccagcgtgctgattagtcgacatagcgtagataatctgctattccataccgcttttgacgtgcatcccccgctttattatctgttactgcatgactggatcatattattgggtgatagcattgcagcggtacgctctctcagtctactctttgggatcctgacagttgtgctggttatcgcgcttacgcgatga

SEQ ID NO: 382242 - DNA, 1344 bp, Salmonella enterica; identical to SEQ ID NO: 368670

SEQ ID NO: 382243 - DNA, 513 bp, Salmonella enterica
gtgaataccccctttacgtctggttacataataacgtatcacgacgcgttgctgtctggcttacacaatagcagccaaataaatatattggcttatactcgtcatacttcaagttgcatgtgctgcggccgcgttccctcaccccagtcacttactttaagccaaataaatatattggcttatactcgtcatacttcaagttgcatgtgctgcggccgcgttccctcaccccagtcacttactttaagccaaataaatatattggcttatactcgtcatacttcaagttgcatgtgctgcggccgcgttccctcaccccagtcacttactttagtaagctcctggggattcgctcgcttgccgccttcctgcaactcgaattatttagagtatataacatcatttaaaataataaacacggcattcgttttaatactacgttcaggactcatcccactcattagcagaaaacctattaaaaagcgtgttcaggcgttttattaccgccattga

SEQ ID NO: 382244 - DNA, 1206 bp, Salmonella enterica; identical to SEQ ID NO: 20954

SEQ ID NO: 382245 - DNA, 501 bp, Salmonella enterica; identical to SEQ ID NO: 379864

SEQ ID NO: 382246 - DNA, 237 bp, Salmonella enterica
atggtgccgggctttagcgacatggccggcggtcatggttttcgcgaaaaacccggcgagcgtctgcgctaccgcgccctgcataaggtcaatgactacaaagcgcgcaacggcattgaacatatgtgcgtcggctgcggccgctgcgacgatcgctgcccgcaatacatcaaattttctttgattatcaataaaatgaccgctgccgttcggcaggcgctggcagaggaggcataa

SEQ ID NO: 382247 - DNA, 870 bp, Salmonella enterica
atgtcctgctacgcagccacagcatcagactatactcagtggtgtctattaaccctctccaactacgttatgttttggcatggtaacaatgcgatgttatggataattaacgataatattgaatttaatccagaaatgaatcgcctggcgtcattatcgaggccagatctcaacattattctgacaacgcccgccagccgctgcttgcgccttctgctggaaaacgccccctccgtcgtctcacaacaaacattctttcaaaaagtgtgggaagaagacggcatggtggtgtcggcaaatacgctttatcagaatatctccattattcgccgcggattacgtaccgttggcgaaaatgaagatacgctgataatcacggttccgcgtagaggctttcagattgagcctggtgtgagcctcatgaccatccgcaaagacttcgctcagacaatagaaaaaaagggtgagacgccgccgcgtatgtcagggcgttggtttaaacattatgtacctgtactttggatgaccgggacatttgctgttggtattttgcttggcactataagctggcaaaccgttcccgataaggatttttacgatcgctacacgctggttgaaacaactcagggctgtcattttttctcgcggaatgaagatatcgaaagcggtagccgctttgcaagctataagtcaatgattctaaaaaccggtatggattgtcagaaatacccatgggtctatttcccttccagcagtcgcaccccagcggttacggcattgatttgtcagcaaccttataaaacgcgcggtgatacaggctgcgtgctgagagatcccctcataatttccccaaaacgtaaccatgtgtga

SEQ ID NO: 382248 - DNA, 498 bp, Salmonella enterica; identical to SEQ ID NO: 381936

SEQ ID NO: 382249 - DNA, 369 bp, Salmonella enterica
atggcctcaaaatcgtggtcgccgtctgacggtatcacccgcagcacgttcccttccgtgtccagctccaccaccgaggaggggtggtcggtcacggcaaacagcgttctgctgtccgggttccatgtcaggccggagaggccgccgtgtatcccggtaatttctttttctgccgtgagctgccattctgtttcctgcgggtaccaggactccgggaaacacagggtgagcacgccggccgccatcaggagaatggcggtcagcagtgctgctttctggttacataaatatctgaacatcgtggtggtgaaagttatgttttctgttacaggggagaccggacttcacatcatgccccacggcagataa

SEQ ID NO: 382250 - DNA, 195 bp, Salmonella enterica; identical to SEQ ID NO: 379531

SEQ ID NO: 382251 - DNA, 651 bp, Salmonella enterica
gtggccgtattcgcctttcagaatgccggcggtttctttggcgatggttttgtagcgttccccggtcaggacgttgagcaccgcctgggtgccgacaatctgcgaggtcggggtcaccagcgggataaagccgaggtcctcgcgcacgcgggggatttccgccagcacctggtccagcttgtccgccgcgttctgctgcttcagctggccttccaggttagtcagcattccgcccggcacctgggccaccagaatgcggctgtcatagcccttcagctggccttcaaaggcgtggtattttttgcgcacctcgcggaagtaggcggcgatgttttccagcttcaggatatccagcccggtgtcgtgctcagtgcctgccaacgtcgccaccagcgcctcggtggccgggtggccgtaggtggcgctcatggacgaaatcgccgtgtccacgccgtcgacgcccgcttcaatggccttcagcagggccatctccgccatcccggtggtggcgtgacagtgcagatgcaggcgtacctcaaaacgttttttgatttcgctgaccagctcatacgccgccatcggcgtgagaatgccggacatatccttgatggcgatggaatcgacgccggtttccagcagttgctccgttaa

SEQ ID NO: 382252 - DNA, 1374 bp, Salmonella enterica
atgccgtttacatttcagatcggaaatcatagttgccagatatcagaaaggtatttaagagatatcatcgataataaaagagagcatgttttttcaacgtgtgagaaatttatagattttttcaggaatatatttaccaggcgaagtttaatttctgattatagagaaatctataatctgctgtgccaaaaaaaagagcatcccgatattaaagggcctttctctccaggaccattttcgaagcgagatgaagactgtacacgatggcgcccccttcttggatatattaaacttattgatgtctccaggcctgaaacaatggataaatacactgtagaggtattagcacatcaagaaaatatgttactactacagatgttttacgacggagtattagtgaccgagacggagtgttctgaacgttgcgtcgattttttaaaagaaacgatgtttaattataataacggggaaattacgcttgccgctttgggtaatgataatctaccgccgagcgaggcaggtagtaatggaatctatgaggcttttgagcaacgtttgatagacttcctgaccacgcccgccacggcgtctggtgatgagagcggcgctattgatcagacggatgcatcacaaccagcggcaatagaggcgtttattaactcgccggagtttcagaaaaatattcgcatgcgtgatattgaaaaaaataaaataggtagcggaagttatgggacagtctatctgttaaatgatgagtttgttgttaagattccaattaatgagcggggaataaaagtggatgttaactctccggagcatcgtaattgtcatcctgatcgtgtcagtaagtatttgaatatggccaatgacgacaagaatttttctcgttcggcctccatgaatattaatggtaaagacgttacagttttagtttcaaaatatattcaaggtcaggagttcgatattgaagatgaagataactatcgaatggcggaggcgcttcttgaatcccggggggtttatatgcatgatatagataacgtaggtaatattctgattaaagagggggtacttttctttgtcgatggcgatcaaatcgtgctgtcacaagaatcccggcaacagcgaagcgtttctcttgcaacaaggcaactggaagagcaaattaaggcccgttacctggtaaaattaaagcagtccgagaccgaaggaaatactgaagatattgaatattataagtcacttattacagaacttgatgagttaatcggagaggaagaacaggcacctgcgccaggaagacgttttaaactagccgcgccggaggaagggactcttgtggctaaggtattaaaggatgaattaaaaaaatag

SEQ ID NO: 382253 - DNA, 768 bp, Salmonella enterica
atgataaagcaggttatccagcagctacgcgttcctgatgcaggtatagagaatttgcaggaacggcgctattggctgcaatgcgagcgtgcctatacttaccagccgatataccagacggatggccgtctgatggcggttgaacttctcactgtcgtcactcatcctgataacccttccagacgtattgccccggatcgttatttcgcggagttagcggttcgacaccgcattgacgtagtgaaagaacaacttcatcagcttgaacaaaaagcggattttttcactcgccatcacttattggcatcagtcaatgtcgacggccctacgctgattgccatgcgacgacagccggacattctggccgcgatggagcgcttaccctggctgcgtttcgaactggtggaacatattcgtttgccgaaagactcctctttcgcctcgatgtgtgagttcggcccgctgtggctggatgattttggtactggtatggccaatttttcagcgctgagcgaagtgcgttatgactacattaaagtggcgcgcgagctgttcgtcatgctgcgtcagtccgcggagggacgcaacctgttcactctgctgctgcaactgatgaaccgctactgtcgcggcgttattgtcgagggcgtggagacgctggaagagtggcgtgatgtgcagcgttcgcccgcctttgccgcccagggctattttctttctcgacccgtgccgctgatatcgctcgaagaggtgattctgaccctgtaa

SEQ ID NO: 382254 - DNA, 174 bp, Salmonella enterica
atgagcgtgggtgatagtgattttaaaagaaaagcagagatgagattaaatagctttatctctaaagcgggcattatggtaatggccactcacgatgatgaactggctaaatctgtatgtaataagttcatcaggcttgagcacggtgaaatagttagcaaaggcggattttaa

SEQ ID NO: 382255 - DNA, 1779 bp, Salmonella enterica
atgtattttttacttcaaaaagtaattttaccaaacattgatctatgcacggaagagcagctttatttcagaactcagggcgggaagtataactatacctcacgtaacttacttgttccgcgtcataaggttgcatattttgatactttttttaatgcattctcaattaagaaatggaaaaaatatacaaccttaacatcactttttttgcgggttaatataattggtcgcggaactataactgtaaggcataaagagaatggtgtcattagagtattaaagcaaattgattttaaatcgtcatgtaatattagtgatgagattgagattgatatatcaaaaataaattttggatatgtctatgtggagtggcaatcagacgaagactctgttttaaatggatttgaatttctgactaaagatcatgttagtaaatcatctatggctttagttataacaacttataatagaaaagaagctgttactaaaacaatcaatagaattaataaaacactcttaacccagagcgaatttaaagatcgttttaaattgattgtcgttaataatggcgaggcgattaatcacccgtcaggaaacggcattatagttatcaataatgaaaacctcggtgggtcaggcgggtttatgagaggtttgatagaggcagggaaaatcaacgatgtcaaacatgtcatatttatggatgacgacggctcatgtgaaattgaatcgatttgtcgaactcatgcttttttactgatggctaaagacaaaaatacagttgttactggctgtatgctttttgaagataacccggcaatcatacatgaatctggtgccatatggcatagagattttttacattacccggataaacattatctggatgctcgggaaatagattctttagatacttttgataatgaaagaaaaataggctacggtggatggtggttttttgcctttaatattaacgctattgaatattactcatttcctttctttgttcgtggtgatgacctgctatttggatatatgcataaaaaacataatattgtcacacttaatggtgtggcttcgtggcaaatggattttgaaagaaaaatatcggttctaaatagctatttgaacttcaggactgttgctgtacctgcattaattagtaaaagaaagtttgctgcactactgttaagtgttttctttgtgcgggaagtctttcttgcgagtttttcatgccgctatgaacttgccagagcaatgattatgtcatataacgattgtctttctggacgggagttttgggaagataatgtagatcttctggagataagaaaaagaattaatgcaataactcataatgaaaaattcaatgtagaaggtattgatattgttaatggttgtgttgattacccatgttctggtaaagaaaaagccatctacaaattttttagatgcataacccttaatggacacttaattccagctttctttttaattaaaaaaccaatcgtggttgattatcgtcattatcaccctactaagttttcattccggagaattactatctatcatttaaatatagaaaatggcaaattattaaaacttacccactcaaaaatggagttttttaaagttattattaatggtttgtttacggcagtcaaaaatttttatcggtttaaatctgcaaaaaaagagatgaaaaatagtttgccctatcttacctcaaagctcttttggtataaaaaattcaataaaaaatctgaagataaatattaa

SEQ ID NO: 382256 - DNA, 864 bp, Salmonella enterica
atgcgttactcacctgaagcgttaatggcatttgttgagaccgtctcttgcggttcgttttctgctgcggcgcgccgcctgcgtaaaagccagtccaccattagtaccgccattgcgcatctggaggcggatctgggattttcattatttgatcgatcatcgcgccagcccgttctgaccgaagaaggaaaacgggtgcttagctatgttcaggctattttatcggcgagcgatcgtttggatgaggtggcgctgacgttatccggcgagacggaggcaagactcacgttcgtcctctctgataccctgcaccctgacagtctggaagagttaatggcgcagtttgatcgtcaatttccgcataccgagtttgaatgcttgatcggagaaaatgatgatgtcatcgacctgttgcaaaaagggcgcgcccagataggtctgattgaagcgcgtgatgactatcccacagacattggcgcgacgcgtctgcctgttcaaagctggatgggagtttatgtggcgaccacgcatccgttggcgtcgcagacgaacctgcaatgggaacaactgcatacctggcgcgagctgcgtctgaatacctaccttgactctaacgccaacattacgcgcggcccggcctggtcagcgccaaactatttattgctgttgagcatggcggttcagggatttggctggtgcgtattgccctgcgcgctggtggaagagtttgcgtcggaaaaaccgctggcgcagctggatgttcctggctggccgagggcgattgctattgatttgctgtggaacaagaagacgccgcccggaacggcggggaactggcttcgctaccatttgcagcagaaataa

SEQ ID NO: 382257 - DNA, 1473 bp, Salmonella enterica
atggacaccatagctcgccagttagacgccgcaaggcaccaattcaaaacgacttattcacgtcagggaatggaagccaacatcgtacatattggatttggcgcctttcaccgtggtcatcaggctgtttataacgatctcacgaatgagataaccggcaaccgctgggggatttttgaactaaatctgttcggcgatgcggagctggtggatgcgctaaatgcgcaacaggggctgttttcagtggtggaaacgtcagccagcgccatcaatagtcgcctggttcgtaccgtcaccggcgcgttgcatacgctgaagtcaggtattcaggcggcgatcgagaagctgactgagccgcaggtaaaaattgtttcgttgacgataacggaaaaaggttactgcaccgatccgcggtccagaacgctcgatctcagccatccgctcatcaaacacgatcttgccgatcctgaacatccccgctcagcactcggactgatcgtcgaagcgctacggatacgccgccagcaagggcttcccccgtttagtgtactgtcgtgcgataacattccggaaaacggtcatttgaccaaaacggcgatcgttacgtttgccgataatctcgatccgcaactggcggcctggatagcgaagcatgtcacctttcctggtaccatggtcgatcgcatcgtgccggcaatgacgccagagcaatttgacatgattaaagaccagatcggttttgccgatccctgcggcatcgtatgcgaggatttccgtcagtgggttatcgaagataatttcgttgccggtcgtcctgactgggataaagcaggggcgatgttcgtctcggacgtgcttccctatgaagaaatgaaacttcgtatgctgaatggcagccattcgtttctcgcctataacggcagcctggccggatatgagtttatctatcagtgcatggaagacgacgcttttaaaaccgccgtacatcatttaatgacggaagagcaggcaaaatcgctgcgcccgaatttggcggtagatgtacatcaatatgcgcagttgctcattgagcgattcagcaacccgaacattaaacataagaccggacagattgcgatggacggttctcagaagctgcctcagcgggccgtcgatccttatctgacgctccaggcgcgcggtgttaagggcagggcgttagcgacgctgattgcgggctggctccattacgtcattaatacgctctctcaggggcagagcgtggccgacccgctcaatgataccttcaatgcggctattaaaaataaaaacacgcgatgggaacaagcgctgtctttgctgcagataaatagcatctttggaacgctggccagcgacaacgcagactttttaaacaacattcagcaggcctttaaccatattgaattacatggcgtcacggccaccattcaccgtttatcttcaaagggttaa

SEQ ID NO: 382258 - DNA, 900 bp, Salmonella enterica
  misc_feature (187)..(196): n is a, c, g, or t
atgaaaaatatatataatacttacgatgttatcaacaaatctggaattaattttggaaccagtggtgcccgcggccttgttaccgattttacacccgaagtttgcgcagcatttaccatttcctttttgacagtaatgcagcaaagattctcatttacaacggttgcgctcgcaattgataatcgtnnnnnnnnnngtccaagcagttacgcgatggctcaagcttgtgccgctgctttgcaagaaaaaggaattaaaaccgtttactatggcgtaattccaacacctgctttagctcatcaatcaatttccgataaagtacctgcaatcatggttactggcagtcatatcccttttgaccgtaatggcctgaaattttatagaccagatggtgaaattactaaagatgatgagaatgctattattcatgttgatgcctcatttatgcagcctaagcttgaacaattgacaatttccacaatcgctgctagaaattatattctacgatatacctcattatttccaatgccattcttgaaaaataagcgcattggaatttatgagcattctagtgcgggtcgtgatctctataagacgttattcaaaatgttgggtgctacagttgttagtttagcaaggagcgacgaatttgttcctattgatactgaagctgtaagtgaagatgatagaaataaagcaatcacatgggcaaaaaaatatcagttagatgctatattttcaactgatggtgatggagatcgccctctgatagctgacgaatatggaaattggttaagaggagatatattaggccttctgtgctctctcgaattagctgctgatgcagtcgctattcctgtaagctgtttgaataggtatagcgagcaggaagttttttaa

SEQ ID NO: 382259 - DNA, 312 bp, Salmonella enterica
atgcacaagcgcaagccgctaaatctgctgccactgctgctggcctgtctgccactgttagccagctgcgtaccgaagcaaaaaaaacttgccacccgcctggacgccgcaaagcacaccgcaaatcttgctgctgccgtcagaagcaaaacaaccaacgccgacgccagaatgcttgccaacatgctcggagatattgcagaagaagctaaacattatgctggaatcgctgacgagcgctaccgggcaggaatgacgtgtgaacgagtatatgattcggtgagagagtcaaataattacaggaggcattga

SEQ ID NO: 382260 - DNA, 837 bp, Salmonella enterica
gtggacgtaaggcaaagcatccatagcgagcacgctaaaacgctggacacccaggcgctgcgacgcgagtttttaatagaaaatatttttgtcgctgatgaatatacgatggtctacagccatatcgaccgtattattgtcggcggcattatgcccgtcagccattctgttgaaatcggtggagaggtgggtaaacagcttggcgtttcccggttactggaccgccgcgagctgggcgtcattaatattggcggcgcgggcgccattatcgttgacgggcagcgccatgacattggtcatcgtgatgctctgtatattggtaaaggggcgaaagagctggtcttcgtcagcaatgaggcgagcagaccggcgaagttttattacaactgcgcgccagcgcatacctcttatccgacgaaaaaagtgtcgcctgccgacgttgcgcccgtcaccttaggcgataacctcaccagtaaccgtcgcaccatcaataaatacttcgtaccggatgtactggaaacctgtcagctcagtatgggactcaccgaactggcgcccggcaatctatggaacaccatgccatgccatacccatgagcgccgtatggaagtgtacctctatttcaatatggaagaggacagttgcgttttccatatgatggggcagcctcaggaaacccgtcatattgtgatgcgtaatgaacaggcggttatttccccaagctggtcaatacattccggcgttggcaccaaagcctatacgtttatttggggcatggtgggagaaaatcaggtcttcgatgacatggatcacgttgcggtacaagatctgcgctag

SEQ ID NO: 382261 - DNA, 168 bp, Salmonella enterica
gtgacagtggagttaaatatgccagaggtcaaaaccgaaaagccgcatcttttagatatgggcaaaccacagcttcgcatggttgatttgaacctattgaccgtgttcgatgcggtaatgcaagagcagaatattacgcgcgccgcccacacgctgggaatgtcgtag

SEQ ID NO: 382262 - DNA, 516 bp, Salmonella enterica
gtgggccgggctggtggtgtaggagagggtgccctgggcgtgcgccccgtggctgcgtaccgcctgcagggcggccttcatattgcgcgggtcgttcatggcgtcgaagacgcggaagacgtccatgccgtttttgacggcgcgttcgacgaagcgttccaccacgtcatcggcgtagtggcgataaccgagcaggttctgaccacgcagcagcatctgcaagggagtcttcggcatggcctttttaagctcgcgcaggcgcagccacgggtcttcgccgaggaaacggatgcaggcgtcaaaggtggcgccgccccagcactccagcgacccgtagcccacgtcgtcgagcgcggcggcaatcggcagcatatcgtcaaggcgcagacgggtggcgaaaagggactggtgggcgtcacgcaggacgacgtcggtaatggcaatagtcatggatccctccgggaattaagcgttaaggcggtgatggtgaatggcggcggcaatcaccggctttaa

SEQ ID NO: 382263 - DNA, 555 bp, Salmonella enterica
atgagtgaaaaatataccgaaactcacgtaatccgttattaccacaacggagctcacgctggaaatatcaaacttagcgtcgatgtggatagttggggaatgaatgcggatgaacactcgaaagtaatcaaagaagaaattattaaaatggtttcttcacgtaattatgaatataaaaaaagttatggccttatatcaattttaactccccatccattaacagcagaacagtttaaaaaatggaaagatttagcaggtactgggggatctgtcagtaatcaaacagaaaagcgaataattgacggtaaggaagttgagatgcatacgcaaataagtgccgagcggattttaaccaaaatgcattttgaaattaatgggattcggcagtgctcactaaaaagcactgccagagcgccaacgccctctggcggtagggtaaaaatggaattgactcctagtgtttttgaatatcttgcaatgatgaaacaccatgatcgagttcatcaagagattgttgaagacattcgatcatctgacgcgcttgctgcggtgtga

SEQ ID NO: 382264 - DNA, 279 bp, Salmonella enterica
atgagtcacgaaactgaattcgaagatatcgacatcaccaataattttattgaagtccacgatgtcaaagtttcaccatttgcagcgccgggtaacgacaccagaattatgtttgtaattgactacaatcttaaaagtggtgaggtgttaccggcggccaatgagatttatcactgcctcacaccgcagcaagcgcgtcagatgatcgaatgtcttcaacaatctcttgatgaactcgatcatggtgtttcatcattgcaagatattcaaaaacactag

SEQ ID NO: 382265 - DNA, 390 bp, Salmonella enterica
atgttgatggataagacaggacaacagccaggacgccgccagttcttagagcaacgggcgcgactgcaagccagtttgaacgcatcacgcgtgagcgacactgcaacccgttttaaccgtctggatgaaacccgcaaaaaagtgattttcatcctggcaaacgacgccgctggacgtgtggccggaatgccacaacttacccgccgacatctggatctgacctatgaaaatctgagtgaaccggaacgggcgtgccttttgatgggcattaagcgcctttccgaatttgcagcatcaatgccgtgggaatttgaggactacgccgcaccacgcgccgaaattcaggcgatacgcgacaagccacccgcgccagataacgcagtcaactaa

SEQ ID NO: 382266 - DNA, 204 bp, Salmonella enterica
atggcaactcgtatcgatgcaactcaatccgaatttacactcggcgcactttctgcgcttaacgaagccaaaacactggccattgcacacgcaacgttggcgggtgttctcgccggaagtgaagtcgcaaacacgctgttgatttccttcaatgcgttactcgacccgctaatcgaaaaacattcgcgtaaagaggaggcataa

SEQ ID NO: 382267 - DNA, 216 bp, Salmonella enterica
atgaaagttattattggatataagaagcaaaataatcagttagatgtagttgtaagtgcctggtgttgggaaatggagcaactcaataagctgacaaaagaagtgatccgggtgttttttgtggagggggaagcaacgtgcgtgccgtcgtcatttcttctgcgtcgtaaatacaaggtaagcgggccggaaagttctaaatattccgccagataa

SEQ ID NO: 382268 - DNA, 693 bp, Salmonella enterica
atgagttatctgggaagtaaagcggccagcggggtctatcagaaaatcattgctgaaatgcccccgcatgatacctacattgaaacgcatctgggcagcggtgcggtgatgttccataaaccgccagcccagcattctgttgggattgatattgattcagctgcattttcgctgacaaggcggcgctggaaagataaaggattaacgccccctgacatccatttccattatggcgatgccgtcacctttctggaggggtattttgattttgcgactgcgggccaggtactgatttacgccgatccgccttatatgccggaaacgcgcaccagtcgcgcccgttaccgccatgaatacaccgtcgccgatcatgagcgccttttacgttgcctgatgtcactgccggaaaatgtgagtgttattttgtccggctacccttcgcagctttatgacaacacgctgaccggctggcgaacgcgagagtttcaggccatgacgcggggtggcgtgcgaacggaaaaaatctggatgaattatgaggaaggtaaagcctattcccacacctttgccggaagggactacaacgaccgggccaggataaaacgtaaagcggcacgctggcgggataagttcgccgccttgccgccagcggaacggctggcaatcatgaccgcgctttgtgatgtcgaataa

SEQ ID NO: 382269 - DNA, 495 bp, Salmonella enterica
atgaaaagcatgaaaaaattgattatcgcaagtgcgttgagcatgatggctgctagttgttatgcttcagttgtgccgaacacagagcaacagaaatcagtgaatgttagctttgccgctcccgatcatttaaccgtatcgcttgaccagatgccaggcttaatggctgggaagaatgataatgatatggatattgcgaagcttacagttgattctacttctattaaagaattcggggtcagggggatttctggctcgctaatgaacaatactggcagtacatggaaaataactggtaaaaatggtggcaacccaatcgttgtgggcttttcaagtaatgatgtagccaaatctcatgtcccgctaatgtggaatgggagagaatggaccacctttgataccaatgtcccagttgatattgttgtaatagcgggtcagaatatctcacctgatacgtacccactgactgtagacgtagtgggatatcagccttaa

SEQ ID NO: 382270 - DNA, 432 bp, Salmonella enterica
atgaaactaactgactttatgcaatctgatatttatgtgagcttcctagacgatttggaaaaatctctttcagagaaaatcgatagaaaatcaaaggttcacgatgttgttattagccttatggaaaaatggttgggatatgcctcgctgtcttttgacgatctatgctgggttatattaaattgcagatcaacttcaataaattacattgtaaaaaaacaattaaaatatactgaaccagatggcggcaaggataatattgtcaatctggcacctaagataaattttcctattggtcatctgattgaatattatttattatcgaaaagaccgagtgatttgcttgggtatgtaaaaaaaattcggattcccgaccctaataaatatgtaaaggaaattgaaaagatattttctgaaatacaagaatcataa

SEQ ID NO: 382271 - DNA, 372 bp, Salmonella enterica
atgactatcgaaagtactgattttttacgttccagcgagcattgtcttttacttgatgaagaagttgggttcagaaatgccgtatcccgggcgtactacgcaatgtttcataaggcaggagaaacgctggagagcgtaccttgcgcagatcataatcatcatgcaaatctaattaattacatgcaggggcgcttgggtgtgccggtggaaaagataagcgcatcgaggcttaaaattcttgcatatgacctgaggcagatgcgacaggcaagaaatgaagctgattaccgattatctgagtcaaaaattaatgcaaatgttgcaaaagaagccattctgacagctcaacacttctttaaacgaatttcctga

SEQ ID NO: 382272 - DNA, 738 bp, Salmonella enterica
atgccaattccaactcaatcacagatcggaggcgagcaacaagccgcgcaggccattgccgattcgatttctacccagatgcgcgtagcgatgcctggcatcattcagtcgttcgatcctgatactgttacctgcacagtggaggtggcgcttcgtggtattgttggcgatgattccaccgaattaaaaccgctggtggatgtgccagttatcttcccgcgcggcggcggttgcacgttaactttcccggttaaagaaggtgatgaatgtctgttaatttttgccgatcgctgcatcgatttctggtggcagagcggcggcgttcaggagaccgtcgacccgcgccagcatgatttatcggatgcgttctgtatcgtaggtccgcagtctcaggcgcagaaaataagcggaataagtacggggtccgcgcagctccgtagcgacgacggaagtacgttctttgagctcaatccctctacgcagaaaattaaaatcgtagcgcctggcggtctggatgtagttaccccgctggccgacttctcggcgaaagttaccattcacgggctgctgtcctggctgggcggcatggtagggtccgttgtttctggtgttgcatcaaaaatcaccggcgctgttgagtttatcggtagtgtgaaagcgaacggcaaggtgatcgacaatacccatacgcatggcggcgttcaacacggtggaagcaatacagatgaggtgaactaa

SEQ ID NO: 382273 - DNA, 354 bp, Salmonella enterica
atgcggtacagacgtgaagacgccgaaggtgattacacttttggttgtggtgatgatacctggctgattaactcgccagaagctgtcgcgcaggcggtaaaaacacgattcgcattgtggcgggggcaatggtttctcgacctgacgaaaggcgccccgtatgttcagtcagtgcttggtaaacagcgatctgacgtttacatcctggctatacgcgaacgcatacaggacacgccgggcgttctgtcaatcctgtccttcgacaccaattatgacggcaccagccgccgcgtaaaattcacttcctccattgacacaatctacggccagacgactgtaacaagcgaggcataa

SEQ ID NO: 382274 - DNA, 663 bp, Salmonella enterica
atgagtactcacttagacaaaattaaaaaagcttacaactcgcctccttggtggtatgatattcgcggttttttcattttgattttctcttatcgaagtagcctgagagaacagatacgcttttttggaataaatatgggtaataaacatttagaagttgctattggatctggcaccctaacttgtttagaacttttctggcgaagaattaataagttaccgaatattgagatcattggtgttgattatgctatacctatgctaaatggggcaataaaacggtttcgtaaaaaccctaacgtaaagctttatcacacagatgtggcaaaaatgcctttcaaagataatgaattcaatacagtgaatgtagccaacgcaatgcactgttttcctgatattgatatggctttacttgagatatggagagtaaccaaaccaagaggtacattagcagctaatattttattatacccaagcaccggttcgtatactttaaagaagttggcggaatttattaacacttggggtatgcgtaagggtattctatactctccctataaaaagcaagatatacgtcagcgaataattcaagctggatgggttatagagtatgagagggtaaaaggaaatacatataatatacttgcccgaaaaataaaatga

SEQ ID NO: 382275 - DNA, 750 bp, Salmonella enterica
atgaaaagtagaaaagaattaactttaacatcacataataccaatagacaattacgcttacttacggaactaagtgaaaaatttactcatttagtcgcagatacagatactttacgacaggagtgcttcaaattacgatataaagtatattgtgaagaaaatgactggctacagaaagagaatttatatggtttattaaaaatagaaaaagacatatatgataaccattcagttcatggattgctcattcataaacaaacgggactgtttgcgggtacagttcgtataatattaaataagactacgacatcaagtaatatgttgccaatttatctactatgccaaaaaaacaaactcaccctgccagatttagtccccattgagaatataggtgaagtttcaaggttttgcatcccaaaaagttatagaaatatcattttaaggtatgaaaatcagaccacaaaaaattacagccatgtttcacactctgtttcagatataatgacaataaatttaattaagttattattaaatttagcaacagaaaataacatcctacagtgggttgcagagatggcacccagcctaatcatacacctcgaaaagcttggtatatattttgataaagttggccacttgataaattactatggcatgcggcaaatttgttataaaaaactcgatgagttgattataaaaattaacattgagcgcccagatatttggaatctaatctctaaaaatagttga

SEQ ID NO: 382276 - DNA, 867 bp, Salmonella enterica
atgacaagttatacattttcatatgacgaagcttttagtaggaatataggatggataacaaaagatgaacaggagtcattacgtcattcaaaaatagcaatagctggtatgggcggagtcgggggatcatatcttataacactgacaaggctaggtgttggctcttttcatattgctgattttgatctttttgaacttccaaatttcaatcggcaaatcggggcaagagtttcatcattaggtcaaacaaaaattagcacactagcttctatggcttatgatattaatcccgagctcaaattaatcagctttacagagggagtacaagttagaaacttagatgaatttcttgaaggagttgacatttatattgatggcttagatttttttgcccttgatattcgccgtaaaatatttatgcgatgcaaagaaaagaaaatcccagcaattacagtcgccccgattggaatgggggctgcctttattatctttagccctgaagggatgagttttgaagattatttccgaatggaaaaccagccacccaagtctcagataatccgctttctacttggtctagcaccggcaggtttgcatagaccatattttatagataaaacatcctttaatatcactcaccaacgagtcccatccacaggattatcttgcgaactatgtgctggcattgcaacagcgcaggtaatcaaactacttcttaacagaggccctgtatattctgccccatggtatcaacattttgatgcgtatacgtgtcgctttgttaggggaaaacttcgttttggtaacaatggtctttttcagcgcatcagaatagctctcgctgaaaataaatatttattagattga

SEQ ID NO: 382277 - DNA, 879 bp, Salmonella enterica
atgcctgaccatgatccgctaacgctaaaactaagcttgagagaaaaactcgcttacggtgcgggtgatattggctctaatctaatgctaagcattggcacattatatttgctcaagttttacacagatgagctaggaatgcctgcatattatggcggggttattttcctcatagcaaaattctttactgcatttacagatatgctaaccggatttcttctcgattctcaaaaaaacattggaatcagagggaaatttagacctttcattctgtatgcagcagtaccatcagcaattattgcgacagttcagtttattgctacaacatttagtctgccgataaagaccgctattgctaccggtctatttatgttattcggactgttttacagtctaatgaactgttcatatggcgctatgatcccagcaataacaaaaaatccaaatgaacgcgcacaactggcagctttccggcagggaggggcaacaataggattattaatctgtacggttgcttttattccacttcaatctttattctctacaactaccattggttatggttatgcagccttaactttctctatctttggtttcatttttattatgttatgttataaaggaaccaaagaacattacattgaacccccatcgccgggacataaggcaagcatcatcaaatcattttgtgcaatttttcacaacccaccactattagttctatgcattgcaaatttgtgtacactagcagcatttaatatcaagctcgctattcaggtttattatacccaatatgtactaaatgacattaacctattatcctggatgggtttttttagtatgggctgtgtaattattggtgttttgttagttccctag

SEQ ID NO: 382278 - DNA, 1431 bp, Salmonella enterica
atgaatttcgacttcagcgcgccggagtatcacgaactggcgctgtgggaagataaaactacgctacgttttgagtgtgccgacacctacatcgccctactggaaaaactgactgcgctgttaggtcgccagccggagctgccggactgggtttacgacggcgtcacgctaggcattcagggcggtacggaagtttgccagcaaaaactggataccatgcgcaacgcaggcgtaaaagtgaacggtatttgggcgcaggactggtccggcattcgtatgacctctttcggcaaacgcgtgatgtggaactggaagtggaatagcgacaactatccacagctggatagccgtatcaaacagtggaaagaagaaggcgtccagttcctctcttatatcaacccatacgtcgccagtgataaagacctctgcgccgaggcggcgaaacacggctacctggcgaaagacgccacgggcggcgactatctggtcgagtttggcgaattctatggcggcgtggtcgatctgaccaatcctgaagcttacgactggttcaaagacgtcatcaaaaagaacatgatcgcgctcggctgcagcggctggatggcggatttcggcgaatatctgccgaccgacacgtatctgcacaacggcgtcagcgcagagatcatgcataacgcctggcctgcgctctgggcgaagtgtaactacgaagcgctacaggagaccggcaagctcggcgagatcctgttctttatgcgtgcgggttacaccggcagtcagaaatattccaccatgatgtgggcaggcgaccagaacgttgactggagccttgatgatggtctggcctctgtcgtgcctgcggcattgtcgctggcgatgaccggccacggtctgcatcacagcgatatcggcggctacaccaccctgtttgacatgaaacgcagcaaagagttgctgctgcgctggtgcgatttcagcgcctttacgccgatgatgcgcacccatgaaggcaaccgccccggcgataactggcagttcgacggcgacgcggaaactattgcccactttgcccgcatgaccaccgtctttaccacgctgaaaccgtatctcaagcaggcggtggcgcaaaacgcggctaccggtctgccggtcatgcgtccgctattcctgcactacgagaacgatgccacaacctacaccctgaaatatcaatatctgctcggtcaggatctgctggtcgcgccggttcacgagcaggggcgttgcgactggacgctgtacctgccggaagagcactgggtgaatatctggaccggcgaagctcaccacggcggtgaaattaccgtggatgcgcccattggtaagccgccagtcttctatcgcgcgaagagcgagtgggcttcactttttgcttctttacggaatatctaa

SEQ ID NO: 382279 - DNA, 1242 bp, Salmonella enterica
atgaaatggtttaacacattgagccacaaccgctggctggagcaggaaaccgaccgcatctttaatttcggtaaaaacgccgtggtgccgacaggcttcggctggctgggaaataaagggcaaattaaagaagagatgggcacccatctttggatcacggcgcgtatgctgcacgtttattccgtggcggcgtcgatgggccgaccgggcgcttatgatctggtcgatcatggcatcaaagccatgaacggcgcgctgcgcgataaaaaatacggcggctggtatgcctgcgttaacgatcagggcgtggtagatgcctctaaacagggttatcaacacttcttcgccttgctgggcgcggccagcgccgtcacgaccggtcatcctgaagccagaaaattgctggattacaccatagaagtgattgagaaatacttctggagtgaagaagagcagatgtgcctggagtcctgggacgaagcctttagcaaaaccgaagattaccgtggcggtaacgccaatatgcacgccgtcgaagcgttcctgattgtttatgacgttacccatgacaaaaaatggctggatcgcgctatcagaatcgcatcagtcattattcatgatgtagccagaaataatcattaccgtgttaatgaacatttcgattcacagtggaatcctatccgcgactataacaaagaaaatccagcacaccgtttccgtgcatttggcggtactccaggtcattggatcgaatggggtcgtttaatgctgcatatccacgcagcactggaagccagatgcgaacaaccccctgcatggctgctggaagacgcgaaaggtttgttccacgctacggtacgtgatgcctgggctccggatggagcagacggcattgtgtataccgttgattgggaagggaaacccgttgtacgtgaacgtgtacgctggccaattgtagaagcgatggggacagcctatgccctctataccgtaacaggggatcgtcaatacgaaacctggtatcaaacatggtgggattactgcattaaatacctgatggactatgaaaatggttcctggtggcaagaattggatgctgacaacaaggtgacaactaaagtctgggacggtaagcaggatatataccatcttctgcactgtctggtaattccacgcatcccgctcgctccagggctggcaccagccgtagcagcaggtttgttagatatcaatgcgaaataa

SEQ ID NO: 382280 - DNA, 141 bp, Salmonella enterica
atgtcgcaaaaaccgttaaaaaccgccatcatttgcattacggcggtactcataatctggatgctacacggttcactttgtgaactacacatgagattaggaggcgcggagtttgcggcgttcttacagtgtaagcagtaa

SEQ ID NO: 382281 - DNA, 753 bp, Salmonella enterica
atgagaatagcattcttatccacagcgatgtttgttacaactcttacgtctcttgccgcagtagctgatgatagagagtatatggatttcaccgctgcaaatcagtgtcgaagtcaacctaatgatgtaaagcggatagcatgttatgacaaagctataaccccgacacgtaccaaaacgttagataagtttgagagtagagatcagtgcagggatgaagcgcaggaaggaaaaaggttgtcttgttatgattattttttccctccaacatttactggggcgaaggttaaaaaaagtattaatacggttggtggagatgttggaaattggaagacagatataaaaacctcaccaattgatgattccaaaaatgttgttatctttattaatggtgataactcctttagatctccctttggggagacaacaacaccaagtctttatatagcttgtagagagaataaaacagaactattcatagattgggatgtatatctaggattagatgaaactacgatgatatatcggatagataaacaaaaagctgttaataagacatggttaatttcaacggacacaaaggctgttttttataatgggaaagtgattgattttataaaaagattggaatctggccagaagttgtttgctcaaatcaccccatacaatgagagtcccgttaatacaacatttaatcttagtggtctatctgaggctattaaaccactgcaagaatcatgcggctggaaatag

SEQ ID NO: 382282 - DNA, 141 bp, Salmonella enterica
atgtcgcaaaaaccgttaaaaaccgccatcatttgcattgcggtggtactcataatctggatgttacgcggttcgttatgcgagctgcacatgagattaggaggtgcggagtttgcggcgttcttacagtgtaagcagtaa

SEQ ID NO: 382283 - DNA, 261 bp, Salmonella enterica
ttgtttccctgtccgatatgtggcgcatcatccagaacccgcaccagccgaatggaaaacaaggaaagaaccatcagacggacttactaccagtgtaataacctggaatgcggcgtctgcttctacaccctccagtccgtcatcggccttgtaggaaaaaacaagaccgaagacaaatccattccgtgggaagacttcccctcaagccatcgcggacgtaatcagcttaacttcgatctcgaccagaaagacgaaacataa

SEQ ID NO: 382284 - DNA, 1131 bp, Salmonella enterica
atgacacccacagacgccatcacactaaaaattaacagctacatggacaccctgaatgatgcggtgaaagtgccggatttcagtatcaccacaggcgaagacgaactgaatgatctgaacaggcgggtaatgtctgtctcaatgaccgataaccggggttttgaggccgatcaggtggttatcagcgtggacgatactgacggcgaagtgcagctcccaaagcgcggcacgaagcttgccgtatcgatgggatggaaaggtgaagccctgatttacaaggggctgtatatcgttgacgagatctcacacaaaggcccgcctgaccgccttgatatcacggccagcagtgccgattttcgcgctgagttcaacgttaagcgtgaagtgtcctggcatgatgtgaccgtcgagcgcgtcgtgtctgccatcgctcaccgctacggattgaaggcgcaaataagcgaaatactgatggatatcgaaatcgaccacgccgaccagactgatgaaagcgatatgtcatttctcacccgcatggccgacatgttgggcgctatcgccacagtcaagaacggcagcctgttattcattctgccgggcggcggcgtcaccgcagacggcaaagcgttaccctctttctccctgacccgcagccacggcgacagacaccggttccgcatttcagacaggcaggcctatacaggcgtaaaggcgtactggctggatctgaacttcggcaaaaaaaagaaagtcagcgttaaacgccgccgcaagcccgcaacgtcaaaaaaagagaaaagcagcagccgcgaaggcgactacatggaaggcgcagacggtaacgtttatgtactgcgcaagacttaccagaacgaagaagccgcaaagcgtgccgccgccgccaaatggcagcagctacagcgcggcgcggcggatttttccattacgctggcgcgtggccgggcagacctctacccggaaatgcacggctccgtgtctggctttaaaaccgacatcgacaacgaagactggatcatcgccaaagcggaacacaccattgacgacaacggattcacaacacaccttgaactggaattaaaaattcccgaatggatagcagaaaaggaataa

SEQ ID NO: 382285 - DNA, 1188 bp, Salmonella enterica
atgagtgaacaacgttttcacggtgcgcgcatcagggaaaacactgacctggtcacggccattaatgacattgattccagtgtcattgggattgttgccgtggctgatgatgctgatgcgggtactttccctttgaataagcccgttttgtttaaccgggttaatgatgtgctcggcaaaactggtaaaaccggcacgttgtataaatccctcaaggccatagccgatcaggtcagtacgaaagtgattgttgtacgcgtccctgccgcaaaggaaggcgacggcgagaagacgcaatcacagcttgtgattggcggaacggaggcggacggcagttatacgggaatgtatgcgctgctggttgctgaacaggatgaacatatcggctaccgtccgcgcattctggcggcacctgatctcgataccaaagaggtgacgtcttccctgtgtgtgattgctgagaagctgcgggcgtttgtgtatgccggatgcaacggctgctctacgatggcagaggccatcgcgtaccgggctgattttgcctaccgcgaactgatgcttatctggcctgactttatcgcctataacccggcgtctggccagaatgaagttttcccggccccggcgtatgcgtgcggcctgcgggcgctgattgataacgagcagggttggcataagtcgctgtctaacgtgccggtgaaaaacgtgctggggatttcaaaacaagtgttctggtcgcttcaggctgaggatagcgacgctaacgcgcttaacaacaaggagatcaccacgctgattaagcgtaacggtttccggttctggggcgaccgctcaacggataccaacgcctatatctttgaggtgtatacgcgtaccgcgcaagtactggctgacactatcgcagaagcgcaatttgaggcgatagacgagccgctgacgccagttaacgctaaggatgtactgagcggcatacgggcgaaactgagcgcgctggtgacgtcagggcggcttatcggggcgtcatgctggtatgacgtggtggataacagcacgacggagctacgacagggacgcgtgcgtattcgctacaaatatacgccggttccgccactggaagatctgacactgtaccagacgttcacggatgaatttttcgggcctgcatttgcgtctttgggaggtgtgtaa

SEQ ID NO: 382286 - DNA, 513 bp, Salmonella enterica
atgtctgttccacataaaatccagttttttacctgttttattgacggggaaaacgagatcggcaaagtgacgtcgctcaccctgccaaaagtgacgcgcaagaccgaaaactatcgcggcggcggcatgatggggtcagttgcggttgatcttggccttgatgatggcgcgctggatgccaccgccgtttttggcggctttatgccaggcgttatcaggaagtacggcggcgacatcgacgagctgaagctgcgctttgtcgggtatctgtacaccagtggcgacagtcgcgtgtgtgaaattgagatgcgcgggcgaattacggaaatcgatatgggtgaggtcaaacagggtgaggatacctcgcacacctacgccatcaaaaacacctattacaagctgtctgttgatgaccaggagcttatcgaaattgataacctgaatttcatctacaaaaaagacggcaaaaatatgatccccgatcgcgcccgttctgcgctgggtatgaactga

SEQ ID NO: 382287 - DNA, 357 bp, Salmonella enterica
atgaaaaaagaatctgctgaatatggagttgacgtcaccaatgaagccactgccccggtgaagggggttacgctggcccagccggttgtacgcggggatgaaacgattacgtatgttgagattggtgacgctatcaggcaatcaggctcactgcgcggactgtcgctgtcagacgtgctcaatatgaaaacggataccctggtgacgctgtttgcgcgtgtgacgtctccacgcctgaaggaaagcgagatcagatcgcttgcgacgtctgattttatcgcgctgtccacggccatcgtcccttttttgacgcctacggcctctggagtaccgaacggggcggagacggacgactaa

SEQ ID NO: 382288 - DNA, 2997 bp, Salmonella enterica
gtgagcgggcggcgctcagaagtggtgcccgcgacaatgaaaaatcttgatatccgcgtttctttcagcgcgatcgataaactcacccgtcctgtagagactgcccgccaaagtgtgggcggtcttgctgattccctcaaaaaaacccagaccgatattaaaacgcttggcacacagtcaaaggcgttttcccgtctgcgcgagaacttcactaaaacgactgaaaaaattcagaagacgcagcgcgagcttaacggtctgaggcagtcacaacaggcgggcaacgccatgactgacaaacagcgtgagcatatcgcgcaactggcggcaaaacttgaccgcctgaatgaggtgcgcacccgcgagaaagagaagctgcgggaagccagccgcgagatggtgaaacacggcatcacgctttcaggcagtgaccggactattcaaagcgccatacggcgtactgagcagtacaaccagacgctggagcatgagcggcagatgctggcgcgtgtggcaaaggcgcgggcgcaatatgaccgtatgcaacaggtcgccggaagactgcgcgggggcggtgctgttgcgctgggggcggctaccgctgccggttatggtgccgggcgttttctggcgcctgctgtgagtttcgatcgggaggtcgctcgcgtgggggcgcttacccgtctggataagtccgatccgcagtttactgcgctgcgtgaacaggctaaaaagttgggcgcggaaacgcaattcacctcaagggatgccgccagcggtcaggcgtttctggcaatggccggttttaccccgcaggccatacaggctgcgttgcccggcgtgctgaatatggcgctggcaggcggcatggatttaggcgaaagcgccgatattgggtcaaatattctttcgcaattccacctcgatcccaaagagatggatcgggtcagtgacgtactgaccgccgcatttacccgcaccaacaccgatctgaccaacattggcgaagcgatgaaatatgccggtacgggtatggccggtcttggtgtcagtgtggaacagacaaccgccatgattggcgtgatggcaaacgtggggctgcgtggcagcatcgccggtactggactgcaaaccacgttttcacgtctggccgcgccaacgggtaaagccgccagtgccctgaaagagttaggggttaacgttgccgacgcaaccggaaaaatgcgaccggctgaagtggtgctggctgatatttataaagctgtccataagtacggcgacgtcgatcaactgtctttctttaaagatattgccggggaagaagccgccaaatctttccaggcgctggttcggtctgcgggcagtggtgaactgcaaaaattactcggagaactgaagaaggcgcagggggaatctgcgacggtcgccagaaagatggctgataacctcgacggcgatttaaagaatctggatagcgcgtgggaagggttccgtattcagattgaagagctggttgacgggccattacgtggactggttcaggggatcagtaacgttgttggcgcgatgacgacgtgggcgcgggaaaaccccggactgacgaaggcgctgttgactgtcggcggtagtgcgctggccgttaccgcgattactggcgggctgtcgctggctatcgggttgttgctggggccggtggcaaaactgaaacttggcttcgcgttactgactggtactaaagggcttgggcgcgccattccgctctttactcagttgcgggcggttattggtggcccgatggggagtgttaagggttggtctgctgtcttctcgtcagtgacgtccggggcgggaaggttgtcgggagttcttgggccactgcgggggatgctgctgtctgttttcacttcaccacgggcggcggttttttctcttcttcgcggggttgccgggcttgctctgcgactgtccgggcttccgacactgtggggtgtgattaccggcgctgtgtccatgcttggcggcgcgatttcgctgttactgagtccgatcgggcttatcggggcggcattcgtggcggcgggtctgctcatctggcgcttctgggaacctattaaagcgttttttaccgggttttttgccggggtgtgggaggcgctaacgccgctacgggaagcgttttctgcgttatcgccggtgtttgattcgattagtaacgggatcaaatccgtccgggactggtttacacgcctgctggaaccggccaccacgtcaaaagagacgctggaaaaatgcaccagtgccggaaaaactttcggtaaggtagtagggagttttattcagacgctggttcttggcccgatgacgttgctacttgattcgcttggctgggtacttgagaagctggggcttattcctgacggtattgagcgcgcccgtcagaaagcggaagaactaaagcgcaacgagctgcttgataccaaagtttctcttctggtgggagatctggcaaaagtcgcaccaaaaaaagtcgatacaggaaccacaacaccgtccggcacagataagccgttgacgcctgatcagggtacgcttcgccggttaagtaatatcgctgacaacacgaaggctaccgccgataacacgaaacgcatcggccccggcgatattgtctttaaaaacctgcctcgtgctctggccgttcgtggcgcatggcaggaatcacggcttgccggttcgactgtcaccgtcgcccctgagctcgccccggtgatggctgccgcctcccgtcctgttgtcgaagcgatacgccgcccggttggcgggaatggtgggcgcaccgttgcggcggcggggtttgatggtgaaattcacgttcacctgcataacgtggtcacgcagaacccccgcgaactggcgagaatggttggagaagcggtgaaagctgaaatgaataaattagcccgaaccgggcgcgccagcttcctggatagtgattaa

SEQ ID NO: 382289 - DNA, 489 bp, Salmonella enterica
atgatgatggtttacggtatgtttgtttttgagctgaagacgcttccacatcaacagctacaacaacacaagacctggcggcacgttaaaaacgagcgcattaaccgctctgcaagctggcagtacatcggcgcgggagatgatcagatcacgctttccggggttctctacccggaaattacgggcggtgaggtgtcgctttcggtgctgaccacgcaggcctacacgggacgaccgtggcccctgattgatggtgtggggcaaatttacggcatgtatgtcatcaccgggctgcaaacgacacgatcggaactcgaccgctacggaaaggcaaaaaagattgagttttcgataagctttcagcggtgcgatgaagatatgcgggagcggctacagtcctcttctgtcagtgatttactgaacggtctgaaggataaagccagcgcggcgtatgattcagtaaacggcgcgatttccggacttttatag

SEQ ID NO: 382290 - DNA, 528 bp, Salmonella enterica
atgaataatgaccttcttccaccgtctgccagtggctttatgcgaagcactgaacaggcctcgacgcggcttgatgctatccccgtcgacctccgaaagctgtggaactctgacgaatgcccggtcgcccttctgccctatctggcgtgggcgctgtccgtggacagatgggacaaaaactggccggaagagacgaagcgaaagacgataaaagcctcatgggagattcaccagaaaaagggcaccatacgcgcgcttcgtaatgttgttgaaccctttggttatttaatcagggttgtcgaatggtggcaggaaaacggcactcccggtaccttccgtctggagattggcgcatcagaagacggtatagacgccgacacctactacgaaatggaacgcctgatagccgacgccagaccagtaagtcgccacctggtgggactgaatatcatacttgaagcctccggcgaaatgtttacgggcggcgcctcttacactggcgacatcatcaccagttatgcggagtag

SEQ ID NO: 382291 - DNA, 897 bp, Salmonella enterica
atgccaaccgttgacctgtcacagcttccgcaaccggccattattgaggcgctggattttgaagtgattctggcggagataaagcagttcatgataagcaagttcccagaagaagtccgcaccgccgttgccgctgcactggaactggaatctgaaccgctgaacatcatcgcgcaggccttcgcatggcgcgagttgctgttgaggcagcgcataaacgatggcgcagcggcctgtatgctcagtcattcagtcgcaaccgatctggataatatcgccgggaatatggacacagagcgattagtgattactcccgcaacggacaccaccgacgccgtgatggaaagcgacacggcgctgcgtatgcgcgcacaggcggcttttgatggtttaagcgttgcagggccgtcaggcgcttatgaatactttgccagaagcgccagcggcaaagtagcagacgccaaagcgaccagcccgtctccagccgttgtcgtgctttctgttttgtcaacagagggcgacggcaccgccacgcctgaattactggcgaccgtaacagatgcactttccgccgaagaccgccgccccataggcgacaggctgacggtgcaaagcgcggagatagtcaattacaacatcaacgcaaaactctttttttatcctggccctgaatcggagcccatacagaacgccgcgcatgacgcactacaggcatggatagcacttcagggaaaaataggccgcgatgttgcacgttcggccattatggcggcgctgcatgttcaaggggttcagcgcgtcgaactgacggaacctgcaacggatatcgttatcaacgacacccaggcggcaaggtgcgtaaccgtcactattgagaaaggtgggaccgatgaataa

SEQ ID NO: 382292 - DNA, 369 bp, Salmonella enterica
atgaccgcacgttacacaggcatgaatccgaacggcaccggaacactgaacgataccgatcagctatggaactcggttaacgacattctgttaacgccgctcgccagccgcatcatgcgccgcgattacggcagtctgatcccggatttgattgactcgccgcaaaaccagacaacccgccttcagtgcatgagcgcggcggtcattgcgctcacaaggtgggagccaagaattgcgttaaacactattgatattcgctggctgaaagacggacgcgccgaagcggaactgtcaggcaccatcaccgaaaccatgcaaccggcacagcgaacaataccgttaagagggggcaacaatgccaaccgttga

SEQ ID NO: 382293 - DNA, 591 bp, Salmonella enterica
atgaacgccgggatgaccgaactaatgcgcctgacagggaatatcattcgcaccggcgttgtttttgcgactgatgccagcacagggtgcgtgcgtgtgcaaagcggcgaactgaaaaccgactggctgcgctggaacgtggcccgcgcgggcgcattcaaaatctggataccgcccgccatcggcgagcaggtgttgatcgcctgcatcggcggcaacccggaaacagcgatggttatcggcagcctgtacagcaacgataacccggcgccgggcagcagcctgaaaaagatggttatcaccgccccggacggggccgttattcgctatgacgccgacgctggcgcgctatccgctacgggtatgaagaccgcaaaccttgaggcgtcagtcagtgtgacgctaaaaacccccgttgtggaatgtactcagcacctgaaagccgccacgtttgaaatcactcagggcgggaaaatgaccgggagcgttgaacacagcggcggcagcttcacttcaaatggcgtacaggttgacaaccacggccacggcggagttaagccgggcgatagctggacacaggggacaagatga

SEQ ID NO: 382294 - DNA, 636 bp, Salmonella enterica
gtgagcatactgacccacgaactggacaccatattcagcgatatcctttccggcctgtcttctgccggaatagcgaaaactgcaaggacggtaggccaggaagtacgccgcagccagcaacgccgcatacgcagccagaagaaccctgatggttcggcgtggccgcagcgtaagcgccgtataacccgttcgcaacagggcattaaatttatctggaatggcgaagtcagggagctgaaaaactggcacggcggacggggaaagtacgggcgcacgatcaccggctacgataccgaccgcaacgacattcgcacgttctaccgcagcgacattgagcgttatcttgcgattaacacccgatcgttgcgccgtgacagcaccaaaaaagcgcccatgtttgagcgccttcggacgttgcgttacctgaaaatgtaccccgacccgcagggcgtcagtatcggttacagtggcgtggcggcacgtattgcccgcgtacaccagtacggactacgggatcaggtggggccgggcgccatagcgaagtacccgcagcgtgaattgctggggatctccgcagcggacgagcgcctgatttataacgccgtgattaacagtctggggagcgccgggaaatga

SEQ ID NO: 382295 - DNA, 477 bp, Salmonella enterica
atggaaaaaattaactcgcttcgtgatgccgtgacacgccataaccgctggagccgggctaatcctgacaaaatgacggtttttgtggacagcggccatatttgcttttcaggtgatacgccgtcatttgcctacgattacaccgtgattctgtttgtgatggacttcactggcgatattaacgatttcaccattccggtcatgcgctggctgtggttcaaccagagggatttgctgatgaacccggaaaaaaataaagcgtttaaattctcaaccgccattaatgacgacgacagcgccgacattctttttgagttccccctctttgagcgcgtgaacgtctcacgcaatgaaaacggggatctgtcatgggaatacctgccggagccacgtatgccggatttttcgaccgggggcgactggagcagcgtttttattgatgaatccttcacagcggatacgggaggtagccagtga

SEQ ID NO: 382296 - DNA, 492 bp, Salmonella enterica
atggaccgcgtaacgactggcgtaataatctcgttgctgatagtagccgcagcgctggcatggactaccagtcgctatcacgataacgccgtgaagtacaaaagccagcgcgataccgccactcatagcctgaatctggcaaacgagactatcagtgatatgacgctgcgccagcgccagaacgccgcccttgacgcgaagtacacacaggaattagccgatgcaaaagccgaatccgaaaagttacgcgctgatcttgcttctggccgtcgccggttgcagctccacgccgtctgtatgcccgccgccgcgcgtgataccaccgccaccggcgcaactgatgcagccaccgccagacttactccggacgctgaacggaattatcagcgtctcagaaccgaatccatagccgttacagcacaggtgaacggcctgcaacagtacatcaccgaacaatgcactaaacggaaggctgatcatggaaaaaattaa

SEQ ID NO: 382297 - DNA, 444 bp, Salmonella enterica
atgaagatttcagacagcggactggccgcacttaaacgcgaagaaggctgcaaactaaccgcctacaccgactcgcgcggcgtatggactatcggcacaggtcacacaggcagagttgacggcgttgcggttggcaagaacatgaccatcacccaggacaccgccgacagactgctacgcgatgatctgtcatgggtggagcgctgcattgctgaacgggtaacggttcccctgaaccagaaccagtatgacgcgttatgcagcctgattttcaatatcggcgcaaacgcctttactggttcaagcgttcgccgctacctgaacgccggtaactacaccgccgccgctgacgctttcctgaaatggagccgtgcaggcagtaacccgaccattctggccccgcgtcgtggacgtgagcgggcgatgtttcttggtcaggggtaa

SEQ ID NO: 382298 - DNA, 378 bp, Salmonella enterica
atggggctgatcatcatgaaaacgagacaggaaaagagtatgaacggcgatccgcacacctggcaggactggcttatgcacctgaaggcctggttgcagggggatattccactcgacagcctgttaatgaccgccgctgtcgcggcgctcagggtgttttatacggggaaaagctggcgacgtctgcttctggaagtaccgttgtgttgtcttctggcagtggcggcattctccatcatcaagcccgtacctgccgcctggttgtctgaagactggcgcgtgggtattggtgcggctatcgggcttatcggcgttgagcatatcagggcgctcggcgttttcatgacaaagaaatttgcagggaaaaatgacgaatga

SEQ ID NO: 382299 - DNA, 201 bp, Salmonella enterica
atgaaagtcaaagcgcttcaggacgataccgtggacttgctttgttttcgccattacggcaccacacagggcgtcacagaacaggtattagccgccaatccgggactcagtaacagcgtatttctggaagccgggcaggaggtggaactgcctgagcagcagaagaaaaaacaacgggaaatgatccagctatggggctga

SEQ ID NO: 382300 - DNA, 495 bp, Salmonella enterica
atgggcatggtggcaaaaccacaggtcaacagcgcagaaaaggacgttaccgacgttgacgacggcgctgaaaaggtgactgccgggacattctggccggagatcctgttacgcgatctccgccttgccagccgaataccgggcagaacgaccacatcacgcctgaagttcgtcaccacagaagcggtggcgcacgtcactgaccagcttgacgactggcggggcattcaggaatcagccggttacagcacactggctgacgttccggccagaatgcttaacggcgagagcgtgaaggtgtatcgctaccgccgcgcggtttactcagccgcccgcgccctgattcttgagaacgcccgcgacgtggacaccaccgaaaaaggcgaccgcaaagccgacgcactggaagtacagaccgacgatttgtggcgcgatgtgcgctgggctatagctgatattcgcggtactcagcgcctgtttgtggagctggtctga

SEQ ID NO: 382301 - DNA, 831 bp, Salmonella enterica
atgctgacaccggcacagaaacattttcaacaggtcatggcgcgccgagcagggcttgagaccggggaggaaacgctggttgaacgtaccgcgcacgaacagatccttcaccgcctccgcctggcgcagtcgcggctgaaaggtatccagtcaaaagcggcaaaagctgtcgccaaaaaagaactgttacctgaatttgagggctggatcgaggggacgctggacagcgataacggacgcccggatgaggtgattaccaccctgatggtgtgggccgtggactgtggcgatctcccgctggcattacgtatcggcgaatacgtggtacgccacaacctcagtctgccggacaatttcgggcgtgacgcggcgacggtactcacggaagaaatctgtaacccgttattaacactggcgggaaccgacccggacgccgatttatccgcttatatcgcaccgctggacacccttcagggcattgtgaacgactgcgatatgccggacgaggtacgcgccaagctttgtaaggcaagagcattctcacgccgggcgataaccgacccgcaaacgcaggcgttatcactgaagctgttgcgtgaagccatgcatcttaaccccaacgccggagttaagcgcgaaatcgccaccctgacgcgcgccctgaaaaagtcgccatctgagccccgcgacgaagcggcgacgacagaccagaacgccgcgcaggaagacgccagagataacgcgccgacaaaagcgccggtacgtaaaaccgccacccgaaaacccgcggccgggaagactaaaacgacccgcaggacggcaaagaaataa

SEQ ID NO: 382302 - DNA, 1086 bp, Salmonella enterica
atgaattacgcactttcagccagtacccgcagccagcttgacctctacatggcgcatcaggcaagccttaatggtcttccggtaacgggactggcaaaaaactttgccgttgatccggctgttcagcagcgtctcgaaaacgctatgaaaaacagcacagaactgacacaaaaaatcaacattatcggtgttaccgatcaggaaggtgagaaagtccttattgacaccaccggcccgattgcccgcaccaacagcagcagcgacggcaccaaacgccgtaaccccatcacaccttacgatttagccgcccgccgctatcgttgtgagcaggtgaactacgacacctacatcagctacgcacagcttgacgcctggaacgcccatcccgatttcgccacccgtatcagtaagcagattgcgcttcagatcgcgcttgaccgcatcatgatcggctttaacggtacgaatcatgcgctcgtttccgattttgccgccaatccgcgccttcaggacgttaacaccggctggattgagcatattcgtaaacaggcagcagcgcgcgtgatgaagggtgtgacgcttgcgacccgcgatatgggtaacaaggttatcgctaagggggactatgccaacccggacgcactggttcaggatgcgcgctcctcgttgctggatgaatggtacaaagacgcccccgatctggttgtgctgttatcacgcaacctctttaactcgctgcgtctgccgttcattaacgccatgagtcagagcaaccccaacactgaactgatggccggtcagttgattgtggcgtctcacctgattggcggtctgccgacctacttcgcgccgttcttcccggataacgcgatgctgatcacctccttcagtaacctttcaatttacttccagaaagggagcctgcgccgcctgatgcgcgaggagccggaatataaccgcatcgcgacctatcagtcgatgaacgacgcctacgtggtggaagactacggcaagtgcgccctgatcgaagacctgaaattcgcgccggagccggaatccgccactaatgcaggtgcagctgcataa

SEQ ID NO: 382303 - DNA, 837 bp, Salmonella enterica
atgggtagcgcaaacaaaccagcccgcaaaaaattccgtgtcgccgtttccggttcaaccattgacggacgcgaaatcagtggcgagcacctgaaggcagcagcgaaaaattacgatcccacggtgtatggtgcgcgggttaacgtggaacacatcacctcccctttccccaacagcgacctttgcgctatgggtgatgtgacagcactgagtgcggaagatatcaccgaaggcccattgtctggccgtaccgcgctctatgcggaaattgagccgacagaccgcatgaagaagctcacggacgaaggcaaaaaaatctactccagcattgaacttcacccgcaattttcactgaacggcaacccctacattgtgggactggcaatgacagacacgcctgcaagtctgggtactgaacgtctgaaattcgcggcacagcaacgcgaacaggtgatgaagttcaataaccagcacaccgaagcgccaatgttcaccgaagcgatggaagctgaaattatcgaactggcagagcagcgcagcgaagaaggcaaacaatggttcagccgtgtcatggagttggttggcaaaggacgtaaatcagacagcgagcagttcagccaggtacgggaagcggtggaaggtgtggcgcagtcacacgctgaccttctcgatcgctttaacgatatgtcgcgccagcacgacagcgaccacaaaaccatcgaaaaactgaccgccgaactgaccacgctacgcgaccaactggcaagccaggacggcgatacaaaagaccgtttccgcgcaacgggcggtaacgccgcagaaatgcccgacttctga

SEQ ID NO: 382304 - DNA, 1734 bp, Salmonella enterica
atgattcaggatgcttttgtacggctgcgggctaaacaactttactggcagggatacccgccagcggaaatctcgcggctgatggggataagccagaacacgatctactcatggaaaaaacgcgatgaatgggacgaaacgccgcctgttgcgcgcgtcacgcagtccattgatgcccgccttgttcagcttacaggaaagcccgataaaaccgggggagattttaaagagattgacctgctcacgcggcaactgaaaaagctgagtgacggccagcccactgacgcgaacggcacaaaaaagccacgcaaacgtaaactgaaaaatcacttcaccgaagagcagattatcgcgctgcgggaaaaaatcatgggttcgctggcctggcatcaacgcggctggtatgagcagcggcatcaccgcaaccgtatgatcctgaagtcccgccagattggcgcaacctggtattttgcacgcgaggcattacttgatgcgctgcgggatgatgtgaaatacccgtatcagcgtaaccaaatctttttgtcggcatcccggcgccaggcgcaccagttcaaaggctttattcaacaggcggcgctggaagtggatgttgaactgaaaggcggcgacaaaatcatcctgtccaacggggccgagctgcattttctggggacgtcagcggcgacggcgcaatcctatacgggcaacctgaaattcgatgaatttttctgggtcagcaattttatcaatctccgcaaggttgctggggcaatggcaacactgaaggggcttacccgtacctatttttccaccccatcaggcgagacacatgaagcctatccgttctggacgggagaccggtggaatgaaaagcgccagaaatcgaaacgccaggagtttgacgtgtcatggaaggcgcttaacagcggtattctgtacccggacaaaacctggcggcagattgtcaccctacaggacgttatcgatcacggctgggaatatacagacctggaagagattcaggatgaaaacagcgaagacgagttccgcaatctgtatatgtgcgagtttgtccgcgacggtgagtccgccttcagcctgaactcgctgataggctgtggcgttgacggctacgacgactggccggactggaagccgtttgcgccacggccagtgggaaatcgtcctgtctgggtgggttatgacgccaacggcagtaccggcaacggcgacagcggcgcgctgtgcgtggtggtgccgcccgccgtacccggtggcaggtttcgcaccattgagacaagacaggtgcgggggctggagttcgaagagcaggcgcgggtgattgaggatattaccctgaaatataacgttcagcatattggcattgatgtgaccggcggtaatggcgatgccgtgtatcagatagtgaagaagttcttccccgctgcggttccctacaatttcactctggcatcaaagcgcgcgctggtcatgaaaatgcttcaggtcatacgtgccgggcgatgggaatatgactgcggcgataaggcgcttgtgacggcattcaatgcggtacgaagaatcaaaacgcaggccggatttatcacctacgacacggaccgttcgcgcggtgtcagtcacggcgatctggcgtgggcgaatatgctcgccatcatcaacgaaccgcttggcgatgaagacggcgcggtcaagagtcttgttatggagttctga

SEQ ID NO: 382305 - DNA, 186 bp, Salmonella enterica
atgctaaatgatgatgaagaagagcagcttatgcaggaatggtcgctcggtgattatgataatggtgaaaatggatgtccgcattgtggccgtcatcgtttatgtatctgccagaatggaaagcacagatgtgaaaagtgcaattggtccccagaacttaatgactacgtgccgatcgagtggtag

SEQ ID NO: 382306 - DNA, 411 bp, Salmonella enterica
atgcatagttttatactcgacctgacgccggagcgctgggaaaaactgaaatccagtcccgcaaatttcccgataaccgaagccgatctcccgtctcagccagagccaggagacacacttattatcaggcatctgctacccaacaaaagaggaattatcgatcttggggattgcgtcattgcctgggcggaacctgtagccggtaatccccatcactaccggctgaaagtgaccttcaacatgacgccggaacaggtaaaacagcgctatggttgccgttgcacaaaattgtcgtcgatattgtgccggcacaaagagcaggaagcagaaaaagagcgggctaagtgggaaagaaagcgccaggtactggcccataaggcagaaacagccgcacggtatctgaaaaaataa

SEQ ID NO: 382307 - DNA, 2505 bp, Salmonella enterica
atgaccccttctcgcggacgctgcacaccaacacccccaccgccgttttccggcaaagccccggacacgactgcttacccgtatccgtggaacagcccggactacgacgccgcagcggcaaatgaacttaccccggaacctgtcaccaccagtggcgaccagggcgacccgttattgtgttttgaatatctgacgccagacggcgaacgccgcacgctcacctatgacgatcttcaggagttgtgcaacacaaccccggaaaatcgcggccttattgagcaggaaaaagccgccgaaaaagagcgtgagaagcgcgaaaaatacctgcgccgccgtctgcaatcactgccggggatcattcgccgccgttttgccctgaaactggccgcactcgacggggaaaacccggaaagtgcggttaagtggctgtttggcacctttgaacgccacatattgcgtcgtgttgagatggtcaacgtgcagtattacccgtgtgacacactccccgctctgttgttacccatgcgtgacgacttccatttactgccgtgggccgacaaaaagaaactcagacgcatggcctacacgctttccagactcatgaaaacggagtttgaaagccagtttgattaccagtacagccagaccgaagacctggacttctccgtactggacgcttacggctatatcgccagccaggcaaccgccctgaatattgcgatccccggatgggataagtacagcaaagaagaactcgacgccgaagaggcgttgcgggctgttggtcgtctccaggcggaaaaatggtggctgggtaagctgaagcgtattcacgaccgctggcgcgaacacctgatgattgcggcgggttatgtcagtaagcaggcctctccgaaatgttcggagccctgcctgaaagaatggctggcgcagcaaaaggctaacatggcctggctgcacaaaatggatctggaagacagggacaccggcgaacgctcgccgctgatcgataaggtgctggcgagcacgtctaacccccaaattgcccgcatggaactgcaaacccgtgcggcaggttttcaggatatcgctgatgaaatggggcttatcgggatgttctacaccctgaccgccccgtcttcgtaccattcaacccgcatcaaagacgggaagcgcaacgacaaatacaacggggccagccccagaaagacacaaaagtatctttgcaaagtctggtcgcgtgttcgtgccgcctggcaacgccggggcattcgtactttcggttttcgtaccgtggagccccaccatgacggaacgccacactggcacatggtgctgtggttcagacccgaagatctggaaaaagcaacaacagtgtttcgcacgtatgccttacaggaagacggcgacgaaccgggagcagaagactaccgctttgaagcggttcaggaagataaaagccggggccgcgccgtaggctacatcgtcaaatacatctcgaaaaatatcgatggtcacggccttgatggtgaagtggacaaagagaccggacgaccactaaaggaagaagccagacgcgttaaggcgtgggcctcccgctggaatattcgccagtttcagcaaatcggcggcgcacccgtcactatctggcgtgagctgcgccgcctgggcgatcgtgaactggtcttacacccggagatcgaagccgttcgcgccgtggcggatgcgcctgactggcaacattacaccatgtaccagggcgggccgttcgttgcccgcgatgctctcaccgtccgcctgtactacagccacaccgaaaacggcaatgattatggcgacacggtatcaaaaatagagggggtttacagtccgttcgcggacgaggaagccatcgtctacacccgcaccgcaagctacaacatcgtgccgaaactgaatccaacgcagggcggggttttgcctttaacaggccgcgaagcggccccttggagttctgtcaataactgtacgcagcccccgaaatccggcgaaaaaagcgacagtaagccgacagaacttccgcgaaatattgacgatttacggcgatattcccgccagcaaaagcaggaaatcatcgaccgcctgaaacgtgaaccccggttaagtgcagatgaagccttcactgccactattcagcacatgaaagtgaccgttaacgacatttccgctacccagtgggggccggaagtgaaagctgcataccgcgaatttattaatctgacgccggaagaacaggcggaacactggcggaaaaaactacacgaagaggcgctgcaacgtgcggccagctacgccagcgccgatgccatctaccagcagaagaaagccgaagccattcgtgattcagaacaacgtactgacagcaggaaacaggaacgccggatatctgaaacatccggcgcccaacgcaccctgcacaacctgttatcccgctggcagaaaaccacaagggggaaaaatgcatag

SEQ ID NO: 382308 - DNA, 1119 bp, Salmonella enterica
atgaccgccaccgcctactacaacgaaatagatccttttgccgccgcctggctgcaaaaccttatcgacgctggttgcattgctcccggcgtagttgacacgcgctcaattgaggaagttaccgccaatgaccttaaaggattcacgcagtgccatttcttcgccgggatcggcgtctggtcttacgccctgcggtgcgccggatggcctgacagtcgccccgtctggacaggttcctgcccctgccagccattcagccagtcaggaaaacgccggggattcaatgacccccgccacttgtggcccacatggcgccagctcattaaggagtgcgcaccttacgttatctttggtgaacaggttgcaagcaaagacggcctcacatggttcgacgctgtacaacttgacctggaagaggcggagtacgccgtcgctgttgtcgatctttgtgctgcgggcttcggtgcgccgcacatccggcaacgcctattctgggtggccgacgccgacagccaatgcatggaaacacccgtcgaatgcggggagagagaggggattgaatttgcaaacggctgtagccttatcgggatggactacgccagcagcgagcgacggaacgcggggcggaaccgggattactccgggtatgtcaggttccagtctggcgcaattgtcgaaaatggcaggctggcccaccccgacaacgacagcagggaaaggcggttatcagggtggcaggattcgcaacgggaagttgtcaacggatcgtctggatgtggcggcacagatagcaggctggcctacgccgacaacgagcaacgaccgctcaccctgcccgcaagaggccatgaagacatatcgcgacaatggaacaaaaattcagaagcgattgcaggatttagcagcaacagcggcgccagtccggttaacggcgtctggcgaaatgctgactggctgttctgccgggatggaaagtggaggccagttaaacccggagttaagccgctggttaatgggactcccggacgcgtgggccagttgcgcgcctacggaaacgccatcgttgcgccggtcgcagaaacgttcataagagcatacatggaagcggtcacgccatga

SEQ ID NO: 382309 - DNA, 504 bp, Salmonella enterica
atgctgaaatattacgaagactggataccggaagaagaagagtcactgataagcctgtatccggatcatacttttcgcgagatagccacacaactgggacgtactaaagccgccgtccagttcagggcgatccgtcttcggcgtgaaggacgcctgggtcataaacgtcaccagttcacaccggaacaggacatgtttattcggactcaccgccacagcatgacgctgtcagaggtggcgtctcatctgggaagaaagagccgcacggatatagcaaaccgcgctaaaaggctgggtgttacttactgtaaatacggtgacttaaaccctttaacaaagtattccgacagcgacgttggactcattcgcgctttacgtgatgacggcatgacattttcgaaaatagccgagaaatttgaaatgcctgagtcaacagcaagatcgatctatcacaaacgatttaccgccgctgacgccatcgcaagggagtacctgccgcgatga

SEQ ID NO: 382310 - DNA, 966 bp, Salmonella enterica
atgaaaggcatcctgaatcaacgttccccgctcaagtgggcgggcggcaaatttgatgttgtgccgcagctacgcgagcatttacccaaagcaggctacctgatcgagccgttcgtgggtggcggttctgtcttcatgaatacagactatgaccattacgtattgtgtgacagcaaccccgcgctgattaatttctacaggttcctgaccactgacaccacggcgttgatagatcgctcatggtcgctgttcagggatggcggcacacgcgaagcctacgaacgcaaccgccagacgtttaataccatcacccttgcgaccgccagattacgtggtgaatatctggaatgggcggcgctgttcctgtacctgaaccgccacggctttaacggtatgcatcgcaccaaccagaagggtgagttcaacattccattcggcaagcacagcctgccgtacttcccctatatggaaatgcgcctgtttgccgataaggcacgcgagaccatgacccgctttgtttgtgctgacttccgcataacgatgaaggcgcttcctgatatctgccacggtatttcgttccatgcagataagctgtctgacgccgttatttactgcgacccgccctacctgccactgaaagataaagacagtttcacccactacaacggtaaaccgtttacccgcgaagaccaccggttacttgtcgcgcatctgatacaggcaaataagctttacggcgttaagtctgttatctccaacagcgacaccgaagagacccgcaagatctattcgccgttcgaacttcacaccctgaacgttcaccgttctgtcagtggtaaagccagttcacgcaagccagtaaaagaagtgatcggcgtactggatggccgggagaggtacgtaagcgcaccacgccgggcgggaaaagcaacagtcatggcgcaatggagggctacgtcatgctga

SEQ ID NO: 382311 - DNA, 240 bp, Salmonella enterica
atgaaacccgcctttatctgcattctgtgcgagaacgttgccaccggcgatcagtgccgcatcagagagcgtcacattaatcctgaccgttcactactggacaacatcaccggcccggatgatgaacgctttatctacctgaccgacggcacacagctacgtgcccgcaacatccgccgtgaaattacgatcgaacccacaccattcatcccgaaaaaacagcagggaggccagcaatga

SEQ ID NO: 382312 - DNA, 534 bp, Salmonella enterica
atgctacagatgaaatttaaaccccgctttattgaagcgttccgcagcggtcagaagataacctcgctgcgcatgatgcagtttaaatgcttccggtcagacagagaggacaaagaggaatattttcacgacgacaccctgactaaaaacataatcattcctgactacagtgctgacgcaaccatgtggtttagtaaaggtgcgagatttacccacatatcggactttgccggacttctgaaaaggcaaccctaccagactttgagcaatatcgaactggtcacagaaatcgaaggcggcgaaacagtgccgtttgccgttgcctttatcaacgatatttccgttatcaagggcgaccagataactgacgaacacgccatcagggacggttttaaccctgaaaatcatcccctcgccgaactcttcgtattcatgcgggacgtttaccccaacaaagacccgttaaacgaaatgtactggctgtacacctttaccaacattcagatgttatctcagtggagggctgacgcatga

SEQ ID NO: 382313 - DNA, 258 bp, Salmonella enterica
atgaagctaatcatccccgatcgctaccgccagaacaggaagaagccacggggaaagccggaacgggcagcaagagtggcatacaaccgtctgctgaatgatgactggtcgcatgtgcgtcggctggaacgagtaccgccagcccgcgtaatcaacgtcatgtaccgctatcggctgttaagtctggacgaaggccagacatgggaactgcttaaccataacgaatacgtgaagaggattagacgatgctacagatga

SEQ ID NO: 382314 - DNA, 441 bp, Salmonella enterica
atgattaacccagataaaaccctttcccaaaaagcattagccggggcgtcatttttgcgtatgcatgccaaagcaatggctggcgacgatgatttttttgtcgcgataatgtctgagcctcacaccatcgccgctaacgccattgaacagctcgttaaagaaaacgccgaactccgcgcccagctcatcgcctttcagaaagcggctaacgctaccgttgcatttgacctggcaaagaaagattccgaacacacctggtacaccacattcgcaaaaggcgctcgcgtatgcctgagagctcacccgtaccagcgtggaacagtgagcgatacccgcattgatgatcgtcgcggtcatttgattttcgtctgttttgaatccgagtttgaggaagaccgctgggtaaaggccaggaacctggaattagtccccaacaaatga

SEQ ID NO: 382315 - DNA, 192 bp, Salmonella enterica
atggacaccaccgcaaggcaaagaattgtagcagccggaatcatcacaaaagcagcagagacactgcaaattgccaatatgaggcttgcaaatcatgaatatctggttgtctccgcagaattaatggaaacagcaaggagtttaaaaacagtagcccgacaattaagggaattacacgacctgactgaataa

SEQ ID NO: 382316 - DNA, 204 bp, Salmonella enterica
atgaatatcagttattcattcaccattccagaatcaatagccgttatatcactggccgcattaattatgtttatggccgtgtggatattgatgttttttgacacatggagacaaagaagaaagtattcacagcttaaaaaacaaatgaatttaaccgaaaagagggaaacaaaatggacaccaccgcaaggcaaagaattgtag

SEQ ID NO: 382317 - DNA, 243 bp, Salmonella enterica
atgaggaaacatacagcagaacaggtaaacgagttcttgcaggggtatcacttcgataatgaagttaaccccagagccaggaaaacacactttgaagttatgaagtgcggaatatttagtgtccgcaataccttgttttactcaaaagatacagatgcgagcaaagaccttaaagaacttaactggatgacaaaacaattaactgacggcgtcgtccccgaccccgccagaattacggagtga

SEQ ID NO: 382318 - DNA, 399 bp, Salmonella enterica
atgaacacattaattaaaaaagtccccatcgccagagcgggaaagataattgacggtcgcgaaatcacgcggtcaatgcttaagcattgcgtagagacgtttaacactgattattatcagccgaatataggtgagtttattgacgatccaatggagacagtcaatattaaaaatcagggaaaaatagaacgcctgacactgaaagacgacactttatttgctgatgttgaaatgtacatgtccatagccaatgtaaaaaagttgtgccagtttccggctattgcatacatggaacacgaaaaccccaaatttagtgcattaatgtacgtaattcttgctaaaagacccaaccgtgaagactgcatcgcccttaaagattgcgaaatgagagagatataa

SEQ ID NO: 382319 - DNA, 408 bp, Salmonella enterica
atgcaggaaaacgctcaaaacacagaagccgtcgctggcaaaacagctacagcggaacagtctgttaagaagacccgtaaatcgccagaacgcgaagaaattcgcctggcaaagaaccccgcgaaacttatctcgaaagaaggttttgcgctgtacatcggtaaaaccgttgatgccgtcgtggcgatggcgaaagctgctaaagcgcccgccatctacatggctgacccgttaaaccctggcggaaacgcagagctttattttgatcgcgaggagtgggacgaggcctgtaggcaactagtcgaaagcgcaccacctgaatggcacgactggcgcaaccgtctttttctgttcaagccgacaagcggcagacggaaaaagaaaactgacgagcaacaggccgcttaa

SEQ ID NO: 382320 - DNA, 297 bp, Salmonella enterica
atggatattcctcaaaaaatacgtgtgatgcgtaaatcagaagacctaacccaaagggaattcgctgatataattggtatttcttattctgctctgaccagttatgaatacggtagaaacctcccaggccttgagatcactatcaagctattcaaacaccctcgcttccgtaagtaccgggattggttcctttttgatgagatggagcctaaagccggacaggtgattccggccctcgcgcgcgttgggcaggacgaaacggaatcaccccattacgggagcaattctggggaataa

SEQ ID NO: 382321 - DNA, 1008 bp, Salmonella enterica
atgtcgattaagaagctcgctgatggtcaatttgctgtggatgttcgaccggctggaacggatggaaagcgtttcaggcgtaagtttaaaacgaaaagcgaagcggtgctttatgaacgtcatgtgttgcagtatcaccacgataaagactggattgataaaccagtggaaaggcgaccactgtcagacctgctcgatctctggtgggcgtatcacggtaaaaatcacccctacggtgagatagagcgggtacggataagagcggtgattaatgatatgaaatccatcaatatcacccgaagcgatcagctaacccgcaagggtattattaattaccgtttgctgatgctgaataagggaattaagcaatctacggttaaccgttattgcgcaatgatgagcggattctttaccaagctgattaacgttgaagagtacagcggtaaaaatccgttccatgaagttaagcgactgaaagctgaacagaccgaaatggcctatctgtctcaggatgaaataacccgtttattggaactgctttccggcgatgatctcaaagcagtaatggtttgtctggcgactggtgggcgctggagtgaggtgactggtctgaaaggtgagcatgtgatcggagggaaggttgtatttatgaagaccaagaacggtaagcgccgggctgttcccatcgatgccgaactggaaaagacaatcaaagtgcgtaccacagggctactgatgaaacccagttatactacggtacgatctgcacttaaggaggttaagcctgatctccacggccaggccgttcacgttctccggcataccttcgctacgcattttatgattaacgggggtaatatcatcacgctgcaacggattttagggcacgctaccattcagcaaacgatgacgtatgcgcactttgcgccggactatttacaggacgcgataaggttcaatccggttgcgggagtgtccataaattgtccacaaactggaacgaaatag

SEQ ID NO: 382322 - DNA, 276 bp, Salmonella enterica
gtgagcgatctcattaataatgagatctctttcaagaaaaaaaagcaccattcttttggtgatatgtcggaaaatcgtttctggctgttgattgaaatttcacccattcacagtgaaaaagtgattgccgcgttaaaagatcatcttgtgttgggctacacaaggcgggaagcatgtgagcgcaatggagtggcggttggatatttttcattaagtctggcgaaaattattagaattgaaaatgcggttacattactgaccatgtttcaggaatga

SEQ ID NO: 382323 - DNA, 831 bp, Salmonella enterica
atgcaaaataaacagtcattgaatatcacggagtgtggcatattaaacgttgtgacgcgttatcaattctcaaagaaaacaatgttgctgttgatgacgtggtgcatgttgagtatgtcttctttgcaaagtattgctgcggagaaaataaaggttgaaaaaaattctcaggagtttggtgttaagttgggagtgagtcgacttatttattcaccgggttcgatggggcaaagcatatcggtaagtaatcccagggattaccctatgctggtccagtctcgggtgtataccgaggatatgaaaagcaaagccccctttgtggtgacaccacctctatttcgcctggatggattgcaacagaataatttacgtattatccgtactggcggggactttgcgaaggatcgcgagacactccagtggttgtgtgtaaagggtattcctccgaaagcggatgacttatgggctaaagataaagaaggaaaacccgcggtaaataaggctgtttcattgaaccttaaattatctgtggataattgtattaagttatttgttcgtccggagagtattaaaggtcatcctgatgatgtggcatcatcgttgtcctgggttcgccatggttcgcagttgaaagcggtaaatgatacgccgttttatatgaatttgtcatctttaaaggtcggtaatactgatatttcagatatacactacgtgccaccattttcgtcatatacattcgctttgcccaaaggaactgcgggcaaggtttattggaccgttgtcactgactatggtggtgtgagtaaagtgtatcaggcagatattaagtaa

SEQ ID NO: 382324 - DNA, 2676 bp, Salmonella enterica
atggaatatggcttgatgaaaaaaatcttctctaaaaaaacatcggttgtacgtttggtttatagtcctgtagccctggctgttagcacggtttttatctgtgggatgtacagctctggtgtgcaagctaaatattacactttcgatgcttctcagttagataagggtgggaatgttgatatttctttgcttgagcagggcgctcagtttcccggtacctatctggtggatgtgatgcttaatggtaaacgagttgactcacgtgagatggcctttcatatcgagaaagatgcaaaaggtaatccgtttttacagacatgtttaacacgtaagcagttgatggattatggtattaaggtggatagttatcccggattatttccggtcctcaaggggggggatggcagtggtgcaactcggggggctgactgtgcgcggatatcagcgatcccccaggccagcgaaacctatcagttcaacaatcaacagttgttactgagtattccacagattgcgctgcgtcctcattatacaggtatcgcacctcaggcactttggaatgatggtatccctgcatttttgatggattaccaggcgagttcttttcgttctagctatcgtagtaatggagcaacattaaacacaaacggtatggatgttcagttattgcctggcttgaattttggggcgtggcgtttacgtaacctgaccacctggcagaagcagaactcacagaagggaaaatggcagacctcctatacctatgccgaacgtgggctgtatagcctgaaaagccgtttaactttgggtgaccgattcactccatccgatgtatttgacagcgttccgtttcgcggtgggatgattggatctgatgattccatggtgccctatagccagcgagcatttgcgccggtagtgcagggagtcgccctgacacaagcacgtattgaagttaaacagaacggctatgtgatctataacactacagtggcaccaggcccctttgctttgtcggacctgcctggtgttaatggaggtggtgatttgcaggtaacggttttcgaggcggatggaacccgtcagatctttaccgtgccctataccacgccagcgattgcgttacgccaggggtacctgaaatacaacgtaatgatggggcaatatcgctctgcggatacgtcggtcgataaagagcctgttggtcaggccaccatcatgtacggtttaccctggaacttaacggcttacagtgggggacaatgggccagtcattaccaggcgggcacgttgggattaggagtttccctgggagcctttggtgcagtatcggtggacagtacattatcccgcggacagaagcggaatcaggatgtagagcgtgggcagagctggcgtgttcgttatagtaagtcatttgaaagcaccaataccgggtttacgctggccagttatcagtatgcgtcgccaggttataacacattatctggggtactggactcttatcgctcgggtgaggcctggccctcaaaggaatactggtatccaggggcggggtaccaatcttcctggaataacaataattttgcagataaacgaaagtcacgtaccagtgtgacgttgaatcagccgttgggtgaatggggtgcactttattttagtggaagtagagaagattactggaatcgctcgcagagtcaaaatgaggtgtcagcacgttactctggcccaatgatacagggcatttcctggtcagtagactggacccaacgtaaatggaattactccatctatcgtggaaataacgacaataagactgagcagtctattaacctgtggattaacgtaccgttaaatcgttggctgggaggcaataccagtgtttcttaccagatgcaaaacagaacaaaccagggcacgttacataacatgggattgaatggttatgcctttgaccagcgattgtactggaatgtaagtgaacagatagcacaggggggaacaggtagcaaccagaacagcagtgacctgaacttacgctggaatggtacctacggtgaaatcagtgggggatatggctaccgtaaaaacggtaatcaggtaaatgccggggttcagggaagtatggttgttcaccgggatggcgtgacgtttgggcaacgtctggggaaaacggccgccctgattaaagcgcccgatgccagtggtgtctcggttattaatgctgcaggggttaaaacagattttcgtggttataccaccctggggaacctggctccgtaccaggagaatatcatcagtttgaatccggtaactctgccagcaaatgtggcgataccgcaaacagataccagggtagtgccaacagaaggagctattattccggcgagttttgcgacacgggttggtgggcgtgcactgattacactgacgcaggtgaatggtaagcctgttcccttcggggctgtagccagccttgtgggccaggaggatacccggtgggatactggtattgtcggagatagtggtgacgtatatatgagcggtttacccgaaaaagggcaacttcaggtgatgtggggtaacgggcagcagcaacactgtcgggccgactatcagttattgaaaagtgacgaaattgcaggtgtgtcaaatctgaaggcattgtgccggtaa

SEQ ID NO: 382325 - DNA, 438 bp, Salmonella enterica
atgactcagggtgtaataaagagggggatggtagcattcgttatctttggggcggtatatgctcatgctaacgatgatgtggacatcacgctaaacagtgcactgaatttaaattcgcaaatcagagatggccaactcattggctatggtcgaatcagtactcagcaggcgcacagtggataccaggtgtggctgaatgctgaaagaaatggtgagtcgccagatcggtatgtgttaaccgggaaaagtaacagacaacataaattgtacgtaataattggtcagaatggctgggtgccggataataaagggggggagggaattataaaacgaacccgtgaaatgcaggaacaatttgatattgtggcaaatggtcatcagagtgtgccagtagatacctatgttattacggtgcagggtcgttattttgagccgtga

SEQ ID NO: 382326 - DNA, 216 bp, Salmonella enterica
atgcgtgctatatggaaagttttgtgctgctcatgccagtacactggtggttgcggtaatatatcccaaaacctaataactgttttgtatgaggttaatttaagaaataacgaaacaggcttattttctgaatattatcgtatggtatgggcaggctgggcaccgaatttaatgaacacgggaccaccggtgtggttgactatcaccggaagatag

SEQ ID NO: 382327 - DNA, 468 bp, Salmonella enterica
atgaaaaagactgcattatttttagctctctctctgggtggtatttgtgcggctaacgctgctacacaggcgacctcaaccgtaaccatctcgggagatgccgtatatagtattgaagcacagcctgcaaaaattttaggtacctggcttggtaaggatgctaacgtaggtggattcattgttagcaatgcgggcccgatcgagggtaaggcggaagtggtatttgatggtgcaaacatgtgccgttctgagagctctacaagcccgtgttatattgacaagaccgatccaacaaaaaacattcttgtttatgctgagggactggactgggctgatgctaccggctttactaccccggtgattcaagctggtgctaaatctactattaatatgaaggcaacgcaagaacaaacgttgaagcctggcgtatatgagttgactgcgagcattcaggtagcgactaattaa

SEQ ID NO: 382328 - DNA, 660 bp, Salmonella enterica
atgcgccaatataagttggttatttttctgtattcaatattagcaggaacagcgtcatatgcggcggacagtacaacctgtgtgacactgaacaaaacagtgaccagcgacgtgcaggaaaataccacgattgtggaatttttctccttttactgcccgccctgttatttcttttctcagaagctcgggattgacaaagctatccgtgacagcctgccggcagggcagaagatggtcaaatatcatgccggttttctgggggagttgggggatgaactgacccgggcatggtcggttgccatggtggccgatctggaagagagggtagagccgttactgtttgatgccgtcatggtttcccggacgctgaaaacgccggaagatatccgggcggtgtttgtgaaggccgggctttctgcagaggagtatgaccggatgctaaccagtcaggaagtggccagtatgacggaaaaacagaagcgtctgtttaaggaatatggcgtgacgggcacgccgacggtgtttgtcaaaggccggtaccgtgttgagaacggcgcgtttcaggcgaacagcctggaagggtttcgtgatgcgtatgtggctgcagtgaaaggcctgctgaatgatccggtcacggtctgtacaccggagaaaaaatga

SEQ ID NO: 382329 - DNA, 1230 bp, Salmonella enterica
atggcaaaaatcgctaagaagctcactgacactgaaatcaaaagcacgaagccagccgataaagaaatcaacttgtttgacggtgatggcttgatcttacgaatcgctcctttgtcgaaaggaggcaagaaaaattggtatttcaggtatgcagtgccagtgagtaagaaaagaaccaaaatgagccttgggacctaccctcacctcacactggcaagagcaagggccttgcgagatgagtacctctccttgcttgccaatggcattgatcctcaagtccataacaacgataaggctaatgccttaaagaatgctactgaacacactctccaaaccgtggcaaggaaatggttggatgagaaggtaaagacctcaggtatctcacaagaccatgcagaagacatctggcgaagcctggagagaaatatctttcccggattgggtaatgttcctgtcaatgagatccgacccaaactcttaaagcaacatcttgaccctattgagcaacgaggagtcctcgaaactttacggcgaataatttcccgattaaatgaaattttccgttatgcagcaactgaggaacttatcgaatttaatccggctgacaacctggggcaacggttcagtaagcctaaaaaacagaatatgccagcattacccccttccgaactcccccgcttcctggttgctctaaacaatgcttctatccgtttagaaacaaggctactgattgagtggcaacttctcacatgggttcgccctggtgaagctgttcgcacaagatggactgatatagataccgataactcaatgtggaacattcctgctgaatttatgaaaatgaagaagccccataaagtcccactgagcaaagaagctttgagagtcctggagtcaatgaaagccatcagtgggcacagagagtgggttttccccagcatcaaagctccactcaatcacatgcatgaacaaacagcaaatgcagccataatccgtatgggctttgggggtgaacttgtcgctcacggtatgcgatctattgctagaacggctgctgaagagagcggtaaattcaggacagaagtgcttgaagcggctcttgcacactcaaaaaaggatgaaataatagcagcttacaatcgagcagaatacttaacagaacgagttgctcttatgcagtggtggagtaattatgttcaagctcaaaggctaaaagccattgcagcttaa

SEQ ID NO: 382330 - DNA, 3150 bp, Salmonella enterica
  misc_feature (3069)..(3078): n is a, c, g, or t
atgagtgaaaataaactgtttgataattatgagattatagaaagaaatctactaaaaacagaatcaaataaaaatattcctgaagtaattcttacccttaaagatggagagagttacattatcaaacattggccaagaaatacctcaagtgatgaacaagttcttgaaagtatttggcaacatgaattacgacaactacaaaggttaaagggatatcctggagtaggagattatatagtaaatccagttgaatcaaaaaaaacaaatgaagggtactatcttgttttaaattctgatggaagagtacctacttcttacttattgaataaaagaacattatctctcccaagaaaaagccactggctcacccgtttaaaagatccggcagttagaatcagattctggaaaaatatctgtagaattacaaatgctattggtttgcttcatgcgcaggggttgttacatcgacatttagatgaaaattcaattctaacatatgattatgaatcagatgattataacgattttcaattgaccggattcgagtggtcaatccgaatgcctacacttaccagagctaaaattgagcctgttggtgaacacggtaaaatatcaactttcgctacagattggatcgatttaggaattttaatagcaaactttttaaaaatagatataaatgaaattaaatctctgcagttcccagcagaatacttcatttctaagtacgatctgacaattagtgaagtagctataattcgtagtctattaggaatccaacctattcagcaaaatgctataaaagaacttcttggtgaaaaagatattctacagtttttagatggtataattgatgagcttactgaattctataaaaaaacgaaaactattcatgggttagcaataaacactaagtatgaacaatctgataataccaaagataaaaaagagctatttcactgcatacaaaaaattatctttgagaaaagtgaattcacaatatccagagatgactctgatataataaagagtttcgtaagcgaagatttatcagattcaccagtattatttgtcaatacctcagaacacaatcgatatgatgtagtattgaaagggaaagaacttttttatgtactaacaccatttcaacctgaccatcgaacgagtgacaaaacatgggatttaggttattcacaatatgcatatttagagttgccaaatagattctttggtaaagataattacattgaactgaatagtaataatatatcatgttatactcattacgaagccaggaaatttttgaatagtaatgataactcattaagcctactgtcttgggaaatgattttcaaagatataggtaaaactaaaaacaaaagaaatgaagaacatcttcgattattggagggcctaactgccgttcatattacaaatatcgcatatgcaaaagcagaaattttccctgtagaaaacatcagtgaagaaagcgaaccagataatattagctcatggatctttaaattcattcccaaatttgacgaaacaacagaggaactgtctaagtcgctaagtatcgactcaccatctgtcaggcttgaaaagattataaatagtagtgaaaacaacgataaggtatcctggagtttagtagacaataatgatttcagcagagttgacgaagagattctgttagagttttatggctatgaaacagatcaagacaatcaagaaatatatagcttcatctctaaaaaacctcttccagaatggaggaatttttatattgttcccgactcgattgaaggaactttgcgccaaataacaagacatgcaaatacattggatatgcttgaaaatcatatcgaattgatgaatgtaattacttcccctaattcaaatctcacagtaagcaatgaagatataattgcaaaagatataatggactcattggatgaatctaaacaaagagtttttacaaaagtattatcaacattgccaatgaaccttgtacaaggtccaccgggagtaggtaaaactcacttagtcaaagcaatttctaaatttatctttaaagaagaacctaatagcaggatactctttactgcacagagtcatgcaaccgttcaacatctatatcacgaagttgtcaaagatttacttactgaaaataaacatacaaatgatcccataattattagatgcaacaaaatatctggcgaagataatataatattaaacagtgccgatgaaactggattagaatatttacggaagttcgtagaaagccctttatacaaaaactcttccaatcaaagtttaaaaagtaatatttccagtttgcttaaagctcctccagtaaagagatacccactaattaatcaactaattaaatcagcaagcttaatatttgctacaactaattcagattatgtagagagaatgataaaagaaagagcacaatttgattggtcgatcatggaagaaagtggaaaggttacaggtatagaattaataagcccacttttattatcctaccgacgattaatgatcggtgatcacaatcaattgccaccgtatcgttcaattgagttaagaaacattttaaccaataatacaaaacttaaaaacacctttgaagaagttgacagcataagtaattttaaattaaaaaatgaactaatgcgtaatagtcacttttcatcaataaccgatgatcaagcaagagaaataggattacgggcagccaaatatgtaaatctatttgaatctcttattattgatgatgaaagacaagacgtaatgtatgaaaaaataaagggaaaagattataaaagaaacaataaattatcctcaatgctgtcagtccagcaccgtatgcatcctcatattgcagaagtgatttcgaatgttttttataacaacaaattagttaccgataaagataaagaaaggaagtatcttacagaagattttcaatcagtacttaacttaaaagaagaatctcacctcacaaatacaccagcactggtatggattagtcaacctgatgtacaaaaaactaaaggnnnnnnnnnnaaactcaaggtcacagagcaggagagcatacaccaatctggtcaaacgaaagtgaatgtaaggcaatcatag

SEQ ID NO: 382331 - DNA, 1818 bp, Salmonella enterica
atgaaaaataaaaacatatatgttaaaattccttttcattatggagttcataaattcaaaatatttaaaggccatagatggggagctttggatcattttttacttcaagagattagccttcaaccctatcctatagaagagctatcattaaaatctaatcttccacaacggctcataattgaaataatattgccatttatgaaattgggttgggttgaattagttgaattgaattctaaatacaacttcaggattaccagcaaaggaaagagtgttgctaatcgtgaggaactcccttatgaaagagagccactggaatctactcggaagtttttaatagatccaatcacagcaaaatgttatcgagtaaatgcaagaaatcaaaactatcagatatatcctacaccaagagcaaatgaattacttaagaataaacactcgatatcaacagaactcaaaattaaaaaccccaaacattcaccgttcacatcagacattctaaattgtgttgaagatactgacgaagaggttatagggtatgaggaaagagctaatgatagaccttattatcaaaatagaacttttgctatagcacaagttgatgaagcagataacataacgggtgttccatctgatatatcaaaagaattagccgcagatattatcgctgcagctaatatgaaacgaagtgaaataaatactaatatagactctcttagccagaactcaaaaataagtatttataataccgagtcttttgaaaatagatttgaagaacactatattaatgaaactgaattcctaataatatcaggttcagaaagccatcgagatcatcttatcgcgatgatcgataaatctgttagtagaatcattatccattcaacttttatacacttaaaaaactttgaatcaatctttcagaaattaactgatgctgctaaacgcggagttcaagttgatattttatggggccaagaagaacccgatgatgagagaagtatcggaagttataaccaatttcttgagggccttaagtcttatagagaagaaattataaagcttggattaacctctctttttacaatacattcagatccaacaggttctcatgcaaaggttatagtatgcgatacaatggaattcggatattgttcaaccatcggttcatgtaactggttagcaagtggattcaataggtatgaatgctctgttttcgtaacaaatgataccttgacgactgaagtattagatattttgagcataatttctaaaggaaaatctagagtatctaacaacttaagcaaatctatttcagccatttcatacgaattgaaaaaagcttgtgagcatttatcatcagaagattctgcgaacaaaaatgtaagaattaaaatcatcacaaagaatgagcatcatgattttgttttagatgcaagagacaaagcaaaaaaatcaatatttattgcgagtcatagaattagtaataatgcagaaagacctattttaactcccctgataacatcaatgacagccaatagcagtcttaatattaacatgtattactcatctcttagcggaggtatcaatacacagcaacttgatgacatgagtaactctttaagaaaaaatggaattactttagagaagaagaaagatcctatttctcatgcaaaaatattatcatgggataatgacaacattttgatcacgagtcttaattggctatcagcctcagcttacggaaacccatatgatgagcttgggatctttatagaaagaaaagatatattttctttaatttcgcctaattactga

SEQ ID NO: 382332 - DNA, 684 bp, Salmonella enterica
atgactgaagaaattagcaacagcaacagcaacagcaacagcaactatcccaataaagaaaaaaaatggaaaacaatcatcaaaaatatttttttctttattgcatgtttagttgctctttcaattagcatattttatctaatcaagaacgtaaaacattatctaaaacctctaagcaccgatataatccctgattacattagcatcctccctattattgcaggtggtctttttatagcactatggtatatttaccgaggtaaatccgttaaatcattaaatgatgcaatattatttgcatcagcaagctatgctttatatttatttttattcgattatgaattttataaaagctttacagatttgcagtacattgcagaacacctctatcaaattggtataaaagttttattacttatttcaactgttggtaaaactttaataacaatagtcgagtgtataaatgacagacataaagaaaaccaggtaataaagcaaaagaaattgaattctgaacccaaaaatgatggaccttcggcttctgttatggataatacaccatcaaatactgcaacaccagacttaataactcacaataacttttattacaaattagttttatttgtagcgattggaatgaccattgccccttgggtttttatttatttacgcgactatatttaa

SEQ ID NO: 382333 - DNA, 165 bp, Salmonella enterica
atgaagatagcttttttccttgcacttgttgcttcaatcaatttaaatgtattggttttttttccaaagtactctggttggttaggcatgatggatttttacatagtgattttttcattaggatgggttctttatcaagttaaatatagtcgcgtaaataaataa

SEQ ID NO: 382334 - DNA, 438 bp, Salmonella enterica
atgcataagataaattatacagatgatatagatctttccaaaatttcccgccgtggtagttttaataaaagtaaaataccttctgaagcagtaagaagctattgtgtcagtgtccgtttgaatgttgaagaactgcaactcctgaatattaagcgaggctcttataaaaagggagagtggcttcgtatggcttcccttcaaaagttgcctcctgttataccagcgattaatactgaagcttggaaaaaattgtctgacatatcacaaaagttgaatcgtattgctctccatatcgacagtaagagtaaagatagccagcttactcatacagagcttttcgctgtgaagcgacaactgatagagcttcgccagcacctgctaaatgctgacatatggagcaaacccgatgaagggtatgcagaagatcaaaaggggtaa

SEQ ID NO: 382335 - DNA, 1173 bp, Salmonella enterica
atgaagggtatgcagaagatcaaaaggggtaagagcttcgctggtgtcgttcaatatgcattgaaaccgggagcacatcataaaagtgatcccatcatcattggcgggaacatgttaggtgattcagcccttgaactgatcgctgaattcgatagcaccaagcatcttcgccaggatgtcgcaaaatcagtttggcacaactcgcttcgcttacccaacggtgaatcactaacgaatgaacagtggtctagtatcgcagatgactatatgaaacgaatgggattcagtgatacccatctccgttgctatgtcttacatgacgacgacggtcagcacatacacattatcgccagcagaatcgacatggccggtgggaagctttacttaggtaggaatgaaaacctcatcagcacccggattatcagtgaacttgaaatcgatcataacctgacagttaccaagactgctcctgcgattgcaccaaagcaaccgaagcggaaaaaaatctctcgcaacgaacagatgctatcggctcggactggtgttccctcccctaaggaagctctccaacatatcattgataaaagtttgacagatacacctgaccttttaacttttatcaagaggctggaacaagcagaagtatcctggaaggttaatgttgcctctaccggtaagatgaacggcttttcattcgaatatgcaggaatcgctttcaaagcttcgcaattaggtaaaagctactcttgggcaaatctcagtaatcggcttaactacaaccccgaccacatagaagctctgcgagcgacaaaggaagttatccctgctcctgctcctgctcctgctcctgctcctgctcctgctcctgctcctgctcctgcaaaagatgttgctgcaacgaatttaccaagggaaagcataagtgaaaagattgctgaaattgaactacgactaaaagaagacagaagaaacgaaatcgttgagaagattcttcaaaagaatgcaatacaacagaaaaagcatctaaggctcagtagctggtttccctttttacaacggctcatagagcttctccgaagctacggtaagagcattcttcacaaaccccaccctggattttcaaaactctatgcaacccgacttctacataaagaaaggaaaattcatttatag

SEQ ID NO: 382336 - DNA, 387 bp, Salmonella enterica
atgaaccgatttataaagtcatctttttttattattgtcttcctgctttctggctgttcaacatcagggaaccagaaccttaaaaacgaaacacctcaaagcctccaatcaaagatcattaaaaacaaaacaactaagacggaattactcactaaattaggtgagcctgatacaagaaccacactcgatgacggaaatgagcagtggagatactttatgtataacaatcagttcaatgcaacaactttcattccagttgtagggctgtttactggcggttcgcagactcagtctaaaactcttgaaatagatttcaaaggcgaaattgtcaacaaatggacgttctccactgacaataacaacaccaaaacgggcgttcttaattaa

SEQ ID NO: 382337 - DNA, 315 bp, Salmonella enterica
atgaaaatatactcaatccttgcagttatccttactacatgtcttctaactgcatgtaacagtgaaccatcgcaagacgatatatacaatgctttcaaaagtgttgtagataaatcaaataccagtatgaaagcttttgattcaagagtttcagaaaaggatcttttaagaatcgattatgtgaagaaagttagctgcacagaagaagcaaataatgtttataactgcattgtcgatgcctctattagtaatatgaaacaaacaaaaccagtaaaactaatcaaatctgatggtgtctggaaagaagttcagtaa

SEQ ID NO: 382338 - DNA, 426 bp, Salmonella enterica
atggacaaaaacatcatcaattcagagtttactctggaagagcaacttatcattataattgataaatatatctcaaaacggtaccagcccggagataaaagtttctcatatcaactttacctaatttttgtgggataccatttaaaatatttctatcctaaaaggatatattccaaatccaatcgtaatattgataacataatggctatgtttagctcagtatacaaaagtctgacaagcaatctattacaacgattaaataacaaagaagccgttctccgtgaactaaattctctcgttaactatattgataacaatcaagaaaaagcagaagaaatctatgctactgtcagagcacaatatgaaatgaaagtaatcgagaaagagttaacccatgaagttcgcgtaagaaccattaggctgtag

SEQ ID NO: 382339 - DNA, 387 bp, Salmonella enterica
atggcaaaacatttgaacaggagtgaaataaaggcaattacacacattatattgacttgggacggcaaaatcacatggagtgatttatgtgaatcagtttataagaatttaaacagaactatcacaaggcaatctttaagtgctcatgatgaagttgttgaagcatatagaacaaagaaaaatttgtctaatttgaaaaaatctggcattaaaaagccagctaacttaacgattgcggcacaacaaataataaatcttaaagccgaaaatgaaatgttgaaaaaacagaacaatagatacaaagagcagtttagctattggcagtataatgcttatagacatggtctcactatggaacaattgaatagaccatttaataaaaaataa

SEQ ID NO: 382340 - DNA, 654 bp, Salmonella enterica
atgacttcaattttcacattttacaaacctactaaaagtttctttttttgtgatatacaaagtaaaaaaagctatgagatgaattataaaaatatattttcccgatatgggtattatgatgatgaaggtaaaccgctacttattcgctcacaccagccacggcaccttttaaacacaatagcccattatggtgaaatgtctgaactggatatagctaaatggtctggtcgtatcaatgcgaatcagaacagagtttataaccatgtgtcagaagaagatatgttagataaattcaaagctattaaattgaataggggtaactactgtcaaagggagtcattacccataaatgaattgacagttgattttgataacctgaatcaaggagcaattcacttaacagaatttggctactgtgtgcataactatttagttcgtccttgtactaaaatcaatgaatttatagaatataataatgaaaccctggaaatgaaatcaatagatagaattagacttgaatctatccgagaaaaagtaacaaaactgaagagtataacgcagaccgcttatgaaaatggtgattatggtgcagacaaatggctgcaacaccatgaaaaaaatctggaaagaattaataagcttttaaataattaa

SEQ ID NO: 382341 - DNA, 642 bp, Salmonella enterica
  misc_feature (531)..(540): n is a, c, g, or t
atgaataatattattttgttcaaatcaaaaaaacatattcgtgtagaagaaaattataatgagttcataaaattttgtcgctatcaactgcccggactaacccaaactcaggattgggagcagtatgcatggaaaggatatgtcacatttagaaaaataggggttggaaataaagtctttgattccattgatgcaatgcacgaagattatatcaattttgcgaaagcatatatcagatatcaacactcattgaaaccattaaaaaattatggggttattatgatggctttgcgatgcctcgaacaggcccttttgcaggttcagaacactggtctcatttataatgttacagccgttgtttttgatgaggcaatgcagatcgggagtaaatattttgaaggtaacgttttggctaaatgtggaatacagcttgaaaaaatatcaaagtttctatatgaacataatctggtgaaatcaggatacatatcctggaaaaaccatgtaaaacagaaagtcaaaaacaattatctnnnnnnnnnnatcttcctgagattgaggattatcaccgaagcgataagttaccagatgaagaggcattgctcgctattgctgatattttttctcaaaatgatgagttactga

SEQ ID NO: 382342 - DNA, 1305 bp, Salmonella enterica
atgaataatttaattaaatataactctgataaaatgtctttgcatgagcataaaatcgtcagttcgattgaaagcaatggaatcaatcttacaaactcaatatatgctatgaacgaaaatttggtttgtggatttgtatatacagtacaatattatttcaatagcaacagctatttgtatgtgaaaaatattgttagaaatatggagagtcttatccgtaaagtatctcctactcatattgatgataaggttctaattgaatatcaaaataagaaattatcaaaagccccagaatcacttcgcgttttacgaccatttttgattaaatggtttgagttaggatatccaggaatagatgaaagtgcggtagaactgttaaagcatttggacctaaagataaaaaaatctggtcagtctgtgcttcaagatgatccaacagggggaccactaactaaagaagaacatacttctttgattaaggctatgaatcatgcatatagaaaaggtgaactgtcactgccacattatgcaatatcactattgatcagccttacaggtagaagacctcagcagttagttatgttgaaatataaagaccttcttcaaaagaacttagataatggcaaagtagaatatgtaatttcagtgccacgagttaaacaacggggtaaagaactacgatatcgagaacttgcaataatatcagaggttgcatcaattgttcaattgcaagctaatcaatcagtgaaactcgttgagcaagctcttggaaaaactcttgatgattattctaaacgagaagttcctattttcttaaatgaggaaaaactctcagatttatccataacaggttcaattcttctggaatataataaattatatgcgaagcctataattgctaatgtagcattgaaaggtattgttaataatgggaatataatatccaaccgtaccggttcgatactaaatattacgcctcgtaggcttcgttatacaatagcaactatgctggctaaggatgggcataatgttaatactatagctgagttattggatcattcctctacttcaagtgcaggtatttatattaaaaatcatgctgacagtgttgaaaggattgattccgctgtttcagaacaattgtcatttgtcgctgatatttttatgaacggaatcaaatcgaaaaagagttgtcatttcaaatttttttcttcaagtagatgccagagtcagaattcaggattcccttgcaatcaatgtatattttttattccgattgatcgcagtgaggtgaatcaactatga

SEQ ID NO: 382343 - DNA, 1203 bp, Salmonella enterica
atgcgtagtatttgtgtggattcttttatgttcgaaaatggtgagagatattgtcatattgtaaataaaaatactggtgaaccattgtattatcctaacttgtatataacaacacaggtcaggaatcggtcagagtctatatcaacaatgaaggttattgccggtagcatttcattgttatatcgattctttatgaggaaagagatcaatattgatgaaagaattcagaaaaagatatttctggctcctcatgaaattgaagatttgattgaattcacttcattcaatttccgagatggcgaggatgataattttaggagttcaaatgtcaaaaaaccaactaagtactttcggattacaaccatagctaactatctggaatggctgtgcaaaatacatctttctcatacaggacagaaggatactctcaaatatattttagatttcattaacaacataaaacgaaagaaaccgagaaacaatgataaatataatatggatatagaaaaaagcttagataaagaacaattggattctttgtttagcactcttgcaccgggtagtaaattaaatcctttttcagaaaaagtgcaaaaaagaaacaatctaatattcctgctattatactgctttggcctgagagccggtgaacttttgaatctgcgaattggtgatatagattttgcagaatcgacaattgcaataagaagaagagcaaatgataaaacagatccgcgagtgtatcagccattagttaaaacttgtgagaggaaattaattgctgatacaaagctcatgtttgaaatttcagattatattatgaatgatcgaagaaagataaaaaattctaacaaacatgatttcctgtttattacttataaggaaggaaaaactcaagggcaacctatttcattttcttcatatcacaaagtggtgagtgttgttcgtcaatcctcctcacttctagggggattgacaggtcacaaactcagacatacatggaattatgagttttcgaaagcaatagacaagaatcaggacatatccgatgaaaaagagcaacaaatccgttcttatctcatgggatggcgaccgggttcagaaacttcaatgatttataatcgcaggcatatttttgagctatcgaaaaaaactgcacttcaacaacaagagcaactattcaaaggagaatttgatgaataa

SEQ ID NO: 382344 - DNA, 315 bp, Salmonella enterica
atgaatatcgaagaatttgtgagtgaagataaccatatgtgtaatctgggccaggaacttttctgtaaaatcttcgaacccggagcgatttacgatttacctgataatgaatttaacagaaagattgtttactggttaagccagtatttagtggggaatctaagagaaccgttagattcgatctctgagcttaatattttcgaacagttttatgtgtatgaaacatggttctcgctaattaaatgtcccgttgaaatgaaaaatctttcaaagcgattaattcaatatcagattgggctgaaaactcttttgtaa

SEQ ID NO: 382345 - DNA, 207 bp, Salmonella enterica
atgaacaatcaagcaacccgcctcatacgcctaccagaagttctcgaacgaactggctacggaaaagcctggatctatcgtctgatcaacgatggcaagtttcctgctcctgtcaaaattggaagtcgtgcagtagctttcgttgaaagtgagattgatacctggattcagtctgtaatcgaaacaagtcgaaataatgttgcttag

SEQ ID NO: 382346 - DNA, 681 bp, Salmonella enterica
atgggttacttctcaaagattttcagcggcaacccttttttaatcgaagaagggcaactgggatacatgactcctgctaacaagcttttccaacctccccatttttttctaacaacccttgatcgccttgctgaaacgagcattattgcaatgcaacgtggaggttttctttggcatgaaggtgacaattattctataaacgcagagcttcgagaggaatcactttcagacattatgccagatcagtttacacgaacagtcatgttcgagattgatttggcaagtggcacagacgaagagattgcagagtcgcttaaagctgcattaccgcaatggcgtaaaattaagggtattgatgaaaacccattagaatctgttcgttttggatacggaactatcaagaaactcatcagttatcgtgtaatacctatgttggatatcctggtgtgggcagccgttagaaaaatccgtgtctctgacgacaggttatccaggctactgtatacagacgatgatgaagaaagcgaaatgaggcagtccagtcagataaaagatactgacaggccattggctcttaaagccagcacaactgactttatccgacaattccattactttatgaacaaaaatagccatttgaagcaaatgaaagtctctgatgtaatgaaactatcggattag

SEQ ID NO: 382347 - DNA, 1104 bp, Salmonella enterica
atgccgttagcacaactgaagcgtgacactctttcccttgttaagctaaatggcgacaggactgatgggataaaaggaagtgttcaaaagaataagattttcattagccggagcgatattgctattgaaaagggggatctgcttatacgcagtatgccgcatggcggtactgaagaatatattgtaatcgaacctaacttcagaatgggtgtaggcggtattcctgcgacctatcaggctgaggtgatactgaaggaaaatacaactaccgaggaaatgacatcatccccttccacagcagtaccggaagcagttattgccactgtaaatacattcattgctctgtgtgtcaccattgtaaatgagggcgcatcaagtcctgataaatatgcttcgcagttttatcgcttgcgtcaggaattacttgaactcgataatattatcaccattccttcatggatcagattctccatgtcacccgctgacattaagaataatgttggtttaaacgtcacaggtggcgatggagcttgggggcgaagacgacagtatttacagagcgaatctattaaaatactttcaagctataaaatcgcaccaattattgagcgttctgttagtgagaataaaataaaaaatactgagcaagtcagcgggttgacaacgatggcaagcgatgcagggttaaacatgaagaagaaagtattcattgtccatgggcacgatgataaactaaaaaacgaggtttacatttttctggcaaatgaaggtttccagcctgtcatacttcatcatgaagccaatgaaggacagaccataatcgagaagcttgagaagcatatcgacactgtatcctatgcagtggtgctttatactgcctgtgatgaagggaaagccaagaatgaaactgaactaaaaaaaagagcccggcagaatgttgttttagaacacggctggctcatgtccaagctatcgcgtaaattcgtcgctgcgatagttgaagatggcgttgaatttcctggagacctgtccggagtggtcagaatatctgcatcagactggaaatatgatctgtctaaagaattaaaagtgctcaataattaa

SEQ ID NO: 382348 - DNA, 1131 bp, Salmonella enterica
atgggatacaccagaaatcagcacatgctctcacagtggtttctcaggaacttccgcagtgatgatacggcacagagtccgaaggagaagcaacgggtctgggcccacgttgtggttcctacggcagaaggcaaaaatgacataaaggacatcccgctaccgatatccagcgtggccgtctgtaaggactgctttcgtcttaccgacggtgacacaggcgaggtttttgatatcgagcatgagctcagtgattatgaacaggatatggctttgcttgtccgggatctggttcagaaccataatttcgcgcgtctggctaactgtgacactgatgattttccggtagagaagcttgcaagttttgctatatttcagatgttacttaacctcaataacccgcaaagcagatttccgggtaaaaatgagttatttcagtcattcattaacccagtaaaaaacaaccttcagcatatcatttccgaaacaatttctttgtctgacgttatgccggagctggcggctttaagtatctatcagaaactgatttgtatagctcgttcttcttctggggatgacgaaaaagctaaggccatgtttgtattattttcccttctcgcacttcagggtaaaataacaatgattgacactatggcctggctacgcggagaggttttttccggaatacatcgtgtggatatatttcataccgggcaccacttttacagtacagaaccacgtccggtatttacagtatcacctaatgtattttgcaaaatgacagaagaacgcgtcctgtaccttccccttgctcataatttggctcttaagttttatcagtacccggaacacgggtttttcaccccactggaaattaatgtattcagcccggaccctcagaaactacttacaaaagacatgtcacgaatcaaagtttataaatgctcctatgattatattgatcaggttatgtcaacaattgatatgtataacgtcggattttcaaatattatttattctagctggcagctcagtgatgttgaaaattatctgaggctacagaacgaacatcatgatacttattatcttccggaacatcccgtttgctggactgtatccagggagaaagggtga

SEQ ID NO: 382349 - DNA, 291 bp, Salmonella enterica
atggccctgaccccggaacagataagttgccgaccgcagctcgtggcaatgggtgacttcaatgcccataccctgctgcccggagaggagtggaccaggccagaaaacgctgatgtccggcacgttctgtcgctgatccccctgacggacatccagctggctaaccggctggatgtggacgaacgcaccatccgcaaggggaaatccggcgagaccagtatggtattcaccacctggtgctgcctgtgctggctggccgggctgggaatgctgctggaagaaccggcttag

SEQ ID NO: 382350 - DNA, 198 bp, Salmonella enterica
atgactgtatttctcatggccgttttctttggcctcttaaaaagaggctctctcattgccctacttgttgatgcctataaaggctggaccttgttttggaagaactatgatcgactcccccatatctaccgttcacaatggcgatatcagcgacgcttcatactcaaaagaatctggaaacgcatcagaaccggctaa

SEQ ID NO: 382351 - DNA, 1341 bp, Salmonella enterica
atggttgattcaacaacagttaacggaagtccagattcacagttacctcaacggaactggaatgccctgttccgtggagattatgaactgggggcttacaatgcctgcgtgggagacaacggttgtccggacctttattactacgctgatggtttcgctgacagcgtattcctgctcattgatgcccttaccacggagcacaaagcaatacttgatacgcttatttatcctatctgtttcaatctgcgacactccgtggaattaactataaagggtcagatagaggatctcagccagcttgcgaaactaagaaaacaaccacttgcgcccgatacagacatagaaaaagtgctgaatcagcacgatattatgaatctgtgggcttttttttcaggccatgcagtcgcgtttgatcggcgttataaggaaaagttgtcaacgctggaacctctcattcactgtattggtgaaactgatcccaccggtcagacatttcgctacagttacagtacggaagccaagaaacatctgacagatgtcagtgttatcaatgtattagttctgcgtgaccaatttcgtgtcattcgtgagcaactggaagaactagccgggttgactcagtggttagagagggaatactccactggggttttcaccaaaaatctcagtcgtaaagatcttcatgctatcgccgttcagttgccgccacgtcattcatggtctgatccggcttcaggccttgatgacatcatacaaactatcaaatctgaaaatgacatcggcagcaaggaactgacagaggcattgaacaagattcaagattgcagagacctagcacgaattatcggtctgcctgtaactattccgggtttggctatgagtgatttgctaactctcaatgacttctggaaagtggcatgggatcgggatgctctggagaatgaattacgtaacgatatatccggagttacagatataccggtagtaccggtgaacctggtcgagaagatgaagcacgaaattaaaatgatgagagataccaaatcctcatttgccagttttatgcagtgggcaactgcagagagagtcgccggactacaggcattaatggatgtccgcagttttcgtttcagtgaagaacatgaccgtcgctacgaatattacaaagaagagctgaccgccgctttttcaggcactgcgcaggcgattgatgctgagttagcagagatctggtctcaaagtattggacgtcgtaattatccttcgcgtgtgatagacagcctcaaacttgccgggtttacgcacgaaagcgctggtcttgaggaacacctcttttcctga

SEQ ID NO: 382352 - DNA, 987 bp, Salmonella enterica
atggttacttttacttcatctgaacaaaatgattctcagggaacggtatcggtctcgctcaagggcattccgaccgatcagggccaggcgctgaaagaggtggccaaagcacgggacataaaccagtccgcgctgctgcgtgaaatggtcagtgccagtatgggcagcattatccacgtgttctgtctcaaaaacccgcttgtcgcttccctggatcaggatatcgcccagtataacggcagtcaggttctgccggcatggaacagtatccctccggcgccgcagtttgaagcggcctaccgcgagctgcttggcatccgcacggaagatgacctgacccgtattctgcttcgtaatgcgcagtatctccgcatgcgcaccagtcaggtattgccgagagggcagcagttctacgggggaacggcgctctatttcgccctgttctgtgaggtcgccagtcgcgatgagcaaaccattgaagccttctgggccagtattgcccgcttctggggcacgtggtaccgccgccaggattattactctcagattaaccagctgcggggcgttctgggactggagtcagcggatgggctcagcgaagtgcatgccgtgggactttacagtcgtgtcgcagtgtttcaggatgagagcgggcagcagggactgagtcaggtgttactgacactgcgcaccgagaacacgcgggcgctgccggccggtgtgttcgaacagtttgaactgccgtactgcaatggccacattctgacgcctgacccggggttcggctcaacgtatgttggccagttgaatctgctgacaatgggattccgtttccgggaagaatcctgctccctgcactgctacaccgtggaggacgccagaatcggggccacccagacccttacggaagtggcggaagcgctcgtcagtaacgttgatgcccctctcagggcctacgcttcaaccattcctgtcaccagtcggtaa

SEQ ID NO: 382353 - DNA, 351 bp, Salmonella enterica
atgtttactgcattcaatgagagaaatgatttcagttatgcttttgaaaaaatccgtaatgcgatttccgcgccaggagaaaataatgtttatgctgcaacagaattaggtcttggcattctgctccgtaaatacgagcagtttcgccgggagctggatgcggccggtgagctgggaaactgggaatatgatctcgatacctacaatcactgtattgcggtgctgcaacgttacttcaccggcaatccatccgggctcacagaacgtgatgcccggatttacagccattacctgcagactgagcacaaaggctttgtgaagctggctgaagaactggctgccgaccgctga

SEQ ID NO: 382354 - DNA, 690 bp, Salmonella enterica
atggctgactggtttattgcgaccgaaggcgtgaaggtggtgaaggacagcgccagtctggggccgcagataattacagctgtatcgaccatcgcatctgctgtcggagcggtgttccttactcaccacttcacactcagacgtgaggagagaactgcagcagcgaagctggccagcgagcgtctttacattagtacagagctggtttttttacttgagcgatttgcgcagcgttgtgctccagcagcaacagcaactgtggagcacgatcaggatggcagaggagaagctgagttcttattaccggaaatcgattattccccggtatctggtaactggcgctcccttccttctggcctgatgtataggctcagcgaactctctgttctcagctacgaagctgtcgtgtgtgtagataatgtgtttgttgaagatactccttatggtggagcgggtgaatatagtttgcataaaaacgcagctatgttgggagtaaaagcactgcggttatcacgagaactgagaatgttatgtggcctccctctgcacggcctttccgatacactatcgccaacgaggttggtattgttgaaagccagaggtaaaatactccaaaaggagtacgaaatggtaaagaagtctaaaaagaccgagcaagagattgaggatttcataaaggggacatcatga

SEQ ID NO: 382355 - DNA, 276 bp, Salmonella enterica; identical to SEQ ID NO: 5935

SEQ ID NO: 382356 - DNA, 645 bp, Salmonella enterica; identical to SEQ ID NO: 233785

SEQ ID NO: 382357 - DNA, 972 bp, Salmonella enterica; identical to SEQ ID NO: 233786

SEQ ID NO: 382358 - DNA, 393 bp, Salmonella enterica
gtggacgatgaacggaaaaggaaaaaattcacactttatctgcatccggaaaaagctgcagactttcaaactttggaagcgatagagtccgttccgcgttctgagcgtggtgagctgttccggaatgcatttatttctggaatggcgttacaccaacttgatcctcgcctgcctgtattgctgactgccattttgagcgaggagttttcagcagatcaggttgtaaccttactcagtcagacgacaggatggaagccttctcaggccgatatcagagctgtgttgactgaactcggtgctttgcaatctgctgaaaaaatgcctccttctgctactgattcggtgcaggaggcaatgaatgatgtgcgccttaaaatgcaaaaattattctga

SEQ ID NO: 382359 - DNA, 531 bp, Salmonella enterica
atgcaacactccataaaacaccgcgcttcaacggcgcaccccgacgaggatgaccttgttgataccacgtgcactcataagaacctcctgactgaaagatgtgagataaaccggataccggcgacgggacgttcatgtgccccttcagaggagcgaaagctcctcctgccgtccacttcacaggggtttctccccgcagtggacctttccgatgggggcccgtttaccgcctcacgggacagctgtccgggggcggacgcaaaatttttagccgggttcatggctaaaaattttgtggccggtgcatctcaccctggacagatggaacgggagggggttacgtctgccccccggaaagtccacagcgggaaacaggccgcaggggtggcggcaggagggaagactgctgcgccatcaggcgcagtttcctcacacaccgtcaggtgtgcagggagcgcaggtcacggcgcgacaggggcggcgcgaccggaacggtcgctgcaagccgggttttcacgcatcggaccgtag

SEQ ID NO: 382360 - DNA, 1902 bp, Salmonella enterica; identical to SEQ ID NO: 8049

SEQ ID NO: 382361 - DNA, 1086 bp, Salmonella enterica; identical to SEQ ID NO: 109578

SEQ ID NO: 382362 - DNA, 639 bp, Salmonella enterica
atgaataacactcaatctgataataatttgttttattttaataggttaacgtacattacgccgcacgaagtggcgcttgctatgaatggttttgactatgataccgaaaatgatgaattgactgatattcaattaaaagaggttattcggttaagaaaggcaataaccagaaatctacaattgattaatgaatataaaaacatatccgccacgcaaaaagtggaggcgaatttagtattaactgccgcttatatctttcagagggaagatattgtacctcctgaaattaaggaaagaattgagaacgcattgcaacaacaagtaaaaaataaagattggggcgatattttaatgatgctaggaggaagtgaattatatgaagttggtaaaaagttaaggagtaatggcagagggcagtacagaaaagatgatgaggataattatagttgtaaattaatttacttactaatagagttgcttaagaaacatggaaagggaaattatagcgataatagtgttatatataatgatattgtttctttttgtaatgagaatgagattctattgaaaggggttaaaaaagctacgttctataagaaaataaagctggggaaagacattataaaatacggagagtga

SEQ ID NO: 382363 - DNA, 684 bp, Salmonella enterica
atgcctctcgtggtgaacagcatgaaaatcactaataaaaaagcccgacatattgagattgtgggcttaaaaatattgtcgcttactgaaattagcatggagcctgagagaacgtctgttagcttctctattcagcctccttgctctagcttaactttcctgcgctggcggcgtttgatctcactttgcatggatgtaatgatgaattgtgacgtactttcgtcctcttctttcaccatttccatcgcttcaactacgtcatgtggcactcgtgcctttaaggcttgtgatttagcattctttgtaccggtagccattactgaatctccgtatgtttggtgggccacagtatacacgggaaaagaacaaagaaaaacattgacgtgggccacacctaatatttatagtgggccacaccttaagtgttctagggtgaaaaaggcgaagcccggcagtgcagcaacactaaccgggcctctgaccaatccgctgtatgagaaaacgaagatggctaaacagaagtgtacctggttatttgctgcgatcaaccgcagtcaacgcaatgcccgtcctgtgatgttaaggatcaccgcagataacgagcgctcagcgcggcgcagactggccccggactacgtgctgagctttgccggtcgcattccctgcggaggtgaacatgcgtaa

SEQ ID NO: 382364 - DNA, 354 bp, Salmonella enterica
atgcgtaattatccgcaacccggcgaacgctggcagcatgaacgtggctggaccatcacaatcatccgattaattgaagcctcgccctccgtggcgctggttaatcctgaattcagctgtgaagtgctgatacgtcatgacagcgacaaccagctttcttcctgccctctggcatggtttgaacagcggtatacgcgcctgtttgatgcgccgctctttaaaccttcgccagctccgaagggcggtagtagctctctgacattacatccgtctgttgtatttacccgctggcgggagcgcagcatacggcgttctgctgaacctgacgacaatcactattcaaagtttctctga

SEQ ID NO: 382365 - DNA, 273 bp, Salmonella enterica
atggcacttaaatgtcccgaatgcggcactacggcacacgccagaacctccgcctatgaagcaccatcggttaaacgctcatggtatcagtgccagaatcttgaatgttcctgcacatttaccgcactggaaagtgtggatacgataattatgaaaccccggcgcaatgaacaggaatcagatgaaccggaagagcctgaaaagcaaaagaaaacgctcaatcgctatggctctgcatcaaaactgtcaagccgtcagcaaatccctgtctga

SEQ ID NO: 382366 - DNA, 987 bp, Salmonella enterica
gtgagtgattctgcatatatgaatgcattacaagagcagtttggagatttgaaatattcaaatttcactgttcagttcatgcctcctattattttcgtttgtggtgggccaataaacgccactccaatgagtgtacgagaccacatatttacctatgtagcaggccacaatcctgaattgtcagactctcttattttagctgagaacttccatgactacttcagagagggggcatattcagatttaatgagctttgaagatgatattgcaaatatttcaacattagttgtcatctgtttagaaagtgcaggttcgttagttgagcttggattatttgttaataggaagtctctagctcaaaaactacatgtggtcgcaccatttgaagaaattgaaggaaatgaacagaaaaatattcctgctagatcttcttttatttatttaggtcctttagagtatctaaaaaaaatagatgaggcctcagtatcagtttatccatggccaagaccggatcgtatgaaatatgatgaggttgagcttatctaccatgatattcattctagattaaaacgtgtaaaaaaaacggagcgctataactctgaaaatacaggtcacttagctatattgatttacgaaataatccttttatcagagccgatcaagaaaagcgaaatagagtgggcactatactgtatggatatagatgtaccacaaaaaataataacccgcttactctatttgcttgaaaagatgaagttaacctcatcattatcttacagtggtacagattacttctactcccgagggcatagagagagtaaacttaagtttggtatcagtgctagtggaaagataaaggattctatgaatattaaagttgcaatccgacaatcttacttaagtatggatgctaaagatatggacgagactgcaaaaaaaaggaaaaatgctctaagtcagatcaatattgttcgtggaggggcttag

SEQ ID NO: 382367 - DNA, 933 bp, Salmonella enterica
atggagttgctaagttatatttcaaaaggtctttttctcagcgaagaagaggctaaaagatatattgttactattccacgtagatataaaaaatatcctattgctaaaagaaatggtaatggatatagattaattgcacaaccagctaggcaagttaaagctttacagaaggcagtaattaatcatatgttggctaatttgaaagttcatgaaaatgctttcgcgtatgaagccgataaaagtattagatctaatgcgttaatgcattgtaataatgattatttgcttaaaatggatttcaaaaacttctttatgagtatcaaaccccataatcttttatctgtcttaaaagagtatggagttgaactaacgggtactgatatctttgttcttgaaaatcttttcttctggaagttaagaagaaatagcccgttacgcttaagtgtcggagcaccttcttctcccattatttcaaatacagtaatgtatttcttcgatgaggaaatatcgaaaagatgtaaggagttggatattacctactcaaggtatgctgatgatcttacgtttagcaccaaaatcaagggggctttatttgatgttcctaagttagtaagggaagttcttaacatagtaaatcttagaaatattaaaataaatcatgataaaacagtttttacctcaaggaagtttaataggcatgtaactggtgtaactattacgactgagggttatttgtccttagggcgtgatagaaagcgtcttttgagaagtaaaatacatcattatgtgtgtggggttttatctgagaaagaaattttaacccttaaaggggaattaggttatgcgaaatttattgaacataaattctttctctcaatgattaagagatatggaaatgctgtaatcagcgaaatttcaaaatatgaaatttaa

SEQ ID NO: 382368 - DNA, 1716 bp, Salmonella enterica
atggcggtggaaaaactgattgttgaccatatcgacacctggaccacggcgctgcaaacccgttccacggcggggcgcggtagctcgggtaagattgacctgtacggcattaagaagctgcgcgagctgattctggagctggcggtgcgcggcaagctggtgccgcaggatccgaacgatgaaccggcgtcggtgctgctgaaacgcattgcggcggaaaaagccgagctggtgaagcaggggaaaattaaaaagcaaaagccgctgccggagattagcgaggaggagaaaccgtttgagctgccgatggggtgggaatggacgaggttaggatctatttcaaactatggtttttgtgataaagcagaacctgaagacgtaacacctgaaacatggatccttgaattagaggatatagagaaagtcacatcaaagcttatcaataaggtaacttttgcagaaagaccgtttaaaagctctaagaatcgattctcacaaggtgatgtactttatggaaaattacgtccgtacctggataaagtgatcgttgctaatgaaccgggtgtatgtactactgaaattatcccaataacaagctatggtaatatttacccagagttcttacgtctattgctgaaagcaccaaatttcattatttatgcaaatagctctacacatggaatgaacttgccaaggcttggtacagaaaaagctcagcaggctgtcatcgaattagctcctatccaggagcaactgcgaattgtttcacgtgttgataaactcatgtccctctgcgatcaactggaacagcactccctgaccagtctggatgcccatcaacagctggtagaaaccctgctaaccacgctgaccgacagccagaacgccgatgaactggccgaaaactgggcgcgtatcagcgagcatttcgacacgctgtttaccaccgaagccagtattgccgccttaaaacagaccattctgcaactggcggtgatgggcaaactagtgccgcaggatccgaacgatgaaccggcctctgaactgctcaaacgtattgcgcaggaaaaagcgcagttggtaaaagacgggaaaatgaaaaaacaaaaaccgttgccaccgattagcgatgaggaaaaaccgtttgaattgccaataggttgggaatggtgtcgtttaggtgaatgcatcaacctaatttctggacagcacctgaaaccagatgaatatgaagaagagtgccatggtgaaatgcttccttatattactggaccggccgaatttggactaatcagcccaacttattccaaatatacaaatgaaaaaagggctattgctgctaagggcgacattctaattacatgtaaaggcgcagggcttggaaagcttaacgtcgctgataccaatatagccattagtcgtcaactaatggctattaatgtcattaggatgaattcagaatatcttaaaattatacttgatagcatgtatggttattttcaatctaaaggggttggtatagctatacctggaatatcacgagaagatgtgatggagccattaattatgcttcctccattcgaagaacaaaaaaggataatggaaaacttatataaattaaattttcttatcgaagatataaaattcaggattaaatccgcccaacaaacccagctccacctggccgacgcccttaccgacgccgccatcaattaa

SEQ ID NO: 382369 - DNA, 2811 bp, Salmonella enterica
atgcaggtattacctccgggcagcacgggcggcccttcgcgtctgtttattctgcgccccgtggccaccactctgctgatggcggcgattttactcgccgggattatcggctatcgcttcctgcccgtcgccgctttgccggaggtcgactaccccactattcaggttgttacgctctaccctggcgccagcccggatgtcatgacctccgccgtcaccgcgccgcttgagcgccagttcggccagatgtcagggctgaagcagatgtcgtcgcaaagttccggcggcgcatcggtggtgacgctacagtttcagttgacgctgccgctggacgttgccgagcaggaagtacaggcggcgattaacgcagccaccaatttattgccttccgacctgccaaatccgccgatttatagcaaagtcaatccggcggacccgccgattatgacgcttgccgtcacctcaaatgcgatgccgatgacccaggtagaggacatggtagaaacccgcgtggcgcagaagatctcgcaggtctccggcgtcgggctggtgacgcttgccggcgggcagcgccctgcggtgcgtgtaaaactgaatgctcaggctgtcgccgcgctcggtctgaccagcgaaactatccgtaccgcaattaccggcgccaacgtcaactcggcgaaaggcagtctggatggccccgaacgagcggtgacgctttctgctaacgatcagatgcagtctgccgacgaataccgcaagcttatcatcgcgtatcaaaacggcgcgccggtacggctgggcgatgtcgccaccgtcgaacagggggcggaaaatagctggctcggcgcatgggcgaatcaagcgccggctatcgtgatgaacgttcaacgccagcctggcgccaatatcattgcgacagcggacagcattcgccagatgctgccccagcttaccgaaagcctgccgaaatcggtgaaggtcacggtcctgtccgatcgcactaccaatattcgcgcttccgtgcgcgatacccagtttgaactgatgctggcgatcgcgctggtcgtcatgattatctatctgtttttacgtaacattcccgccacaattattcccggcgtcgccgtaccgctgtcgcttatcggcacctttgcggtgatggtatttttggatttttccattaataacctgacgctgatggcgctcactatcgccacgggtttcgtggtggacgatgcgattgtggtgatcgagaacatctcgcgctacatcgaaaaaggagaaaaaccgctggcggcggcgctcaaaggcgcgggcgaaatcggctttaccattatttccctcaccttttccctgattgcggtgctgatcccgttgctctttatgggcgatattgttggtcgactgttccgcgaatttgcggtgacgttggcggtagcgattttaatctccgccgtcgtctctttgacgctcacgcccatgatgtgcgcgcgtatgctcagccagcagtctctgcgtaaacaaaaccgcttttcccgcgcctgcgagcggatgtttgaccgcgtgatcgccagctacggacgtggattagcgaaagtgctcaaccatccgtggcttacattgagcgtggcattcgccacgctcctgctcagcattatgctgtggatagtcattccgaaagggttctttccggtacaggataacggcattatccagggaacgctgcaggcgccgcaatcgtcatcgtatgccagtatggcgcaacgtcagcgccaggtggcggagcggatattacaggacccggcggtgcaaagcctgacgacttttgttggcgtagacggcgctaaccccacgctgaatagcgcgcgcctgcaaattaacctcaagccgctggatgcgcgtgatgaccgcgtgcagcaggtgatctcccggctgcaaaccgccgtggcgacgattcccggcgtggcgctgtatctccagccgacgcaggatttaaccatcgacacgcaggtcagccgcacacagtatcagtttaccctgcaggccacgacgctcgatgcgctcagccactgggtgccaaaactgcagaacgcgctacagtcgttaccacagctctctgaggtaagcagcgactggcaagatcgaggattagcggcctgggtgaatgtcgaccgcgacagcgccagccgtctgggtatcagcatggcggatgtggataacgcgctgtacaacgcgttcggacaacgcctgatttcaacgatttatacccaggcgaaccagtaccgcgtcgtgctggaacataataccgccagcacgccgggcctggcggcgctggagacgattcgcctgacgagccgcgacggcggcaccgtaccgctcagcgcgattgcccgcattgagcagcgcttcgccccgctctccatcaatcatttagatcagttcccggttacgacattttcgtttaacgtgccggagggctattcgctcggcgatgcggtgcaggcgattctcgatacggaaaaaacgctcgccctgccagcggatattacaacgcagtttcagggcagtacgctcgccttccaggcggcgctgggcagcaccgtctggcttattgtcgccgccgtggtggcgatgtatatcgtgctcggcgtgctgtatgagagttttatccatccgatcacgattctctcaacgctgcctacggcgggcgtcggcgcgctgctggcgctgatcatcgctggtagcgagctcgatattatcgccattatcggcattattttgctgatcggcatcgtgaagaaaacgccatcatga

SEQ ID NO: 382370 - DNA, 315 bp, Salmonella enterica
atgatgattgacttcgccctcgccgccgaacgcgaacaggggatgagtccgcgcgacgctatcttccaggcctgtctgctgcgttttcgaccgattctgatgaccacgctggcggcgttgctcggggcattgccattaatgttgagtaccggcgttggcgcggaattacgtcgcccgttggggatcgcgatggtgggcggcctactggtcagccaggtattaactctgtttaccacaccggtgatttatctcctgtttgaccgcctgtcgctgtacgtgaaaagtcgctttccgcgccataaagaggaggcgtag

SEQ ID NO: 382371 - DNA, 2118 bp, Salmonella enterica
atgcaggaaaccatggattaccacgccctgaacgcgatgctgaatctttatgataaagcaggccatattcagttcgacaaggaccagcaggcgatcgacgccttctttgccgcccacgtccgcccgcattccgtgacgtttgccagccagcatgaacgtctggagacgctggttcgggaagggtattacgatgacgctgtcctcgcgcgttacgaccgcgccttcgtcttccgcctgttcgagcacgcccacgccagcggctttcgcttccagacgtttcttggcgtctggaagttctataccagttacacgctgaaaaccttcgacggcaaacgttatctggaacactttgaagatcgggtgacaatggtggcgttgacgctggcgcagggtgacgaaacgctggccacccaactgaccgatgaaatgctttctggtcgctttcagcccgccaccccgacttttttaaattgcggtaaacagcagcgtggggaactggtctcctgcttcctgctccgtatcgaagacaacatggagtcgatcgggcgggcggtgaattcggcgctgcaactctccaaacgcggcggcggcgtcgcgtttttactctccaatctgcgcgaggcgggcgcgccgatcaaacgcattgagaatcagtcttccggcgtgatcccggtgatgaaaatgctggaagacgcgttttcgtatgccaaccaacttggcgcgcgccagggggccggcgcggtttatctccatgcgcaccatccggatattctgcgttttctggataccaaacgagaaaacgctgacgaaaaaatccggatcaaaacgctctctctcggcgtggtgatcccggatatcaccttccggctggcgaaagaaaacgcgcaaatggcgctcttttcgccctatgacatacaacgacgctacggcaaaccgtttggcgatatcgccattagcgaacggtacgatgaattaattgccgatccgcacgtgcgcaaaacctatattaacgcccgtgacttttttcaaacactggcggagattcagttcgaatccgggtatccctacatcatgtttgaagatacggtaaaccgcgcgaatcccattgctggtcgcattaatatgagcaacctgtgctcagaaattttacaggtcaatagcgcttcccgttacgacgataaccttgactatacccacatcgggcatgacatctcctgcaatctcggctcgctgaatatcgctcacgtcatggattcaccggacattggccgtaccgtagaaaccgctattcgcggcctgacggcggtgtcggacatgagccatatacgcagcgtgccctcaatagccgccggtaatgccgcctctcatgccatcggtctgggccagatgaatctgcatggctatctggcgagggaaggtattgcctacggttcgccggaggcgttggatttcaccaatctctatttttacaccattacctggcatgccgtgcatacttcaatgcggctggcccgcgaacgcggcaaaaccttcgccggatttgcgcagtcgcgctatgccagcggcgactattttacgcagtatttacaggacgactggcaaccgaaaacagcgaaagtcagggcgctatttgcccgcagcggcattacgctgcccacacgagaaatgtggctaaagctgcgcgacgatgtgatgcgcgatggcatctataaccaaaatttgcaggcggtgccgccgaccggttcgatttcttacattaatcatgcgacctccagcattcatccgattgtggccaaaattgagattcgcaaagagggcaaaaccgggcgtgtgtattaccccgcgccgtttatgaccaatgaaaacctggacatgtatcaggatgcttacgatatcggtccggaaaaaattattgatacctatgccgaggccacgcgccacgtcgatcaaggactgtcgctcaccctgtttttccccgataccgccacgacccgcgatatcaacaaagcgcagatctatgcctggcgaaaaggtattaagtcactgtattacatccggcttcgccagttggcgctggaaggtactgaaattgaaggctgcgtatcctgcgcgctataa

SEQ ID NO: 382372 - DNA, 531 bp, Salmonella enterica
atggctgatggtcaaaaagatttagaccggttagatttaatgtgcaaggtcatcactagaacagatggatttcacaactacgcaaacacaaaatcgactgttatattaacattcaccaccgcaatattagccttaattattgctaatgtaagccatttttatgaattcttgaacataagtaccgttcctcatgttaagttagtattctcgatattactatttgctgaattgctgctactattttttgccttgttgcttatatcaaagactctaatacctaatactgataaaagtaaaacaaaaaacatttattcttttgtggatatttatacaaatttcaatgctgaagaatataaggctgaagttctaaatgttacgagagatgaccttattgttagcatgtgtgatttacaatataatttatctaattccttagataaaaaatatatctgtcataaaagagcagtgtggtgtttgaagaatacattaattttaatgctaatatcatccctgattttaataatttcatag

SEQ ID NO: 382373 - DNA, 1341 bp, Salmonella enterica
atggaatttgaaagtatttttactgcggctcagtttgagttaaataataggataaaaaatccgacaaagaaatcatccgtatatgactcacgctcaagtgatggtgcatccatggatttggtaacaaaagcaatccaggaatcggttagaggcactgcatcaatggaaggctttgtaataggagatgatttacttgatctttctggtgaaggggttgcaaggaaaaatattaggagaatatttggtaaggtgggggaaccaagtatgtccattggatgtcacccggattttctccatcttactaatagttcagaacttgaaaatgggtacgctattactttgtttatggatatttctggctcaactaaactgggcaaaaaatatcccatagaaacagtttttaatataaagaacacaataataaaatacgctattgagattatacaagcctttgatggacatgttcacagaataatgggagatgctgtaatggcatttttcagaacaaaagagcatgaggcgagtgaaagtcttatgatgaaaaatgcagtcgattcgataaattgtgctacgtatttaatagaattcatggagaaagtaataacaccgataattgaggagcagggtgctgatgagcctgtaggtattagagttggagtagattatggtaataacgatgatgtaatctggggtaactatggtgcttttggtgcgttcgaggttacagcgacttcatataatgttgatgtagctgcaaaattacaacatgctgctaaaacaaacactataatgatcgggtataatttaaagaaattgttagggttgggtaaggaatatacttcaaccatagagaaatcaggagtttctcaaacttatgtaaaacctaattacaagattggcgagtctcaaataaattataaacaatataagtttaatcacaaagagtattttaaaatattacctcaaaatttaaaaggtagtgcttataatttaaagctaaacgatactaatacttattatactggttgctcaacaacaatagagaaatttaaagaaataactttcgaagcagcagtgagttatgttccagggcaaagattaactttaatagctgaaaaaacaaatacaggcagtgattgtggtagagaaagaggcgtaagtaaaaaagaatttttaatgagtgaagtacattccggttattacactgttagtgttcctgagtcaacggcatatcatggaatccatcatatgaaattcagaatacaagatagccatggtaatatcgttgaagatgataaatatgtaggagttatcgtttcgcatcctattcttctcaactga

SEQ ID NO: 382374 - DNA, 1278 bp, Salmonella enterica
ttggccaacgacattattacccagcttcaggcgcgtaatgagacgttgacgcaggcaatagcccgttacggctcactcaacgccagcacgctgcacacgctcagctttgagcaaacaaaagtcacccggcttacgcaacagctcgctaactccgcccttcgccgtgaagagaacgataaacagcgcgccgggttgctggaaaaaacacaaacgttcgccggacagctcggcaagctcctgaacgttgagactcccgactggaagctgccttacgaatttcagggcaacatggtcgatatggcggcgaagggcggcatggataacaccgcgcgggacgccctgagcctgaatatccgcgactggagccttgatttcaatcaagatcaaaaagatctgcaaagcaccgccgccacgatgatcgaaggcggcgtcagcgcattgcaggatcttagccgctacatgcccgatatcgccaaagccgcgaccgcctcccgcgacagcgcgcaaagctgggcgcaggcggctctggccactcgcgacaaactgaacatcgcccctgacgacttccgttttgcgcaaaatatgctgtacagcgtggcaaaaagcggcggcggctccgttgcagagcaaacccagtggattaacgcctttgccggaaaaaccggcgctcaggggaaagaaggcattgcggaactgaccgcaacgatgcaaatcgccatgaaaaatgcccctgacgcaggcgcggcggcagcgaatttcgaccatttcctgaaatccgccttctcgaaagagacggacagttggtttgcccgccagggcgtggatcttcagggatcgctgctggagcatcagcaaaatgggatcggcgtgacggaagcgatgacccacatcgtgcagatgcaactggagaaaatgaacccgcagatcctcgacaccttcaggcaaaccatgaagattgaggatctttccgcgcgcggcgacgcgctacaggccatggtggagaaatttaacctcggcgcgatgttcggcgatgcgcaaacgcgggattttctcgccccgatgctggcgaatatggacgaatatcgccagctaaaagcctccgcaatgcaggcggcggggcaacatgttattgatgatgacttcgccgcgaaaatgacatcgcccggagaacagaccaaagcgttacaactttcacttaacgatctgtggctgtatgctcaagatattaccgaaaacggcgatgatactactggcttttttggccatttttcttattga

SEQ ID NO: 382375 - DNA, 1278 bp, Salmonella enterica
atgaatagaagacaaagcgatcatctcatgatgataattatttctttgacgatcttaattattatccttacctactttatagaaattaattcagtggttcatggtcagggcgttatcactactaaagataatgctcagttaatatctctttctaaaggaggaacgatacaagatatttatgtggccgagggtgatactgtaaaaaaaggagaactccttgcaaaggtcgttaaccttgatctgcaaaaagaatatcaaaggtatagaactcaaaaagggtatctggataaagatgttaacgaaatatccttcattcttgataaagaaaatgagagtgggttgattaccctggatggcacccgttctttaagcaataaagaggtaaaagcgaatattgaattagtgcatagtcagataagagctaaagagttaaaaaaaacctctcttgattctgagattagcggattacaagagaagctaagttcgaaagaaaaagaactagcattgcttgccgaagaaataaatattctttccccactggtaaaaaaaggaattagcccatataccaattttcttaacaagaaacaggcgtatataaaagttaagtctgaaattaatgatattgaaagtagcatcactttaaaaaaagatgatattgagttggttgttaatgatattgaggcgcttaataatgaattgcgactatctttatctaaaataatatctaaaaatcttcaggaacttgaggttgttaactctacattaaaagtaatagagaagcagataaatgaggaggatatctattcaccggttgacggtgtaatttataaaatcaataaaagtgccactactcatggtggtgtgattcaggcggcggacttactttttgaaataaaaccaaaagtaaggactatgctggccgatgtgaaaatactacccaaataccgtgaccaaatatatgtagatgaagccgttaagctggatgtccagtcaattatccaaccaaagataaaatcgtataatgcgactatcgataatattagccctgattcctatgaggaaaataccggaggaacaattcagcgttattataaagtaattattgcattcgatgttaatgaagatgatttacggtggttaaaaccaggtatgactgttgacgccagtgtaattaccggaaaacacagcattatggaatacctgttatctcccttgatgaaaggcgtggacaaagccttttcagaaccagttaatactaaacgattagatacaccttga

SEQ ID NO: 382376 - DNA, 1134 bp, Salmonella enterica; identical to SEQ ID NO: 26635

SEQ ID NO: 382377 - DNA, 1152 bp, Salmonella enterica
atgagacgaacatttacagcagaggaaaaagcctctgtttttgaactatggaagaacggaacaggcttcagtgaaatagcgaatatcctgggttcaaaacccggaacgatcttcactatgttaagggatactggcggcataaaaccccatgagcgtaagcgggctgtagctcacctgacactgtctgagcgcgaggagatacgagctggtttgtcagccaaaatgagcattcgtgcgatagctactgcgctgaatcgcagtccttcgacgatctcacgtgaagttcagcgtaatcggggcagacgctattacaaagctgttgatgctaataaccgagccaacagaatggcgaaaaggccaaaaccgtgcttactggatcaaaatttaccattgcgaaagcttgttctggaaaagctggagatgaaatggtctccagagcaaatatcaggatggttaaggcgaacaaaaccacgtcaaaaaacgctgcgaatatcacctgagacaatttataaaacgctgtactttcgtagccgtgaagcgctacaccacctgaatatacagcatctgcgacggtcgcatagccttcgccatggcaggcgtcatacccgcaaaggcgaaagaggtacgattaacatagtgaacggaacaccaattcacgaacgttcccgaaatatcgataacagacgctctctggggcattgggagggcgatttagtctcaggtacaaaaaactctcatatagccacacttgtagaccgaaaatcacgttatacgatcatcctcagactcaggggcaaagattctgtctcagtaaatcaggctcttaccgacaaattcctgagtttaccgtcagaactcagaaaatcactgacatgggacagaggaatggaactggccagacatctagaatttactgtcagcaccggcgttaaagtttacttctgcgatcctcagagtccttggcagcggggaacaaatgagaacacaaatgggctaattcggcagtactttcctaaaaagacatgtcttgcccaatatactcaacatgaactagatctggttgctgctcagctaaacaacagaccgagaaagacactgaagttcaaaacaccgaaagagataattgaaaggggtgttgcattgacagattga

SEQ ID NO: 382378 - DNA, 429 bp, Salmonella enterica; identical to SEQ ID NO: 26632

SEQ ID NO: 382379 - DNA, 2118 bp, Salmonella enterica; identical to SEQ ID NO: 26631

SEQ ID NO: 382380 - DNA, 1767 bp, Salmonella enterica; identical to SEQ ID NO: 26630

SEQ ID NO: 382381 - DNA, 1248 bp, Salmonella enterica; identical to SEQ ID NO: 26629

SEQ ID NO: 382382 - DNA, 636 bp, Salmonella enterica; identical to SEQ ID NO: 26628

SEQ ID NO: 382383 - DNA, 378 bp, Salmonella enterica; identical to SEQ ID NO: 118050

SEQ ID NO: 382384 - DNA, 201 bp, Salmonella enterica
atggctgacacctacctccccccgggctttaaaaaatgcaaatcatgtcagcaagttaaaccctttgaacagtttggaaaagagctcaagggcaagtttggcctcaagagtaaatgccgagcgtgtattagcgagaaaaacaaaacgtacgcagcactgagagatcccctcataatttccccaaagcgtaaccatgtgtga

SEQ ID NO: 382385 - DNA, 276 bp, Salmonella enterica; identical to SEQ ID NO: 31734

SEQ ID NO: 382386 - DNA, 198 bp, Salmonella enterica; identical to SEQ ID NO: 31733

SEQ ID NO: 382387 - DNA, 288 bp, Salmonella enterica; identical to SEQ ID NO: 31732

SEQ ID NO: 382388 - DNA, 237 bp, Salmonella enterica; identical to SEQ ID NO: 32299

SEQ ID NO: 382389 - DNA, 294 bp, Salmonella enterica; identical to SEQ ID NO: 32300

SEQ ID NO: 382390 - DNA, 609 bp, Salmonella enterica
gtgtacgtaggtaaattcatccagttacatgtagccgctaataagagccttaagatcgtcgaaatgggcgatgtgaaactggtggccataaccagctcgattcctaccacttttaatggtgggataaagagatacaaaggggttacgtatgtgtcactttcccaaacagctcaaaccactatcgacttcccgaagcgtatctacaaagagggccaggaatgtacttctgtcaccagtcctgaccaaggtcctttcgcccgggatgttaggttgaattgctacgggcgatgtgttgtcaccggcgtaaggtccccctggcgtactgaggccgcgcacttaacgccacgtcatgaagaaggcattcccgacgtaacgaacggaattttacttcgccgtgatatccatacactgttcgacaatgaccattgcgccataaaccctgacactatgaaaatttacttcagccgggaggcccgggagttggatgatgatctcctgaaatggcatgggaatgagatagagacgacacgcatgcaggttccggttaacatcgaaaaccttcggatacgatggcaaaaatttaaggctaaggatcgtcagcgtaaataa

SEQ ID NO: 382391 - DNA, 456 bp, Salmonella enterica; identical to SEQ ID NO: 25798

SEQ ID NO: 382392 - DNA, 366 bp, Salmonella enterica; identical to SEQ ID NO: 122249

SEQ ID NO: 382393 - DNA, 276 bp, Salmonella enterica; identical to SEQ ID NO: 25796

SEQ ID NO: 382394 - DNA, 426 bp, Salmonella enterica; identical to SEQ ID NO: 25795

SEQ ID NO: 382395 - DNA, 1686 bp, Salmonella enterica; identical to SEQ ID NO: 77387

SEQ ID NO: 382396 - DNA, 366 bp, Salmonella enterica; identical to SEQ ID NO: 25794

SEQ ID NO: 382397 - DNA, 237 bp, Salmonella enterica; identical to SEQ ID NO: 77389

SEQ ID NO: 382398 - DNA, 213 bp, Salmonella enterica; identical to SEQ ID NO: 25793

SEQ ID NO: 382399 - DNA, 285 bp, Salmonella enterica; identical to SEQ ID NO: 70433

SEQ ID NO: 382400 - DNA, 1260 bp, Salmonella enterica; identical to SEQ ID NO: 80752

SEQ ID NO: 382401 - DNA, 780 bp, Salmonella enterica; identical to SEQ ID NO: 56175

SEQ ID NO: 382402 - DNA, 558 bp, Salmonella enterica; identical to SEQ ID NO: 25161

SEQ ID NO: 382403 - DNA, 366 bp, Salmonella enterica; identical to SEQ ID NO: 157173

SEQ ID NO: 382404 - DNA, 1110 bp, Salmonella enterica
atggatgaaaaaattgtcctgacgcgccagcaaattttaagctctgcactaaaagtcagcaaatgtcgctcgctcgtaaaaaggcgctttcagtctttgggtttaaagtacgcagattctcaggaagttcgagatcggctaactaagatagaaaaaaacgcgtttcatcatttgggaaaattttgtcagagcaacgatatcgattccctattctccatggcaaataccctgtctgagcttttccttttaaagggagagttgatcacgactgatccctttggggaccgtgaaaccagctactggtcggtaccacaaggatcatgccatgaatggattcaatcgctgaccaccagcgaaggtcctgaacgtaaattcgttagtttccgtatttctttcgataacaatgacgaacggtgtgatcttgtaaaaaagaatgcccgtatgcttggttgttatcttttgccttatttcgtcgatttaacacgcacggtgggcgcattcattaatttgccaggtagtgtctcttttaaacaagtacagcgcatcaaaccccagattcatccagaaacaacacatagtcatatagttactattgaggactctccctttctttctcggttaaaatttaaaatcattactgccatagatcagcttcctgaccctaatggcctttatacaaacacctttaacagcattattgaccgtgcactgctgactcatctcaaaaccgaacaggaaaaaatagatagtccaagagtctgcaaaaatgtgatttcggcttttgccgactcaactctttctctgccggtgtttaacatcggcctaaacgagcagtacagatactggacgccgtggggcatcaactttatagaattttcccgccaggccgcaaaagcaaggaccgctgtatttgttcctgatgtgggacagatcgagtggaaaagcgcagagcataaagaactggcggagttaagcctcatcgaccaaatcatacctaaacagtaccactggctcctgggtatcccgacgatgtggcgtaacaactattgcaatcacgatcagaggctagctctttttcgtgaatggagggaaagcaatggctgcggataa

SEQ ID NO: 382405 - DNA, 507 bp, Salmonella enterica; identical to SEQ ID NO: 105735

SEQ ID NO: 382406 - DNA, 1062 bp, Salmonella enterica
atgctgcatcactgtcaggctaagtcactggatgacatataccttgaggatattccccacatcatacatccggccacggcggtacatgacctcgaagataccgccctgccaaaccggattattcaggaatggaatttaccgcagggatatacacagtttgtcagccggtatcaccagttccaccatcaacgcccctggctcgcttaccgcgatacgcttgacgacatcagatacggtaagatcgttctgcttagaaaagacataaccggcaatgccgggccgggggttatatcaaatggcaacctacgcaatgacctgcccctgtccctctttacccgtctgcgcgatatcatctctcgtcagttgaaacgcccggggtattacgttcgatcaacgacaccagcacagcacgcccaatcaacaaaaaccattaattccaaagcggctggtcgtcttctcgcagctggcgggctttataatggaaatgtggagggatttcgacatacggctgaacaacttggcggcgaagctgttgaaggctatgaccaggtattgaacgaaacaacttcaggtatgctggttgcagcggcttcacttctggttatccgaaatccaaggtctgcggatgaattgacaagttatctcggcaagtacaaaaaagcacacgttttgctcgatgatatgaatgttagcgaattgaactacatgcgccgagacagagctgaatatttagctctccgtggacaattcaacaatactgtacgccctaacttccttaaatcactttcagaccacccagatgccctggctacgtttgaacctaacgatttgatgaaacttgcaacaggcaaggtcccctctgggtggcaggttcaccacaagatccctcttgatgatggtggcacaaacgctatagacaacctggtacttactcagaattcaccataccattcagcactgtcgaaagcacaatccatcattacgaaggatctaccgtataattcaagcaccaaagttctatggccatcgccgaacggtgttatctacccggtaggaaagtaa

SEQ ID NO: 382407 - DNA, 558 bp, Salmonella enterica; identical to SEQ ID NO: 105733

SEQ ID NO: 382408 - DNA, 360 bp, Salmonella enterica
gtgctcagaatactgacagacagaggcacagaatattgtggcaaagtggagcagcatgattaccagctttatctggcaataaatgacatcgaccacacaaaaactaaagcgatgtcaccgcagacgaatggtatctgcgaacggttccacaggacgatattgcaggaattttatcaggtagcgttccgcaaaaagctgtatggcgaactcgacacattacagtcggatcttgatgaatggctggctcactataataatgagcgaacccatcaggggaaaatgtgctgtggccggacgccaatggaaacgttacttgatggaaagcacatctgggctgagaaaaatttaagccagatgtaa

SEQ ID NO: 382409 - DNA, 972 bp, Salmonella enterica
gtgtatagccgaattccaaaccgttctactgtacgtgatattagcgactttaaggtactaaggcttaaagagtttccgggaaaggatatcttacaagtaatatgtgaccatgctcgtagtctctgtggtagccagtattcagtaagccaggctctcaaggttaaagggccggattttttaagaaaatttgccaacgacagtagaaaacaattttgttcacggcttgtggctcaatgttaccagaaggctggaatacaactgacagagaatataaatttctgttcaccaggggatattgagagaagcgattacttagtcgaacagcctgaaatggtctatcgtgcatcggaagaagatgttgcacacgcgcagggggagtcgccgcatacacaacatacaaaaaatgcagtaaattttgttagaaatgcattgagtattttcgaaaattatgggattaagactgtcggctctccagatggagaagtcgttattacgacgttaaatgatataactttagcagtatatgaaaatagaaataaacctggattagatgaagaaattacagaagccatgcgattatctggttaccttgatcatatcgatctggataggcagaaaaacccttacaggtatgatctcatgctctttagtcaaaaagtcgaggttcatggtaatgaaaataagactttggaaattcttagacatgaactcaagaaagaacaggacgtagttgaagttcgtcttcggtcttacttggcaggaagacataatttgaacagtggtctgaagtttaatgaattagaatttacaatcgcgcatggtttactgaagggaatgctggagcgagttattattattgaaaaatatacagtaactaaaagaaacgacgttagattcaaaatgattaatgttgcatgcaacaggatcattcagaatatcacgatgaaagctcccgaattgaatatattgtga

SEQ ID NO: 382410 - DNA, 594 bp, Salmonella enterica; identical to SEQ ID NO: 84336

SEQ ID NO: 382411 - DNA, 615 bp, Salmonella enterica
atgttaatccaaaatattgatgttaacgctctgaagaaaaatgagaaagaaacgtctcatgacaaaggctggggtattatggaacagggtgcaatagcacttgttgtaattatcgtacttgcccttgtttttggtggattgtatatgttgcgttcacgaaccggtgtggcaaatgaaagttcgaacatacagacaatcatcacaagtactcaggggctgctaaaaggtagcgatggatatacgtttaccagtggagccaaaatgacgggtgctctcattcagatgggtggcgtacccaagaccatgacagtgcgtggtactccatcatcaggtacagcaacgctctataactcatggggcggtgccgtaactgttgctccggcttcaacatcaggtttcaacaatggttttaccgtcacctatgaaaaagtcccacaggatgcctgtatccagattgccacacaaatcagtcgtactggtttaactaacggtattaccctgaacagtacgactcacaatgatggaaaagtcactactgaagaagccagtgcgcaatgcacagctgataatggcagcaccggtacaaacaaactaatcttcaccatcaatggctaa

SEQ ID NO: 382412 - DNA, 816 bp, Salmonella enterica
atgatttttaccaaaatcattaggggattcatcagtactgagcagcaggcagcgtctctggaagagactgccgccagtatggaacaactgaccgccaccgtgaaacagaacgccgaaaacgcccgtcaggccagtcacctggcattgagcgcctctgaaacagcgcaaaaaggcggcaaagtggtggataacgtcgtacaaacaatgcgcgatatcgcctccagttcgcagaaaatcgccgatattatcagcgtaatcgacggtattgctttccagaccaatatcctggcgctgaatgcggcggtagaagcggcgcgcgcaggcgagcagggacgcgggttcgcggtggtagccggtgaagtccgtaatctggcccagcgtagcgcgcaggcggcacgagagatcaagagtctgattgaggattccgtgagccgtgttgatgtggggtcgacgctggtcgaaagcgccggtgaaaccatggatgagatcgtcaatgcagtgacccgcgtgaccgatatcatgggcgagattgcctcggcgtccgacgagcaaagccgtggtatcgaccaggtgggcctggcggtagcggagatggatcgcgtaacgcagcagaacgcctcgctggtggaagagtccgccgccgcggctgcggcgctggaagagcaagccagccgtctgacccaggccgtcgcggtgttccgtattcaccagcaacagcagcgtgcgcgtgaagtggctgcggtaaaaaccccggcagccgtgtcgtcaccaaaggccgctgtggccgacggcagcgataattgggaaacgttttaa

SEQ ID NO: 382413 - DNA, 204 bp, Salmonella enterica
atgaaacataaagagcaatggtttttttcgtggaatgcttacgatgcaaccacatgggagcacttaccggcgtattcgtatggtgaagtctacaattgcgatggtgaacaatcctcgcatgaaatattcgaatccttaatggctgaaaaacagaggctgagagaaaacctctggatacagtgcattgcattcaacaaagtttaa

SEQ ID NO: 382414 - DNA, 441 bp, Salmonella enterica
atggctacttattcttttatggacgtcactgcgtccctctccggtccgactggcgttatcgatcttggtcagggttctgcgaactctgaggaaggtatcacccagaccatgggcggcaacaagaacactatgaccatcggtgccgatggcgaagtgatgcacagcctgcacgccgataagtcaggcaccattacggttacgctgctgaaaacctccccagtgaacaagaagttgtctctggcatataacgcgcaaagccagtcatctgccacctggggcaataacgtgatcgtcattcgcaacacagcatcgggtgatatttctactgcgcgttcgtgtgcattccagaaacagcctgatttcaataacgccaaagagggcgggaccgtggcctgggtatttgactgcggcaagattgaccagctgctcggggagttttaa

SEQ ID NO: 382415 - DNA, 426 bp, Salmonella enterica
atggaattcgaaattaaaggcgtgaaataccgcaccgcaaagctcagcgtttttgaacagttgaaggtatcacgaaagctgttgccggttctggccgggatggtttcagacttccgaaatgtgcaggagaagatcagcagcaaagacactgaaggcgcgatgaccactatcctgccaaagattgccagtgcggtgtctgatttgagcgatgacgatgtgaacgccatcctgtttccctgtctttctgttgtttcacgtgagcacatgaaaggctgggttccggtctgccagcatggcgaaatggcgtttgacgatatcgatctgctgaccatgctgcaactggtggcgcgggtggtcgccgattcgctgggaaattttttgcaaggactccctaccagcgggacgcccacccagccagcggaataa

SEQ ID NO: 382416 - DNA, 2112 bp, Salmonella enterica
atgctcgggtggataaatggagagcagccaatgagcagtaacgcagatacgattaaagacttccttgtttcgctgggattcgatatcgatcaggctggtgccaataatttcgaaaccgtgctgaaaggcgttaccgcaaacgttatgaaggttggcgcggtggtggaaggcgcagcgctgagcattgtcggatttaccacccggattgcgaacggtctggataaaatttactgggcatcccagcgaacgggggccagcattcagggcatcaaagcgctgggctatgccgcatcgcaaaccggtgccagcgccgaatcggctatgtcctccctcgaagggctggctggcttcatgcgtagcaatccgggtgcggaaggcttcctgaaccgtctgggggtccagacccgtgatgccagcggaaagatgcgtgatactgcatccatctttactggcgttgggcaaaagctcaacaacatgccgtattaccgcgcgaagcaatacgcgcagatgcttggcatcgatgaaaacacgctgatggcgatgcgtcgcggcatgaatggctttaccgccgattaccagtctatgctgcaaaagacggggttcaacgcggataaagcagctgttcagtccaacaaattcatgacttccatgcgcggtcttacgtcgctgttcggcattatgcgggacaagatcggctcaaacctcgctggtggtctggctggttctctggacagcctgcggcggcgcatcctcgacaattttccgaagattgaagagacgctgaccaaagtcattaaaggtgtgatctggcttgctaacgccttcacgcgaatggcttggcgggtgatacaggccgctggttctgtcattgactggtggaaaaaactggacgatggcagcaaaaagttcctgatgacgatcggcgcaatcctcatcgcatggcgtctgcttaatgctgcgttccttaaatcccctatcggcctgattaccacgctgattctggcaattgggctgctgtacgacgattaccagacgtggaaagagggcgggaaaagcctcatcgactggtccagatggcagccggagattgagcaggcaaagaaagtacttaaatggctgcgcgataggtttcttgagctcaaggacaacctgggtggctggaaaaataccctcactcttctgttcagcttcctggctggtgcaaagctggtttctatgctggccgggatcgggaggattgtctccgggtttaccggtctcggtaaggcgattggcagctctgttggtggcctggcaaaactcgcgcggggtattgccgaactggcgataaaaaacccgtggttgctgatgttcatccccaccaacaatacgccgaccaccagcgaagaaatggcgtcgattggcggtacaggtagtaatatcgtacctgaaaggcagcaggcatatgaggcgctgagaaaggaaaaccccgggaaggactttttcacctatgagcaaatacagcgcaagattcaggaaatggggctggagcctgagcagcaggcgcaatccgttaaacgtcctcgtgcgaccgcgcagggaaaaatactgctcgactggatggggccgatgttcaataagctggagtctctctatcagctgcctgccggcttattgaaaagtgtcgccatcactgaatcaggcgggaatcagtttgcagtttccggcgccggcgctaaaggcctgtttcagtttatggacggcactgcacgagatatggggctgcgcgggaatgatgttttcgaaccggagaaggctgcgcaggctgccgctaaatatctttcacagttgctgcgggcgaatggcggtgacctgagcaagacgctggcgtcatacaactgggggatcgggaatgttaaacgatatggaatgaggctaatgccgaaggaaacacgcaattatattccgaaagtgatgagtaatatgcctgccagtgcgccggtgattcagcaggaaacgaacataaatatccacggtgtttccgatccgcgcgaagctgcccgtttgactgtcgagcgtcagaagggcgtgaattctcagttaactcagcaacttcccacgggaccgagataa

SEQ ID NO: 382417 - DNA, 603 bp, Salmonella enterica
atggatattctgtcagcgatttttcgccagcaatcccggcgaattggcatactgatcccgagcgtggtcgtttccgaaaagcactctgatgcgctcgaaattactgaacatccggttgaaagaccaacaacgaattctgcatcgggttttattaccgatcacgcttataagcgccccagtgaggtcacgatggaatgtggcttcgctggtggcggcgcgttactggattttattgatacaacatcaatcggtctcagtgccgggcttagcccaaaggagacctatcaaaagttgctcaggctgcaatcagaccgccttccttttgatgttgtcactggaaagcgggtgtacagaaatatgctgatcaaaacgctggaggtgacaaccgataagaccagtgagaatgtcctgaactgcatactaaccctgcgtgaaatcattatgacgcaaacaaagagcatcagtgttgctgataagtctgatatgcaggatggcgtcagtacttcggcggtgcaaaatacggggatgaaatcaactacgccgccaaatgagtctgtactgagcagcgttgtcagcggcgggtaccgactgggggggggataa

SEQ ID NO: 382418 - DNA, 342 bp, Salmonella enterica
ttgtcagcggcgggtaccgactgggggggggataatatgcagataaatgaaataccgttatcaccggacaaccagcagtttcgcatattgcttggtgacacgacttacactctcaggatcatctggcgtgacacggctggctggattatggatgttatggatagtggcggcgctgtgttgctttccggcgttcctctggttaccggagtgaatctgttacaacagtatccgcaatcaggcattgacggtgagctggtggtgatcaccgataaaggcgcaccagaagacccgacaaaagacaaccttggcatatacagccatctcatttttgtacaggtgtaa

SEQ ID NO: 382419 - DNA, 1065 bp, Salmonella enterica
atgtctcttaactggatgcgccattttgagttgcagttgctggatcaaaacggtgagggcgtctccctgtctgattttaaggttactttccagatagaatgggcagatactcgctggccgcgagtggctaatgtaaaaatttataacctgtcacccgacactacgcataaaatactcggtcaggaatttgcgaaaatccgtattattgccgggtatgacggcattgcaccggatgttgacgccagccaggttggcgtcgccagggagatttcaccagaccagatagggcaggtgaacggtcagaactatggccttatttttgacggtgatattcgttttactgtgacagggaaggacaatatcactgattcctgggtgctggttcaggctatcggcgaccatgaggctttcctgtatgcgacaactatcaccacgcttgccgctggttataccgttgcagatctgtaccgggcgacaatgaaggatttcaacgcgttcggcgtgacgcagggcattaccggcgagtttcctgacaccgtgtttccgcgtggccgcgcgatttactcatccacccgtaacgtgatggataacatagctgcacagtgcaaagcgacgtggcaactggtggatggtcaggttcagatggtgccggaggataagtacatccacgaagccattgtgttgaatgccaatactggcctgatcggaatgccgcaacagacgatgggcggcggcgtaaacgtgaggtgcctgataaacccgaacatccgcattaatggtcttatccagctcgatcaggcttcagtgtaccgcgccacgctcggcaatagcgaaatcgctcagtcgcccgggcgtatcaccgaaacagaagagaacggcaaccgtgtgctgaccggcacaacgtcacaggctgccagcattgcgacagatggcgtttatatcgtcaaagctatcgactatactggcgacaccagaggtcaggcgtggtacatggatttgatgtgcttcgcgcgtggtgctcgtgatctttatagcccgaaagcaatgcaagggacgacgaattag

SEQ ID NO: 382420 - DNA, 345 bp, Salmonella enterica
gtgagacatttactttgcactgttaccgttttcgcggtgcttatatcagcgcctgcttttgcggatcagcaatgtggtgattttaaaatccattgggcagatgatggcttagccagaatcaatggcgcaaagccagaaatgcaaaaaatcaccttcctgaaaaacaaaggtgattataacaatatcaagatggattggcgtatggccaccgatcagcctggaagatgggttggtcttgagtacatcaatcgaaacggcaagataattctcaatgcccagtggctgcaagccagcatgaatgcgccgcgtcagtatgcaacctatgattgtataaaggtgaagtga

SEQ ID NO: 382421 - DNA, 543 bp, Salmonella enterica
atggctacaccattaagagcttccgaaaactatttgatcggtttaggggaattgctggaaagcggtactccgatcgacgaatttacctatcgctatgttatgcgtcatttttcttcgagtttagaaggtaatgatgttagcgccgtagggtttgcgtacgctctaaatggtgaggatgaggctgcttttgagcatttttctaagcaccttcgtccagatagccccatgattgcaaataactttgtcgtatgccttttcaggcgttgtatgttccgtaagatgcatgaggtaatttttgatttggctgacaccttcggtggcaagatgttgagcatgatggctgcatgtgaagcattccgtatcggagaccttgagctgatcaaaaaatatattgagtatcattgcacgctacttactgacgatgaagacagggctggagctgaggaatatatgcaagaattaatcggcaaggtttccagttgttacgaaagtaaagtactgagagatcccctcataatttccccaaagcgtaaccatgtgtga

SEQ ID NO: 382422 - DNA, 1053 bp, Salmonella enterica; identical to SEQ ID NO: 31750

SEQ ID NO: 382423 - DNA, 201 bp, Salmonella enterica; identical to SEQ ID NO: 31751

SEQ ID NO: 382424 - DNA, 717 bp, Salmonella enterica; identical to SEQ ID NO: 283211

SEQ ID NO: 382425 - DNA, 3390 bp, Salmonella enterica; identical to SEQ ID NO: 163225

SEQ ID NO: 382426 - DNA, 174 bp, Salmonella enterica; identical to SEQ ID NO: 118103

SEQ ID NO: 382427 - DNA, 3189 bp, Salmonella enterica; identical to SEQ ID NO: 105749

SEQ ID NO: 382428 - DNA, 978 bp, Salmonella enterica
atgaaacaaaaatttagggctactgcaataagtagtaatcaacttagttttttttctatattcgatatagatgaagatgaaataacgcaaatagttgattcacccaaagagcatttaaatgatgcatacacgtccggattaaactttaaatcagatgaaagtaacatttctgagataaattatgattctgaaaggcgtgaaaatcacctttatgaaaaatccaaattacttaaaaatcagattttgcatacaattaattttgcagcagaaacagattatctatattcggttgaagaatataacccagatttgggtggtctggtaatagaatggacccctgaggatgtgtatgttgtttttctatccgctatggaagagtctttggaaatcattaaagaactagtgttgaggagaaagttattcttcaaagatgacaatggtaatatcacagtgaatccacttttagaagctgaaacacggtggtatatgtcaaaatcatttgaatacacttgtttatctcatggacttgatgcatgtgaatttagagcggaattaaaatcatggctctattatcattcgcatcgttcgattagtgaaaacacgaaattagctgaatgcaggaatgatgatgaaatcattttgcatgattgcaatgacgatatgggctgggacatcttctttgatcaggattatttaatgtcagaaaaaaaactggctgttaaatggactgacagggaaattatggatgtttacataaaagcttttaaatccacattagagttgtttgacgagcttgtttcatgtgatctgttaactaaacgaaacgcttttggcaagttagaaataaatccaatattcgaaaatcattttgaatggatcatgtctgaagcttttgaaatagggggaaatcatcttggttataatgtgcctcaaatcaggaaactgatggcaactatttgccaaatgaatctcaaataa

SEQ ID NO: 382429 - DNA, 555 bp, Salmonella enterica
atgaaagtggcaaaaaataaaaagaacgaacagtttttaaatattaaaaaattcatcccttatacaccggaaccagaggaggcactattccccggtggggcgcatcttaaatcagaggatggtcaggactggtataagtgccagaaattattttcagaagacacgctgaaaattacctacgacgataatgacgtcattacgtgtatcacgcgcgatatttccggtttgtggcctgcgggccagagcgttacagagttgcctgatacggatgaaaaccgtctcgctgatatttcaggcggctggcagtttaaaggcggtaaagtcgttcaacgggtttattcgccggaagagctgcgtaaaaaggcggaggctgaaaaagttcgccgccttgctgaggctgaatcagccattgcaccactggcgcgggcagtaaaacaaaaaattgccacagatgaggagattaaacggcttgaagcatgggaactctacagcgtaatggttaaccgtgttgatacttcagatcctgaatggccggaggtgcctgatgtggcgtga

SEQ ID NO: 382430 - DNA, 438 bp, Salmonella enterica
atgacagccacgtttaatttatggggcgacgcaaacaggccaacagttattgaactggacgacgaccagggatggcatctatacagtcagcgaaatcctgatggttcgattgtctttacggtcaatggagatatcaccgctaacacacttcgttcaggtggagccatctatcagaataacggtgatatctttggttcgttatggggaaatggctggttaagtacctggattcacaacaatgtagtaaaagcggtcagacttggccccgtggcactttctggcggtctgtggcgtgattttcagcttggcggcggacaggtggtgacggggttccatactgacggtagctgggaaatggaaggtgatgatgacaaggtttattaccgtcccattcagtatctgattagtgatacgtgggtaacagccccaagtgtataa

SEQ ID NO: 382431 - DNA, 1389 bp, Salmonella enterica
atgagtcagtctccttatgatgatgagttcagggccatccgttatattcagctccgtggtcaggatatcgcgaacgctcacgagacaattaacagtgatatagagagccttaaggcacagttgaccgggctaatcagcggcactgaacttgatgaagcggagcatctggcgcttaaagaacatcatctgcgagaaatgaccccttcagatactgccatgcattctactggtctcaagactatatatagcgaggctaaccagcgtgtatgcggtgatattggactggccacaatactctccacggatgacttggctgttgtagatgcccggatccagaatcatattaaagaatttaatgatcgctacgcactcgacgcctgggattatgctattgcctgcggatgcgggctcatagcatccatgctggatttactttgcgtcagagccccgccaaaacctacggtgagctttacggcagaagtggatggtattttcaataaacaggtgcagaaagccttcaatgccattttgccggaggacctgagtacaaaactctcagatttgttccctataggggcaccagacagttcgatcagcagcgatttagtgggtgcggccggtggcgttttgtctcccacaaatcaccgcttaagagctttgtcacacgatcccgtactgggcattattttcggtataaaggatatgctgaacgggacctgtacggtggttcagaatggacagatcgtggtttatccttccagtaaaggcgttacagacgaaaccaatattttcaggctcatcgccagaatgtttggacacctggcatcggatgttaatgccccctcagcaaaaggaaaccgtggcatggggttaccggctccttttatggggctacttcgtatgcttgaggggatccctgtggggagttctaacttcggcaaacaaatagagtacatgtatgtcaacgggtatgactttcgtcagtttatcgtgacaagtattccgatgagcataatggaagttttgatgcgggttttctatgtggcgaaacaggtatcgctgggaaaaggagcttttggggagaccttactggataccatgccgttgcggctaaatccacgcttccggatgatgcttgccctgggttatggaacttccagtgctgttaacgcaggtaaaatgtatatcaccggcaatattctcaatgcgaattacgcctcctggatggggttggcctggaatggttttcactcactcaagtggtccctttatcagcgacacttaaagctttgggccggtattgaaaaggcagaactggaacggcttcagaacaatatagacagcatcgaggcattgaccatcagagcaggaaacttgccagtcaagtaa

SEQ ID NO: 382432 - DNA, 498 bp, Salmonella enterica; identical to SEQ ID NO: 105546

SEQ ID NO: 382433 - DNA, 657 bp, Salmonella enterica; identical to SEQ ID NO: 31747

SEQ ID NO: 382434 - DNA, 456 bp, Salmonella enterica; identical to SEQ ID NO: 31745

SEQ ID NO: 382435 - DNA, 1254 bp, Salmonella enterica
atgaatttacttgaaaagatcgccctcgttggtcagcgcatgaaaagcgagcagatttctctaaaggaatctctgatggcttcatcaagagtatctgtttctgatgatagtgttgatggtgttgatagactgatctataaccactgtttgaataaaaaaaatctctctgatttttttgggaagtcacgagtaacgttcaataaaatactttcggacttagaagaaaaagaacttgttggtgcacctatttatcaaaacaaaaatcatctttacacccgctgggatgttcaaaaaataatggatgccctgggttatcccaagtaccgcgatcattactttagcagagctattgttactcagaatcataaaggcggtacagggaaaagcactacatctgtagctttagcagtagcagctgctttagatctacaactcaatgcacgtgtattaatgatcgaatgggacccacaaggttcgattggaagcagcatgattcaaagtgtctcagaagatgatgtcttccttacagcaattgatgcaatccttggaatttatgaagaaaattctgagtataaaaaatatttagattcaggattctctgaagaagaaatcatcactaatatgcctttttcaacgcatctgccaaacttggacgtaataacggcttttccgacagatgctcgttttaaagataaatactggcaatgttctagagaagaacgtacgtctttgttactacgtttcaaggaagttatcttaccggtactgaagcagaactatgatttgattattatagacactccacctgaagattcacctttgatctgggctgctgacgaagcggccgatgggattcttgtcgcagtgtcaccacgtgaatatgattacgcctctactacagacttcatgcttacaataagtgaaaggtttaaacaatcaccaagtaagggcgacaatttaaaatggttcaaagttcttgctgtcaatgtagatgacaaaagtccatatgaaagaatagttttggataaattaatcagaactgttcaggaccttttgatgtccgctaacataaaaaattctgaagcatttaaggcagctgcttccaaagggcgtacagtgcttgatatcaaaaaatcagaggaactttgttccgcaaagcagcttgatgtcgcagaagaatctgtattacaggtatatcagcaatttataaatgaaataaaaagtttttcagctaagcaaggagttaacgcatga

SEQ ID NO: 382436 - DNA, 2682 bp, Salmonella enterica; identical to SEQ ID NO: 105740

SEQ ID NO: 382437 - DNA, 711 bp, Salmonella enterica
ttgaaaaatttaatccgtagaattgaaaaatattttaatcaggaaatggatttcaatgatatttcatcgactactatcgacggaaacgaaaatcttttatctggtgctattactttcttaatgcacaaaaacattgatagtgaagtctcattgtctttacttcaatatttaattgatcatggtgttaatgttaatcataaaattgaagagtctaacagcccattaataaaagtttttctttatcaatggaagaacagcgagtttaaagcaaaggtcattgaaatacttttatcaggtggagcagaacagaacatacccggtcacaaccttcttgaatatgctacggcgaaagaatgtaagctcttactggcttatggtgcagatctggaaagaatcgctgataatcgctcacagacggctatctttgattgttattgtctcgataagctgtctgtgctgattgattcaggggcaaacattaatcactcaaacaaaaagggtaaaacctgcctggcttgctattacaagaaaagcgaatatgtcagattcttactggataatggcataaatgcagacattttcctgaatgatagtgattatacggaagaacaaaagaaaactgttaatgcaataattgctcaaaaagagagtgagcagttaaaaacagtgttcggaaataatcttgagtcaaaagggatgattagaatatga

SEQ ID NO: 382438 - DNA, 375 bp, Salmonella enterica
atgataaagagatacagtgaaagacttgcagaactggaactactacaaaacaggctgttgctgtcgttccgaacggatgacgacgattttattttatctgtatgccgtcaaatcagcgatacagggctaaatctcaaatacagtaatacagattatattttccattatataaactgttgctcttaccacagagaacccagttttattgtgattggtttactgttgtcattacaggctaaaaaaacggtcatggcatacagattatttaagaagctgtatatagataaaaaagatagccacagcttaactgacaacattcaaagaacggctggtagtttactgactgttatgaacagaaaggaaagtgcagcttga

SEQ ID NO: 382439 - DNA, 549 bp, Salmonella enterica
atggtattaagaatccgagacaacaaagaaagagtaaatttattcctggaatactttgattgcacttatgaagtaaaaccacgaaccccatttaatcagcctgatgtgcttacaatgaatttttactatgccttaaagcttttctgtaaaaattacaatgaaatctatgatgcccctcatcactggaaagataaaataccagctttattcactggatataaaatgctttttgaaagtaaagagttaaaagtgtcttttatttgtggaacaatggcaaaaaaggcaagaataagggaaaagtatcatgtatctcatgctgttactttccgtgttccttatcactggaatggttcaagagaacccgtaggcattgccacctatcacctggcgattgataaaactttaaacgacgaacaaatagaacaagaattttataaactactcactctttttgaatactcattaaagtatcatcaagggaaagtacccgtctttaaaatagatttaaacaatccagaagtgataagaccgaaatacgaaaaagaataa

SEQ ID NO: 382440 - DNA, 1152 bp, Salmonella enterica
atggcattttacaagaaaagaacttccagtgatcccggaatgaataaagaagataaaatgaacttattcatggaaacacgaaaagcagaaattatagaatctcttaaccaattacccgacgataaacctatctggcaatcccccgtttttacaaccaaatacataaaccctgtgagtggtgctaaatataatattgaaaactccgttttgctgttaggtcaaatgagagaacgagctttaaagaatccagacgaaaaagaaaaacttcccttctttatgacttttaaccaagctaaaaattcgggtctaatcgttccgaaaggaacaaagtcttttgcgatattaaaaagattcggaaagaaatacgaagtaaccaagctggacgaagcgacaggacaggaagagatagaagaaaggttcaggagagcagcttcaatagatttcgtcttcaacatttcagatctggaaggagagctatcagcgaagctacaacgaaacatgagtatggggtttagtaaagccaccaatgaagaggcaaaagtcattctggaagcactggaagcgacctcaccggtgaagatcaccagggtaaccgactttaacagttcgtcaggctcttactatgtgccgtcagcagagtttatcaaccttcccccgtcttccctgttcaggaatgtcatagaagagatctccaccctggcacacgagatagcccactcctgggggcatagcagccgtttgaacagggaaaccctgaatacatacagccaggacaacaaagcacgagctgaagaagaactggtagcgaatgtggcaagccaggcagtcgttaatcattttggtctggaactggacgacaagagacagtttgagtcatacgaaaagaaccatgacacttatgattttggctgggcgaagcttcttaaagacaacccggacagcataacaacggctatccagaatgcagataaaacagcgggtaaaatgattgccgaagttgaattatggttatcgaataaattgaaagataatccagatcttgcggtatcagaatttattaaagacagaataaataaaaaacaggaaaaggaagaaacaccagaagaaaaccccactcctgaaatctccaccaggagaaaaccttctatctga

SEQ ID NO: 382441 - DNA, 345 bp, Salmonella enterica
atggagtatacaataaatttctttcataaccttgacgacatattaaaaggtactcatttaaggcttgtctttgtggctatcattggatttgccatttttatgaaaggtatcaggcatgttatcaatgattttccagtgctggtaagctattacaaacgagccaaacgagaaggatatacaaatttccagttctttattaataatgctcacaacattggaatgtatcttttagttttgtttgccacggttttgagtgcctatgcaatttatttcagtgcagaaaggataaacacaattcaggaattgcaggaaaatacagtcattaccacacccaaaaataaataa

SEQ ID NO: 382442 - DNA, 1119 bp, Salmonella enterica
atgggattcggaactaacgaagctttaaatgcagaaaaagaacaaaacacagaacacttcaacacccaacagcttgaaaaaacttatgctgatgctgttaacaatgtcattaagctaaggagagatctgaaaggatatgaagagacaaacaaccaggaagcgattgacaagacttacgaacaaatagcagagcttaaaagcatacagaacactacctataatgctctcggctatgttccacagtttgatgacctggaaaacgaagaagaagtaatccctgacgaactgaaagtgtttgctcaacagaaagacaataaaagtttaaccgctgccgttgtatcaccggcaaatgacgaacccgccaaacccgcaccagtccatagcagtgcagaaccaacagaagaagaactgttccccgtagagccgaaggacaacggttttactgataaagcaccagtagcagctatgaccgtggcgaacgacgatccagagcctgccgttaaggacactacggaacaggatattcttgaactggaagaacttcacaatgcaaacaaggggcagtcattcaattcaaaaacccgcttcctggacgacgaagattatcacaggcttttcgataatataggtcgaattggtagatcacttgatgggcaaaaaagaattgtttacttcaaagacaatactcaattgcttgaaaggactgactctattgtagtcatggcaagaaatcagatcgacagtgcaagaagactcgttcttgtcgctaaggaaaaaggctggaatacggttaccttccagggaaattcttctttccttgaaaatgcttacttacaggctgttcagaacggtgtaggggttaagccattaagtgaagaacaaagacagttttacaaagaagttcacaataaatttaaacttgatgaattaggcattaattttctgggaaaaaaatctcttaaagaccttgaagaagaaaaaaaggagagggaattagcgaaagtcagtaatgccgaacccgaaaaaaagcctgacataaaacagcaaaaagaacctgaaacacctaaaccagaaaataaaccagatgaaaacaaaccaagaagacttttcagaagataa

SEQ ID NO: 382443 - DNA, 744 bp, Salmonella enterica
atgaacataaacaacaataaggacagaataaaagaaatagagagtcttggtgtaagcggggaggaaactccccttaccccacctgatggcattgtgggggcaattaacgagttaagggaagaagagtgttctcttcccgatcccttgttcgtcggcaagctggttaaccctctcattatgaaagataagccaggttattctaaaaaaatgaaggagagaaagcatattacttttaaacccaatgaagacgggttagatttacttgaatgttattataatgatttttatatcgagctttacactcgtgattataatgaacatttacaggctatacctaaaaagaatttagaaaaactggcaagagttgataagaaattccaaacctatatggaagaaaccgaatacacattttatgagaacatttcagagttgtttgatttattcggtgatatgatttttgaagattggggtatggctacaccatcggtagatagcagtgttatgttcacaaaagcagttttaacagaagccgtattaagaaatatgcctgtctatcctgatttaatgaatgaacagcaaggaagaattttaagaagattatttatcgacattaagcatgaatacaaaatggtttaccatccagagatgacaaaagaagtaagaacgacacactatatttgtggtaaaaattattatgagtctatgagtaaaaataaaagttatttattatcatcaggttattga

SEQ ID NO: 382444 - DNA, 411 bp, Salmonella enterica; identical to SEQ ID NO: 159098

SEQ ID NO: 382445 - DNA, 495 bp, Salmonella enterica
atgataaataaaataaaggctgtagaattaaacgaaagagacatacttcaaagattcggtgatgatgttgtcttaataaataaactaccacacaacatatatacgaacgaaaaaggtgttttaatagagaacccactttcattaactgataaattactatctgtatccgtaggtgtaaatagatatggtttttctgtgctttatgtggctttactggtagaagttatagaagaactaaaatcaatggatcaagaagaaaggaataaagcattaagtataatatcaagaaaagcatatagtattaaacaaatgataccaaagattgaaaaaagaaaaatgcaattatttgttccagaaaaaactcttgaagaaattcagaatatgcttcctaatttatttaaaacaaatttaatacctgctttaattgattatgccatagatttgaaagaaaaaagtggaaatgtatttttatttgaatgtcatcaagaggggtaa

SEQ ID NO: 382446 - DNA, 609 bp, Salmonella enterica; identical to SEQ ID NO: 31743

SEQ ID NO: 382447 - DNA, 354 bp, Salmonella enterica; identical to SEQ ID NO: 31742

SEQ ID NO: 382448 - DNA, 3336 bp, Salmonella enterica
atgggtgacctggtcagcaaaaataacattgaccgtttagagcgatttcattctttgctggcgggtcagtactggacgtccactgacagcatccctgaagagggtattgtggcaggggatacgctgctcattacgtctttgcgttacgttgaagataagctgcacacagtgattctacgcgcccatccccgcgtttacggtcagactgtagctattgtcactgaagacagcagcggcaaccgtagggaacgtggcaaagaaatgcgagagcatcgcttcctggttaaggattttctgtccagttttgtatttgaacccgaccataaggtaatccgggatgctgaactcagacaagctcaggaagaagtgaatagcctacaggcatcgcttacagccctcgtgagcgatgctcaggggctccgtgaccttgcgattgagcaattaggtacagatgaccgtgaaaaccctgtgacgggccttagcgttgcgttagtgcccccacaagagcagcaggcggtaacctcactggcgattggatcagttcaaaatgctctgtcctctggtatttcagatacccgcattgaacaaatcagagaagcggccttaaaagaagggcagatcagcacagccatcagcaaaatcatcacacaacgaacgcaggcaatcgctaatgccagcaaaagaatgctgccctatttcgaggaagttgcagcggcaagtctggccactacagaagaagccatggaatatgtgaagaaaatccacgatggcgttggcagtctggaactgtataccggcaaagacgttgaggtagtgaatatcgtgaagggtgaatccgctccatcacacctcccgctccaggtcgttcaggcaaagctgatggtggatgaagagctggccgtatggtgcgatctcgatagctggttcgacttctctgatatggaaaaatttcatgaaactttacgaaccagccccgggctggtggagcagatttttccgtccgaacgttccatcgtatgtatggccacaacacgacgttatatcgattaccgcgatccctgggaaaatcatgtccgcaatgacaggaaccgggttgtattccttctggtccgggacggtcaaaatattcatcaggtttactcttcggtagaaagccatcttggggcttcgcagctattcccttccgccagcgaacaggaagcacatttccaggggattgatggcagcaccataaagtttgaggacgtcagttataccgaccgactgaagcagcatgatcttatggcacttcactaccgtcgtttcctgatccttatctgcggcctcgatcaccggctcaaactatttggtgatttctatgataccaataccccttacagttttctgagccttgagttccaggaacggtacttccaatttctgcacgacaaagacggttctggccttttgggtatggctgagacacggccgtctctgcaaagttatcttgaacaggcaaactcatgccttcagtccggatcccgggtaatgtgcaactgggattcgttgatgaacccagtgacagcaccaggagcagttcaggaagacaacagctactctggctataaatggcttgggagaacccataaaaactatgagccggttattgcattccgtcagggagacgatatctgtgtcaacgcaacagtaaacagatactcaacggatcgagatttcaattgtaaggtgaatttgtctttatttaaggagtccagcaggaatgatgctgaactgggtttcctgtgcatggataccattaaagcggaggagctcgaatggtacattcacagacgtaaattcaggtctaatcacctgttttacattcgcttcttcaagatggctttaaattatattcgtgccgagcgtgaggcagaagaaccttaccggcagatgctgagccaggctctggccgatggaaatattggccagcctaatctgagatcagagttgatagatcgatgcattgtagcctggcgagctgataacaggggggcgacgctggaagctgccatgagtacagagaagggctccaaagagctcctgaaccagctctatatgctcgctgatgtggggctcaaacatcttcccggggttcgtaattttattagcagcaaaggctatgagctggtcaggttatcggtaaatgcttcagggaaacttgttgcatatgccgcaccagcaaattttgaatgcgacaaccggatggaagggcatgcctgggttcatcgaatggtacttgctacatcccgaaatggcttaaacgtcactcatcaacgttttgcgaaaatgaaacacttcttaccagctgaaaacaccctgttcgaagatgaacagctggtggccacatggtcgggcaaaaagactgctttcaaaagcttcgaagagaagcagcgttattttgatacatgctcccgtggcgctcaggctcttaagcagtttttaaagctgaacgatccggtgatttacaccaatctgcttggccagtggattgaggcctatgaaagtatcaatgaaaccagtgagtacgtacagcaagtaagcctaatggctcctgttgcggtcaagagcgaaaaaggtaaagccagcctcatctatattggcactaaagacctggccgactggttttatcagaaagcgccgacacccgagttgcaggcgctgttccttgaggaatacctgtccaaatttgaaaataaagaggtcaataaagaaaagctactttcacgcagaaataccgctctgtctctcagtttttacaccatggacaacggggaagtaccagatgaaatcctcgtcaccaaatcagttgataatgccagacggtggtattcaggaatgttcacaagcatgccaacgatgttaaatgaccagtggtcctgccatgttgcgcatttttcccgtaacggaaaactctatttgacgcctgatctggtcactgatgaaggggaacctggttttgatgaaatactcgggtatccgcgcccggaggggctggtaccggtaaccgtgtgtgagtttgaaattgaccactttaaccgacgtggcattgatgcgaatggtgataaggtgaatattacacagtgggtcgatatttatcagggtgagcgtgaggttacggaactgctggggcctatttctgaagaaggggtgaacatcaaaacctacaggatggacactcttgagcaggcgatgaaaaacatctcccggggctcgacgcgcctcagaccgtcaacggagaatagcgagtggcaacagccagcagaaggtgtgagccgctatgtacttcggtcatggtaa

SEQ ID NO: 382449 - DNA, 258 bp, Salmonella enterica
gtgcatttcagtacaattatcacgatggtgtttgttttgcgtcgaaagatggggaaacgttggctggatttatttgaagaaaaattagccatttataaacctaatgataaactcgcgcttagcgaattacacgaaagcatacgtgagaaaaatgggctagacttgcaggatttacaagattggtactggaaagagaagatgacatatgagtatcacaaagaacgtaaaacaactataagctatcaaaaattcaagtag

SEQ ID NO: 382450 - DNA, 528 bp, Salmonella enterica
atgaacattaccgacaaagaacttagctcaaatacagtgagacagtatggatggaacttaggagagttcaatcactcaacgccttttacatctcattttatttatatcaccgactatcataaagataatacatggatgatttcactttcgcaggaggattttaatacaaccaaaattttaacatcgttaagtctagatgcctgtgtatccatgctcggaaagatactaaaaaaaatgtctaacaaaaacggtatctcacaaacggaagaatctgaattcgcatttcttttaacaaactatattaaacagactttgacttttagagaatggcaacgcaatgctgacggaaatcaacgactgcactttcttattaatatctacggtgcaaaagaagacggtggcgaagtggttttaagaccatttattgtaaatcctgatgaattaatgcttactccagcggatgtcgttgaatttaattcgcaggttatcaacgttgatcggcagcgtcatcctgagtggttccgttaa

SEQ ID NO: 382451 - DNA, 177 bp, Salmonella enterica; identical to SEQ ID NO: 31741

SEQ ID NO: 382452 - DNA, 672 bp, Salmonella enterica; identical to SEQ ID NO: 105759

SEQ ID NO: 382453 - DNA, 306 bp, Salmonella enterica; identical to SEQ ID NO: 105758

SEQ ID NO: 382454 - DNA, 303 bp, Salmonella enterica
atgtcatttaccaccactattgagaaacgtgcggataaccgcattttcgccggtaacgatccggcacataccgcaacgggagtcagcgggataacggcggccacaccgatgctgacgcccctgatgctggatgataccaccgggaaactggtggcctgggacgggcagaaggccggaacggcggtcggggttctggcccttgagctggacgggtcggaaaacctgctgacgtactggaagagcggcacctttgccacagaatcactggcatggccgaagagtgtggatgccattaagcactga

SEQ ID NO: 382455 - DNA, 525 bp, Salmonella enterica
atgagcaacatcgacaaacgggcgcttcgtgaagtggctgagagggctacgccggggaattggcgccgcacctcatcactgttcaatggcatcacggtaacgccattttctctttgcggtgaagaagtgacgttagcccatactgttgagaaacgtgacgcggaatttatcgccgcagccaaccccgccaccatgctggcgctgctggatgagctggaaaccaaagaggaacagcgcgccaattggtttcggatggcgcagaagttaggcgaggatttggatacagcagaacgcctcatagccgaactggaccaacgcctgattgaatacgcgggaattgcaacccgtgaggctcgccgggtggcagaactggaggcgcggaaggtcaacctgtcaaaactcagcgttggagaagtcatgcacatgaccggattcagccgggattatgccgagggttggtgtgctggtaatgataatgcgatacacgaaatacgcaccgctggcatcaaggttaaggagtcgtga

SEQ ID NO: 382456 - DNA, 213 bp, Salmonella enterica
atgaccactattaccaaagaacgcattgagcaatacgccaatgacccgcgcatgtttaatgttaacgatgaaattcgccagattgctcgtatcgcgctggcatcgctcgaagaggaggctattggtgaagtttcagagaagcggcatggtcttgttatggatggaattgtagaccttggtggggaatatacttaccgcatcattaagggataa

SEQ ID NO: 382457 - DNA, 282 bp, Salmonella enterica
atgagtatcaatgagttagagtctgatcaagaagattgggcgttatcaatgttgtgcagatccggtgtcttgtctctatgtaggcatcacgaaggtgtttatgtagatgaaggtgtagatatagagtcggcatacaaatattcaatgaaggtttataagtctaacgaagacgaatccccattttgcaatgcgcgagaaatgactgatgccgtacaaaattattatcacgagtacgggggaaacgatacttgccctctctgtacaaaacatatagatgattaa

SEQ ID NO: 382458 - DNA, 495 bp, Salmonella enterica
atgatcacccctgaaacagccagtcaggcgttatcgtcatggctggcatatctacagataacccaggaaaccgccacgcagctgatcacccgcgcgttcctggagcagccggcgcgaccgcaaatagcggttcaccgtatcgagcgtgacgacggaacggtggattacgacgcatggcgccgtaaccggataaacatttttcagcgctggcggaaacgggaaacggcggagcactgcgagaaattctctgcgctgatccccgctattctggaggcgatccgcaaaagtgcgccggagttgcataaacgaataacggcagggcagagcattgaatacctgctttcacagcttttaaaaaaaccgcagtggccagcgcggtacttcttggcgcgccgctggcggattttgagcgggagtgtgacgaggccatatatgcgttacaggcgttacgtagcggttatcgccagcagtaccagagacatgaccagtgagtaa

SEQ ID NO: 382459 - DNA, 684 bp, Salmonella enterica
atgccattaagttttccaaatgtatatttaaatacccatatgagaatagagacattaccctcggatattctcgacagtatacgtaatgcagccagacctcctgatggcgcgactgggccgactgaaatacaggtgcaactacgtgatgcattatacctggtacgtcatagccccgacgaaggagcatttgaggtggttccatggcgtgagccggggcaggtttatagtgatattcgcaggagttatccagaaaggtttagcaatgcagaaaggttggcacgccaattaaatcgtacatggaatatgcctgcaccgcctgcatctttaactttttctgaatcccagaacgccagataccattttaatactcaacctgccaacataagagatttattacctgttaggattaatttctgtagttttcaggttgaagcaggaagttttgcatgttctgaagaacatttaacttgtccgataacgctggatattccaacaaacggtgtttttgttaaagtatcatcacagtcagatatttgttgcttatttgacaaagaggcattcctcaacctggtgtgtcagggattagagcatcctttgagtcgggagcctatctgtatgggtatgatagttagaaaaagtgaatgtttttttaataccgagcgtgataaatttaccttaaagtag

SEQ ID NO: 382460 - DNA, 252 bp, Salmonella enterica
atgctgaaagatgacccgatatccggccatgtcttcatcttccggggccgcagcggcagtaaggtcaaactgctgtggtccaccggcgacgggctgtgcctgctgaccaaacggctggaacgcggccgcttcgcctggccctctgcccgcgatggcaaagtgttcctgaccccggcgcagctggcaatgcttctggaaggcatcgactggcggcagcctaaaagactgcttacgtccctgaccatgttgtag

SEQ ID NO: 382461 - DNA, 768 bp, Salmonella enterica; identical to SEQ ID NO: 40324

SEQ ID NO: 382462 - DNA, 957 bp, Salmonella enterica; identical to SEQ ID NO: 118529

SEQ ID NO: 382463 - DNA, 999 bp, Salmonella enterica; identical to SEQ ID NO: 101473

SEQ ID NO: 382464 - DNA, 903 bp, Salmonella enterica; identical to SEQ ID NO: 118531

SEQ ID NO: 382465 - DNA, 2325 bp, Salmonella enterica; identical to SEQ ID NO: 118532

SEQ ID NO: 382466 - DNA, 954 bp, Salmonella enterica; identical to SEQ ID NO: 118533

SEQ ID NO: 382467 - DNA, 522 bp, Salmonella enterica; identical to SEQ ID NO: 118534

SEQ ID NO: 382468 - DNA, 399 bp, Salmonella enterica
  misc_feature (378)..(387): n is a, c, g, or t
atgataataaaaaactcagaaggtcaagagatatacaataaaagaagcaatggtaatttagatactgatagcatcatcaatgccatagtaaaagccgggggagtagaaaaaatacatgtcaaactttatgataatggctttactatgaatgaatttattaactctgtcaggtttctaaaatcaatcaattttgatattaacaatttaccaattgagcagtatagagattatggaggcatagaattaataaaacaaggatataatatgtataaaactggtaaagataatgtaccagtgattacagaatgtggttacgaggttttaaaagagtgtgttaaaaaaggtcttgatttaaataaattcagcaaaagcaaccannnnnnnnnnaaaaggtcttga

SEQ ID NO: 382469 - DNA, 897 bp, Salmonella enterica
atgcgtatatatgatttaaatggaaatctattatatagaaattcaaatgaaattaatcaagaagccattgtagatgcaatagttgaagccgggggtgttggtaatatcaatattcaaattgattttgactatttcagccacaaagaaagcattgaagggataaaattcataaaaaatatcggatacgacattagcaagtttaacatttacatatgtgaccctgcaattggtgttgagctaattaagcaagggtacgatatgtatcaattacgaggtaacactactgaaaacaaagagccagtgatagcaaggtgcgatatttcaatcattaaagagtgtttgaatcaaggcttagatatgagtaagttcaataaggaaaatcattttagcttttatggtgagaactcttcacgagtgaatgaaatatctcatttccttgagaacttccaaaatacaaattgtatagatatgggcaaacttgaactcttcattgatagtggagcttttaatagtaaaactgcgagtgattttgatggttatgttcctttatactatttctgtgattcacattatggaagcaaacttagtgataagttacttgaaaagcttttaaatgtttacgacaaaattgatataagagaggatcgaatatttgattatgacaatgaaagagcaaaaaattttatctttaaaagatacattgaaaccagtgaagacaaaaacggagcaataaatcatatattggaaatatttgatcgtaatggacatgacatagaaagcgaagaacactcagccactcttgaagttataaagaaccatatcaaaaaggaacagaacgagatccaggaagctttcacacacaccgcaccaaaaaccagcaccagaagaagaatgtag

SEQ ID NO: 382470 - DNA, 186 bp, Salmonella enterica
atgataataaaagcggaagaaatggaaaaggtaatgtatggcgacaggttgaaagaatttattccagaaaagaaaaaacctaaactactcgcagacatttatcatgctgaaaatctttttagaagaaacagcatagacaaaatagatacatcaaataaaatagaattagtagccaataaaaaataa

SEQ ID NO: 382471 - DNA, 537 bp, Salmonella enterica; identical to SEQ ID NO: 223363

SEQ ID NO: 382472 - DNA, 426 bp, Salmonella enterica
atgaaactattcgacttatttaatataacacatcctgttttaactgttccaattacaattatcatggggttaatatttctcaccgttctttttaatgtgttcaaaaaccagttccttaccaaatacaaaagactcgatgagtctggattctggaaaaacatattccatttattgaaatggcttaaagggaagataaattatcttgttggggtttattttttcagtatgacattactgttttcaataatggtgtttgtattcagagataaaacattcacgttagatataaccgcatatattctatgtgcctttatcagtgttggtttaagtgttttgttttatacatacagagatataaatttcgacattaaaacttacaagcaagtaagacaagagcagaaagaaaagagaaggagaaaagtatga

SEQ ID NO: 382473 - DNA, 2280 bp, Salmonella enterica
atgagtacaaaaaatataacgaggtatttaggaagtatattcttacttctttcactaacaacacaaaatgcttatgcagaaggttttgatctctttaaacccagcgatgataactggttaattaaacatatattccttcaattattctatcctgatgtatcgccacttggtcccatttcagaagttttccttgcaggtattcttgcttttgggggaatccttgcagggtataccatgcttgccggcacactacacacggcgaacgatggagagatgttaggtaagaaatggtcttctctctggatacctatcaggacaaccctgggtgtgtctatgattttacctatcaagggcgggttctgtgccattcagttagttctcatctggattgcagtgcagggtatagggcttgcagatcagacctggagtgcttttgcggaaaaccccttgaagggttcagtcgttccacaaccttacattgataaacaagtcaaagaactctataaagctggggttatgggttatgcctgtcttgcagcgatacaaaaagaccaggatgaaaatgaagctgatgcaaaatcagcaggaatcattgataaattattgaaaccttcaagagatgcctggaatccgggtatcactacaaccacttctaaaggagctaataatagtcaaagacttactattgagttcggtaataaaaataatgaagtatacagaaatgtttgtggttctatcacatatgatatgtctttatctgcaactcaatcagtatcatcggctccggcagcggcattagatttagttgatttagataagattcaacatgctcttgttcctgtgcatgtaacggcattaagtgcattgctggcaagatcaagtcaaataggtaataagcttgttaattccgatgaaataacacctgaaagccttgcttccgatatgaatacagctactgatgcttataaggtcgctattgctcttgcagctaacacagcttaccaggatgcaatcagtaaagatgcggttgaagcaatgaaaaaagacgggtttgtatcagcaggagcatggtttatcagaatagcttcggcacaggatgcagtaaatgctctcgctaataatgttccaatgggtacgggtccaggaagctatttagaagagtcaactggatggtggttcgacacttccgggaaaacaaattacccatctgttgagaaagttatcaaaaaaacaaaagcatattttggtaaagcaaatatgataaataataacagtgccagtggtgcaggtgtaggtgctgatggtgaaattaatcttttagataaattactggcttatatttccccttctgaattaggtgcattgtttgattctcagtctatgacttctaaccctgttattgcaattgtcagcattggttctaaattaatcaattttgtaatagtaacagcctcagcaatagtagcgggtatcgtggttgtaggtactacttcattagtggcaagtggtggtgtaattgcaggggtaacttttgcaacacctttattggcaagtcttcttggaactcttttgtggaacggggttaagatggcatatgtccttgtctggaagccattcataatatggtgtggagcggttattggttggttaattcttgtcgtagaatctctttttgctggtccattatggatggttgctcaccttgcccctgatcaggatggtgttgtgggtaaaatggggcagggatatatgttagttctttcattgttccttcgtcccgttctaatggttataggattcgttgcggcattatcacttatgacaccatgtcttatgttcataaatgcttttatcgcttttaacggtaatgcaattggtgtaggtgcggcggctttaatcggtaagattgtaatgataagcatctaccttaaagtagttgaagaagtaatgaacaaactattcggattaattcactctattccagatagtatcttgcaatggatcggtggtggcttatctcgctctatgggtgattatgcaaatggtattgaagcaggttctacacaaaacactgaaagatttggtcaaggtatgagccaggttaatcaggcagtaaccaatgcaggaactgataaaataaaaagagttggtgctgaaaggaaagaatcacttaaaggtaatatgactaatgccagtgcaggcgacgaaccgggaagtggtgcaggcaacaaaacaaaagcaagtgaatcaccaggcaacaagccaaaaacaaaaggttaa

SEQ ID NO: 382474 - DNA, 780 bp, Salmonella enterica
atgtactatttaaaaaacacaaacttttggatgttcggtttattctttttcttttacttttttatcatgggagcctacttcccgtttttcccgatttggctacatgacatcaaccatatcagcaaaagtgatacgggtattatttttgccgctatttctctgttctcgctattattccaaccgctgtttggtctgctttctgacaaactcgggctgcgcaaatacctgctgtggattattaccggcatgttagtgatgtttgcgccgttctttatttttatcttcgggccactgttacaatacaacattttagtaggatcgattgttggtggtatttatctaggcttttgttttaacgccggtgcgccagcagtagaggcatttatcgagaaagtcagccgtcgcagtaatttcgaatatggtcgcgcgcggatgtttggctgtgttggctgggcgctgtgtgcctcgattgtcggcatcatgttcaccatcaataatcagtttgttttctggctgggttctggctgtgcattcatcctcgccgttttactctttttcgccaaaacggatgcgccctcttctgccacggttgccaatgcggtaggtgccaaccattcggcatttagccttaagctggcgctggaactgttcagacagccaaaactgtggtttttgtcactgtatgttattggcgtttcctgcacctacgatgtttttgaccaacagtttgctaatttctttacttcgttctttgctaccggtgaacagggtacgcgctga

SEQ ID NO: 382475 - DNA, 3075 bp, Salmonella enterica; identical to SEQ ID NO: 118525

SEQ ID NO: 382476 - DNA, 1149 bp, Salmonella enterica; identical to SEQ ID NO: 118526

SEQ ID NO: 382477 - DNA, 510 bp, Salmonella enterica
atggctataacctttcaccctaaaaaaaagcagatcttgatatgtgattttaaaggttcggtatctccagaaattaaccaatgccgaccagtgttgattttaagagaagagattgttggcagtcagaagctcgttgttgttgttcctattagcaatactgaacctaatcccctttgcagctttcatcatgagttagatgatgcttcacttagcagccacatgatggggaaaaagcattgggctaaatgtgatctggtatcaacagtgtctgttgaccgtttagatcgaattagaagccgggatccgagaacgggtaaaaattactttcatgtaggagtcatgactgatgatgactttgacgcagtaagagataaagtcatgtacggtatcggatttgatgactttttggatgtaaaaaatgaaggtgttcctgatggggcagcagcttcagtggtaattgctgccgaagtgaacgttgctgaagtagaaaaacaaaaaaaagccatctga

SEQ ID NO: 382478 - DNA, 261 bp, Salmonella enterica
atggggctgtttatggatcagcgagaaaaggccaaattgttggcttatgtattaaaaaccgagtggaacgcaaagcaaaaacacatcgctttagtactacaggtatcagaaggaactatctctttgtgggtgaaagagatgtctttaaaacatcagatttataaacttagtcaagaattacaagaggttagggctttagctcaggggctggtaagttctgggcagattgagcaaaaccctggttttttacctagtttctaa

SEQ ID NO: 382479 - DNA, 432 bp, Salmonella enterica
atgaaaataccaactcatttaaaacataagcctgtaattcaagttgaaaactatgaccgcatagatggtccatatgcagaagatacagatgccatgggactatccgttggtattgctcaatggaacactccaggatggacagagctttcggcaaaggtttggcgaaataccggcgaaaagtggtctcggcagtctgaggagcttccacttcaccgcgtaatagaccttgctactctgatctgcataacgatggattacagcaaaaatgggcggttatcatctagtgatgatttcccggtcagtcgttcttcagacaaccaagaactcgctcatcacactgagctcatgaaaaaagaactaaaagaaaaccaggaatacctcgatgagagcttaaaacgtctgtcggctgagttgaaacgtcttggttactaa

SEQ ID NO: 382480 - DNA, 198 bp, Salmonella enterica
atgcgttatccctggagcgtgagcgccagccggaaatacaggaacgcacactggatggcccttcgctgggatggtaatcagagacaggctaaaatgttgtcagcgcgtttccggtgcattttttgggataatggttggttcgggggttccgggaacgcgcttctgtcagaccttgctgaaaacacaggaacgcgttaa

SEQ ID NO: 382481 - DNA, 459 bp, Salmonella enterica
atgaaaaaacaaaacactcaatactctacattcacttcatatctttctaaaaccaataagaatgtggatatgtatagaatttataatccactaaatgaaaatttgcgtttcaattcacacgataaaaatttttatgatttatattttaaaaggcattttatcacaagaagaaatattttaactgtcttttctattcattgttatctaacaaaaaatgaaagatttatagatgatagaatatccttcgtgaaatgttcaataaagttatttagaataatatttaaatcattagctaatgatattgattttaacatttctttccgtggtggaaattttattttcatttcacagttcgggaagaaagaagaaatttcttggtttacactttcaaaaatcgcggctgatatttttgatattaaagacttctcaatgaacaataaagaattagttgccgcataa

SEQ ID NO: 382482 - DNA, 435 bp, Salmonella enterica
atgatattaaatgtagtcagcattcaaaaaaccaaaaaaaatgaagccgctttaatggagtgggtaaacaactgcgaaaatctggaatgtgctcttagtgataattatgttgtttcaatagacaatgattttgattctgaaaaattctacaccgaaaattcacgatatagaaaacaatggattgatatttactataaaagtgagaatatgaacttaagccttttattagaactttgtagaaagtttgatagctatgtttcaatagtattaattagtgaatgggctggggatctaagaagttgtggaactctttgcctttccccggacggtgaagaatactttaaagcgcaacaatcaggaatgactttgtattcaagttggccccagtatgtaaaaaaagttttcccaaattgggttaatttagattctatctaa

SEQ ID NO: 382483 - DNA, 177 bp, Salmonella enterica
atgaacaaccagatcaataaagtgccttacagcagcggtgataaaccagaacttcctaaaaataaaaaagttaagttctatcacgaagacgagtatgcttttgctcatttcttgtatgacgatacagcagccgaacaagacaatgcagaaactaaaatcgagaataacaacgactaa

SEQ ID NO: 382484 - DNA, 795 bp, Salmonella enterica
atggaaaaacaatttaaaaaaacactggaaagcattcaaccacgatctaatcgctctcattctgatacagtcagagagttctttaattgtgtatcttacacaatgataatgaacagcctttttcagttagaacgaagagaattattttattcaggaaaaagtatatacggttttaatcagtttgccataaagtctggttttattgaaaaatcaataattttaactgacaggcataaattcaatattgaagaaaaattttataatcagtttgatactgaaatcatagaaacagctaacttaatctcgcttgaaatacaaaaacaacctttgacagatgttttcaataacatttttgaagaatgctatttaacaggaaaaaaaggcgaatggctcggtcaatatttaacacctaatgatgtttcagaacttttaacagagttagcaaacttgaacaaagaaaaagaaaacaattatagtattggcgatatttgtgcaggtacaggatctttaatttttccattacttaaaaaaattcataaaatggaaggatatgaagggattcagaaaatagaacttctttataacgacattgatccactgatggcacaattatttatggctcagatattaaccaatatgacctatcataatctcgattttaaatctctacatgtacatattgggaatgcaattacagaatacgatactataaacactctttttttaagagttaagcaaaatccgttagtggctcaaagagtattagaaattgataaagaaaagaaagcggcatga

SEQ ID NO: 382485 - DNA, 255 bp, Salmonella enterica
atgagcagaacgctcgaacagaagattgctgatgctgaggcgagattacagcgcctgaaggcgaagagccgaagcctggacacagcgcagaaggttgttgtgggtgcagcattgctggcaaaggtcagaaagccggaggaggtgcagttgcgtgcctggttactccagttcctgaaggcagaggtgacacgacaggctgatgtgacgcgaatactgccgctgattaacgagctggaggcgctgccagaacagtga

SEQ ID NO: 382486 - DNA, 693 bp, Salmonella enterica
atgtcggacttgattgcctacaagtcgaatgctttggttgaggccagctacaagttgaccctacaggaacaacgttttctgttgctgtgtatcagtcgattgaaatctggtgctgatgctgaattgcaaaagacaatgaccattaccgctgcggaatattttgattcattccctgacatggggcggaaaaatgccgaggttcagttacaggaagcgatcgatcgtttatgggacaggtcgatcattctcaaggatgacgagaagcgtgaggagttccgctggatccagtatcgggcacagtacgctaaaggtgaggccaaggctcgaataaccttttctgacgcggtaatgccttatctgacgcaactgaaggggcaattcacgcgcgttgttataaaaaacatatcaggtttatcaagtagttacagtataagaatatacgagctcctccagcaattccgcagtacgggagagagaattattgctcttaatgactttcgttcaatgttaggaattgaaaataaatacaaacaattcagagacttaaataaaatactaataaaaccctgtgttgacgaactgaacaaaaaaagcgacctggctgtaacggttgagatgatcaaaaaggggcgcacggttgtagccctgcattttcgcttcaaggaagacaaacagatcaagatgacgatctag

SEQ ID NO: 382487 - DNA, 2139 bp, Salmonella enterica
atgaaaatcatctccagaagcagcggctacagcgccgttgcttctgctgcctatcgttccggttcactgatgcttgatgagcgtaccggactgactcacgactacacccgcaaaagcggtgtggctgaggctgtgattctgacccccgccaccgccccttcctggtgtacgaaccgtgccgaactctggaatgccgttgagaaagccgaacgccggaagaactcacaacttgcgcgggaaattgaactcgccatcccccacgaacttccgcaggatgccgcacgggaaaccgttctcgcctttgtcagagaaaactttgtcagtcagggcatgattgctgatgtggcgttccatcacatggataaaacaaatccccatgcgcacatcatgctgaccacgagagctgtcggacctgctggattcggtggaaaggtcagggactggaacgaccggacacatgccgagacgtggcgggcatcatgggctgaccatgcaaacagggcactggcgaacgccggttatcaggaagagatagaccatcgttcatacgagcgacaggggcttgagaaaacgcctggtattcacctcggaaagtctgcctgtgcgatggaaacacgcggtatcgaaacagaacgcggcgaacagaatcgtctgattaacaggcttaacctggaaatacagatttcccgcaccgaactcaggaacagcgggctgacagagcctgcccgccgtgtggctgaccttctgaatatcgtgcttcctgacaacgcaacttcgtacacactgcatgacatcatcgaagcgttgccgaaggacagtaacgcggcatggaaactcaccagtaatgccatgtcgatgatggcagatatgcaggcgacgcgcagacgctgggaagagctgaacaccgaacgaaaggaagcgatgagccatgctgccagcctgaaaaaatcatcgccgttttcgtccggtttttcccgtattcccctgatgcaatgggcggcaccggaataccgtagtgagcagggaaaaatccagtctctgagccagcaaatggaaaaattgcgacagcattaccggaaggtggagaaacaggacattcccgcgagtcagacggcatttgaaacacagtggcagcagtggggggaatccggccttgcagctctcagagcccagttgcttaaacgtgaagaggaattgcgccggaaggagctggaggatacagaacgtagtcgcgcggagcgacgagcggaacagctcaggaaaaatgacaatgccgttatagattcaggggtactgagcgcagtcgttacggggtatggcgaggcccccatgcctggtaacggggaaatgacctgttaccttctgcttcacaacaggagcggagaatatacgctctgggggaacgaactggagaaataccgcgccagaatctttgagagtgttgatttaatgcgtgacaggagtggttatatctgtgaccgaagcgaaatcggccaacgtccgccactgcaacgtgtttattcctctgcgacctttgagcaactgctgacgcaggtttgccagacatggccgcaacatacccgcaatctccgccagccgaagacatggccggagtctttctgtcttggagaagaccgccagccagccatgccatcaccggtggcaaggaaggtggattttacgcagggacgtctgccaccgacgctgatgccggtaatgagttctgtcgaccgggaaacccgtcagcttcagcttttgctggtcatgggcgtggatgactctctgggcggtgttatccggcttaatggtacgctgtatcccgcgtttgccgttccctcagccgataacaggcatctggtcatcagtgcgctgaccgataaggggttacggtatgcagggtatggtgttgccgtaaatcacgatgcagacagccacatatcacctgcaccagaactgatgcagtttcatctgaaaacccgtgaggcaccgctttttgctgccgtcaacacaccagaaaaacagccggatcatctgttccgctcgctgggttttaatcgtacctgggacgaatggcggcgcgaggaagatgcacgaacacacgccaccgtgaggagacatgatcgcggttggtcacagtga

SEQ ID NO: 382488 - DNA, 426 bp, Salmonella enterica; identical to SEQ ID NO: 31762

SEQ ID NO: 382489 - DNA, 459 bp, Salmonella enterica
atgagaaaatcaggtttaggtttagccctgttgttttctttaattgctccgattaaagcggtctatgctgaagcgattatgatttcaggaaagctacaggctgatctgccagccgtatcctttgacccggggccgggcgactttgttgcatacgttaattctaacactatcactgcctcaggtgcaggcacagcctgtaatgtaacggttgatgatcgagcgacttcctctgttgataacctcgtttgtttttttgagtggttacccaataccttgggattaacttctaacggcttcactctttcaggcgttcccaacaccaccggtgatttaaaactaccttacaagatttcttacttctctggttctgaacggaaaaaagttgaaatagtaaaaggtgaatattcaatcatttgggacaaggacaaaagggattacagaaacgaagattctacatga

SEQ ID NO: 382490 - DNA, 582 bp, Salmonella enterica
  misc_feature (176)..(185): n is a, c, g, or t
atggctaaaaaccctatctcaaataaggcagataacgaccggattcagatccggtctttctggatatccgaaagaaaagcaccctatgtttatagtttcttgaaaaaaacagaactttctcataggggtgaccaactggatttaattaggtcggctattagtaccgggttggtatnnnnnnnnnntcttaataggtttctgaatgatggaaatactatagatactgaacctaagcctcctattaatgtattgctagagaatgtcttagatcaaaagtttaaggagtatttaacacctctacaattagataattcaaagcaggattctgtttctgtaaaagaaaccttccttgtacaaaaggaacatgcctgctttggtgtgaagattgaaaatgagggaagcgatacctctataccatctgaaagcccactttcttcaggtgcatccaaaatttcaaaagaaaagtccatttcctctgtggtgccagtgctagaaaaagtatcggatgaaaatcaaaccgcctccataagcataaaatctaaagctaaggcaaacaagcgactagcgactttggcaagatag

SEQ ID NO: 382491 - DNA, 1041 bp, Salmonella enterica; identical to SEQ ID NO: 13976

SEQ ID NO: 382492 - DNA, 381 bp, Salmonella enterica; identical to SEQ ID NO: 13977

SEQ ID NO: 382493 - DNA, 150 bp, Salmonella enterica; identical to SEQ ID NO: 13978

SEQ ID NO: 382494 - DNA, 657 bp, Salmonella enterica
atggtggaaggtcggagggaacggcaacaactcacccctcccagtgaagggacgggtagtttgccgctctcgatatgccggacggagccaaggccatcgatcacggggcgcgtcagtggaagaacccgcgcctgcgtgacgtatgcgtcttcgccgcaccatctcacccgtcacgccaccacataccgggaactgccgccaaggtctaactcaaccaatctagccgcgctacatacggtttttgtggcaactcatcaggtgtccgctgtcgatgaaactctctgcgccggtagcggaactctcacgcgtgcggtcgccgtcgtcacagctcccccaaccgcaaacgattctcgcaaatacgcaagtatctgcaaaaacaggtttttttcggggttcctgggagactgtgctgttgaaaaattcttgaagaatacagaaggctcatgcaaactgaatgaactggtttctgttgtggatctcaacagtttccacaggaacattgaggaggtcagagacctcaatgaacccgaaacagctcgccttcctggcgagctgttttcgttctacgcccgccgacgaaagatcgcaagtgcaataacgagatttttcacgtctttacgctcaaaaagtaaaaaaaccatgttttcccctggctga

SEQ ID NO: 382495 - DNA, 924 bp, Salmonella enterica
gtggcaaagcaaaagttcaaaatcaccaactggcccacctacaataaagccctcatcaaccgtggctccataactttctggctggatgatgaagctattcaggcctggtatgagtcggcaacgccttcatcacggggaagacctcagcgctattctgatctcgccatcaccaccgttctggtcattaaacgcgtgttcaggttgaccctgcgggctgcacagggttttattgattccatttttacactgatgaatgttccgttgcgctgcccggattacaccagtgtcagcaagcgcgcaaagtcggttaatgtcagtttcaaaacgcccacccggggtgaaatcgcgcatctggtgattgattccaccgggctgaaggtctttggtgaaggcgaatggaaagtcaaaaaacatggccaggaacgccgccgtatctggcgaaagttgcatctggcagttgacagcaacacacatgaaatcatctgtgcagacctgtcgctgaacaatgtgacggactcagaagccttcccgggtcttatccggcagactcacagaaaaatcagggcagcatcggcagacggcgcttacgacacccggctctgtcacgatgaactgcggcgtaagaaaatcagcgcgcttatcccgccccgaaaaggcgcgggttactggcccggtgaatatgcagaccgtaaccgtgctgttgcgaatcagcggctgaccgggagtaatgcgcggtggaaatggacaacagattataaccgtcgctcgatagcggaaacggcgatgtaccgggtaaaacagctgttcggaggttcactgacactgcgtgactacgatggtcaggttgcagaggctatggccctggtacgagcgctgaacaaaatgacgaaagcaggtatgcctgaaagcgtgcgtattgcctga

SEQ ID NO: 382496 - DNA, 1326 bp, Salmonella enterica
atgaataaatatcaggcagttattattggttttggcaaggctggaaaaacattagccgtcacgctggcaaaagcaggttggcgtgtggctctcatcgaacaatcaaatgcaatgtatggcgggacctgtattaatatcggctgtatcccaaccaaaacattggttcatgacgcacagcagcacacagattttgtccgtgccatacagcgtaaaaatgaagtggttaattttttacgtaataagaattttcataatcttgcggatatgcccaatatcgacgtgatcgacggccaggcggagtttatcaataatcatagcctgcgtgttcatcggcctgagggaaatttggagattcatggcgagaaaatttttattaataccggtgcacaagccgtggttccgccaattcctggaattaccaccacgcctggtgtatatgacagcaccggattacttaatctaaaagaattgcctgggcatttaggtattttgggcggcggatatattggcgttgagttcgcctctatgttcgctaattttggcagcaaagtaaccattttagaggcagcttcgctgtttttgcctcgggaagatcgggatattgctgataatatcgcgacgattttacgcgatcagggcgtcgatattatcctcaatgcccatgtggagcgaatcagtcaccatgaaaatcaagtgcaagtgcatagcgagcacgcccaactggcggtggatgcactgttaatagcttccggtcgtcaaccggctaccgcttcgttacatccagaaaatgccggtatcgcagtaaacgagcgcggggcaattgtcgttgacaagcgattacataccaccgcagacaatatttgggcgatgggagatgttaccggcgggctgcaatttacttacatatcactggatgattaccgcattgtacgtgatgagttactgggtgaaggcaaacgtagtactgatgatcggaaaaatgtgccttattccgtatttatgacaccgcccctgtccagggttggtatgacagaagaacaagccagagagagtggtgctgatattcaggtggtgacattgcctgtagctgcaattccgcgcgccagagtgatgaacgatacccgtggggtattaaaagcgattgttgataataaaacccaacgtatattaggagcatcactgctgtgtattgactcccacgagatgatcaatatagtgaaaatggtgatggatgccgggctgccttatagcatattacgcgatcagatatttactcatccgtcgatgagcgaatcactcaatgatctattttcattagtcaaataa

SEQ ID NO: 382497 - DNA, 273 bp, Salmonella enterica
atgaacaaacagcaaatcgcaaaagtaatagcaataccttcaaaaataaaaatgatagaaaccgaagctaatgaatatctttttatggttaataagaagaatgaaggatatttctggataaatgaaaatagtatcactactgaaatgggtagaaaagaatttgttaaggtcataaacgaagcgaagaaatataacctttccagcagataccatatcgtagctgcaagctttatttatgacagcgataatatacattgcattagattaatataa

SEQ ID NO: 382498 - DNA, 282 bp, Salmonella enterica
atgaacaagacagagctaacacagagactatatgaagctgatttgataaatacctatgctattactggaagccaggagagctatctctttatgacgaaccagaacggggaagggtactactggataaaccataatggcgagacactggggtttataaaagaagatctggacaggatttacagcgaagcaaaagagtatgggttatcggataaaaaattccatgtggtttctaattgcatggtatatgaaaaacattgcagcacaataatgataaatttctaa

SEQ ID NO: 382499 - DNA, 645 bp, Salmonella enterica
atgggaagaaatatagaaagtaaatcatttacaagcatatggaaagaagtcaaaagctatacctgtactgtgaatgaaacagagacatttgaaatgttattattagtaatgaaaggccgagggtttagatttaacaaacatgagagagttatattttcaacaagaatacaaatgagaagccagcaaataaatagatgtgccttacacaaaaaattctcctacaaatcagtagaagaaaaaatgaaaactgtgtttaggacattaaagcaaattcatgataaaaacgaactggaaagaaacaggctattaaacggaagggataaaataattagccgtttcaacagaatcaaaacctttaacagtatctggaaggaattaatagagttagagatcactactgacgagatagatagttatgagtgtcttatttttatcatgaaagtccgagaaattaaaattcctgactcagcattagccgcaatggaactcacctttttaaataccctgaaaaagaaaaagttatacagggaaacaaactctattccatttgaactcgattttatcaaagaagaactaaataatatatataacatacttacggataacattaaatatgacaaatttcaaacgatacactctctataa

SEQ ID NO: 382500 - DNA, 393 bp, Salmonella enterica
atgagcaatattactttaaacacagcatattcaggaatgataattttagatcagcgtggttcagggaaaactacatttttgaatcagataacaagcgagcatcccgatctattttttaatatggacgatagatataatttttatactgactctgtaatagagatagcaaaggcaaacaatcaattcttattggcttccaatgtgttattaaacagaaaagaaaaaaatggctttataaagaaaggtttcaaaatattaaattcagttgaagaagctaaggacttttataataactatctaaaccctgtaaagatagccaggaaagaacaggaagaaattgagcaggtaatgaatgaaaagccagttgccattaagaagaaagcccgattgtaa

SEQ ID NO: 382501 - DNA, 447 bp, Salmonella enterica
atgggaagaaaaagaaaatcgaaatataaaaaacataaaagaatggtttatattcaaaatcaaaaaaaacaacaagaagaaaatgagcattatgctttttggtggaaggtattttcttttgttgtaataacaatagtcatttctattgctcactgtttttataaaaatgatctggcattacttaccttttatcttatgggtttaatgttttctgaatgtttaatagaccagaaagaaaaaaataataccttgaaagggttaataaagaatcgcagattcacaataacaatagacaaaatgaatgattttttaaaaactcgaaagggatatctaactatgaatattattgattataccattatcatcagtatgattattcttctcatgatttatatctatattggagtacctgagtgggcacatttgatgagtcagatgaacagctaa

SEQ ID NO: 382502 - DNA, 318 bp, Salmonella enterica
atggcatatataatcttaaaaggattgtttgaacctgatagtgttgcacactttgctggtagcttaatttgtatagtgttatgcagcatgataatttatgttgtactttatgatttggctaataattttaaaacccattgcaagagtgtaattaatgaagttggaaatgccctgttttatttaatgtttgctatattggtgggggtctctcttatcatattagaattaatgatcacctatccctttatccgaaatactgtgctgataagtatctatgctatatacggtttatactttgtgaaaggagataaagaatga

SEQ ID NO: 382503 - DNA, 432 bp, Salmonella enterica
atgaattattatgttatggaaataaacacccaaatggtaatagatagcatttttgaatattacatgcagtttaaagagcaaaataacaaagaggttgactggacagcaggaacggatggcttaatggaatttcataattggctatactacaaatatggtgacaggtatttcttttgggtgactaacctttataaaaagagaaagaacagacataaaataacagaataccagtatgaatatgcagaaagctatccttcttctatgggttgttatggtggagactacaaaagacctcaatattctgtatgtgaaatccccaatctattattggatataactaatcttaatgacagcaaaattgagtctggattgcgtgttaaatggcacctggaatcatttatacaattaaaccaaaaaaggaaaataaaatga

SEQ ID NO: 382504 - DNA, 1266 bp, Salmonella enterica
atgcgtaaaactctaattggctgcatggttgcaactgcccttgctactgtatcttcggcacaggctcaggtatttagctactcatttacagataccaataaggctgttcggaatattaagcctgcaacacaaacatatcttaatcccgctggtgttttgactctgaacttgatatcgggtcttgatcggtacgagcgagtgacggtcacacgagacagcgataaaaaggttatgtattcctccgtctcgaccaaaacgagcgttgcagatcgtatcgttgctgccgatggaacagaatactatggaaaggatatggttctaccggcgctcggagaagggacctttactgtagtcaatgaaactctggatattcgccagactgtagtgagcacatctacttatcatttcatcgttgatacaactcctccacgctataagagtatttatccgagtcaaaacgcaggttacgacatggtactttctgggccactttgggagttgggccgaggcggtagtggccagttttctatatttgcagacggtattgaggatgctagtggaattgccaagatccgtcttgtcattaaacgaagtaatggttctgtggtctccgacaataacctgagttatgacacagccaataaacgtgcgttctatccgtggattaaagatatgaacacccaggctggcatgccctcaagtgatcttgatgaagaattcaccttcaatttcatcgttacggacctggcaggaaatacgcttaacattcctccccagcggtttttatatgacgatcaaatgggagaatttacgccatttgcagttcatgactcacgtgtaagcaccagtgttgtacccggcatttcttcgggatacgtcccgtttaaacgaggccttacagtgctggaaaacccctacaagttggttatacgtatcccaagaactaactggaagccatatcgaaatggtggcatgagcattaccaataactatggcggagtacaggtcctttccgaagatgccacctatgtctacgtggaagttaagctgccacagggtgccttagatggaaactactatagacctgtgaatacatatcaatggtctggaggagatcttggtcagtatgccagctggctcaactgggatcctgcctctgtaaagagtccggcttggggaagttcacccatagaacgacaaaaggctgatggaacatggttcaacagcgtaaactggaaccacggcagcctggcggctgcaaattga

SEQ ID NO: 382505 - DNA, 288 bp, Salmonella enterica
atgttaaagcgtattatttcaggagagcaaaaggttactgactggttggaatctattaccagatcatttaatcaaagctcacaaacagaaccgaacgcgctacagaacacaggtattgaagctattttagattcaacaaatgtgtttcaggttgaacctgtcgtagagaacgatataaaaaacagcacgttttcaaagactgattctgtagctgaacctgagaaatcagtttcgcaacaggaagacaatgctgaaaatggttttgatatcgagctcaaaggctggtaa

SEQ ID NO: 382506 - DNA, 606 bp, Salmonella enterica
atgcaatggcgaattgctctaagttggatgtcagggtattttatttattttgttatgacccccattgcattcaaatatttcggggctatatatgcagggcagttagggatgtctttaacattatgcaatatggtaatggctacgggcctggcttggatatccactaaatatccaaaatggggagtaatggtttccaacaaacagcttgcggaactgagtaaatcgttcaaaagtgcagtaatgcaatcatccttttttgtcttgacaggattaactggtgtatacatttcattatggttattgaaattatctggttcaaacattggcgagcggtttttgggattgcaggattttttctttttatctttagcaattattggtaatcacattgtagcttgctttgcaacctatataagagcgcataaaactgaaaaaatgacattggcatcatgtataatggctctcttgactataactacaatgttgtttgttgcatatttagagtactcgaggttctacatgttaatgtatgcagcactaacgtggttatattttgttcctcaaacttatataatctttaaaagattcaagagttcttatgagtaa

SEQ ID NO: 382507 - DNA, 135 bp, Salmonella enterica; identical to SEQ ID NO: 17104

SEQ ID NO: 382508 - DNA, 135 bp, Salmonella enterica; identical to SEQ ID NO: 17104

SEQ ID NO: 382509 - DNA, 135 bp, Salmonella enterica; identical to SEQ ID NO: 17104

SEQ ID NO: 382510 - DNA, 135 bp, Salmonella enterica; identical to SEQ ID NO: 17104

SEQ ID NO: 382511 - DNA, 135 bp, Salmonella enterica; identical to SEQ ID NO: 17104

SEQ ID NO: 382512 - DNA, 135 bp, Salmonella enterica; identical to SEQ ID NO: 17104

SEQ ID NO: 382513 - DNA, 189 bp, Salmonella enterica; identical to SEQ ID NO: 79255

SEQ ID NO: 382514 - DNA, 216 bp, Salmonella enterica
gtgctgacagtccgggttatcacacccgaactcttttacacccagtatccgtgtgccgcaggccagcattttggtgacggcttcaacctcgatatcgcgcagaccgcccgcatccaggaaggacgtccagcactggttggctgtgaacagacgtttcagagggcggggagtaaaaccggacaacatgaggatggattaaaccccggtatcctgtag

SEQ ID NO: 382515 - DNA, 285 bp, Salmonella enterica
atgtacatgcggatgccagttgagacgacggccatacgtgtggatggcgcagaagataccgggttccagcccccgttttcgggcggcatacagcagattctccaccgccagacggcacacgtcattcagcagccagcggttgctttcgaacaccggccacagcgtgtccggcagggtgaagaccagatgtacccagtcgcagtcaggaagacgattcagctgtgttgctgtccacaggtctgtggccttctttccgcaggacgggcaggcacggctgccgcatga

SEQ ID NO: 382516 - DNA, 222 bp, Salmonella enterica; identical to SEQ ID NO: 26755

SEQ ID NO: 382517 - DNA, 135 bp, Salmonella enterica; identical to SEQ ID NO: 17104

SEQ ID NO: 382518 - DNA, 135 bp, Salmonella enterica; identical to SEQ ID NO: 17104

SEQ ID NO: 382519 - DNA, 135 bp, Salmonella enterica; identical to SEQ ID NO: 17104

SEQ ID NO: 382520 - DNA, 504 bp, Salmonella enterica
atgaggggatctctcaggggtacgcgggtatttggctacgtaacgacaatgggcgaattacttaacgcctcgattatgttttttgcgccactgatcattaatcgcatcggtgggaaaaacgccctgctgctggctggcactattatgtcagtacgtattattggctcatcgttcgctacctcagcactggaagtggttattctgaaaacgctgcatatgtttgaagtaccgttcctgctggtgggctgctttaaatatattaccagccagtttgaagtgcgtttttcagcgacgatttatctggtctgtttctgcttctttaagcaactggcgatgatttttatgtctattctggcgggcaatatgtatgaaagcatcggtttccagggcgcttacctggtgctgggtctggtggcgctgggcttcaccttaatttccgtgttcacgcttagcggccccggcccactttctctgctgcgtcgccaggtgaatgaagtcgcttaa

SEQ ID NO: 382521 - DNA, 423 bp, Salmonella enterica
ttggataataaagataaatacaatatatgtgaagaagagttagaggaattgaacttctatagtaatgagcactaccattacaaacaaaatggcggtattgtgtccaaaagtaaagaattttatgattttttaaacacagttgaaacgaaaattagttttttaccaaaatacatatatgaagatactaatattcattcatacaatattacgccaacatactatcgaaatattaacattgaaattcatgacattattaatattatcaaaattaatggcggcattataaaggatttgactacggatgtatgggaaagcgagcatttaaacaacgataaacttgaaaaaaggattgctttaaaagaacagcagatattgaagatattaaccctaaatacaagcaatagtaaaacgagaagaatatag

SEQ ID NO: 382522 - DNA, 498 bp, Salmonella enterica; identical to SEQ ID NO: 119724

SEQ ID NO: 382523 - DNA, 489 bp, Salmonella enterica
atgtcgaagaagacagccggagggcggaatacggcacgctacctgggtcgttatctgaagaagccaccaatagcggcttcccgactggctcattacaacggaggggcaagcctgagcttccgttacctggaccacaaaacgggagaaacggcgacggaaacgctgacacagcgtgagctggtcgcgaggctgaaacagcacatcccggagaagttttttaagatggtgaggtacttcgggttccttgccaaccgtgtgtgtggagagaagctgccgcaggtgtaccgtgcactggggatggataaaccggaaccagtggcgaaagtgtgctatgcacaaatggtgaaacagttcctgagtcgtgacccgttcgaatgcgtgctgtgtggctgccggatggtataccgccgggccattgcggggctgaatgtatcagggctgaagaaaaacgcgcgggatatcagtctactgaggtatatgccggcctga

SEQ ID NO: 382524 - DNA, 255 bp, Salmonella enterica
atgaacagcgacagcgcgcgcaaggtgcccgccgatgcgccaaccgcattcatcaagccgcgctgggcaaagctggttctgaccgacgacggcatcgaccggcgttactacgagttatgcgccctgtcggagctgaagaacgcgctgcgctccggtgatgtctgggtgcagggttctcgccagttcaaggacttcgacgaatacctggtgctgagagatcccctcataatttccccaaagcgtaaccatgtgtga

SEQ ID NO: 382525 - DNA, 729 bp, Salmonella enterica
atgtcgtattctatcggcgaatttgccagactatgcggtatcaatgccgccacgctaagggcatggcagcgacgctatggtttattgaaaccgcagcgtactgatggcgggcatcgcttatacagcgatgacgatattcgacaagcgcttagcatcctcgactgggtgagaaaaggcgtaccgataagtcaggtcaaacccttactgtcgcgtccggtcattcgcctgggcgataactggataacgattcaggagacgatgcttcaacatctccacgaagggcgaattgacgcgctgcggcagttgatttatgactgtggccgggaatatccccgcgcagaactggtgacccatttattgcgtccgttgcgcagcaaagtgtccgcgcatcttcccgccgtgatgacgctgcgcgaaatactggatggcatcattattgcctacacctctttttgccttgaaggcgacagaaaagcgcctggcaacaatgcctttattagcggatggcatctctcggatcactgtgaaatctggctggaagcgttgactcgtaccggacaagagctgcggctcaatgtgcttccctctccaccagccgtgctggcgcccgagctgttcgcccagagaaaatggttcctggtgaccaccggcaagctcactgccgggcagaaaaaacagcttgcccagtggcgcaacgtggtcgcttcgctggaggttatcacactataa

SEQ ID NO: 382526 - DNA, 336 bp, Salmonella enterica
atggttgcacagacgcggcaacagcacattcgtgacttcctgactaccttcacgctggacctggtattggttcacggtcgtacgaaacgcgccctgcggcgtttggttttcaatagtgcaacttacggtacaggactgacagccgatacaacgccgcaggtcgataagcatggcgtaacggtgtcggggagagccttcatgccgctccggcgaaaaaggaaatttcgcttcagccagcggaaccagcgaggcgccagcggtcaggacgccgagctgctggagaaattgccgtttactgctgtccatattgactcccgtccacattgccaacaatga

SEQ ID NO: 382527 - DNA, 636 bp, Salmonella enterica
atgcgagatcaagactttagttacttcattgagaaatttggagaagctacatcttatagcgctgttccagagaaaagtatgacaaaatggaaaggaattcttccggataaacttctttcttactggaaaacagagggatggggaacgtataaaaatggattgtttagtcttgtcagtcctgatgagtatgaagatgtactggatatatggctagaagatactccatttaaagaaatggacgcataccatgtcatagccaggagtgcctttggcgaattatatgtttttggtgagtctaccggaagaaatattacgattcagcctttatttaatcaaataatttttttcgaaaatggttttatggtaaaaacaacagatgaattaaatagtgaaattgaatcttttcttgcattttcaagtgttgaagagtttgatttatttgattgtaatgataattacatttttgaccgggcagttaaacaactaggcgtattagctgataatgaaatgtttagtttggaacctgcatacatttttggcggagaaataaaaattgaaaatttgagtaaagtggactgtcaaatacatttgatgattctgagagagttatcttcccctaatattataggcttctaa

SEQ ID NO: 382528 - DNA, 522 bp, Salmonella enterica
atgatatgcttattttggttaagttgctcattaatatatttataccaatcaaccttagataattacgctacggattttttatacgtctcactacattctaggccagtttaccagccccggcagcatctccagctattggtattgcagcaaaaagagaaaaaccagcctcaacataactccctcggcacaagcttattcctgcattcagcaggtcaggaaaaatgccaggccctggaacaaggccagccacatcaagttccgtctgtaatccatctaaccagccatcaccttcatttttttctgccggtgtttcctgttttactggtggagttgcttcttctgcgctttttccgatgcagggaactatatccaacaaatctaaaagattctcaagaaaatagttgggttatttatcatgtattatatcattcctgtctaagtctgttatctttacatagccagcctcaggtcaatattcatctatttcaagccatttccagaattgataaatccctcctttag

SEQ ID NO: 382529 - DNA, 483 bp, Salmonella enterica
atgaatattactgaatgcattagctttctaagatttacaactattcatccacaatttgatttatatttgataactaatggaataagaaatcgccctcaagataaaggtggaatagaatattttgatattccagatggtagtgtttctcttggttttagaatcagatccacttatgagtctgagagtttgcttcccatcaagtctgatgggaagtttgttttttctgaacttgtggtctatcaaaaaaacaaggatgacttaccatataaattaaatttcaatgaccatctacaattcttaagagaaaagctgggaagagagttaaaagataatcaaaacgggttgccagaaagaagagttttaacgttttttcatgattttttagttatcgtgattttcatggattcaagtgaaaatatcaatcttattaaatttatttcccctgatgtttttcatcgaaaaaatttaggaattaacatataa

SEQ ID NO: 382530 - DNA, 372 bp, Salmonella enterica
atgaaactgtcaggcaagattatcaaggtgtatcataataatttttttagatttttttttggcatcgtaatgtcatcgctaatttgttttttattgatcaggaatataaataatatacatagcattatatttattaaatttcttgtagcactatcaggatatatattcttttattatagtgcattttcattagtagacattgggattgagggaatacaccacttccacattaaatacaataataaaaacattaataagcagccaatactctcatttatgaaacataaacatacgataagtttctctttaaagatttttattactatattttatttctacatggccattaaatttataatattcgaatattag

SEQ ID NO: 382531 - DNA, 207 bp, Salmonella enterica
atgcgagagggggcggccattttgaaaagaacaacgtgcttatatacctcctgggtttttgccgcttttgtctctctgctgatatttgcctggagtgtcataaactatcctctctatgaatccataataattattgtcttttatatctggctaattctggtgccgctttatcttattgtgtatgagtggctaatagattgtcattga

SEQ ID NO: 382532 - DNA, 1293 bp, Salmonella enterica
atgagttcaaataaaattacagacattaaggccagggaaattatcgattgccgcggctggcccactgttcaggttgacgtgtatgttgatggcaaattgacgggtagagctgatgttcctgccgggcgctcgacaggtatccatgaagcgttcgtattattagatgccgatcaaaaacgctatcgtggtttaggggtgcgcaaagcaattgccaacattgtcggggaaattaaaaacgctatcctgggtcagaatgtcaccgaacaacggaaaattgatcagatcatgatcgatcttgacggtacaccaaacaaacaacgtctgggggcaaacgcaattcttggtgtttcgctggccgttgcgcgtgcaggcgcatttgcctgcgatgttccactctatcgatatctcaatcctttcggccacgttcttcctgtccctttaatgaactgtctgaatgggggaaaacttaccgcaaactatctggagatacaggagtttatggtattgccagtgggcgcagaaagttatgctcacgcgttacagatgaccactgaaatcaatgaatgtctgcgcgaactggtcattgataaatacggaattctcgccacaaacacgggtgatgaaggcggattcgcgacccccatgaaagggatctgggaaccctttgaatacatgcagcgcgcagttgaaaaagcgggctacaaggtcggtttcggcgaagatattgtttacggtatggattgtgcagccagccactggtatgacacaaaatccgggctgtatacacttgatgacaaacagtactcccgtgatgaactcattgatctttataaacaagttgcagcagcctatcctctgggttctgtggaagatccgattgatgaagaagactttgaaggtttcattaaagtgaccaaagagcttccgcaaactcagattgttggtgacgatctctttgttaccaatgtcgatcgtctacgtctcggcgttgaaaatcatgccgccaatgccatgctttttaaagtcaaccagattggttctctcagccaggcaatggatgctgcagaatttgcctatcgctatagttatggtgttcaggtatctgagcgttcgggtgaaactgaagatggcctgatttcagatttggttgttgcactaaatagcggacaaatcaaaaccggtatgcctattcgtggtgaacgcacttctaagcataatcgtctgttacaaattgaagaagaactaggaaatactgccgtttatgccggacataatttccgtcgtccgcgttaa

SEQ ID NO: 382533 - DNA, 1317 bp, Salmonella enterica
atgagtagcagtatcgaaggtgattttggacatgcagaaagactcgaaagagtctataaaaaagtaatctggcgcttagttccatttatttttatatgctatatatttgcatacttctcaagaattaatgttagtttcgcaaaacttgaaatgttagccgatatacaattatctgaaacagcttatggttttggtgctggaatattttttattggttatgtaatatttgccgttccgagtaacatattcttagctaaaattggtgcaaaacgctggatctgcatcctgatgatagcttggggcattttctcaacatgtttaatgtttaccaggacaccgatgcaattttatgtattacgtttactaactggtattgctgaagctgggttcttccctggtgttgtatattactttacgcgctggtttcccagtgagcgcaggggccaggttatctcactatttatggctgcaattcctttatcgggtgtattaggtggacctttatcaggttttatcatggatacctttggtaaccatcagttgaacttagcaggatgggaatggttatttctcttatatggaatacccactattctattaggcttctcggttttttggtttatgcctgatagttacaattcatgcacatttttaactcctgaagaaaaacaaatcattgctattgatttacaaaaagaagatcaacgaaaagatagtgattgcaagaataactctgtgcttggcttcctgttctcaccgatggtctggtatttctgccttatttatttctttatcgagatgggggaatacgctattggcttctggatgccttcaataatcaaaagctccgggtttgacagcttaagcctcatcggtgtcttgagttcaatcccctaccttttcgccggaattgtcatgatttatgtcggtcgctctgccgatttacataaagaacgtagatggcatctcgtcattcctatgctggtaggcatggttggacttctggtagcagcaaagtttgcccatagtccggtaatcgcaatgattggactgacactttccacaattggtgtcctgacctctttgccgatgttctggacagtacccagtgcaatgttgggttccgcagcagcggccggcgggctggcgttgataaactcaattggcaacctagctggattctgcagcccttatctggtcggctggataaaagataccactaacaacacagatatcgcgttgtatattctggcaggtagtgtattcataggcgcactgttaattctgcgaattcctaaaaaactgctggcccattaa

SEQ ID NO: 382534 - DNA, 1368 bp, Salmonella enterica
atgaaatatattaaaaatcaggacgagctgatcactgctcgccccgaagaaaaattacgccgggatataattgatatcgcagaaaatgtccttgattatgtaaacccgggtttaatcaccagaaagattgtacaactgaacgataatcagttaatcattcagaataaatcatatcaacttactccagaaacccgaatttttgttatcggcgctggtaaagcaacttttccggttgcaaaagcacttgaagatattctgggtaaaaaaatttataaaggtgccgtgatttgtaaaaaaggagagaaaggaacgctcaattatatttctctttatgagggaaatcaccccgtaccagacgactcatcactaaaaggagcacaggcagttaccacaatcctgagagaagtccggtctggagatattgttatcgcctgtatctcgggtggttcatcttccctgctggtctcacctgttcctggagtcagtctggatgataaagcgacaaccagtaaaatattactcacctgtggcgcgaatattattgagatcaactcagtacgtaaacatctgagtctgctgaaaggcggaaaacttattcaggcgctgcctccaggcactcacttaattaacttgaccgtttctgacgtgataggtgatgcgcttgattacattactgacccttccgtaccggatacctcaacattcgctgatgcgcaaagaactctggataaatatcagctttgggacaggttgccacactcagttgtggaacatattcgaaaagcagacccacaatttgaaaccatgcgtgaggacgacctgtctcatattgatcgacaggatattgtcctgcttccggctgatgctgcttgtcagggtgccatcctggcggcgaaacaggccgggtataccccccttctgctctcaaattgttttgaaggtgaaagcagtgctctcggtcgtaactttgtggcaatcgctaaacagatcctacaggatggtcatcccgtatccagaccatgctgtgttattggtggaggagaaacgacggtattaatctcatcaggatttaaaggcgaaggtggacctaatcaggaatttgcgctgagtgctgcggcagacatgcagggaatgaaaggtctggttgtgttggggctggatactgacggtaccgatggacccacaccctatgccggggggttagttgatggctatacatttgaaagagccagcagcaatcaatgcaaaccgatggattgtctgaaaaatcatgatgtatctcaggctctgattgcggctaaagatattgtggtttctggtaatacaggaacaaacgtgaatgatttaaaattaatgctaattcagtaa

SEQ ID NO: 382535 - DNA, 906 bp, Salmonella enterica
atgaaaaaagttctggttttatgcggaggattctctaaagaaagagatatctccatggttacggggagagcttgtgctgccgcgcttaaagatgctgggtatgacgcttatataatagatgtagacagaacgttacctgaaaaattaaggcaaataaacccggatgtttgctttaacgctttacatggtccttatggggaagacggctctgtccaggggttacttaatatcatggggataccttacactcattccggtgtcggtgcatcatccattgcaatggataaaataaagactaaagctattgcttgccagcacggcattcatattgcagaagatcaacttatcgattatgccacgtataaatcgatggagattccttttccttatgttctcaaacctgttaacgatggttccagtattgcgacttacatcttcaatacgccagatgcagaaaaattatctgagcaagcatggatctataacactcacgcgatgatggaaaggtatatcaagggtagagaattaacggtgaccgtttttatgaataaacctgtaaccgtaacagaaataatcccatctacagatcatcaattctataattttcatgccaaatacgacaccggcggttctttgcatagtttacctgctgatattccagataaagccttcaatatctgtatggaaaatgcgttagctatgcatattttgctgggatgcaggggaataagtcgctctgattttatactggaagaaaatacagggaatatattttttcttgagattaatacacagcctggaatgacgcctacatcgctggttccggaacaacttgcctgggccgggatcagctttacacaattggtttctctgctggttgacgaggcaacaatagatgtgctttaa

SEQ ID NO: 382536 - DNA, 438 bp, Salmonella enterica
atgttaaccgaaaaagatatctgggaattatgtacattacgttcagcaattgagaggctgggtgcccgtctggctgcggagtttattgataccgataataacagtgagaaattacaactcgcttttaagcattttactcaaacgtgtgccagtaatgattacgcaaccatcgccgagagtgatctaggcctccatgaggtcattattgggatctcaggaaaccggcgtcttcaggaacaatatgatttaataaaacgacagacgcttttattcatacggtcgagcaacgatttaatacctgatagtggagaaatactgaatcagcacaaacctattgttgaagcgatcctgtccggggatattgaattggcaggaaggttatcggaggagcacaacatcgaagaaggtaaaaaacttatctccagtattgctctttaa

SEQ ID NO: 382537 - DNA, 1446 bp, Salmonella enterica
atgacaaaccaacaaagctatcgtcggacaaaaattgtcgcgacattaggaccagctaccgataatgacagcaaacttgaagaactactcgcctctggtgtaaacgttgtcagattaaatttctcccacggctcagcgcaggatcatataaagagagcccaaaaagtacgtctcattgctgaaaaattacagcgctacatatctattatggctgacctgcaaggcccgaagattcgtatctccagtttcgccgaggggaaagtgacattgactcagggtcaaatatttactcttgatgttgaacttgctccgggtgaaggcaataataaaattgtcggttgtgattacagtgccttacccggtgaagtctcgaaagatgatctactgcttctcgatgatggtagaattaagcttcgcgtcaccgatattcagggcagtcaagtcattacgaccgtcgtccttgggggacgcttatccaatcacaaggggttaaataaacaaggcggaggcttatctgccgacgccctgacgccgaaagataaagaagatataaagaccgcggcctggattggtgtcgattatttagccgtatcctttgtgaaatctcctgccgatgttgaactggcgcgccagcttatgcaacacgcgggcggtaatgcccatattgtttcaaaaattgaacgcgcagaagtcgtcagtagtgatgaaacaatgcaagccatcatacaagcttccgatgccatcatggttgcccgcggcgatctgggtgtagagataggagatccgcaacttgttgcagtccaaaagaaactgatcgataaagcctgccgtcttaacagagctgttattaccgcgacgcaaatgatggaatcgatgattgaaaacgccatgccgacgcgtgccgaagtcatggatgtggcgaatgccgtcattgacagaacggatgccgtcatgttgtccgcggaaacagcgacagggaattacccagcagaaacggtacgggctatgtcctcagtatgtattggggcagaatcgattccttccgttcaaatttccaatcatcgtcttgatgcaaaattcaatagtatcgaagacgccattgctatggcctctatgtacattgctaaccatctctgcgggattaaagcggttgttgcgatgaccgaatcagggaaaaccgcgcttcttatgtcacgcatcagttccgggatacctgtttacgccttctcccgccacagcagtacgctgaatcgggttgctttgtatcgtggtgtaacgcccgttctttatgagcacagtgcgaaaggcgtggcggcatcaatggagatactaggcatgctgaaagagcgaggtcttgtcaggacgggcgatcgggtgatcgtcactcagggtgacattttggatcttataggctcgactaacacctgtcggattctgacagtatga

SEQ ID NO: 382538 - DNA, 567 bp, Salmonella enterica
atgagtcatttacagggtaacaaccgtccgtttccgaccattcccactcacagactgttgttacgccctttcactgtcagggatgtcgacagcgtgacaaatgcgctgtcacaacctgaaaccacctactggcttcagcatgttccgtacccctatacgtcatccgactctgcggcctggataacgaaacacccacagtcctggcatctcggcatatcgctagaactggccattgaggaaaaaaccactcaacaactggctggaacaataggtttatttgaactcacgcaggaaaaaaactatcttggatactggctggcaccacagtattgggggaaaggttattgtcatgaagccgctctcgctctgactcaatgggcttcagcgcatttaggtctccatactatcagaggtcgctgtataagagaaaatagccgctcagcacgtaccttacaaaggattggcatgacacttgagaaggttgaatatgattcccgactcattaatggaacgctgcatgatgttatgcattacggattgacattacgatgtgacgggccgggttag

SEQ ID NO: 382539 - DNA, 1212 bp, Salmonella enterica
atggcaatttcaaaaacgaatggtcaatctaagcccaagcgtaaaactgaggttcctggtcaagcgttagggtacagccttcaatttacactactcactcatttgttgcttcaagcgcctgagggtagtctttgcagtttggaggtacttgatgacgttgcccaagagaataattctggtgatatcaaattcattcaaagtaaaagcgctcttacagctaatcctgcagctgaccgtgcaaaatcattatggaaaacactttctaattggattgaccttgctacatctccagacttcgaagtggaaaaagccatttttgagctatatgtatcgcgtccagttgaaggaagtattgttaaaaagtttaatgaggctaaaacaccagaggatgcccaagaagccattacccatgcccgaacagaattatggggagattcaccacacttcactttgaaggatggcatctcgaaagaaatttccaaatacgtcgaaaaagtctttaccgcagaccaaaaccttctacaacgacttatttgcaactttcaactgacacttggtagtggtagtccacaagcagatcttgaagcatgtgtgcgaagccatcctgtctcgccttcaaaggttagcgatatcactaattatctttgcggaaaagtgaaacgccacatcgatatgcttctagaggcagaaaaacctgctgtcattgcccgtgatgatttttacacttggtataaagcatatgttcagaaaatagatcgccagatggttctttctagccgtgctcaggccccagtaaaagagaaggctcaggagtatcttcctgataaatttgtccaacaattagagatcatcggcctgccttatgaagaaatacttggagccataagtgactatttaatggcctcattcgaccgaactgattgggctgcgcggggagaagttgacgaaacctcatttgatgatttggatactgcgctacagagaacatggaagaataaacagagaatctgtggtttaacacacagtgaaaagtccgaacaagatcaagggaagctactttactttgaatgtatgcagtttaatatcccacttcaggctatgtctccaccaagccattttattcccggttgctatcatattttagctgatagcttagctgtaggatggcatccaaactatacgacgcagttgaagaataagaaggtcgcataa

SEQ ID NO: 382540 - DNA, 495 bp, Salmonella enterica
atgttggcaagagaagctcaaaatattcagaatcctgcattaggtgctgctcttgtatggcggttttgttgtggttatgtcaaaactaatcgagtaagcgcgccccctcctcttccatttctctttctggtacttcctataattctgcatcaagagacttctgagtttgttaagcgtacctataaaagttcagggctgcgagcttttgctgcaaagtttggcgattcatcggtatcaaagcaagatttactgtttcaaattcatgaacgttcaatccgttggcgacagcttagcctgcgatcaattgagcttgctgtcgcaagcgatctactcaaattgcaagatgggagtgatgtaatccctttatcgaaaacaaaggcgaggggattatcggatgaggtaaagacactcatggatttggcagaaaaactgggctcttggtttggcgaactctcgattcatgaagttgtgacaactttaaaggtgaaactctaa

SEQ ID NO: 382541 - DNA, 1983 bp, Salmonella enterica
atgtattttcagattcgaggcatcatactctggccgcgaaataaaaactttaagcctcataccattcgttttgaactcggcaaagttaatgttatcagtggtgcctcacgcactgggaaatcggcagttatccctatcatcgattattgtttgggcgccaatacctgttcaattccagtaaaaacaattcgtaaatattgtgaatggtttggaatcgtcgtggcaacagagcaaggtgaaaaactgttggcgcgaaaagaaccgggaaaccaacatagcaccactgatatgtttgtgctagaggctgaaaatattacgtcaatccctattcgcttggaaaaaaatactaatgttattgcagtcaagagaatgcttgatgatttggcaaacctctctaaccttgacttttcaggtggtgatgaaaattcagggtttgatggtcgcccagcttttcgtgatttagctgctttcacattccagccgcaaaacgttgtcgccaacccagatgttttatttttcaaaaccaatacctatgagcatagagaaaaattgcggaagatttttccctatgtacttggcgcaataacatctgaattaatggctaaacaattcgagttgaatagaatccgcctatttttacgccgcaaagagcgagagcttaaagatgcccaggatgtatcagcacaatggcttgctgatttaaaatctaagtatagtgaggcccaagaacttggcttggttcctaaaccacaggaacagttatcccgaaagcagatgattagccagcttgaagaagtcatttcgcgaaccgatctaacgttgaaggtaacagtatcaactatttcagatgctttgagtgaattaaatactcttgaaagtgaagagcgattagtttctcgtgaattgactacaatgcgtcaccgtcttgaagaaatgaatcgtctacgagttggaatgcatcagtatgaaaatgccctattaatgcaacgagatcggcttaaaatttctggctggctattatctaatacgaatgatgagtcggattgccctatgtgtggtagtcatacggattctgctaagcaaaaactacaggctcttgtccaacgtctgtcagatgttgaggctgcggtgggggctgatgcccataaggaagttccagccgcatttgatagagagctacaacgtgtaactactgaagtggctaacgctactgaacgtttaagagccatacagtcacgtaagcgaaccttaacgagcagatcgaaggaagctcgtgagcagcagttttctactaggcgtgctgagcgttttatcggtaatgtcgaatctgcgctagagttacatagaaaactaggtagcgacagtgaacttgttgaagaagtaaggaaacttaaagaaatggtacagaccttggaaaaagagttacgtgaaaaagatgtcgaattgcgtaaaaaccaagcattaagagtgattaatgctcaagcaggtaatattcttcagggcctagatgtagaagacccaagcgcacctatttctttagaaattaatgatctaacaataaaggtgttgggagatgagcgtgatgattatctttcggagataggaagtgggtcaaattggctctcctaccatttggcaatattgctttcactccatcaattttatttaagccaaaaaaataatccagttcctagttttcttatacttgaccaaccaagtcaggtctatttccctaaaactactcagcttccaaatattgctaatgaggatgagccaaaacttcgtgatgaagacgttgaagctgttagacgggcatttaaagcaatggggaatgtggtaatcaaggaaaaaggtaaacttcaattaatcgttttggatcatgctcctcgtgaagtttggggcgaaattgatggtgttgttggattaccggagtggcgtgatggcattaaattggttccgatggaatggttgactggagtttag

SEQ ID NO: 382542 - DNA, 627 bp, Salmonella enterica
atgaatgaactaattaaactaattgataccaatcccgaagaagctacagtacagaactttttcgaaaaacatccagcttcaatcataggtactgcctatgcgttatcgaatactttgatagctaaacttccattaggtgtggattttgttacagactttacatgggtaaatcctcgctctggaccaacatatgtctatattattgagatcgaaaagccttctaaatcgatatttaatcaagacaattcatttactcaaagttttaatcacgcatacgggcaagtggaagattggctcggttggtgttatagaaaccaaggaacgtttcgggatatcctaatcccactaaagtctcacaacgacttgctatcattttttgctgtaagaggaattctaatttatggaagagattctgaattaaataatagtagaaggaaggaacgttggactcaaaaaggattatcaaacccatttattgaggtacgaacatatgatggatgggctcgtgaaaagaataataccataccacctcacgatgggttagctagctatttatctactgtacattattctaatcgctcttatatcaaaaaatcccacaaattaaacacacataatcatgtttaa

SEQ ID NO: 382543 - DNA, 726 bp, Salmonella enterica
atgaggcatgtgataaaaacccgacgtggaacagatgccttactcactgcacatgagcaaccaccacaaaattcagatcaatcaactcgtcgctggcagcactttggtcgtgagaataaagcagccttaatgactctgcttctcaatgagcaatatcacctttgctgttacagcgaaatccgtgctgatttgcgtggcctcggctatcacattgaacacgtcgaaaataaaagtcagcagccagggcgaaccttcgattatcaaaatctcgccgccagcgcgttagactctgagaatggtttgcacctgtttggtatcaacgctttcggcggtcacgcaagaggaaaacaagaggccgtggacatggcaaagtttattcattgtcacctccctgactgttctcgttattttgcttacctttctgatggccgaatagtaccggctgatgagctaaatgcccaggaaatggagagggcagagtacaccattgatctactaaatctgaacagcggattccttcaaacggaacgtcgtaatcattgggaagagctggaacagctttttgaggaacatattgaaaaaggctgggatctgcaacaattacttcagcttgagctggtcccttcaccagatcataaactgcatgaattcttcagcattacacgccagtttttccagcaagaagctgaacaggtattacagatccacgccccagcattaatttaa

SEQ ID NO: 382544 - DNA, 255 bp, Salmonella enterica
atgagttataactatgctagtaagcatggtagtgctgttgcgttgcgtatgggttataaaggctttccggatgagaatgcttatgatgatgcttgctatattaaagatgccttaaaatgggtatttaagataacaggcttaaaaaaactgagtgtttacagtgacgatgatcttcgtaaacagaattatgatgtagacacctattattacgttgaaaatgagccgaaagaaagcgctgaatcaccacaggattaa

SEQ ID NO: 382545 - DNA, 1383 bp, Salmonella enterica
atgaatgccaaaattgttaaaatgaaagagaatacacctgttctggcagggctgaaaagactttgccataggaaaatgtattcattccacgctttgcctatttcgagtcatggtcagagtgatattgttggcgataccagagaatttctttctgaatgtctggaggggtcagcaactggtgaactcttcgataatttctttttccctcatgggattattgctgaatcacaaaaattgacagcaaagctttataatgctgacgcatcattttacatcaccagtggaacaagtacatctaaccaaatagcgatcactgctctttttgaaaagggtcaacgcattttgattgataaaaattgtcaccaatcaattcattttcatgcacaagcaattggtgctgaagttcgttatctttgtcctgatttgcagacaatggatcaggaaataagtgcatggtcatatgcacacttagaaaatacactcttatcattacagaatgaaggtaaagggtgtgatattgtgattcttacagcacagtcctatgagggcatcatttatgatattccacaggtattggcccatcttttgtcagctggtgtgcaggctcgaaaattttttattgatgaggcatgggggagtctgaattattttagtgaagatacgagacagctaacggcaatgaatatagactcattgctcgagttatatcctgacctcgaagtgatttgtacacactcagcccataaatctctcttttgccttcgtcaggcctcaataattcattgtcgtggaaaaaaagaactggcagagaagatagaaacagctaaatatagaatccatacaacttctcctagttacccaatactggcttctttggatgctgcgcaagcaatgatgtcagtaaagggggaaatacttgctacacatactcgcgagttagttcatgaatttattatgggggtgtctgatattgctggcctgggtgaaaaatcaatttgcagggaggtattcaatacacactggcatattcagtatgacccaaccaaaattatgatcgatgtcagcgcgttagggacaggtcaagaaataaaaacattgctcagcgaacatgatatatatctaaagagattcatcaataatttcattcttttgaattttcatattggtattaatagagaagcaatccgctgtcttctttcttcgctaacaaaaattagcaaagataataagaataataaagaagagaacgcagttgccaataaattcattatatcttacccaccaggtgttcctcttgtttttcctggggatgttattagcaaagacgttagaaataaaataaatgaatgtaaacggaatggctgcctaattattgctgcctga

SEQ ID NO: 382546 - DNA, 1497 bp, Salmonella enterica
atgattactcttcgcagactgaatgaaatagccattactcgaggtaatgatatttgcattattgataaagaacgacaatatacgtggtatgatattattcgccgtactgagtctcgcattgtctttctccgtcgggcatttaaccctgagcagttacggtctgtttgctatttatcaaaaaatagtgtcgatctaatttgttggttggctgcttttgctactttaggaattcctgcaaacggtcttgactactcattacctattgagaccttgagggggttgctaattaaaattaatcctggactaatgttagtctcttttagcctttactctccggatgaactcaataagttgcatgtccgtactataaccatgctggcagtcgatgctccaactgatccagttattggcagtataggtgaatttcatcaccctgaattggaaagtctacttgcgacacatattcctgcaccatttcgctcagtttcactaacttcaggaaccagttcagcacctaaaatcgtattacgctacaactcttttgatgcccggcgtttcgactggtttactcagcgattcaacttcacgcaccacgatggtttcctgcttatcttacccctttatcatgcagcaggaaatggctgggcaaggatgtttatggggcttggggcttctttacatttggtggatcaggatgatgaatctgctcttattcaggcactttctctcaactccgtaaaggctacagtgatgacacctaatctggtttcccgtctcactaaactcgccagtgaaacagttttacatcattacttgcgttgggttttggttggtggaagctattttccagtaaaaagcaaaatagctgcatatacccacttgggacatatttttaacgagtattacgggtgtaccgaaactggggtgaacgttctttctgagtcttcagatatgtttgagtgtccaggtagcgtggggagagcctttgacggtaataaaatcagaatcctggatgaggataatgtaccactgaaagcaggcaataggggaagaatagctgtagccagttatatgcttatggatgaatacggtgatggcagtaggcctttcattgaaatagacagtgaacgctattttttgatggctgactacggatatcttgacgataatggacgactattcttgatgaatcgtaatagtgaaataaaatgtgagcaagacatttatcatattgaggaacatttacgtgcactcccctgtattacagatgtggcactcataccaataagacaacaaaataaagatcatatcaggtgcatatttagcgctaaacatataaatgaagatgatgtttcttttattatggatgaaataaaaaataaaattaatcatatcggggtgactgatttcaccgcacatatggttgataaaataccttatagcccgagtgggaaagtccgtttcagcgagatagtccaaactctgacagcagcataa

SEQ ID NO: 382547 - DNA, 963 bp, Salmonella enterica
atgaattcatatctgaaagggttactctgttgcttattagctacagtgtcatggggggggatgttcccggtaatgacacatgctctaacttatattgatccgtttaattttactacttttcgctatgggattgcgggtattgcctttgcattgttattgctatttcgtgaaggccaaaattcattccggttaaaaggagagcgctggggtttggcttggttgtttggtacgctgggttttgctggttttggttttctggtctttctgggccagtcgcttgcggggcccgggggggcacttactgcatccattatgatggctactatgccgatgttagggcttctgactatctgggctctgaagaaagtacgccctcacgccagtactatgtcttttatcctgctgtcttttagtggtgtcgtcctggttattaccaatggtgatgtctttgccgtccttaattcacctattagccttgctgcaaatctgctacttatcgctggagcattgtgttgggtactgtataccattggtggaagctattttccgggctggagcccgttacgttatacaactatgaccacgctgttggggatgattagtgttgtattaattgatttgtttctggttggatcgggtgcaatttctgtaccgagtgcagcgtcgataataactattgttcctcatctattgtatatggctctggttgctggtctggtggccgtgctgtgctggaatgttggtaatcgcataattactccaacaaatggtgtgctctttatggatgttgttcccattaccgcttttattgtttcagctctaaatggcgttgtgccaacaaacatgcaaattaccggggccgtaatcacagctatggctcttgtactcaacaacctgaaccaacgtaaactcgcgatattggcaacccaggctaataccctgaaggcatcgactagtcactaa

SEQ ID NO: 382548 - DNA, 996 bp, Salmonella enterica
atggctattaaagtaggtattaatggttttgggcgtatcggtcgcacggtttttcgtgaagcgcaaaaacgctctgatatagaaattgtggcaattaacgatctgttagatgttaactatatggcgtatatgctgaagtatgactccactcatggtcgctttgatggcactattgaagtagataatggtcagttaattgttaacggtaaaataatccgtgttaccactgaacgcgatccgaataacctgaaatggggtgagatcggtgttgatgttgttgctgaagcaaccggtattttcctgaccgatgaaactgctcgcaagcatatcacttctggtgcaaggaaagttgttctgactggtccgtcaaaagacaatactccaatgtttgtgaagggagtaaactttgacaagtatagagggcaggatattgtttcgaatacatcatgtacaactaactgtttggctccactggccaaagtcatcaacgacaactttggaatcattgaggggttaatgaccaccgtccacgcaaccacggcgacccagaaaaccgttgacggcccgtctcataaagactggcgtggtggtcgcggtgcggctcagaacatcatcccttcctctactggtgcagctaaagccgtaggtaaagttctaccggaactgaacggaaaattgacgggcatggcgttccgcattccgactcctaacgtttctgttgttgatctgactgttcgcctggaaaaagcggcttcttatgaagatattaagaaagtaatcaaggctgcttctgaaggctcaatgaaaggcactctgggttacactgaagatgacgttgtttctacagacttcaatggtgaagtttgtacttccgtgttcgatgcaaaagcaagtattgctttgaacgacaacttcgtaaaactggtttcctggtatgataatgaaactggttactcaaataaggttctggacttaatcacccatattgccagataa

SEQ ID NO: 382549 - DNA, 879 bp, Salmonella enterica
atggatcttaaccagcttaaaacatttgttaccgttgcggaaaccgccagcctgactcgcgcagcaggacttctctacctaagtcaaccagcggtaagcgcccatataaagcaacttgaaaccgagttcaatgtaaagctattcaaacgcacccccagaggcatggaactgacctctacaggtctcatcatgagagatgaagcacgtcttgcacttgatgccgcaaacaaatttgtaaataaagcccgtacacttcataatatagagaactgtgccttaggcactatttcagttccagtaatccttaatctaccattagtactatcacaactacggctgcggcaccagaatgtcagtttgacgatccagcagaatatttcggggtatattattgaagacattaagaacggtaagctcgatgctggctttgtcattggggaagttaatgactctcagttagggattattcctgtttcttctgtaacgctctgccttgtaggtccatgggcctggaaatcccagcttgaaaaagcaggttgggagcaactacaggagttaccctggattgctactccagaaaaatgctcctttactgctataacaaagtctttctttgaacgacatgatgtcactgtaaaggcatccattatagttgatcaggaaaaaacgctagctgaattggtagcaatgggagcagggataactctgatgagagaagatatcgctctagctcttcaggataatgaggagatttatatctggccgggagaaaagacagtgagccagctttgtttcctttgggatcgtgaaaaagagaaatcttctgtcttatctgcactaattgcaacggtgaaagatatctggcaagtgccagcttga

SEQ ID NO: 382550 - DNA, 432 bp, Salmonella enterica
atgcgtactccgcatattatgccgctgtcccggcaggcgcttgccattctgaagcagataaaggaaatctccggccatctggatctggtgttttccggcgaccataacccgcataaaccaatgagtgaaaacaccatcaaccaggcattgcgtctgatgggttatgacacaaaaactgatatctgcgggtatggtttgcgggctatggcctgtagcgcactggtggaatctgagcgatggtcgcgcgacgcagtggagaggcagatgagccaccaggagcgtagcagcgtcagggcggcctatattcacaaagcggaacacctcgatgcacgtaaggtgatgatgcaatggtggtcggattgcctggacgctaatcgtgaaggctgtgttgcaccctatatctatgcccgacaacaaaagcgggagtcataa

SEQ ID NO: 382551 - DNA, 375 bp, Salmonella enterica
atgaacaaccacatttttctggctatcggccatctgcccaccactctactgaaaactcagcatttcactgcgttactgagaattatcgatgataaaggctttctggaagtcgcgtcccgtacccggcagcaactttgtaacatcatgcgttacgccgtgcagcaggggctgactgaaaacaatccagctctgaatctggaaggcgtcaccactcctccggttaaaaatcactatcccgctctgccgctggagccgttatctgaactgctcctgtgcattgatggttatcagcagggccgggaattaacccagctggcagtgaagctgactctgcatctgtttatccgctccagcgagctgcgttttgcccgctga

SEQ ID NO: 382552 - DNA, 1425 bp, Salmonella enterica
ttgaacgtctccactgccttacgccaggctgtcgtccgtacgccctggtatgccaaacgcaagagctacaaagtgttgttctggcgtgaaatcaccccacttgctatccccatttttctggaaaatacctgtgttttgctaatgggcgtgctcagtacttttctcgtcagttggctgggcaaggaagcaatggcgggcgtggggcttgccgacagttttaatatggtaattatggctttttttgcggctatcgatcttggtactacggtggtggttgcctttagcctgggcaagcgcgacaggcgacgcgcaagggcggcggcgcgccagtcgctggtgattatgacgctatttgccgttgtgctggcagtggtcattcattatttcggcagtgaaattattaatattgttgcaggcgaggcgacgccagaagtaaaggggctggcgttaacgtaccttgaactgacggtgctgagttatccggctgcggcaattgcgctaatcggtagcggcgcgttgcgtggggcagggaatacgaaaatcccgttgatgattaacggcgggatgaacattctcaatattatcatcagcagcatcctgatttacggggctttctcctggcaagggctgggttttgctggcgcggggctgggattaaccatttcgcgctacatcggcgcggtagcgattatttgggtgctgatgattggttttaatccggcgctgcgcattccgctgaaaagctatctgaagccgctgaatttcggcattatctgggaagtgatgggtatcggtattccggcgagcattgaatcagtgctgttcaacggtggcaagctactgacgcaaatgtttgtcgcaggaatgggcactaacgttattgcgggcaactttattgccttttccgtggcggcgcttatcaacctgccgggtaacgcccttggttcggcgtcgactattatcaccggtaagcgtcttggtaccgggcaaattggtcaggcagagcgtcaattgcgccatgtattctggatgtcgactatcgtacttacggcaatcgcctgggggacagcgccgttcgcgggtctgtttgcctcattttatacccaggagcaggacgtaaaagaggtagtgaaagttctgctctggcttaatgccgcctttatgccaatttgggcggccgcgtgggtgttgccgtcgggttttaaaggcgcgcgcgatgtgcgatttgcgatgtgggtatcgatgctggggatgtggggctgtcgcgttgtggcagggtatacgcttggtattgtgctgggtatgggggttgtaggggtttggctggggatgtttcttgactgggccgtgcgcggcgcgctgttttactggcgtctggtaagcgggcgctggctgtggagatacccgcgcgtaaagagggagtaa

SEQ ID NO: 382553 - DNA, 378 bp, Salmonella enterica
atgagcaatctaataagaaaaaattattctgaattaggtgaagtaaaggctccttatgtccattcagtcaagcatagtaacacgctctatatttcaggcatgacggcgtttggcacagcggcccaacaccagggcattgctgagcaggctgaagaaatattcagccaaatcagaaaaatcgccagcgtagaaggtacagatttttcggcgctaatcaaagtgaccatcttcatcacctcttttgaggagatcaatgagctacgcaaagtactgtatcgaaattatggtgaatacttgccagccagttcgctcgttgaagtcagccgcctcttctcacctgatctctcaatagaaattgaggctatattcggcctttga

SEQ ID NO: 382554 - DNA, 1992 bp, Salmonella enterica
atggcaaagcagattattcagggaacaactgaaatcaacagtttgggtatcaagaatcattttgagtcagttgaacctgtacaggcgatattggaactcgtatggaatggatttgatgctggcgctaagaatattaacataaacatagtttatgaccattttgatacagtaaaaaacctgaccattcttgatgatggtgacgggataaactttactgatttaggcagcaactttaatcgatttaacgattcattaaaaaaaacaagcattgatcaacacggttctaaaggtcgagggcgtttatcatttcatagactttgccatcaggctatctggtataccaaatacttaggtagaaatgcttatatcaagattaatgatgaggatattaaggcatatgaagctcaaattgatatcgacgctgaagagcagaacagtttattgaatgcaatggataaagggacgtgtgttgaattaacattgttacattcaagccttccagatagaagtgaactgatttctattttgtccaatgagttttgttgtaaattggcattggatgataaaaagaggatttttgtaaatggtactgaaattgacatcccagaacacgaaataaaagaggtctccttcgagattgaaaataatgacttcatggtgaaagggattcgctgggataaaaaaccggcgactgaaaaatcatttatctatttgactgatagttccggaaaaattgttcacaaagaatccacaacattcaataaaaaaagagattttcatttgagtgtatttgtttcatctatttgggctgatacttttagttctaatggcgatgacattttttcaacagctaaaagtaatcctgattcaaaagcatggcggcaattagttaaaaatgtcttaaaattctcaagatctatatatgatgattttctgcgagtgcaggttgaaaaagccatacaaaaacttgaggaggatggtgcatttcctacatacaatgaatatgatataacatatgctagctggaaaagaaataatattaagcaggttgtaagaagtatttatattgccgatcctcagtttctggtatcactcactataaagcagaaaaagataatcatcaggcttcttgataagatgctcgtatcaaatcaaaatgaagatttatttgatatccttgaaagtgttttagatttaagtgatagtgatctttctaggtttgcatcacaattgaaaaaaacaaaattagaaaatattataagttcaattgaggaattgcaaagaaggcgttttgcggttgagaaattaaagctaataatgaacgagtattataaagaagttctagaaacgcctgacttacaaaaaatcattgaaaataacacatggttatttggtgaaagatacgaaactataggcgctgaggaagacacttttactaagattgcgaaatcattgagggatagtgtttactccattaataacatagatgaacaagatgtggaaaatggagaggatattataggtgccaggagacaaacagatttattcttagccagaaggatgccaacgtttgactctaatgggaataaggtttttagatgcataattattgaaattaaaagaccaagcatagccctcaatgttaagcatttacgtcaacttgaagattatgctgggattattaaacggcatcctgagttttctagccaaaatttgcattttgaattaattcttataggtaggaaaatttctagtcaagatatagaaattcctactcgcttgtcaaactatgctggccgtggtgatgttggtttagtatctgatgatgcaaatatgaagcgttacgttaagaattggtacacaatatttgatacttttgaattgacgaatagtttcatgcttgagaaattacaaatggaaagagatataattgaaaagaaatctagggaggacctggttaaggaattacaagaagaaagtgttgatgcttaa

SEQ ID NO: 382555 - DNA, 1035 bp, Salmonella enterica
atgccccggagaattcctgctctggcaggcagtccgtaccgtgcactgactgaaactccctatacctcaacaaactgccactccggcgtgaaggtatcgttctggcacagccaaaaagcatacgccgaagactgtttgtgttctcaacatcagggggagtgtatgggtaaattaggcagtgaaatgacggcgctggcgaagcatggtggtgggagttataaaacggtgaacgatcgtatccacattgtgcagcgtttcgatcatcacttgcgggcgctaaacgtccagatccagcgggtggcgcagattaaggtgcgccacattgaaagctacattcatgaaaggctgacgcaggggatcggcaaacgcacgctacagaatgaaatggcctcactgcgtgcggtgctgcaacaggccgggcgtaagcaggtggctgagcatgagcggctaaccaataaatcgctgggtttatccggtacgtcacgcaacggtacgcggcaggctattacgccggatcattatcggcatgtgctggaaacggcccgcgcgaaagatccgggtctggcagcggcgctggaactggcgcgactgatgggtttacgttcacaggaagcggtacaaagcgcgcagtcgctgaaaacatggaaacaggccgttgaacgcggcgatacgcgcttaaccgtggttttcggcaccaaaggcggacggcctcgcgaaacggtgattctggatactggcgcagtcaaaaaagcgctggataacgcgttagctattgcagaaagccgtaatgatcggttgatcgacaagccggatcttaaaagcgcgatggattactggcacaaccaggcggcgcgtattggtctgactggcgcatattctccacattcgctgcgctatgcgtgggcgcaggatgccatgcgtcattatctggcgcaggggttcagcaggaaagaggcgctagcaataacggcgatggatctggggcatggtgacgggcgtggacggtatgtggcgcaggtgtatgggcaaatttga

SEQ ID NO: 382556 - DNA, 228 bp, Salmonella enterica
atgattgataacgactggcacccggcagacatcatcgccgggctaagaaagaaaggaaccacgctcgctgctgtttcacgcaaagcgggtttgtcatcttccacgctggcaaatgcgctgacaagacgctggcctaaaggtgaaaggttgatcgctgaagcattaggcgttgcgcccgaacagatctggccgtcccgctaccgaaagacagaataccgtcaaaactaa

SEQ ID NO: 382557 - DNA, 273 bp, Salmonella enterica
atggtattttttatgctgcctgttcgtctcaaaacagcccgcttacacgcacatttgacccaggaaaaactgggtgtccttgccggtattgaagaagaaaccgcacgttctcgcgtatctcagtacgagagtggggtacatcgccctacgtttgaaatgatgtgcgcattcgcgagggtgcttgatgtgccggaatgctatttctacgtagtgaatgatgatttcgctgaaagggtcctggtgctttatcaggaatgtcagaattattcctga

SEQ ID NO: 382558 - DNA, 303 bp, Salmonella enterica
atgctaaacatgctgtcaatatcctttattgatggtgccgtgatgttgcctgctcgtcttaaatcagctcgtttacgggcaaattttactcaggaaaaattaggtgtactggcgggtattgaagaagcgaccgcccgatcccgcatatcccaatatgaaagcggtatccaccgcccgacatttgaaatgatgtgtgcatttgccagagtgcttaatgtaccggagtgctatttctatacggtcgatgatgattttgccgaagcggtgttggatcttcatcgccagtggggaaataaaacctga

SEQ ID NO: 382559 - DNA, 354 bp, Salmonella enterica
atggagttattccgaaaaactttagggggtttaaaagcaagttattatattcgccatttcatttttggcgcgataatttcaacattctttatttacatctctatgcagaatccttctgggatgaaggtgggtaatgtaatattctttgttatcaatgcgttactttatccatatgcaagattcgtatatgagcaggttgtttcgttcataatgggtgaaaatgtcttcttcatcaatgcgatagtgatgttaatggctaaggtcatcacaatgtgcttatgttggatattttcaatatttatcgctccagttggattggcatatctttattattatcattccaggggtgattag

SEQ ID NO: 382560 - DNA, 390 bp, Salmonella enterica
atgaacaaaaccgtgtatgtaccaagctacttccaacctatctacaaagaggtaacggtcaaagttcccaccggaaatacaaaacgatttcttggatttattgatattgaggaaaaaatccgcaaaaaagaggtagtacaggaaggatggtcagattgccaggttgatggtgaaagattgaatgaagatattacacgcacagtagataagctcaaccaagacggatttgaagttattagcataacgccagtaacgtccggaaactggggatttaaatatgactcagggtctatcaacaatggaaccggcagaggtggatatggttacggatatggttactcttataccgaaggtgttttaatcctcgcaaaggaaaagggagcttattaa

SEQ ID NO: 382561 - DNA, 1182 bp, Salmonella enterica
atgaacaactctgtgaaaaaatttaaacctagtacggaaatactccagtttggccgcgacccaaacaaacagtatggttttgtaaatggtccaatctaccgtggttctactattatatataattccgtaagcgatatagaaaacagaaatgcacgttatgattatggaacagcgggctcgccaactattgagaaccttgaatctgcatggacgcatttaactggagcagcaggcacagttttatctccatccggtttaggcgccatcgcacttgcgctcttaacgacaacgaagagtggtgaccatttattaatgccagatagtgcctatcggccatcgcgtaatttttgtctgaacaccttggctaaatttggtgttgaaacaacatattataatcctctcataggttcggatatagaggggctaattaaatcaaacacctctactatatttcttgaagcgccaggttcacagactttcgaagttcaggatattccggcaattgtatcagttgccaaaaaacataatatcaagactattttagataatacttgggcaacgccaatattttttcaggcacataagcatggtatagatttatcacttgaagctggtactaaatatctaagtggccattcagacctcttgatgggactgatctcagcaaaccaggagacatggcctgatctcaggaaaatgtacagcagtatggcaatgcttcctggaccagaagattgtttcctggcgcttcgtggattacgtaccatgcatttacgcctgaaagaagctgagaggaaaggtattgaaatggcaaaatggctcaaaaataggccggaagtcctcagagtgttacatcctgcatttcctgaatgtcctggacatgaatattggaaacgagattttaccggttcatctggattattttccattgttttagaccctaaatttaataaaagtaatttagctaatatgctggatcatatgtcacttttctctatgggattttcctggggaggttatgaaagtttgatcataccatttgattgtacagaatatcgtactgcaacagaatggaatcctggtgggttaacgttaagactacaaattggtctggaagatatcgaagaccttaagtgtgatctaatagaaggctttgagcgtttaaatcaggttatatgctaa

SEQ ID NO: 382562 - DNA, 1275 bp, Salmonella enterica
atgtctgaatgtaccttaactaaagatgatataaaaagaataccattcacgttatatgatgctgggtgggtcattttatgtattggaatggcaataggtgctggtattgtttttttacctatccagattggaataaaaggcatctgggtttttatagtgtctatcataatcgtttatcctggtatttatctccttcaggatatttatttgaaaactttgtcgaggacagaagatgcaaaggactatacaagcattatttctcaatatttaggccctaactgggctattttcatgagtatcatatattttttgatgttatttaagggaatatttaactattcacttgctgtaacatttgatagcgcttcatttctacaaacatttggtattaccgacggactcatgtcagaccatttttggtggggattgcttgttatatcagttctggttgcccttgcgtcacagggtgaaaaattaatttttaaaatttcaactcctatggttctggtgaagttaggtattgtcctgttaattggtattgcaatgataccgcactggaatttttcaaatatatctgctttaccaaatatggggacctttattcgcgatctttttctaacaatgccatttacattattctcaatcctttttatgcaaatactaagcccggtgaatattgcttatcgtaagattgagtcaaatcgacgcattgcaacatatcgtgctatacgagtcaaccgtatagcttatgcaattttggctataagtattctcttctttgctttttcatttactttcaccttaaaccatgagcaggcaatgctggcttataagcaaaacattactgcgttggcattggcagcaaaagttttacctggttcacttatcaaaatcatgactgtcctgctcaacatttttgctatattgactgcctttttagggatttatcttggttttcaggatgctttgaaagggatagttagaaatattgtttctcggtttattccagtagagaaaataaatgaacgttttctttctgtttttgtttgtgccttttcagttataagtttatggtgtctggtcatgacccggatgtcaattatacttcttaatcaacttagtgctcctctctatggtattgttgggtgtttaattccagggtatttgatatataaagtttccttactgcatgaccttaaaggaatggctgtatactatattattggtattggattgatgctatgtttctcaccattatttatattatttgattaa

SEQ ID NO: 382563 - DNA, 387 bp, Salmonella enterica
atgaaagttattattaacactgacaaagcaccatctgccataggaccttactcgcaaggtttcatatttaatggtctcgtgttcacttcaggacaattgccgttatatcctaaaacaatgaatttaacagaaggaggaattaaagaacaaacatggcaagcattgcttaacttaaagtttgttcttgaaatggggggagcttcgcttgaaaccgttcttaaaacaacttgtttccttaagaatatggatgatttcaacgcgttcaatgaagtatacgaaaccttttttggtaaaattaacggaccagctcgttcatgcatacaggttgaaaaaattcctaaagatgctttggtagagattgaagctattgcttttgaaaataaataa

SEQ ID NO: 382564 - DNA, 945 bp, Salmonella enterica
atgatgacaattcctttgacaatcaagcaaatagaaatgctggttaaagcaagtgaaagcaaaggtctctcagaagctgctcggttacttaacctttcgccatctgctatcagtaaaggacttgctgccttagaagaaaacttaggtgttgctcttattaagcgaacaaccagaaattttcagcttactgaagcaggagaattttttgttgcgagagcatcaaaattattagaagaatttgatgatgttataaatagcacatgtgaatatataaattatccccatggtctattgaaagtcacaagttctgttgcttttggctacgcacatctggttgagatttttgataaatacagggaactgaataaagatgtcgaactcattcttgaacttgatgatcacattgttaatctcaacgaaaatgatgttgacattgccctaaggatcacatcaacaccgccacaaaattacgcaacgcgcaagctggcggaggtaagttggatgtattgtgcttcacctgcataccttgagaaaatgggggcccctaaaaaattagacgacctcattaaccatcaatgtttggtctatcaggggattacaccttctctgcgtttttctgcacctggctcaagtagtaacagttgtaaccataggcctaaaattccgttatcagtcaatagcagtttacttttactaaaagccgctcttgcaagtcaggggattgcctggctaccttcatatcttgtcagttctcatattgaagatggcgagttgattcctttaaccatggatggaaagtgtgtttatccgactcacagtctttatgcactgtactttccaagcaagtataaaaatccaaaagtaagatcgtttattgattttctccttgaagatcaccagccatggaaaaaatgggaagaaacaataaataaattgaagttttaa

SEQ ID NO: 382565 - DNA, 924 bp, Salmonella enterica
atgcgttcgcttaatcgcttgaaatggctgcacgcttttgaagcaactgcgcgtcatggtagcttcacaggtgcagccaaagagctaggcgtcaccccggcagccgtaggacaactggttcgggcacttgaagactgggtaggccacccccttttacaccggacacgttctggtaaagaaaggctcacgctcgtgactgaggctcaggatgcgctaaaagagatcactcaagggctcgatagccttgagtcaggacttaataaactgcgcggtcgtcaggctcgatccgtcgtcattctcacggcctcacaagttctggtgatgaactggttaatggaaaaattaaatcgtttttccgaaacgcatcaaaatatcgagctacgcctgaatgtgacggaaaaactcatggatgtggctcacggagaggcagatattggtgttcgttgtggcaaaggagactggtcgggggtaaataaggcatggttaatggatgaggaagctgttctggtatgcagcccacgcattgtaccgcctgagaaaattacgtgcggcgaatggctggcagaacaaaaactcatccatgatgataccctgcaccctggtgcaaattttccttcatgggaagaagtcttagccgcaacgcaagctccagctacgcgttatacaggattgcatattaactctacctcagcggttattatggctacgcttagcggccagggagtggcaattgtccgccgtgcgttggttgaacagttaattgccacaggacaactgatacaacttcatccaaatatacgctggccgctaacatggtcctattacattgttacaccacaaaaagcagtgatgcgtcctgaagtaaaagtttttcatgactggttaattaatgatattttgattaaaaatagcccaacctcctga

SEQ ID NO: 382566 - DNA, 282 bp, Salmonella enterica
atggcttacttacaaatcactctgaatatcagcaaccacaaccgccctgccgcagcaaatgtttatcaaaaatataaagcgccatttttaaataccattgccggagcgacctcaaaagaattgcttattcgggatgaagacgtgcaagttttacatggctttgaaactactgctcaagcgcaggcgtatcttaccagtgaattatttacaaaagacgttgtggaagaattgaagccttttctgaaccaggcaccagatattcgcatttattatgtgatctga

SEQ ID NO: 382567 - DNA, 345 bp, Salmonella enterica
atgctttcaaactggaatgagtatcgtagtggcctgctggctgccattggtaaatttgccacattgcagccggagttcatgaaaggctttcagcaaatggacaaggggactttagaaaatgggcatctggatcccaaaacacaggaattgattgcgctggccgtggcggttactacccgttgcgatggttgtctggcagtgcacgtcgatgcggccgtgaaacatggcgcaacccgggaagagatttctgaagcattgtccgtggctataaaaatgaacactggggcagccctcacctacacagcacacgcactggatgtgtacgacaacctgccgaataaataa

SEQ ID NO: 382568 - DNA, 216 bp, Salmonella enterica
atgatgaactgcccattatgcggactggcagcacatacccgcagcagttttcaggtgtccagcgaaactaaggaacgctataaccagtgcactaatatcgagtgcggccatacattcgtaacgcatgaaacatttgttcgctcagtgtgccgccctcaaaaaatcagcgcagccccacctcacccaaaaggcatacaggaacaatttgcatactaa

SEQ ID NO: 382569 - DNA, 1608 bp, Salmonella enterica
atgcagaaagagtccgacattaacaaggattcgctttctgcgcagtggatgctggtaaaagcgggtgcgcagaacgccttcagcagcctgggcgaaacgctgcgccagccgctgatggacatcatggattatgttaaaagcgtaacgggtgggctgcggcgctggatagaaaccaatccggagctggcaggcacgctgatgaaagttgctgctgccaccgccgcaatcacgctggcgctgggcacgctggccgttgcggtggcagcggtgctggggccgattgccgtgatccggtttggtttgtccatgctgggcgtaaaaacgcttccgtccgtgttcaccgcagttacacgcaccggcagcgcgctgtcctggctggcaaatgcaccgctttccgtgctacgtcgcgggatggcttcagctggcggtggcgcaagtctgctgactgctccgctgaatgcgctgcggcgctcggccggggtggcgggcaatgcgctgaagaccttagccggtgccccgcttaacctgttacgcgccggaatggcgggtattcgtaatgttgtcggtatggtaatgaaccccctggcagcattacggggcggattatccgccgccggtggcgtgctgcgcttcctggtgtccggcccgctggcattacttcgcgttgcgctttatggaatttctggcctgctgggcgcgctgctaagcccgatagggctggttgtggctgcgctggctggtgtggcgctggttgtctggaaatactggaagcctatcagcgcatttctgggtggcgtggtggaggggtttaaagccgccgcagcaccaatcagtgaagcgtttgagcccctgcgcccggtgtttgagtggattggcgataaggtcagggcactctggggatggttcagcgacctgctgaccccggtcaaatccacggccgccgaactgaataacgcagcctctatggggcgtcgtttcggtgaggccctggccgaaggcctgaacatggtcatgcacccgcttgattcgcttaaatctggcgtgtcgtggctgcttgaaaaactcaacatcgtcagcaaagaagctgcaaaggcgaagctgccggagcaggtggtgaagcagcagcctcccacggtgaacagcgacgggaaagtggtgctgccgcccggcggcttccccatgatggggtttgctggcatgtatgacgacggcggcaccatcccgcgcggccagtatggcatagtcggagagaatggccccgaaatcgtcaacggtccggcaaacgtgaccagcaggcggcgcacggcggcgctggcttcggttgtggccggaactctgggcacggcggcggcgcctgcagaagctgcacccctgcatccgttcagccttcccgccatggcataccaacagagccagcccgcgaaggcggaccgcgcacgtgcagtaatgcactttgagacgcacgcgccgatcacgatttatgcgcagccaggacagaacccgcaggatattgcgcgtgaagttgcccgccagctcgacgagcgcgagcgccgcacccgcgcgaaggcgcgcagtaactacagtgaccaggggggatatgacgcatga

SEQ ID NO: 382570 - DNA, 507 bp, Salmonella enterica
atggcagtagttcctagacaaaacgcaccaagtaaaaaaatgatctggcagtactggattgacaatggaattcaaagaggtttggatgatacgcgctatgataatgcgtgtgattttaatgtatgtgtctgctgtggccgcgaatcctcaaaattggagagggcgcatattatccctcactcactaggcggaagtaatgatgtctcaaattatattctgctatgcagtaaatgccatagagaaagcccagatattgctaatgaatctgcgcttattgaatggatgaatgagcaacctactgaaatggaaagcatgttaagactaatccagcaggaaatggataaatataataaagaaactcaaatgacagttaatgaaattcttatcaaagaaactttcagtgagttgttcaaaaaggcaggaacacatggtggtagacattctgatgcaaccaaggtgtatattattagggaagctttgaaaaaaatatttattcagactttttga

SEQ ID NO: 382571 - DNA, 1161 bp, Salmonella enterica
atgaaacgaagaactcggatcaactacacgccagagcagaaggcaattatctgggacagatataagcaaggtgattctctacatgatatcgccagaatgttcgatagatatcattcttccattatgcccactatccaccagacaggcggctaccgtcctcccgtgcgaaaacggcaccgattagcgctttcgcttgatgaaagagaggagatatccagagggctggtagcaaaactcagcatcagggacatcgccgccaaattatcaagagcgccctcaacgattagccgcgaggtcaggaggcacggtggtgcaaaacaattccgagcagcaaaagccgatgctactgcgtgggaaaatgcgctgagaccaaaaccttgcaagctaattggaagccccgcattgtgtaaaatcattgcagagaagatgcaccaggactggtcgccggaacagatcgccggttggctgaaacgctgttatccggataatcaggaaatgcatgtgtcacacgaaacgatttataaaacgctttttatacaaacccggggagcattaaaaaaagagctgcagcaatgcctcagaagcggaagagcagtgcgtagatccagaacgtcatcgcttaaagggaaaggattagggtcaatcccgaacacgatacctatcagcgaaaggccaccagaggcggctgacagagccattccaggtcactgggaaggtgacttgattcagggctcgaaaaactcctatatcatcaccctcgtagaacgtcattcccgttttgttatgctggcgaagatcagaggtaacaagacaataacggttatatctgcactcatcagacaagcccgggaattacctgctgagctttataaaacattaacttgggatcgtggcgctgaaatgaccagccacacacgatttactatagcgacagacattcagatttatttttgtgatcctcaatctccctggcaacgtggctcaaatgaaaatacgaacagattgctcagacaatattttccaaaaggaactgacttatcggttcacagccagcaaagacttaacagtgttgccagacagctcaacgaaaggccgagaaaaacgctagactatgaatcacccgcagaacggttcaataagtgtgttgcgtccatcagttga

SEQ ID NO: 382572 - DNA, 693 bp, Salmonella enterica
ttgccagtggtactggataaagaagcgcttaataatagtgatcttggggtgttccaggcattattcgcacgttctaatgatatgacaaacctcgttaataaaattgtaaatgctatcagccgcttcgaaggtgcccgagtagctcaggaagagacaaaggaaattcgggcaaaagttcttaaagatgaatcagccgattacataagtgaaacaattgaggatcttaaggcgcgcgaaaaagatggtcgtcaattatcttcaagatggcatcttgctggatatggggcattagtagcttctgtcattttcgtattaactctttggtttttagctgagcgttcatttgtacaatcacctcttgatactactagattgattttcgatgctattaaaggcgtaacagttgtagcgttacttttgggtttggcaaggtattcatttttaatggcaaaaacgcatcaattagaagctttgaagaatgccgatcgtctgcacgcaatttcgttcgggaagttctatatgcgcgttttttctacgcaaatatctcaatctgaattgaaagaagtattccaacattggaatacttcaggggcgtcagatttgtcgcatcttgatgtagataaaattgattcacgatttattgaactctttgggaaaatctctgaaagatttgatattaaaaataaatcttaa

SEQ ID NO: 382573 - DNA, 498 bp, Salmonella enterica
atgaaaagcataaaaaaattgattatcgcaagtgcgttgagcatgatggctgctagttgttatgctggctcatttttgccgaacacagtgcaagagaaatcagtggatattaactttgccgctcccgaacatttaaccgtatcgttggatcaagtgccgggtttaattgctggggatgagcctacaggtacggctattgcgaagcttacagttgattctacttctgttaaagaattcggggccagggggggggctggcgtgataatggacaatgctggcattgtatggagaatagctggtaaaaatagtggcaactcaatcactgtgggcttatcacctaaggatgtggccaagagtcagggcaggcaaacgtggaatgggagagagtggatcacctttgataccaatgtcccactttatattactacgataggggagcagaatatctcacctgatacgtacccactgactttagatgtagtgggatatcaggcgtaa

SEQ ID NO: 382574 - DNA, 264 bp, Salmonella enterica
atgaatgcctccggcgccagcgtccgccacatcaacagcgaaacctgcatgatcacctgttactcacaaatccccagcggcgactgccaggaagaagcgggatttgagaccgggcgcagcgtgacggtgaagatctccgagggatgtttgatcctgatggctgagacggacgaagtgagggagctacggaaggagctttatcaggtgaaaaagtcgatgaagcatattaaggcgggggtaaatgatgtggtgaacgggaattaa

SEQ ID NO: 382575 - DNA, 312 bp, Salmonella enterica
atgaaaacaattgtaggttttgatggattattatccatttataaagaacgtccagaagcatggtatttttttactgatgttacaatggataacaaaaaagaaagtattagaactggcattttttatcttcctgatactcgtgatgaagaagaggatatggatgatatgtcagataaatataaaggttggttagagtacgcaactttcttagctattattgataataaacttgagcatcatcctaaagcgtcaaatgaagacttattagatgctgttatttattatctcgaagaagatgattttttagactaa

SEQ ID NO: 382576 - DNA, 390 bp, Salmonella enterica
atgtggtttcagaatgcgttaggtaaagaaaagattcaattcatgtttaataatgaattagatatgcaatcaattgaattatatagtttttcaatggagcgtttttcagacttgaaatttaatttcgtttgtaaaaatatacccaaaaaatatcctgaaaaatggaataaagatcatttcaatgcacttagtctcataattacttttggagacataatccagttagatgttactgggacaaaaatttgtttttattgctctccaataattacatcttcattggattgttctgaaataaaaatagaacatgacgatcttaaattgtactgtagatcaaaatttttaaccatcgaggaaattaatccctacctagatgaacgatgggattaa

SEQ ID NO: 382577 - DNA, 267 bp, Salmonella enterica
atgatgactactgctactggtatcaagttaaaagaatttggtgagaattttcatgacagactttctaaagatgaactgaattatgcattgagttacatcgattttggggaggagccattagcttttgaaatattctgtgattatatctgcgaaaatgatcttgttataacaaagagtgaatatgagcatctatgtgcttttaataatatcttcaataatttgttagaacatgatgttgttctttatttaaaagaattagttaaatag

SEQ ID NO: 382578 - DNA, 876 bp, Salmonella enterica; identical to SEQ ID NO: 186770

SEQ ID NO: 382579 - DNA, 1371 bp, Salmonella enterica; identical to SEQ ID NO: 186771

SEQ ID NO: 382580 - DNA, 1701 bp, Salmonella enterica; identical to SEQ ID NO: 186772

SEQ ID NO: 382581 - DNA, 711 bp, Salmonella enterica; identical to SEQ ID NO: 186773

SEQ ID NO: 382582 - DNA, 591 bp, Salmonella enterica; identical to SEQ ID NO: 186774

SEQ ID NO: 382583 - DNA, 249 bp, Salmonella enterica; identical to SEQ ID NO: 186775

SEQ ID NO: 382584 - DNA, 1239 bp, Salmonella enterica; identical to SEQ ID NO: 186776

SEQ ID NO: 382585 - DNA, 726 bp, Salmonella enterica; identical to SEQ ID NO: 186777

SEQ ID NO: 382586 - DNA, 555 bp, Salmonella enterica; identical to SEQ ID NO: 186778

SEQ ID NO: 382587 - DNA, 2010 bp, Salmonella enterica; identical to SEQ ID NO: 186779

SEQ ID NO: 382588 - DNA, 471 bp, Salmonella enterica; identical to SEQ ID NO: 186780

SEQ ID NO: 382589 - DNA, 537 bp, Salmonella enterica; identical to SEQ ID NO: 186781

SEQ ID NO: 382590 - DNA, 243 bp, Salmonella enterica; identical to SEQ ID NO: 186782

SEQ ID NO: 382591 - DNA, 249 bp, Salmonella enterica; identical to SEQ ID NO: 186783

SEQ ID NO: 382592 - DNA, 666 bp, Salmonella enterica; identical to SEQ ID NO: 186784

SEQ ID NO: 382593 - DNA, 759 bp, Salmonella enterica; identical to SEQ ID NO: 186785

SEQ ID NO: 382594 - DNA, 723 bp, Salmonella enterica; identical to SEQ ID NO: 186786

SEQ ID NO: 382595 - DNA, 636 bp, Salmonella enterica; identical to SEQ ID NO: 186787

SEQ ID NO: 382596 - DNA, 534 bp, Salmonella enterica; identical to SEQ ID NO: 186788

SEQ ID NO: 382597 - DNA, 597 bp, Salmonella enterica
atgagcgcgccaaatatcaacggtctgctgatggcacacccttatggggcggtcctactgatcgtccttttcctggtggtgatggcctttctgaacctgcgctggcgtgagaaagccagcacccgccgtcaccggcgataccgggcaacggcggggcgggtactgaataagcttaacagcctgccgggagacgggcagcgtctgacctatctgcgcaaaatcagcccctatgtctttgaagagctgttgctgtctgcctttgaacgtcagggactgaccgtagtgcgcaatgcctcttacagcggtgacggcggccttgatggccaggtcatcatcgacggcgagcactggcttatccaggccaaacggtacagtcgtgctgtttcccccgcacatgttgaggacttcgaccggcttctccagcagtccggccgccgggggctgtttatccacacgggccgtaccggaaaaatgagccgcaccattcgcacggcgtcaccgcgtctgcgcatcatcagcgggcaacgcctgctggccattctcgccggtcaggacgtccggcagtatctctggaatcttttatgcacatcttcctga

SEQ ID NO: 382598 - DNA, 489 bp, Salmonella enterica; identical to SEQ ID NO: 186790

SEQ ID NO: 382599 - DNA, 2100 bp, Salmonella enterica; identical to SEQ ID NO: 186791

SEQ ID NO: 382600 - DNA, 759 bp, Salmonella enterica
atggctgaggtaaaacgtcccccacagcagcagacactgccggagcgcaaacacggcattctgtataacctgctctggggctggccgtgggccctggtgggcgtggtgctgtcctcgctgctgctgagcctgctgattgaatatatcggcatcgccttcttctggccggaagccggggcggcgcacagtgaagcggtcatgaacaccgagctggggtggctgtccacagagttcacccgcagcctgctgctgtctgagccatcggtgacggttgtgcgctgggtgagcaccgcctatcagtgggcctttgtggacagtggcttcctggactgggtccggcagcaaaatgcacaccagatgcacagtgacaatgccgtcacccgggaaatcaacagctggagcggctggcttgccggctacctgcgtgaatacctgctggccacggtatggatcagcattatcaccctggtacgcgtcaccatcctggtgctgtccgtgccgttgtttgtgctggtcgtggtggtggcgctggttgaggggctggggcggcgtgatctgcggcggtacggcgcggggtatgaaagttcgtttgtctatcatcatgccaagaagctggtcaaaccggccgctgtggtgcccgccatgctgtacctttcctggcccacggcagtctaccccaatctgctgttgttgccggcggctgttctgctggggatcgccgtaacggtgaccactgcgtcgttcaagaagtatctttaa

SEQ ID NO: 382601 - DNA, 516 bp, Salmonella enterica; identical to SEQ ID NO: 112172

SEQ ID NO: 382602 - DNA, 186 bp, Salmonella enterica; identical to SEQ ID NO: 112173

SEQ ID NO: 382603 - DNA, 348 bp, Salmonella enterica; identical to SEQ ID NO: 186794

SEQ ID NO: 382604 - DNA, 243 bp, Salmonella enterica; identical to SEQ ID NO: 186795

SEQ ID NO: 382605 - DNA, 387 bp, Salmonella enterica; identical to SEQ ID NO: 186796

SEQ ID NO: 382606 - DNA, 357 bp, Salmonella enterica; identical to SEQ ID NO: 186797

SEQ ID NO: 382607 - DNA, 660 bp, Salmonella enterica; identical to SEQ ID NO: 186798

SEQ ID NO: 382608 - DNA, 951 bp, Salmonella enterica; identical to SEQ ID NO: 186799

SEQ ID NO: 382609 - DNA, 1503 bp, Salmonella enterica
atgcagattaaatctaatgccctggtgaagtttatcgtgccggccgtggtgattgccgggctggccgtggggcttaaaagctgcaaaaacgaaccggcagagccgtcccaggcaaaacaaagcggcggccccctgcataatctctcgccagatgaactgaaggcgctgggtgtggaaggcgatacgccggaggacaccctgcgcacgctcatcggccggctgaacgatgtgcgtgaccgccagaaaacgctggataaacagaacgcggatttggtgaaagaaaacgagcggttgcgccgacgcaatcaggacgtttcaggacaggtgaatgaggccgttaatggtctgcgcgagcagtacgacaagcggcaggcgcagcttcagaacgaacaactgagcctgacggcgaaaatccaggagctgaccgacaaactcaaaaatcctgagaccgagaaaaaaacggcggacagcgatatcccgccggggctgggcctggacggcatgggcagcagcaccggcggggcggcgtctcagggcagcgacggcatgatgtgggtcgcgccgacggaccagaaagagacggatccgcgggacgcggccagcggcaaggcatcacctcagttcccgacttcttttctgggtgaaaatgagctgacccgacagaaagcggcctatgaggagaaagtgaagggacgtaccaatgaaaaaggggcggaagagagcgcagagccggtttacacgctgccggaaaattccacgctggtcggcagccgcgccatgacggcactgcttggccgtgtgcccatcaacggcaccgtgaccgatccttatccgttcaaagtgcttatcggtaaggataacctgacggcgaacggcatcgagctgccggacgtcgaaggggcgattgtttccgggacggccagcggtgactggacgctgtcctgcgtacgcgggcaggttaacagcgtcacctttgtcttttccgacggtacggtacgcaccctccccagacccgacaccagtaacaacgctggcgggcaaaataataacgctcaggctaaacaggataccggcaccagtggcggtatcggctggatctcggatgaaaacgggatcccgtgcattggcggcgaacgtaagtccaacgcctccacctacctgcccaccatctttggcctgtcggctgccggtgcggcgggtgaagcgatgagccaggggcagtacacgacgcagaacaacgtgaatggcatttccgccaccatgaccggcgacgccggacaggcggcgctggggaaagccatttccggcggtatgtctgaaaccaccgactggatcaaacagcgttacgggatgacgtttgatgccatttatgtgccgcccggtgcccgtcttgccgtgcatatcacccgtcagctggccattgattatgaagataagggccgtaaggtgcgctacgacttcaccctgccgggtggcgtcagtgacaacggcggactggactga

SEQ ID NO: 382610 - DNA, 369 bp, Salmonella enterica; identical to SEQ ID NO: 81035

SEQ ID NO: 382611 - DNA, 411 bp, Salmonella enterica; identical to SEQ ID NO: 186801

SEQ ID NO: 382612 - DNA, 2859 bp, Salmonella enterica
atgctttcactgtttacgcgtaataaatccaccaaccggcagacgccggttgatgacggccagtccgttcaggcagatgaaaccctgaccgcggccgtgaagggccggcaacccctgaagcgccccgggaaaatgacgcgccaggatgaggagaaggtttatcacgccaatccgtccatcattgactttttgccctgggcagaatttctcgatgaagagcagtgtctcctgcttgatgacggcgtgtcggtgggggccgtttatgatgtgacaccggtggcgaccgaagggcgaaccgaagagcgcctggagcagatccgggactcggttgaggatgcacttcaggacagctttgatgaacatgacgtgaatccctgggtcgtgcagttcttctgccaggacgaggacgacactgacgcgtacctggacaggctgcgcgggtatgtcaaaccgcatgcacagcgcacggcgtttaccgacgcctggctgggtgaaatggagcgccatattcgcagtatctcccggcctgagggactttttactgactcgctgattaccggccagccgtggcgcgggcagcagcgccgcacccggatggttgtttatcgctggcttgggaaaagccgggatccgatgccgccggtggcgatgctcaaccaggtgtgcgaccgggtcgttaatgccctgggcggggcggggatccgctgcacccggcagaacggcctgcaggtgcatggctggctgctgcggctgttcaatccgtcaccggactgggtggagaaaaccacgctctatcggcaggctgcttacgcagacccgcgcgagacacctgaaggcaccgtgccggtcagcaatgattttgccgaaactctgtggttcacgccgccggtttcagacccggaaaacggcgtgtggtggattgacaacaagccgcactgcgcggtggcggtggaaaaactgcgtacaccgccggagccgggcaccctgaccggcgagaaaagccggggtgaaaagaaaattaatgccctgatggatatgtttccggaagggaccatggtgtgcatgaccgtggtggtacagccccaggaccggcttgaagagcagtttaaccggctgtcgaaaaatgcggtcggtgagaataccgagtcgggccgcgtccgccaggatgtgaagacggtcaaagagtatctgggcaaccggcacaagctgtaccgggcggggatcaccttcctgctgcgcggcgacgacatgaccagcctgaagcgcaagcggctggagctgtccaccgtattgctaggggccggtctgcagccggtacggccggagtttgaagaaggtccgctgaacagctggctgcgggcgctgccgatgtgctttaacccggacagcgacaaaaaacactggtatacccgtctgacatgggttcagcacctggcaggacttttgccggtaaccgggcgggaaaccggcacggggcaccccggcttcagctttttcaaccgcggcggggataccctgacattcgatccgctcaacaagctcgaccgcacccagaacgcgcatctgctgttgttcggcccgaccggggcgggcaagtcggccacgctgtgtgccgcgctctcccagctgatggccgtccatcgtccgcggctgtttattgcggaggccggcaactcgttcggcctgctggccgacttctttgacagcctcgagctgacggtgaataaaatcagcgtcaaacccggaagcggcgtcagtctgccgccgtttgctgatgctcacaaactggtggaagaaggcctggccgcccaggccgtggatgagagcgaccttcctgatatcgacacggacgacgatggcgaggatgacaagcgtgacgttctcggtgaaatggaaatctccgcgcgcatgatgatcaccggcggcgacccgaaagaagaggctgaccttaagcgtgccgacagggcgatgatacgtgaggcgctgctgatggcggcacatgccacgtataaggaagggcggcagatgctgccgtctgacctgcagaaggcgctgtacgacattgcctctgacaacgatgagggcgtcatcaatgtccgcaatgctcagcgcaaggcgaaagcggcggaaatggcggaatccctgggcatgttcactcaggccgggagctttgaggcggagctgttcaaccgcgaaggggagctgtggccggaagcggacgtgacgctggtcgacctggggcatctggcccgtgagggttacgaggcgcagatggccctgaccatggtctcgatgaccaacatgatcaacaacatcgcggagcgtgaccagttcctgggccgggatattgtcttcacggtggatgaggcgcatatcgtcacggtcaacccgctgctgtcgccctacatgaccaaggtggtcaagatgtggcgtaagctcggtgcctggctgtggctggccacccagaaccttaaagactacccggatattgccgaaaaaatgctgaacatggcggaatggtggatttgtctgaccatgcccccggaggaggtcaaagatatcagccgtttccgcgcgctcacgccggagcaggaatcggtgctgctttccgccagtaaactgtcggggtgttatacggaaggcgtggtgctggcgaaacggatcgaagcgctgtttcgtgccgtgccgcccagtctcttcctggcactgggcatgacggaaaaagaagagaaagccgaacgccgggcgctgatgaatgaatttcactgcagcgaactcgaggcggcaaaacgcgtcgcgcagaatctggaccgtctgcgcggtctgacggagaaacaacaggagcctgccacggtatga

SEQ ID NO: 382613 - DNA, 378 bp, Salmonella enterica; identical to SEQ ID NO: 186803

SEQ ID NO: 382614 - DNA, 276 bp, Salmonella enterica; identical to SEQ ID NO: 143144

SEQ ID NO: 382615 - DNA, 990 bp, Salmonella enterica; identical to SEQ ID NO: 143145

SEQ ID NO: 382616 - DNA, 399 bp, Salmonella enterica
atgaaactgacctctcttgttttcctgccggctctgctgccgacatccgtactggccggcacggtcgtcttcactgacagtcagcatctgccgacaaatctgccgccggacgtgccggtggtccttcttgatggtcctgaccggctgcaggccgacatgttcggggaactgcctgcagacccgcagcaggccgaagcacaggtcaggcaggtgatggcatcatctgcctggcaacaaaaacagctgcagctgaatgattcctatcgccaggtggtccgggcctgggaactgggcattaaaaaagtgccggccgtggtgtttgatgaccgcgatgtggtgtacggcaccacggatgttgatgtggccacttccctgcgtaaccggggaggtggtcagtga

SEQ ID NO: 382617 - DNA, 993 bp, Salmonella enterica; identical to SEQ ID NO: 186807

SEQ ID NO: 382618 - DNA, 1464 bp, Salmonella enterica
gtgaaaaaatcaccttcattttcagccgttcgcgtaagcctgctgctgaccggctccctgctgacagtcctcccggccgcgcacgcggccgatgatgacaataccatcctgggcatgtccctgccgcaggtgaacaacagcgccatcggttacggtaagtccgtcgatggtgccgtgtctgacaaactgttctacaccctcggcggcggctcggttatttcccagccggccacgcgcggcaatatgcaaaagctggggctgaataccggctggagcagtgacctgatgtgcggcaactttgacctgaaaaccaccgtcggcaaccagctcaacggcgtaacatccggctttaaaaacctgatgggcgacgtgattcagggggccaccggcgcggtggccagtctgccggcgatggtcattcagcgggccaaccccggtctgtacgacatgctcaccaacggcgttcttcaggccaatgtgtcattcgacaaggcgcagcttaactgccagaacatggcgaaaaagatgatggacttcagcgacagcagtaactggacgcagcaggccatgatggatgaatacaagtctgttgtgaacagcggagatactgacgcggttcgtgcagatgaggcggggcggaaagtcaccggcacgtcgggcaacaactggattggtggtcagaaacgtgggggggcggggcagcccgccatccgtgtcacccatgaccttgtcgctgccggctacaacatgatgaacggtttacctgtcaccgctaattcgactgtcggcgaaagcaactgtaacggtggcgcatgctctaaattcggcagtgctgaagaggcggcggccatgaccgtgaaggtactgggcgatcgctcgatgcgcacctgtgccaacgcgagcgaatgtaccagcggtgatgcggatgaccagcccggtacgaccgttgccggcaccggctttgccccactgctggaagaggcaactaaagccaacgctgagcagctggtcaggctcgtcaacggtacggaaaagcccacggccgcgaatctggctaagctgaaaaccggcggactgccggtgacggccggcgtgattaaagccctgcagcgtgatccggataacgcggccctgaccgcccgtcttgccggcgagctggccatgtctgacacggtggaaacggcgctgctgatgcgtcgcatgatggttaccggtatgtcggagccgaatgccgctgcccagccaaaggccattgataccgccggtcagcgtatcgaggcgctggatcgggaaatcgcggcgctgaaaaacgagatggagatgaagcgtgaactgtcacgtaattcagtgctgaccattatcgacagggagaatcagcgcgtcgaaaccaacccgcagacccagtcagatgacaataccgacagtcgcttcaaccagatggcagcgccgcagtcggctgaatga

SEQ ID NO: 382619 - DNA, 339 bp, Salmonella enterica
atgcgtaataaaacgactgtcaggaaagtccttacccgtgccggcatcttcctcgcctgcatggcgctgttcatggtggtctcactgatgatggctgacaccgccatgaaacatccgactgaagctgctgcattccggagctggatgcagtcgacgcgttacggctggctgatgtggcgactggcgctgtatgcgctggttgcgtggggcctctggaaaatccggcatgcgccgggcttccgggaggcataccggtggccgctgctgcgcatcagtgtggtcagtgtgctttttatcgcgttgtgtgagtacgcgatgtttaccggtccgggagtctga

SEQ ID NO: 382620 - DNA, 1524 bp, Salmonella enterica; identical to SEQ ID NO: 186810

SEQ ID NO: 382621 - DNA, 402 bp, Salmonella enterica
atgtatcagtctcaagaaaaacgcgcctgggaacgtggtgttcgtctcgctgcaatatggaagggtatcaaaaaaatttttacacgtttagatcagcgctgcgtcatactggctaaacaatacaaactgccgaagtggttaggccacataccgcttcttttagctgtcctttgttcgttagttgcacttatagcaggcggtttcttgataagctgcagcgcagttttattatggacttttattgctgccataacacatataggatctagctctaaagatgcttcaataaatagttttaatgaaaagaaagatgaaaataattttcatgatgaatttgtaatgaatagcgccatcaataatgaatatgatggcgctccttacaaatccccgagtgaagattag

SEQ ID NO: 382622 - DNA, 411 bp, Salmonella enterica
atgccaattcctttagaacagacgatgtgttgggataaaagttcgcagaaaaattcagcaaacacaccggttttgatgatggcggctatcgccagacttacaggtagcaatccatcactggcatgcgttccgttgtttggtgatggggtttcatgtggtttcccttctccagcacaggattatgtcgaaaaacgtctttccctcgatgacctttgcatccgctatccggaaagtacctatctggtgcgagcagagggggattcgatgcttaatgccgggattaaagacggtgatttactaatagtggagtgtattcgtgaggcaaagcacggtgacattgtcattgcagccgtagatggggagtttacctgtaagggggccgcttggaaaacggaaaatatcctacgttaa

SEQ ID NO: 382623 - DNA, 663 bp, Salmonella enterica
gtgcgccgggctggtggtgtaactcagggtgccctgggcgtgcgcgccgtggctgcgcaccgcctgcagggcggccttcatattgcgcgggtcgttcatggcatcgaagacgcggaacacgtccatgccgtttttcaccgcccgctcaacgaagcgttccaccacatcatcggcgtagtggcggtagccgagcaggttctggccgcgcagcaacatctgcagcggggttttgggcatggcttttttgagctcgcgcaggcggacccacgggtcttcgccgaggaaacggatacaggcgtcaaaggtggcgccaccccagcactccagcgagccgtagcccacgtcgtcgagctgagcggcaattggcagcatatcgtcaagacgcaggcgggtggcgaaaagggactggtgggcgtcgcgcaggacgacatcggtaatggcaatggtcatggattcctccgggaattaagggttaaggcggcgatggtggtggatagcggcggcaatcaccggcttgaggcgggcaaagtcgtccgcggcgggaacggcgcgcggtgcgggcgcggcgacgggttccgggaagaagcgagtaatcacggcggacatgccgcggatggcaaagatgagcaggaacagaaagctcagtacgaaccccatccctaa

SEQ ID NO: 382624 - DNA, 1545 bp, Salmonella enterica
atggaccataacatgaagaaaaaccctgtaagtataccacactccatttggcccgccgatgacatcaaacggctggaacgcgatgcggcggatgccttcggactcacactctatgaattgatgctgcgcgctggcgacgcggcatttcgggtagcccgtgacagttatcctgacacccgacactggctggtgttgtgtggtcatggcaacaacggcggcgatggttacgtcgtggcgcgactagcgcaagcggcgggcattagcgtaacgttgctggcgcaggagagcgacaaaccgttgcctgaagaagcggcgcaggcgcgcgatgcctggctgaatgccggcggcattatccatgctgccgatattatctggccggaagcgacggatctgattatcgacgcgctgcttggcaccggcatagcccaggcaccgcgcgacccggtagccggtctgattgaacaggcgaacgctcatcctgcgccggttgtcgccgtcgatatcccgtcaggcctgctggcgcaaacgggcgccacgcctggcgcggtgataagcgccgcgcatacggtcacgtttatcgccctgaaaccaggcctgctgaccggcaaagcgcgtgacgttaccggcatactgcattatgacgcgttgggactggaaggctggctggcaagccagacgccgccgctccggcgttttgacgcgacgcagttggggcaatggctaacgccgcgtcgaccgacctcgcataagggcgatcatggtcgtctggcgattatcggcggcgaccagggaacagcgggcgcaattcggatggctggcgaggcggcgctgcgtacgggggctgggttggtcagagtactgactcgcggtgaaaacatcgcgccgttgctgacggcccgcccggaactgatggtacatgaactcacgcctcagtcgctggaagagagcctgacctgggctgacgttgtggtgatcggcccggggcttgggcagcaggaatggggcaaaaaagccttacagaaagtagaaaacgtccgtaaacctatgctgtgggatgcggatgcgttgaacctactggcaatcaatcctgataaacgtcacaatcgcgtgattacgccgcatccgggagaagctgcccgcctgttaggatgttctgtggcagaaattgaaagtgatcgcttactttcagcacagcgtctggtaaaacggtacggaggcgtggtcgtgttaaaaggcgcaggaacgattattgccgctgaacaccaccctctggctatcattgacgctggtaatgcagggatggcgagcggcgggatgggcgatgtcctgtccggcatcatcggcgcattgctcggacagaagtttaccccgtatgatgcggcatgtgtgggatgtgtggctcacggcgcggcggcggacttactggcagcgcgttatggcgctcgcggcatgttggcgaccgatctttttactacgctgcggcgtattgttaaccctgatgtgattgacgtaaaccatgatgaatcgagtaattccgctacctga

SEQ ID NO: 382625 - DNA, 1770 bp, Salmonella enterica
atggcggtggaaaaactgattgtcgaccatatcgacacctggaccacggcgcggcaaacccgctccacgacggggcgcggcagctcgggtaagatcgatctgtacggcattaagaagctgcgcgagctaattctggagctggcggtgcgcggcaagctggtgccgcaggatccgaacgacgaaccggcgtcagtacttctggagcgtattgcggcggaaaaggccgagctgatgaagcaagggaaaattaaaaagcaaaagccgctgccggagattagcgaggaagagaaaccgtttgagctaccggtggggtgggaatggacccgattaattaatcttggtacatgggctttaggttctggttttccaaatgtggttcaaggaaactctgataaagaaattttgatgtgtaaggttagcgacatgaatctcgagggtaacgagaaattcatcgtttcaacaataaatacaatttcaaaagatctagctgatgaatataaaattaaaacttcagagcccggcaccatcattttccctaaaattggcggagcaattgcgactaataagcgaagaattttagttcaggaaacagcaattgataacaactgtcttggaataaaaccatgtaatgcaatatcaggtgagtggttctatctaatccttagtgctctcgatatgtcaaagtaccaatcaggtacctcgatacccgcgataaaccaaagtgtcataggtagtatacctatcgcgcttccttctcttaaaatgcaagagaagattttatcttatgtcataaccctaatgtccctctgcgaccaactggagctgcattccctgaccagtctggatgcccatcaacagctggttgaaaccctgctaaccacgctaaccgacagccagaacgccgatcaactggccgaaaactggtcgcgtatcagcgagcatttcgacacactgtttaccaccgaagccagcattgacgccttaaaacagaccattctgcaactggcggtgatgggcaaactggtaccgcaggatccgaacgatgaaccggcctctgaactgctcaaacgtattgcgcaggaaaaagcacagctggtgaaagacgggaaaatgaaaaagcaaaaaccgttgccaccgattagtgatgaggaaaaaccatttgaactgccagatgggtgggaatgggttaaattgggaaatatactccatgatataaaatatggaacttctcaaaaatgtgattataatatttcaggctatcctgttctaagaattcctaacattgtaaaaggtattatcgatcttgccgacataaagtatggtgcattaaccgattctgaattaaaagatcttacactaaataaaaatgatctcttatttataagatctaatggcagcactaatattgtcggtcaaagtacattagttcaacacgatctaaaagatcatgcttatgctggctatataattagagtacggctacataacgaatatattaatgccagatatataaacatggtaatgaaatcaaatttaatacgtgagcaaattgaaggtcctattagaacaactacaggtgtcaaaaacattaattcaaatgaacttatgggacttcttgtacctcttccaccaaaaaatgaacaagggataatcattaaaaaaattaatgaaatagatacaactttatctaatttgaaagttagcatccaatccgcccaacaaacccaggtccacctggccgacgccctcaccgacgcagccattaattaa

SEQ ID NO: 382626 - DNA, 213 bp, Salmonella enterica
atgggtgatgtatctaaatattcattagttggtatttttgttttatggattacatctttgattattggaataatgaatgtttggtggcatattttaattgcagttattttaatgatgttatttactaacattaagaaaaaatggttaattattgtgatctatatatatgtgtttcttatcggattaactagttgtattataactggtgtatag

SEQ ID NO: 382627 - DNA, 510 bp, Salmonella enterica
atgaattcattcacactagtaataatgcaaattaagggagcatccataaatgaatcagagaaattgtatgaaagaactataaaaacatttgaatatgccatcttaaaattcaaatcaaaatttaactattgtatgaataattttatgtcattcttacattcgatattgaataaaaatatatatctactcaatttagtatttatacctgatgtggttaatgctcatggtatgggtgttacagaaaccgtatttataaactggtgggtaattttaagtttaaattttatcatcttcgttacattgtttttctataatagaattattgtgtcgttattttatttattttctttcttaacgatgttgttcttgttcttgttctttcatttatatatgaaaacttatattgatgtatatttttatataaatggatatgtagctttgattattgtacctttgcttattacatatatttttacgcgagtgaataaaaatcgaaaaaaaataaaatag

SEQ ID NO: 382628 - DNA, 156 bp, Salmonella enterica
atgcctgcaattaaaaagttagctgatgccagagacgttattttgcatgaactgattttgcatgagctgatcggcgtaaaccatgtttgtactaaaacagaaaaagcgcatctacaccctatgctggaagaaatgtttgtagtggcaggtaaatga

SEQ ID NO: 382629 - DNA, 132 bp, Salmonella enterica
gtgaaaaaagtggccctgatatatggggtaatcctttatatcatcaatatctttgtgttcctgacggggaaaatggatatgtttgtggtggtcaggatcaacgaggagaatggccaactgatggaatgttag

SEQ ID NO: 382630 - DNA, 1032 bp, Salmonella enterica; identical to SEQ ID NO: 118187

SEQ ID NO: 382631 - DNA, 1620 bp, Salmonella enterica; identical to SEQ ID NO: 186672

SEQ ID NO: 382632 - DNA, 1509 bp, Salmonella enterica
gtgacccggaaaacaacagccgaacaaaacgccatcatcgaatggaagggtaatcatcttgtggtaaatgcgtttgcaggcacaggaaaaacctctacgttagtgaactacgctgaagccaacccggaaagtaagatgctttacctcgcctataatcgcgctgtgcgggatgaggctgaacgcaaattcccctataacgtagaatgtaaaacgtcgcatcagcttgcatgggcccgtttcggcaggcatttccgtgaccggctgacagccagtctgcgcattacggatgtggccagaaagctcaatccccgccactggccgctggcgcggctggcgctcagcgggctgaacatgttcctctgcagtgctgaccccgagccggggctgatacatctgccgtctgaggatgatcgccacggtctcgatgcaggtaaaattctgggggcaatccaaatcctctggtatgaaatgagccgtactgattcagtctttcccgtcacgcacgacacctaccttaaactgttccagctctctcatcctgacctgtcaaaacgctgggacaccatcctcttcgacgaggcacaggacgccaatccggtgaccagtgcatttgtactgaatcagccctgccgggtcattctggtcggcgaccgttaccagcagatataccggtttcgcggggcagataatgcactgagtgccccgcagctggcgcaggcagaccggttatggctgacagcgagttttcggtttggccctgaggtcgcgcgtgtggccaacatcctgcttgaacgtgccggagaggaaaagcgcgtgacaggtaacgggggccaggatgctgtcgtcagcagccttccggcaggggctgagcatattgctgtactgagccggacggtatccggcgtgatcggcagtgccctgacggcaagccttatggagaaaaatgtcttctgggtcggggggattgaaggctacaaaacagaggagctggaagacctgtactggttctccgccgatatgcctgaaaagatgcagtccccgcgcctcagccgggactatcgggattttgatgaatactgctcaatagcaaaagccacacaggacgtggagatgaaccaggccattcgtctgctcgatgactttttcccactaccgcaaaagctggccatcatgcgccgtcaggtggtaacccatgagaaagacgctcaggtcacggtttcaaccgcacaccgcagcaaagggctggaatggccggtggtaatgctgagtgaggattttactgacattaccgacccgcttctttcggaggatgagcggcaggatgagactaacctgctgtacgtggctgtcacccgggccagaagaacgcttgtgcttaacgaactgatgcgctggctgagcgatgaaggcgggaaaaaccgcgagacgacgcacgaaaccgtaccgtccggaaatggagagagcgccgacaggcacgaagaaacgggaaaaacttctgagagtgagtaa

SEQ ID NO: 382633 - DNA, 684 bp, Salmonella enterica; identical to SEQ ID NO: 186674

SEQ ID NO: 382634 - DNA, 933 bp, Salmonella enterica; identical to SEQ ID NO: 186675

SEQ ID NO: 382635 - DNA, 987 bp, Salmonella enterica
atgaaaaaaacgacttcacacaaggcggcccgccgtccggcaaaacagactgacctttatcgccagatcaccgaccgcattgttgtcgcgctggaaaacggcgtcgcgcccaggcgtaagccgtggcgcgcggctgccggcagcggtctggccggtctgcccctgaaagccacaaccggacgtcactacagcggcgtgaatgtcctgcttctctggatgtcagcggaagagcagggtttccgcaataaccgctggatgacttaccggcaggcgcagcaggctggcgggcaggtgtgtaagggagagaaagccaccctggcggtggtttataaggactggacgaagcaggcggaggatcgcgaaggcaaccgcctttatgacagtgacggtaaaccgctgatggaaaccgtgccgatgctcaaacccctgcagctgttcaacgctgagcagtgtgaggggttgccggcagaggttgcggcttctcctgaacaacccccgacggtggatgaggacggcatactctgtccggatgtgatgaacagggtgatccggatgtttaacgccacaggggttaaacaccggatgctgcctcagaaccgggcttattaccgcccgctgacggatgaaattgtgatgccggtggctgagcagttttttacggaggcggactgctggtccacgctgttgcatgagctggtacacagtaccggtcatgcgaagcgacttaaccgggaggggataacctcctcatcccgcaagttcggggatccggtgtatgcctttgaggagctcatcgccgaaatgggcagtgcgtttttgtgtgcccagctcggggtgttcggtgaggttcagcacgacagctatgtggaccactggctgaaggtgctgaaatctgacaaaaaggccctgttccgcgcctgccggcatgcccgggaagcgtcggaatatctgctggcactgcctgaaagtcaggctgtggcggcgtaa

SEQ ID NO: 382636 - DNA, 348 bp, Salmonella enterica; identical to SEQ ID NO: 186677

SEQ ID NO: 382637 - DNA, 603 bp, Salmonella enterica; identical to SEQ ID NO: 186678

SEQ ID NO: 382638 - DNA, 648 bp, Salmonella enterica
atgaaagacctgtcttcttccccggcttccatgtcggttgtctacaccatcgagcacgtcagcacggttccgttgcgtcactggcatgctttcgttctggccgtaacagaaaccttctggcaattgccggtgcgtctgcgtccgggaaatatgtatctgccgtcgcttaaccgcgcggctgacctgtttccggttgctgatgtcatggcgttctgtggcgattcaggcggctgtttctggccggtcaacatgaccattgagcgggagcgcagccacaatacgctgagtatccaggagctggattttcagcatcagccctgcgatttctttgcgcgtgttgtgatggtcctgctgcataacctgtgtccggacagcttccggatacattcttcagacgagggtcgcagctgggtgttaccgttacgctggattggacaacatctcggcctgcctgatcaaccgacgctgagcgcgcctcagccggtactgaaaacaccggtaggcgagggcgcgtttgattccctgctgctgcagctgctctccggtggtgagcgggtgctgagcaatgaggactggaacgcattcgtgctggcggaattccatctgtacgaactgaagcgggtcgcggaaacatctgactcgttttaa

SEQ ID NO: 382639 - DNA, 366 bp, Salmonella enterica
atgcacacagacgtttatacgcttaaaactccactggacacgctcagctggctttgcctgcttgagagtgaactcctgagcatcagggcatttcagcgtctcgatctacacacggaccgggatgaaccgaatgaactgacgtttctggaagattccatcattgggaccggcacagcttatggctggtttgtctttttacttggggaaggcgatattccgcctttgcctgatacgtctaaaaatctgctcttcacgctggacgagctgggaaaagaaattaaccggcccttctgggagaaggccgtggatgaaggtatccaggatgcccggtgtgatcgggctatagcggctctcgaacggatgtaa

SEQ ID NO: 382640 - DNA, 648 bp, Salmonella enterica
atgtctgtcatctcttctgcggttttccctgaacatctccttactcagcttcagcagtctgctgacgcagttgtccggagattgaaatctttcatttatctgcatcgcaacagcagctggtatgtcaacggctcgggcaattatgccgtccgtgcgcatatctcttctgtcaaagatcagggcgttaacgtctttcttaccgttcgtacaggttgccaccgcgctgagtatgtatttcaccgcctgccggtttcctttccggagggcattctcatgactgaagcactgcacgatgtcactttccgtattctgtcgatgtttgagacgcgacgggatgtatgtcccgctcagtatggcctcgtaagtggcgttttcatccggggcgaaatcctcagagataacgtctcctgtggcgaacaggtttttgtcgcaccgctcggtgattgtgatccggctgaccccgaactctgtgtctggtgtcagtattacggatattcttcccgggttaaggccggcgacatactggatggggtggccgtttctggcataaatctcaccgatccactgtcgttagctgtgctgcaacgcctccgctttaatcctgaatatgtgtatcaggagcaatctgattcatatgcactgaactga

SEQ ID NO: 382641 - DNA, 618 bp, Salmonella enterica
ttgtttatatttggatatcttcgtgcttcaacacaagaacaggatgcgttgcgtgcaaaagcgaggctcaaggactttgctcaacaacacaatcatcgcatagctggttggtatgttgaaaatgcttcaggtgcagcattgcatcgaccggaactgatgagactgcttcaggatgcagagccaggagatgcgatagttatagaacaagtagatcggctttcacgtttggatgataacggctgggagtctttaaaaaagatgattcatgagaaatcgctttcaataataagccttgatctgcctacaagtcatattgcgctatccagctcctcagctgatgactttacccgtagtatgctccgggcagtgaataatatgatgctggatatgttagccgcaattgctcgtaaagattatgaagatcgccgcagaaggcagatggaggggattacaagcgccagggagaagggaaaatacaggggaaggctggcagacaaggaaaaacatgaattaataagaactctccgcaagaaaaacggaaagtcaataaacgaaacggcaaggctcgctggcgtatcacgcatgaccgttattagagcatgtaagaataaagattga

SEQ ID NO: 382642 - DNA, 900 bp, Salmonella enterica; identical to SEQ ID NO: 186683

SEQ ID NO: 382643 - DNA, 672 bp, Salmonella enterica; identical to SEQ ID NO: 186684

SEQ ID NO: 382644 - DNA, 549 bp, Salmonella enterica; identical to SEQ ID NO: 112183

SEQ ID NO: 382645 - DNA, 276 bp, Salmonella enterica; identical to SEQ ID NO: 143183

SEQ ID NO: 382646 - DNA, 2064 bp, Salmonella enterica
atgaaaactcaacgctttgtacgtacccctcttgcagttctgattatggcattccagacgaatgccgttaatgctcaggagagtcacgatcacgcaacgatggaggatgattccgttatggttgttacggctcctgcctcatcgccgctggaagttgtcacgtccccaaaaagacctcgtcagcctgtcccggcaagtgatggttccgattacctgaaaaccatccccggtttttcacagatacgggccggtggcacgaatggcgacccggttttacgcggtatgttcggatcgcgtctgcgtatcctgaccaataatggcgaaatgctgggtgcctgcccggcccgaatggatgcccccagctcttatatctccccggaaagttttgaccttctgacgttgaccaaaggaccgcaaacggtcctttgggggccgggtaactctgcagggacaattcgtttcgatcgcgagcagccgcgttttgataaacccggcgtacagggaaatgccagcctgcttgctgcctcgaacaatcgctgggatgagaatgcggatatcagcctgggtagcgaagatggatatttgcgcctcatgggtaacaaatcacgttccgatgactataaggatggtaatggcgatcgcgtcccctcaaaatgggataaatggaacggcgatatggcgctcggctggacgcctgataaagataccctgattgaactgacggcagggaaaggggacggggaatcgcgttatgcgggtcgcagtatggacggctcccagttcaggcgagaaagcctgggtgccaggttcgaaaaatcaaatatcggggaggtattccagaaatttgaagcgaatgtctattacaactacgccgaccacattatggataactattcacttcgttcacccgacggtggtatgtcaggaggtatgtcggaaggaatgacagacagcggcatgggtgactcaatggatgcaggcatgtcaatggatatgaatatgccaatggcgatggaagtcgacagacgtactgttggcggtcgtatgatgggcacatgggagtgggcggatgtggagctgagaagcggcgccgatacccagctgaatacccatcgtaataaaatggataacagctgggtcaaagatgcccgtttccatgattatggtctcttcagtgaactcacctggaatacctctgattcaagcaagttagtggggggcgctcgccttgatcgtgtcctcgtggataatttttccgggaaaggctcctcagagcgaacggacacccttcctgccgggtttgtacgtttcgagcataccctcgcagaaatgccgctaatgctgtatgccgggcttgggtatacagaacgtttcccggactactgggaactgttttcccccacctacgggcctgacggcacctcagacgcgtttgataaagtgaaaactgaaaaaacgacccagcttgatattggcgcacagtattccggcaaacgtacaaacgcctgggtttctgcttatgtcggtcacgtaaatgattttatccttttccgctacgatcccaacgatgcatatatcagccaggtcgataacatcaacgccaccatcatgggaggcgaagccggtgtcagctataagctgaccgacagctggaaaaccgacgccagtctggcctattcctggggcaggaacatggaagatggtaaaccccttccgcaaatgcctcctctcgaagcccgtctgggattatcctgggaaagtggtaactggagcagtaccgggctggtacgtctggtcagtagccagcatcgggtggcgattaatgaaggtaatgtggtgggcaaagattttgacagcagcgccggttttgccgtggtttccgccaatgccgcttaccgcgtgaacaagtactttaaagtgagcgccggtgtcgataatcttctggacaaagattacagcgagcatctcaacctggcgggtaacagtagctttggctactccgccaatacctccgttaacgaaccaggaagaacattctggggcaaaattaatgtgacattctga

SEQ ID NO: 382647 - DNA, 261 bp, Salmonella enterica; identical to SEQ ID NO: 143159

SEQ ID NO: 382648 - DNA, 297 bp, Salmonella enterica
atggatgccgtaagtattggcggtgccatacgcggaaatcgtgccgtcattggtgacgaggttgtcgacgcccactttaagttccatggcggtggacttgatgccgacgaggctgctgtttcccgcagtgatcaccccgccagcgcggttgaccacttcaaaatgagagccgtaatagagcgcaacggtaataaaatcagactgcataaggccgctattatcaacagaaacagaaccactcaccgccatatcattcagggtgtggacataaatcgccgcatcctcgatcttgcctga

SEQ ID NO: 382649 - DNA, 402 bp, Salmonella enterica
atgctgccgccattggtgacgttgttggcgccgctgttaatcaggatgccgttgtctttggcgacgatagcgcttccgctttcggtcgttatctggttattgccgccagcgatactgatgccggtgctggtggtggtgatcttacttccacttttggccgtgatctggttgccgctgcctttactgacgcggataccatttttgcctgaaatttcaccgcctgaggtggtgacgatattgttattgccgctgataaggaggccgtcgcttacgccggtcatcttcccctggttggtgatggtattgccgttgccattaatcgccaccgccgtgttggccgagattgcgctcccggcctggttattgagcgtatggcctttggaacgtgccgagtcgagatag

SEQ ID NO: 382650 - DNA, 387 bp, Salmonella enterica
atgtcgccgttaaatgcgcccagcgtgccgctgttgccaatctgtagcgtcgtgccgctatcgacggtcgcgcctttggcggtcatcgcgccgttcagtatcagcgtgccggattttacccaaagcgcgctgttggttgttcccgagaagttcatcgtcgcgcccgacagcgtccagtcgccgctgctggtcacgctgttcaggccgctgatgctgctgcccagcgtaccctctccgtccagaatcagattattgttggcgctggcgctgttgttgtcgtcggtaatgctgccggatatctccgtaccggtattgagggtgagggtgttgttcttgctgccgctgttgatgagaatggcgttggttccgccggttattttcccctga

SEQ ID NO: 382651 - DNA, 321 bp, Salmonella enterica
gtgggtggtgagatccgcgacgataaagggatcgctggcgcttgccgcgtccagtttgagataagcgcggttgtcgatattgccgctgcccagcgcgccgccagcggtggcagtcagcgttccctctgcaatggtggtgccgccgctgtagctgttgttgttactgagcgtcagctcgccgccgccctgttttatcacgttgccgctgccgctgatgacgctgccgtaggcggcggcatcgctgcggttaaacgtcagcgtgccgttgtcaacgatgtcgccgttaaatgcgcccagcgtgccgctgttgccaatctgtag

SEQ ID NO: 382652 - DNA, 237 bp, Salmonella enterica
atgaacgcgtccgggttcatggcgctgccgttgatagtgatgccgtcaaaatcgccgctaatggcgttgtccgattcgataagcgccagggagatcagatcgtcggtgctgcgtatcggctcctggctggcgggcgaggcgacattcagcgtgccgtccagattaacgttttttgcgcggatggcggggccgctggtcgccgtcaaatcggccgtcagcgtactgccgtcctgctga

SEQ ID NO: 382653 - DNA, 480 bp, Salmonella enterica
atgacaacaagtgatattattgcatccatagctcttctggtgacaatcattggacaaattcgctctgaatataagtcaaaaaagaatgattcagaacagaggttaatgaaagatgaacaagatagacttcgtaaattattgctagaaaaagaaactaaatcagcaatcagtgagatgaaagctgaattaggtgcgcgtatagtaaaaatatccagaaacaattacaaacttaaaattttcaatcgtggaaaagttgaagctagaaaagtggaaataatttttccagacaatgatggcgctgaatatcttgttatgagagatgtttatgataaatttccatatcaggtattacacccacagcatggcattgaaataattaccagcatcaacttcgaaagcaagtcaaaatatagaataatattaaaatgggaagatgattttagcagaagtaacgatgaggaatttatagtctctatataa

SEQ ID NO: 382654 - DNA, 276 bp, Salmonella enterica
atgaatattaatcctgacaaatatgaaagaaacataacactactttgtccggtttgtggaaattcagaatttgagcattctgaaggcattgatatggtaaaatgcattggatgcggaagagtaacggataaagatgagcttattcaggaaaatggtgttgccgtagaatcacagcttgatgaaatcaaaaacgaaataaataaagacttgcataaggaattaaataagatgctaaaagatgcatttaagggaagtaaaaacataaggctgaaataa

SEQ ID NO: 382655 - DNA, 267 bp, Salmonella enterica
atgcccgtttattgcgtttcatatgatctgaataaagcaggtcaaaattacaatgctttatatgaagaactaaaaaagtcccctggatactgccatcctttagactcaacatggctagtatcgacaactgaatcagcgcaacagctttcagacaggttgcgcaaaaatatagacaataacgatagtttactcgttattggagttactaatcagtatgctgggtggctccccaaaaccacatgggaatggatacataaacacgtttaa

SEQ ID NO: 382656 - DNA, 123 bp, Salmonella enterica
atgcagactgatgagtcacaagtatacatttttcgcccttatatcacagtaaagggcaagcgaatcacccgtccgaatggcggaatgtttaagattccgattaatcgtgaacagaaaaaataa

SEQ ID NO: 382657 - DNA, 867 bp, Salmonella enterica
atgaaaaacgttagaaatcagaattttatagatgataggctttggtatattgaatggcttctgaggatgaaaggctggttttcccgtacagatttaatggataaatttggtattaaagaggcagcggcaagccgagatatacgtatgtataaggatatgcgggctgataatttctattttaatcaaagtgttaaaagatatgaggttgatctgaataaatttcagcctgtctttgatgtgcctagcgatacactgttttcaaagctaacagatcctgatgagtcacgctcgctgggagcaagtgagagtttgattgaaactattccaatcttggcagaatcaaatgtagaaattgcggatttgactcgagcgattttaaataaaaaaattatcaatataaaatattattcaatgacatctgggcaatctgataagagagttgcacctcatgctatgtttaacaatgacctaaagacatattttagatgttacgatttcggacattctaaatttttagatttagttgttgggcgtataattgatctttctgatactaatgatttaacccctgacatcgcgcaaggtcattctgacatagactggaatacatatttgtctttagaattggttgttcaccctagggtgaaacacaaacaagctatagaaaaagatatgcaaatggttgatggagttaagcaggttagcgtaagacgagcattggcacattattggctcagacgttggtgtgttgattgttcagaaaaagcgactatgagtgatagtgcatatcaattacatttaaaaaatcatgaagttatcaaagatgttcatggctatttccccggggttaataatcatgtcgattaa

SEQ ID NO: 382658 - DNA, 3093 bp, Salmonella enterica
gtggtgaaatccggcgacgagacgctcacactctccggcgccaattcttacaccggcggcacccttatcagcagcggcacgctggtcgccaacgatgtaaacgcgctgggcaccggtgacgtcaccgatgacgccgtgctggaactgaacaccggcggtgactttgacaacgccatcagcggcagcggccaggtggtgaaatccggcgacgagacgctcacactctccggcgccaattcttacaccggcggcacccttatcagcagcggcacgctggtcgccaacgatgtaaacgcgctgggcaccggtgacgtcaccgataacgccgtgctggaactgaacaccggcggtgattttgacaacgccatcagcggcagcggcaaggtggaaaaatccggcgacggcacgctcacgctctccggcagcaatacttataccggcggcaccaccatcagcggcggcacgctggtcgccactagcgttgaggcgctgggaagtggcgacgtcaccgacaacgccgtgctggaactgaacacaggcggcacgttcgacaatgtcatcagcggcagcggccaggtggtgaaatccggcgacgacgcgctcacgctctccggagccaatacttacaccggcggtaccaccatcaacggcggtacgctggtcgccagcaacgttgaggcgctgggcagcggcgatatcgacaattacgccagcctgcaactgaacgccagcggccagttcgttacggcaaatctcaccactcacgataacgccaccaccgcaattggcgcaggcagcgcattgcgggcaaatacgctaacgcaggaggcgaacagcaccctggccgtacacctgaccgacagcaacagcggtgccatcgtcaccgccgaccgcgccaacctgggcggtacgctggatattaccggcatcggcaacgtggcgaaatcctggacccgcgacgcgtacgcctacacgctgattgacacggacagcgccatcaatagcgattttgcgcaattcaccgtagccggtatggacgccaaacaggtggattttctcaccgtcgatgggcgcgtgaacgccgacgacgacacccgctatgacgtaaccgcctcgctgtcctggtatgccgacagcgacaacgccgccaccgacgcccacggtaccttcaccctgagcgagcaaggtcacagcttcacgctgaacaccgcgctgacggacgttgacgccacgctcaatcccgacagcgccacctactgggacggcaaatcgctcatcaaacggggcgctggcgcgctgatcctgggggcgcaaaatacctacagcggcgacaccgacgtgcaggagggcgcgctatggctggccgaaacggcgactatcggctctgcggggagcgcgcaggcgattaatatcgccgcgaacgccgcctttggcggccacaacgccacggtgaacggccatgttaacaacctgggcagcctgtactttgccgatacgttcaccgtcaacggcgatgtcgtcaacagcagcgcgatgataagcggcagcgaccagcccaacaatacgctgacgatcgcgggaaactataccggcaacgacggtcatctctatctcaatacccaactgggcgatgacagctcgcccaccgataaactgatcgtcaccggcgacaccgccggcagcaccacgctgcatatcaccaacgtcaatggcctgggcgcaaaaacggttaacggtattgaagttattgaggtgggcggtcagtccgacggtgattttacgctctacaaagggcatgttgatattaacgcctggacctacacgctgaaacaagacggcggcgactggtacttgcgctccgagtctgatgacgtgccggacgatggcggtgacgtcactccgccggacgatggcggtgacgtcactccgccggacgatggcggcgatgtcaccccaccggacgatggcggcgatatcactccgcctgacggtggcggcgatatcactccgccggacgatggcggcgatgtcactccgccggacgacgacggcgaggtcactccgccggacgatggcggcgatgtcaccccgccggacgatgacggcgatatcactccacctgacggcggcgacggcacgcccgtggcgccgcagtaccgcgccgacattggcgtttatctcggcaaccagtggatggcgcgcaacctgcaaatgcagaccctctacgaccgggaaggcagccagtaccgttccgccgacggcagcgtctggatgcgttttaaggccggtaaagccgaatcgcaggcggttaacggcaacgtagatatcgacagcgactactcgcagttccagctcggcggcgacatcctgacctggagcgacggcgcgcagagcgtcaccgtcggcctgatgggcagctacatcaacgccagcaccgacagcactggcaaccggggggcggacggcagccagttctccgccaacggtagcgtggacggctacaacctcggcctctacgccacctggtttgccgatgcgcaaagccatcgcggggcttacatcgacagttggtatcagtacggcgcctacaacaacagcgtggataacgacggactcagcgccagccgttacgactccgccgcgcacgccgtctcgctggaaacgggttatcgctatgatattgcgttaagcaaccgtaacacggtcagcctgacaccgcaggcgcaggtcacctggcagcgctacagcgccgacacggttattgacgatggcggtacccgcatcagcggccagaacgatgatagctggacgacgcgcttaggcgtgcgtgtggacggtaaactgtacaaagagagcggcaggatccagccgtttatggaggtcaactggctgcacgccagcgacaatgcctcggccacctttggcgacacgaaggtatcgcaggatttgccgaacgaccgcgtggaagtgaaagtggggattcaggcaaacgtcagcgaacggctaagcgtctacgcccaggccgccggtcagaagggaaagaacgactacggcgacgccagctttagcctgaacatgcgctataactggtag

SEQ ID NO: 382659 - DNA, 1791 bp, Salmonella enterica
atgcttaatggaaaaacattaatgctgttgttgggtggggttgttctctcgggctgtgggccggagccctccgacccgcagggaaataatccggctgagttaaaacaggagcaggctatccagaaagaaaatagcgctcaggccggggatgacactgtccagaaaagacaagccgaggccgcccaacaggctgcgaaaaaagcagccgaatataaagcgaaagctgaagccaaagccctggcagatgccaaagcgggatctctggcaacagccgaagcaccgcaacatgaaatgcggacacgtgcctcggcatcaaaagcgttcgctgcacaaggcggtaatgtaatggggaccgcgcgttacgaacactacgatgaaaatccgattaaacaggtaagtcaggcgccgctcgccacgtttagtctggatgtagacactggcagctacgctaacgtgcggcgatttctgaatcaggggcaactgccgccgccggaagccgtgcgggtagaagagatgctcaactactttcccgcccctcagcccgttgcggataagcaggataacactaaacccattgcggcctgtataccgatgccatttgcggttaaatacgaactggctccctcgccgtggaacgcgcagcgtacgctattaaaagttgatgttcaggcccgggacatgcagaccagagacctgccacctgccaacctggtttttctcattgatacttccggctctatgcagccagcggaacgcctgccgttgatccggtcggcgctaaaactgttggtgaacgatctgcgtgcgcaggataacatcacgattgtgacctacgcgggcggcactcacgtcgcgctggcgtctacagcgggaaataacacaaccgcgattaaagcggcaattgataatctggatgcttacgggagtaccggtggtgaagcgggattacgactagcctacgagcaggccgaaaaagggtttatcaaaggcggcgttaaccgcattttgttgaccaccgacggtgattttaacctcggtattaccgatcccaaagacatcgaagcgctggtaaaaaaagagcgcgagaaaggtattactttatctacgctgggcgtcggcgatgacaatttcaacgaagccatgatggtgagaattgctgatgtgggtaacggtaattacagctacatcgactccctctccgaggcgcaaaaagtcctcaaggatgagatgcatcaaacgctggtcaccgttgccaaagatgtaaaatcgcaaatcgaatttaatccgcagtgggtgactgagtaccggcagattggttatgaaaaacgccaactgcgcgacgaggatttcaataacgataaggttgatgccggtgatatcggcgcgggtaaacacgtcacgctattctttgaactgacgcttaacgggcagaaagcctcggtggataaactgcgctacgctcagaacaaagccgcctcaaagacaacaaaatcaagcgagctggcgtggatcaaattgcgctggaaagcgccgcagggcagcgaaagtacattagccgagttcccggtcgttatgggaaagatgccgatctttgctgacgcctctgaagattttcgtttccgcgcggcggtagcggctttcgggcaaaaactgcgtggctcagaaacgctggcagatacaacctggccgcaaattattaaatggggtgaacaggcgcgcggggaagataaacaaggctatcacgcggagtttattaaactggtaaaactggcggaaagcttgtctcactaa

SEQ ID NO: 382660 - DNA, 978 bp, Salmonella enterica
atggttgatattcctaaaatgagcgaaacaatagataaagctttggatgcggtaaaatcagttacaactgaaccggtagtgaaagctgttaatcaacggttatcaaatccattttttctatgctttatatcctcttgggttctctgtaactgggaccgcgttctattactcttattctcgttcagtctggacattgaacaacgtattgaaaaaataaaagcgttaccctcaaatagtgtcttttttggaattagtatccctcatacccatacattttggtatccatttgttgcctcaattatatttgtagttggtactccttttatttcatacgttgtcgatgtaatacaaaatggagtgcttacgaaaaagagtacaaatgatagtaagagaaaacagagtgctcttgatttaaaaatagaagaaataaataaaaatgtcgagtatgaatatgcagacgcaaaagcgaggttaaatgctgaaaaggcaaataaagctattgagtatgatacaagtgatcttgaagaaaaatataatagtgctcaggtaaagcttagggatgttaatgtattaataaaggaaaaagaaatcgaggctcaggcggttgctagctcttatcataatgctatgaactcaatgtcgaaaattaggaaggaattagactccaaagaaaaggaactaatggatttgaatgctaaaattatagcaaatcaaaataagttagattcgattaatcaggggatatccaaaaatacactgcctttcgcaaggccgactttaggttctaatgggtttcagggacttggtttaagttctgcgaactcaaccttgtcaggtaaaaatttagctaaattgaattgggggcaaggaataaactggcccaatttaaattcagctagtcttcaaactgttagcgatatagcttcaggacttaattctgtaagccataacagtaatgatgaaaagaacaataaataa

SEQ ID NO: 382661 - DNA, 909 bp, Salmonella enterica
atgattgaaaaaatatgtgaagtaattgatggtgaatacgtctgtgatatagatattagcgttgaagaatggaagattttattaagggataaaaaagtttttgatgacaaaagtattgcagcgttaaaaaaatggttcattgagccagaccattcctgtacatgtttcgatatcggcaagaagtacgacctgcacagtatgagtgctaatggtgtaatcaatgggttgggtggaagagttcagaagcagcttggccgattcgaggttaaaggagtcggaaagattgcttccgggacaaaattcattacagtcatgaaaagtagagaaattaaaggaaacccaaagcgaaatttatggactatccgtgaagaacttgttcaggcaataaaagaactagatttttttagtacgaacgaaagctcaagcattgatttttactcagataatgatttgatcactgctctagaagaaagtaatcactttgacgttactcagacatttgagtatagcgaaaaagcgaaacctaagaaagctgcaatagaagtcaaaaatggactctcatacccaagaagtaaatctgtttcaaaaaatgcgcttaacaaagctgattataaatgtgaaattaattgcgaccatccaacgttcagaaggcgaaactctcctctaaattacacagaacctcatcacattgtcccgatgtcaaagcaagactattttgagaattcactggatgtggaagagaatatcatatcactatgttgcaactgccataaacaaattcatcttggcaaggggtttgaagatatgttgagaaaaatatatgccgagcggaaagatgtattaaaaaaagcgggaatcgagatattattagaggatttgattcttttttacaagatggaaggtaattaa

SEQ ID NO: 382662 - DNA, 351 bp, Salmonella enterica
atgaaaatcaaaaacaccctttttgtaatattaatgttatccctgccagccatttctgctgaacattcggaaatgaaaatgtcagatatgcactcatcggcatcatcacaggaatatatggctggcatgaaaaatatgcatgaaaaaatgatggccgccgttaatgaatccaatcccgataaggcctttgcaaaaggtatgatcgcacaccatgaaggggcaatcgcaatggctgagaccgagctcaaatacggaaaagatcccgaaatgagaaagcttgcgcaggacatcattaaagctcaaaaaggtgaaattgagcagatgaataaatggcttgatagtcataaataa

SEQ ID NO: 382663 - DNA, 432 bp, Salmonella enterica; identical to SEQ ID NO: 227668

SEQ ID NO: 382664 - DNA, 1476 bp, Salmonella enterica
atgcatagcaaaccttccagacgccctttctcactcgctctgcggctgaccttttttatcagcctgtccacgatactggcttttatcgccttcacctggtttatgctgcattctgttgaaaatcattttgccgagcaggatgtcagcgatcttcaacaaatcagcaccacactgaaccgtatactgcagtccccggtggatccggatgataaaaaaataagcaaaataaaggaatcaattgccagctaccgcaacgttgcccttttgctcctcaatcccaggggtgaagtgctctttagctcagctcagggggcggcactacgcccggcagtgaattcagcagattttagcgagcacagccgcgcacgggatgtctttctctggacggtggaggatcctgcgggaccgatggataccgggtccggaatgaagatggaaacatacaggattatcgcctcctctggtcaggcgatatttcagggcaaacagcagaactatgtcatgctgactggcctatccattaatttccatctccattacctcgatgcgctgaaaaagaacctgattgcgattgccgtcgtgataagcctgttgattgttctgatcattcgaatcgctgtccgtcaggggcacctgccccttcgtaatgtcagcaatgccattaaaaacatcacctccgagaatcttgatgcgcgactggaaccgacacgcgttcccattgagctggagcaactggttatctcgttcaatcatatgattggaaagattgaggatgtctttacccgccaggccaatttctctgccgatatcgcgcatgagatcagaacgcccatcaccaatctggtgacgcagactgaaatcgcactgagtcaggatcgaacacagagggaacttgaggatgtcctctattccagtcttgaagagtataaccggatgaccaaaatggtcagcgatatgctgttcctggcacaggcagataataatcagctgatacctgacagggtcatgtttgacctcagagcggaagtcatgaaagtcttcgagtttttcgaagcctgggccgaagaacgcaatatcacgctcaaatttaacgggatgccctgcctggttgagggagatccacaaatgttcagaagggcgatcaataatctgttatccaatgccctgcgttataccccggagggacaggcaatcaccgtctcaataagagagcaggagagcttttttgaccttgtgattgaaaatccggggaaaccgatccctgaagaacatttatcaaggctgtttgaccgtttttatcgggtggatccatccagacaacgaaaaggagaaggcagcggcatcggccttgcgattgtgaagtcaatcgtggaagcacatcacggaagagtgcaggtggaatcagacgtacgctccacgcgttttatcttatccgtgcccagactggagaaaatgatcccggaaacccaatgctga

SEQ ID NO: 382665 - DNA, 681 bp, Salmonella enterica
atgaaaatattgatcgtcgaagacgaaattaaaacaggtgaatatctcagcaaagggcttacagaggcagggttcgtagtggatcacgctgataatggtcttaccggatatcatctcgccatgacagccgagtatgatttagtcattctggatatcatgctacctgatgtgaacggctgggatatcatccgcatgctgcgcactgccggaaagggtatgccggtcttactgctgacagccctcggcacgatcgaacacagggtcaaaggactggaactgggtgcggacgattatctggttaaaccctttgcgtttgccgaactgctcgcccgggtgagaacccttctgaggcggggaaacacgatgatcacggaaagccagtttaaggtggctgacctctcgattgatctcgtatccagaaaagtcagccgcgccggaaaccgcattgtgctcaccagtaaagagttcagcctgctggaattcttcattcgccatcagggagaggttcttccccgctccctgattgcctctcaggtctgggacatgaattttgacagcgacactaatgcgatcgatgtcgcagtaaagcgactccgcgctaaaatagacaacgattacgggacaaagctgatccagacagtccggggcgtgggctacatgctggaggtcccggatgcatag

SEQ ID NO: 382666 - DNA, 1386 bp, Salmonella enterica
atgttcaaattaaaattactcagcattagcacgatattcatcctggcaggctgcgtgtcgcttgcgcctgaatatcagcggcccgcagcaccggtaccccagcagttttcactgtcccataacagcctgacgccagcggtaaatggctatcaggatacgggctggcgtaacttttttgtcgatccccaggttacccggttgatcggtgaagctctgactaataaccgtgatttgagaatggctgccctgaaggttgaagaggcccgggcccagttcaacgtcacggatgcagatcgttatccccagctgaatgcctcatccgggataacatacagcggtggtctgaaaggtgacaagccgaccacacaggagtacgacgcgagactggagctcagctatgagctcgattttttcggcaaacttaagaacatgagtgatgctgaccgccagaactactttgccagcgaagaagcccgtcgggccgtacacatcctgctggtctccagcgtttcacagagctatttcagccagcaactggcgtacgaacaactccgtattgcgcgggaaacgctgaaaaattatcaacagtcctatgctttcgttgagcaacagctcgtgaccgggagtacgaacgttctggcacttgaacaggcgagaggacaaatcgaaagtacccgcgccgaaatagccaaacgagaaggcgatctggctcaggcaaacaatgccctgcaactggtgcttggaacgtaccgcgcagttccgtcagaaaaagggatgaaaggtggggagatcgcaccagtaaaattgccaccaaatctgtcgtcacaaatattgctgcagcgtccggatattatggaagcggaataccagttgaaagcggctgatgccaatattggcgcagcgcgagcggcttttttcccgtccattaccctgaccagtggtctttccgcaagcagtacggagctgtcaagcctctttacgtcaggaagtggaatgtggaattttattcctaaaattgaaattcctatttttaatgctggcaggaataaagccaatctgaagctggctgaaattcgccagcaacaatcggtggttaattacgaacaaaaaattcagtcagcctttaaggatgtttccgacacgcttgcgctgcgcgacagccttagccagcaacttgagtcacagcagcgttatcttgattcacttcagataactctccagcgtgccagaggattatatgcaagtggtgctgtcagttacatcgaagtgctggatgcagaacgttccctcttcgctacgcagcaaaccattctcgatcttacctattcccgacaggttaacgaaattaatctgtttaccgcgctgggtggcggttgggtagagtaa

SEQ ID NO: 382667 - DNA, 354 bp, Salmonella enterica; identical to SEQ ID NO: 19861

SEQ ID NO: 382668 - DNA, 1293 bp, Salmonella enterica; identical to SEQ ID NO: 216612

SEQ ID NO: 382669 - DNA, 3147 bp, Salmonella enterica
atgattgaatggattatccggcgctctgtcgccaaccgtttcctggtcatgatgggggccctgtttctcagcatctggggtacatggacgattattaacacgccggtcgatgccttgcctgacctgtcagatgtgcaggtcattatcaaaaccagctatcccggccaggccccgcagattgtagaaaaccaggtcacctatccacttaccaccaccatgctgtccgtacctggcgcaaaaaccgtgcgtggtttttcacagttcggggattcgtatgtgtatgtcatttttgaagacggcaccgatctgtactgggcccgttcccgcgtgctggaatatctgaatcaggttcagggaaaactgcctgccggtgtgagttctgaaatcggtcctgatgccacgggtgtgggctggatttttgaatatgcccttgtcgatcgcaacggaaaacacgacctttcagaactgcgctctctgcaggactggttcctgaaatttgagctgaaaaccatcccgaacgtggctgaggtcgcttcggttggcggcgtggtgaaacagtaccagattcaggtcaatccggtaaaactgtcccagtacggtatcagcctgcccgaagtgaaacaggcacttgaatcgtctaaccaggaggccggtggctcatccgttgaaatggccgaagcggagtatatggtccgtgccagcggttatcttcagagcattgatgattttaataacatcgtcctgaaaacaggtgagaacggcgtgccggtttatctgcgggatgttgcccgcgtgcagaccgggcccgaaatgaggcgtggtattgccgagctgaacggccagggagaagtcgctggcggcgtggtgatcctgcggtcgggtaaaaatgcgcgcgacgttatcacggcagtgagggataaactggagacgctgaaggccagcctgccggaaggcgttgaaatcgtgaccacctacgatcgcagccagttaatcgaccgggcgattgataacctcagttacaagcttcttgaagagtttatcgttgttgctgtcgtttgcgcactgttcctctggcatgtccgttctgccctggtggcgattatttctctgccacttggcctgtgtatcgcctttatcgtcatgcacttccagggactgaacgccaatatcatgtcgctgggagggatagcgattgccgtcggtgcgatggtggatgccgccattgtgatgattgaaaatgcgcacaaacggcttgaggagtgggatcatcagcatccgggtgagcagattgacaacgccacccgctggaaggtgattaccgacgcctccgtggaagtgggacccgcgttgttcattagcctgctgatcatcaccctgtcctttattcctatctttaccctggaagggcaggaaggtcgtctgtttggcccgctggcattcacgaaaacgtactccatggcgggagcggccgcactggccatcatcgtcattcctattctgatgggattctggatccgggggaaaattcctgccgagacaagtaaccccctgaaccgggtgctgatcaaagcgtatcatcctttgctgctgcgggtcctccactggccaaaaacaaccctgctggttgcggccttgtccattttcacggttatctggccactgagtcaggtgggcggtgaatttctgccgaagattaacgagggcgatctgctgtatatgccgtcgaccttgcctggcgtctctccggcagaagctgcagcgctcctgcagacaacagacaagttaatcaaaagcgttcctgaagtggcttctgtatttggcaagaccggtaaagcagagaccgcaacggattccgcgccgctcgaaatggtggaaaccacgatccagctcaaacctgaggatcagtggcgtcccggcatgacaattgacaagattattgatgaactcgacaggacagtccgtttaccgggtctggcaaacctctgggtgccgcctatccgtaaccgtattgatatgctctcaaccgggatcaaaagcccgataggtatcaaagtgtccgggactgttctgtccgatatcgacgcgacggcgcagagtatcgaggcggtagccaaaaccgtgcctggcgtggtgtctgtcctggctgagcgacttgagggcgggcgctacatcgatatcgatatcaaccgggagaaagcttcccggtacgggatgactgtgggcgacgtccagctgttcgtctcttcagcaatcggtggggctatggtgggtgagacggttgaaggcgtggcccggtaccctattaacattcgctatccgcaggattaccgtaacagtccgcaggcgttgagagagatgccaatcctgaccccaatgaagcagcaaattacgctgggcgatgttgccgatattaaggtcgtttccggaccaaccatgctgaaaaccgaaaatgcccggccagccagctggatttatgttgatgcccgcggcagggacatggtgtcggtggtgaacgatattaagacggccatcagtgagaaagtgaaactgagaccggggaccagtgtggcattctcaggacagtttgaattactcgagcacgccaataagaaattaaaactgatggtaccgatgacggtgatgatcatcttcatcctgttatatctggcattccgccgggctgatgaggccttacttattctgatgagcctgccgtttgccctggttggcgggatatggttcctgtactggcagggcttccatatgtcagtggcgaccggaaccgggtttatcgccctggccggggtggcagcagagtttggcgtggtcatgctgatgtatctgcgtcatgccattgaagcgcacccggaattgtcccgtaaagagacgttcacaccggaaggccttgatgaagccctctatcatggtgccgtactgcgtgtccggccgaaagccatgaccgtggcggtgatcattgcgggtctgctgccaatactctggggaaccggtgcaggttcagaagtcatgagccgtatcgcggcacccatgattggtgggatgatcacggctccgctgctgtccctgttcattattcctgccgcctacaaattaatctggctgcgcagacataaaaaaagcgtgtcctga

SEQ ID NO: 382670 - DNA, 441 bp, Salmonella enterica
atgaaaaaagtggttctaatggcgctggctctcggcctttcactacccgcgatggcgagtgaaaaagtcattgatatgtacaaatctgaaaactgtggctgttgttccctgtggggcaaagcgatggaaaaagacgggtttgaagtacgaactcacgtcatgaatgatcaggcgctgtcagccctgaaagaaaagcatgctattcctgcaggactacgaagttgtcataccgcggttgccggtaatttgatcattgaaggccatgtgcctgcgacaacgatacataaggcaatgcagtctggttcgggtatatacggtctcgccacccccggtatgccagcaggaagtcctggaatggagatgggagcccgaaaagaggcttacgatgttatcgcattctcaccggatggaagtaaaaaagtcttccagcgaatcgaatag

SEQ ID NO: 382671 - DNA, 2448 bp, Salmonella enterica
gtgaaaaatgacaatgcagtgcaacacaacaaccagactgcttctgagcagacattatccccggacgagggccacgtattgcataaggtgagagatcccgtgtgcgggatggccatcctgcccgacagggcgcacagcagcattcgataccaggaccaccaactttatttctgctccgccagctgtgagagtaaatttaaagcccatcccgatcgttatcttaccgaagatgccagtgaacattcccatcaccatcaccacgatcatcacgaagtcagccctgatcagataaaacagcctcacaaccaggcggaaaaagagaattctgaaggtgtgtggacatgtccgatgcacccggagatacgccgcagtggtcccggaagctgtcctgtctgtggaatggcactggagccgctcgtagctacggcatccacggggccgagtgatgaacttcacgacatgacaagacgcttctggctggggttgttgctggcgtttccggttctggtactcgaaatgggatctcatctgtttcccgacttgaggaatacagtaccgccacagtacaacacatggctgcagttgcttctggcctcccctgtcgtgttgtggtgtggctggccattcttcgcccgggccggaatgtcgttacgtaaccgctccctgaatatgtttacccttgttgcaatggggaccggcgtagcctgggtttacagcgtcattgcaaccgtcttcccctcctggtttcctgcatcgttcagaaacatggatggcctggtggccgtttattttgaagccgcagcagttattacggtgcttgttctgctgggacaggttcttgagctgcgggcacgggaacaaacctcaggcgccattactgcgcttctgaaccttgcccccaaaaccgccagacggctggatcatgacggtcatgaaacggatattaatgcggaagatgtcctgcctggcgataagctccgcatcagacctggagagagtattccggtcgacggtatcgtgatcgaaggcaaaacaaccgttgatgaatcgatggtgaccggggagtctatgccggttaccaaaacgaagggtgaccctgtcattggggggacgattaatcagacaggtagtcttatcatccgtgcagagaaagtcggtgatgaaacgatgctctcacgaattgttcagatggtcgctgatgcacagcgttcgcgtgcccccatccagagaatggcagacagcgtttcaggctggtttgttcctctggtgatacttatcgcggttgttgctttcttgatctggtctgtctgggggcccgagcccaggatggcgcacggtctcattgcggctgtgtcggtcctgattattgcctgtccctgcgcgctgggactggccacgccgatgtcgataatggtgggggtgggcaaaggcgcccaggccggggtgttaatcaggaatgccgaagcccttgagcgtcttgaaaaagtggacacgctggttgtcgacaaaacaggcacgctcacggaaggttcgcctacggtgacagggattatcagtctcagtccgggtggggaaatatctcttttacgtgtaacagctgcagtggaaaaaggttcgcagcatccgttgggtatggctgttgtcagagccgcgcatgaaaaggggatcgtgatacctgccgtcagtaatttcaatgccccgtcggggaaaggtgtctcaggcgatgtcgaaggtcaacgggttgttattggtaatgaactggctatgcaggaaaacagtatcgttattgataatcaaaaggccgttgcggatacgttgcggatggaaggcgctaccgttatctatgtggccacagacgggaaccttgcaggcctgatagctatctcggatcccgtgaaagcaaccacgccggatgcgcttaaagctttgcgtcaggcggggatccgcattgttatgctcaccggggataaccagcttactgctgaagcagtcgcacggaaactgggaatagatgaggttgaagccgggattctgccggatggcaaaaaagcagtgataacccgactgaaagagtctggccatgtggttgcgatggccggagacggtgtgaatgatgccccggcgctggcagcggctgacgtgggtatagccatgggaacgggtacagatgtggcaatagaaagtgctggcgttacccttctcaaaggcgatttgatgatactcaacagggcccgtcatctgtcagagatcaccatgaaaaatatccggcagaatctgttttttgcgtttatctacaatgctcttggggtgcctgtagctgcaggtctgctttatcctgtgtatggaatactgctgtcgccagttattgcggcggcggctatggccctttcctccgttagcgtcattgcaaatgcgttgcgtctgaaaagtgtcaggctcgggaaataa

SEQ ID NO: 382672 - DNA, 198 bp, Salmonella enterica; identical to SEQ ID NO: 129801

SEQ ID NO: 382673 - DNA, 738 bp, Salmonella enterica; identical to SEQ ID NO: 162284

SEQ ID NO: 382674 - DNA, 450 bp, Salmonella enterica
atgaatatattaattacgaccactgcgtttacagctttattttgtggggcagcttttgctcagtccagtgatattgcccatgaagcacatcgatttgttaataatgcctcagccgtcagtcatgtgaattcctcgaagcatgaaaacttaccggacagggttaataaaaacaacacgccctcattctctgaaatgaatgaacatgaaagggccattgttgctcattcatttatgaacaacagcgcgtcctatgcgcatcagaaaatgattgaggaacataaaaaaatgctgtccggcagtgatgcaaattcaaagacctcgtcttcttcttttaacgaactgaatgccggagaaaaagccgctctcgtgcatgagcaggtcaataatgccggtgcggaagcacatcagacgcaggcaagaaagcttcacgggctgtattcgaccaggtaa

SEQ ID NO: 382675 - DNA, 480 bp, Salmonella enterica; identical to SEQ ID NO: 160548

SEQ ID NO: 382676 - DNA, 828 bp, Salmonella enterica
atgggatacgacgcttccggtgttgttgaagcaaccggaccagatgtgacgctgttcaggccaggtgaccacgttttctatgccggtgtgctcgatcgccagggagccaacgcagagtttcagctggttgacgaacgcattacggggataaagccggcagcactaagttttgaagctgcagcgtcggttcctctgaccggtctgacagcctgggaaatgttatttgatcgtctgcagttgtcagtgaacggagatgctgatcagaccctgttgatgcttggcggtgcgggcggagtcccttgtatggctatacagcttgcccgcactctgagtcgggtgaacatcatcgggactgcctcccggcaggagagtgtcagagcggttcgcgggtttggtgcgcattatgtcctggatcattcatgtgcgcttgcgccacaggttgccagccttgctggactccctcccattacccggattttctcaacgtacaccacgccatctgcctgggaaaatatggccgaaattattgccccacaaggccgtatcggactcatcgacgaccctgaaccactggatctgcgtttgatcaaatttaagagcgtttctgttcactgggaggcaatgtttacccgccccatgcatgctactgcggacatgtctaaacagcatgatattcttaacaaactctcatgcatgctggattccggtaagctcaaacctccgttgctggcagagtatggcaggctgaatgctaaagcacttcgccgggctcatgaggacatggaaaataaaaatgtgaacgggaaaattgttttttcagggttctga

SEQ ID NO: 382677 - DNA, 234 bp, Salmonella enterica
atgaacgaagatgattgtcgaataagacgcgggaatgatgctgaattattttcggggataagacatattgtagtttgcagtgaatattcttcgacaagaaaagatgttcagggcgggactacgactcaagatgagaaaagcggcaatgtacagtccttactgggggcggggtttcgtaaacttgccctggcgtcacgggatcgcgtgggacgcccgtggccgctggtgctttaa

SEQ ID NO: 382678 - DNA, 504 bp, Salmonella enterica
atggttggcgttgttcttggacaactaaaaaacgctgagaaaagcaatgaaattactgctattccggagttaattaatttactggatgttcaaggaaaaattatcacaactaacgctatggattgtctaaaggatattgcggaaaagattgtttttcaagatggatattatttatttgcagtgaaggggaatcagggtagattgcaaaaaacatttgaaggaaaatttcctctgaaagaacttaataatcttgtatacgatagttattcaacaactgaaaaaagtcatggaagagaagaaactcgtttacacattgtgagtaatgttcctgataaattgattgatttccctttagtggaagggcggaagaaattatgcgtagcggtttccttccgcaaagaaatagcatctcaagtgaaagaacctgaaatgcagatgagatattatataagttcagcgaatttgacagcggagaaatttgcgagatctatcagagagcattag

SEQ ID NO: 382679 - DNA, 141 bp, Salmonella enterica
atggatattgagaaattaatggcacaaatatcaattatttctgattacagacaatcatggaaagttgagcataaattatcagttcttcttatattgacgatctgcccgttatttctggttctgagggttgggaggatatag

SEQ ID NO: 382680 - DNA, 453 bp, Salmonella enterica
atgatcaccatatttactatgattactaaaattgaagagaaactacttctgcttagagcaaagaaatttgctgataaacttgaaggacttgaatcattctctatctctttgttgggaaaagatgtttttttatggcatagagatgagttaaaggcagctaattctattgataataaggatgaaagagtatgctttaaacagcctgtagcggaagataagataattagtgctgtaatttccttattgaaaatagacaagcaatttttttgttggcttgtttatgaaggcaggtgtggaatatttgttcgcgggagtgatttccacttgtttttagctagtatatttagattaaatcatacgtatgatgtatcactaatatttgaatcacctgatagagtaattgctataagtgacaatgagtatgatgttgatatttatcataaattaaaatag

SEQ ID NO: 382681 - DNA, 4500 bp, Salmonella enterica
atgacggaaaaaagcgcgcaggaaaagctggcggaactggaccagcgggacagtaatgccgaaacagtagaaaacatcgccaccacagggcatgttgccagtgtcggaatcacggtcgtcagtatggtgggggcaacggcaaaggtagggctggcagcagcagcggccaaaacctgtgcagccggaatagccaaagccgttgctggatttggcggccctctggttgcaggactggcgggagggatgctggggggatggctgggtaccaaagcgggtgactggtttatggatacctggggtaaagatcacgcagtttctggccccacagatataccggcgtgtgtgggacatcatattgttcataacaattcctttctgggcgcaattggtgggttgattggcggacttattgtagggattgcggttggtgcactggtcgttgcgacgggaggggctgcgctgggagtactcgctgccactgttgctgccggagctggagggctggcggggggatttgtcggcggtgccgcgatggccattggttcccgctgggcctctgataccggagaaattcatgaaggttcgcccaatgtcacttttgaaggaaaagcagtggcacgggtaaccgatccagtgatttgcagcgacgatccgggcgaaccgctgccgcagatagctgagggcagcaaaatcatttctgtaaacagtctgccgctcgcacgtaaggggcataaaatcacctgttcggcagtgattcaggacgggtgtaaaaccatcacggcggataagactaccgggcagtacgggccgattaatgcggatatgtctgttacagaacaatctatcgtgtccggtttagaggttctgacagcactgtggggcgcaaaacagttaaatcgggcagccaatgagcgtatcagccagggattcagcgacccggtggacgcgggaacaggcgaatatctggactaccgtactgatttccactggccccatatcctgccgttaacgctgaaacgcgcctacactggccgccataccgtgagcggctttctgggcactcgctggctgtgtaactggtcgcagtacctggaattcgacagcgacgggcagaatgtcacctattttgatgctgagggtttatgtccggcctattccacggtgcaggagccatacaactgccgcaacctgctggtgccgcactaccgcctgacgggtaaccgcaggcgggccgtcatcttcgatgagcatacgcagcagggctatatcttcacacccgtttcccccggcgcacgccgcctgcgtctgtccgctatcaaagaccgtaaccgcaacgaaatccgctttctctataacggcgtgggccatctgacaaacgtcgaacacagcggcggcctgcgcctgcgggtgatgtgtggcccggaaggactgatttaccgcgtcagcgacgaggcggacggcagtgagctggtacgttatgactacactcaccacggcgatgagtggtggctgcgtgatgcgcagacacggtttaacggcacgctgcattacacgtacaccgaacagggctggctgaattcctggcgcgacaacggcccgacgcatttccacctgcgctacgacgatgaagggcgggtggtggcgacgggcaccgaagaggggctgtataacgacaccttccgttacttcccggcagagcgcaaaaccgagtataccgatgcaaccggggccgtcaccacgctgtggtttgatgaaacatggctgctgataaaacagcgagacccgctggggcgcatcacggagtgggggcgcgatgaatatgaccatccggtgagcatccggcagccgggcgggcgtgtcacacagattaaacgcgattatgccggacgcatcctgagcgaaacggatgccgacgggcgcaagcgggaatggcagcgggatgcgttcgggcagataacggcttaccgggaccaccgcaccacggcggcataccgctataacagcgaaggcaacctggttcaccgggaagtgaatgaccagaaatggcagtaccgttacaccgaagatggccagataaaggaggtcatttacccggacggcagccgcgaacagtgggcttataacgcgcagggcagcctgacggcgcataccgatgcggcaggccggacgacgcattatgcggaagaccgctggctgcggctgacgggcgtgacggatgcggaagggcgcagcacgcactggcagtaccgtccgggagagagcaacccgcatgaaaaggtcagcgcggttatccgggcagacggcggcgcagaaacgttccgctacgacggcgagggaaaaatcgccgtccataccggcgcgatgggccagaccacgcgctaccgccacggggcattcgacctgctgcgcgaggtggaggacgcaggcgggcagcgcattgtctgcgactatgacggcgcggcgaggctgacacagttaacccgctccggcaaccagcgctggcggctgtattatgatgcggcggggcaactggcgggggaggatgactggtcgggacggcggacggtttaccgccgggatgaacagggcaggctggcggagaaagtgcgcccggacggcagcgtgtggcgctatgcgcgggatgaattcggtcgggtgacaaccatcacgggtgagcgccagcaactgcgctacggctgggacctttatgaccggatggtgagcgcggaggtgtatgagtgcaacgacgccacgcagaaggattatacgctgaccagccgcatcacgctggaatgggatgaccggcaccggctggtggcggaagagcaggacggtcagcgcacggaataccgctacgatgaagcgggacggctgacgggaacgaaaaccgcggacggcgaaacgcagcgggaatacgatgcctcgggcgcattaacggcttaccgcagcaacgaccaccggatggagtttggtcatacgcgggcagggcaggaacggagccgccgctaccgcccggaggatgaagaaagctggctggaacagacgccgctgaaccacgcggtctacatccaggagcaggggcatgatgcctgtggccgcacggcgtggcagcgggcgggggcggagcgactgacaggcagccatgagagcgtggcgtcatggcgaccgctgggcgaacaccgttacgcgtgggataaatcgggccgcctgacgggccatgaggtgtggtcgaaaacgcgcagcgaacaggaaacacgctaccgctatgacaaccgcgaccagataaccagcgtgctgcgactgaacgccgacggcccggcgcaggaagagcgctaccgctacacggtgaacgagcaaatcgcggaaagccggataaacggcattctctcacagcatgattaccacaacgaatgcgtgacgcaggcgggagacagccgctacgaatacgacgcctgcgggcgggtgataaaacgcaccgaacagaaacggggcttccggccacaggaatggcgctaccgctgggatgacttcgaccgtctgcgggaggtgagaacgccggacggggaagtgtggcagtaccgctacgacgctttcggacgcagaacggcgaagcgtaatattatccgtgcggcgtggaaacaaaatcaccacactgtcagcgaggtgcgttaccagtggctggggatggcgctgtcggcgagtgagaagcgctacgcggacggcagcccggcgctgcgtgagcagtggcattaccggggcggttttgagctgctggcgaaggaggcgcgggcggcgaacgacgacaccagcgacttttatcccatactcatcggtccggatggtgcgccgcaggagatgtacagcgctaacgggcgaaaggtgtggcggcggcagcgaagcctgtgggggcagtcggcggcgaacgacgcgtcgcctgacgggcgtgaaagctgtgacgcgggctttatgggccagtggcaggacgaggagagcgggctgtggtataatttacaccgctacatggactcacggacggggcattatttaagccaggacccgctgaaactgggcggcgggctgaacacgcagtcgtatgtgcatgatccggtggggtggtgcgatccgttaggtctcaaatgtggtggtgttaatcgtcgtcaggctttaaatgaggcaaaagatcttgcaggtattcctcgttctcaacagcctaataggcaatggactgttggtaataatccaatgaggagagggcaaaccaattataaatattcggaagatcttggttctcatggacgatattatgaatatacagatgctcgtggacataagagagtcattgttgagcatactgccgatccgagagctccgggaccacatactcatgcagggcaacctaaaccaggtgcagatccccgaacctatgattttaaaaatgataggtatcaaaagataaataatccttcaaccaatgatcaccatatttactatgattactaa

SEQ ID NO: 382682 - DNA, 327 bp, Salmonella enterica; identical to SEQ ID NO: 182607

SEQ ID NO: 382683 - DNA, 897 bp, Salmonella enterica; identical to SEQ ID NO: 101398

SEQ ID NO: 382684 - DNA, 1077 bp, Salmonella enterica; identical to SEQ ID NO: 217334

SEQ ID NO: 382685 - DNA, 1257 bp, Salmonella enterica; identical to SEQ ID NO: 101400

SEQ ID NO: 382686 - DNA, 942 bp, Salmonella enterica; identical to SEQ ID NO: 139831

SEQ ID NO: 382687 - DNA, 849 bp, Salmonella enterica; identical to SEQ ID NO: 182612

SEQ ID NO: 382688 - DNA, 1257 bp, Salmonella enterica; identical to SEQ ID NO: 101403

SEQ ID NO: 382689 - DNA, 1266 bp, Salmonella enterica; identical to SEQ ID NO: 139828

SEQ ID NO: 382690 - DNA, 1149 bp, Salmonella enterica
atggcgcaaaacatttcgtggtatggcgtgatagcacccgaagagagtcaattcagggtggtaaatgtgaaaccagtaacgctatacgatgtcgcagagtatgccggtgtctcttatcagaccgtttcccgcgtggtgaaccaggccagccacgtctctgcgaaaacgcgggaaaaggtggaagcggcgatggcgcagctgaactacattcccaaccgcgtggcacaacaactggcggggaaacagtcgttgctgattggcgttgccacctccagtctggccctgcacgcgccgtcgcaaattgtcgcggcgattaaatctcgcgccgatcaactgggtgccagcgtggtggtgtcgatggtagaacgaagcggcgtcgaagcctgtaaagcggcggtgcacaatcttctcgcgcaacgcgtcagtgggctgatcattaactatccgctggatgaccaggatgccattgctgtggaagctgcctgcgctaatgttccggcgttatttcttgatgtctctgaccagactcccatcaacagtattattttctcccatgaagacggtacgcgactgggcgtggagcatctggtcgcattgggtcaccagcaaatcgcgctgttagcgggcccattaagttctgtctcggcgcgtctgcgtctggcgggctggcataaatatctcactcgcaatcaaattcagccgatagcggaacgggaaggcgactggagtgccatgtccggttttcaacaaaccatgcaaatgctgaatgagggcatcgttcccactgcgatgctggttgccaacgatcagatggcgctgggcgtaatgcgcgccattaccgagtccgggctgcgcgttggtgcggatatctcggtagtgggatacgacgataccgaagacagctcgtgttatatcccgccgttaaccaccatcaaacaggattttcgcctgctggggaaaaccagcgtggaccgcttgctgaaactctctcagggccaggcggtgaagagcaatcagctgttgcccgtctcactggtgaaaagaaaaaccaccctggcgcccaatacgcaaaccacctctccccgcacgttggccgattccttaatgcagctggcacgacaagtttcccgacttgaaagcgggcagtga

SEQ ID NO: 382691 - DNA, 303 bp, Salmonella enterica; identical to SEQ ID NO: 217345

SEQ ID NO: 382692 - DNA, 183 bp, Salmonella enterica; identical to SEQ ID NO: 239330

SEQ ID NO: 382693 - DNA, 132 bp, Salmonella enterica
atgggtattaaacctggcccaaagccgattgctgaatcaactggcaaagaagataaaagaaggcgtgtcactccggaaaacaagccaaagcatcccgggctgaaggaacacgaccataaaaaaggcgaataa

SEQ ID NO: 382694 - DNA, 924 bp, Salmonella enterica
gtggcaaagcaaaagttcagaatcaccaactggtccacctacaacaaagctctcatcaaccgtggctccctcactttctggctggatgatgaggcgattcaggcctggtatgagtcggcaacgccttcatcacgaggaaggccccagcgctattctgatctcaccatcaccaccgttctggtgattaaacgcgtattccggctgaccctgcgggctgcgcagggttttattgattccatttttgccctgatgaacgttccgttgcgctgcccggattacaccagtgtcagtaagcgggcaaagccggttaatgtcagtttcaaaacgtccacccggggtgaaatcgcacacctggtgattgattccaccgggctgaaggtctttggtgaaggcgaatggaaagtcagaaagcacggcaaagagcgccgtcgtatctggcgaaagttgcatcttgctgttgacagcaacacacatgaagttgtctgtgcagacctgtcgctgaataacgtcacggactcagaagccttcccgggccttatccggcagactcacagaaaaatcagggcagccgcggcagacggggcttacgatacccggctttgtcacgatgaactgcgccgcaaaaaaatcagcgcgcttattcctccccgaaaaggagcaggttactggcccggtgagtacgcagaccgcaaccgtgccgttgctattcagcggctgagcggaagcaatgcacggtggaaatggacaacggaatataaccgtcgctcgatagcggaaacggcaatgtacagaatgaagcagttgttgggagattcactgacgctgcgtgactacgatggtcaggtagcggaagctatggccatggtgcgtgcgttgaacaggatgacaaaggctgggatgccagaaagcgtgcgtattgcctga

SEQ ID NO: 382695 - DNA, 1254 bp, Salmonella enterica
atgtactatttaaaaaacacaaacttttggatgttcggtttattctttttcttttacttttttatcaagggatcctacttcccgtttttcccgatttggctacatgacatcaaccatatcagcaaaagtgatacgggtattatttttgccgctatttctctgttctcgctattattccaaccgctgtttggtctgatttctgacaaactcggactgcgaaaatacctgctgtggattattaccggcatgttagtgatgtttgcgccgttctttatttttatcttcgggccactgttacaatacaacattttagtaggatcgattgttggtggtatttatctaggcttttgttttaacgccggtgcgccagcagtagaggcatttatcgagaaagtcagccgtcgcagtaatttcgaatatggtcgcgcgcggatgtttggctgtgttggctgggcgctgtgtgcctcgattgtcggcatcatgttcaccatcaataatcagtttgttttctggctgggttctggctgtgcattcatcctcgccgttttactctttttcgccaaaacggatgcgccctcttctgccacggttgccaatgcggtaggtgccaaccattcggcatttagccttaagctggcgctggaactgttcagacagccaaaactgtggtttttgtcactgtatgttattggcgtttcctgcacctacgatgtttttgaccaacagtttgctaatttctttacttcgttctttgctaccggtgaacagggtacgcgggtatttggctacgtaacgacaatgggcgaattacttaacgcctcgattatgttttttgcgccactgatcattaatcgcatcggtgggaaaaacgccctgctgctggctggcactattatgtcagtacgtattattggctcatcgttcgctacctcagcactggaagtggttattctgaaaacgctgcatatgtttgaagtaccgttcctgctggtgggcagctttaaatatattaccagccagtttgaagtgcgtttttcagcgacgatttatctggtctgtttctgcttctttaagcaactggcgatgatttttatgtctattctggcgggcaatatgtatgaaagcatcggtttccatggcgcttacctggtgctgggtctggtggcgctgggcttcaccttaatttccgtgttcacgcttagcggccccggcccactttccctgctgcgtcgccaggtgaatgaagtcgcttaa

SEQ ID NO: 382696 - DNA, 237 bp, Salmonella enterica
atgctgccacgcgtggaccgtggtaatcagcaccgcgtcggcaagcgtatctgccgtgcactgcaacaacgctgcttcggcctggtaatggcccgccgccttccagcgttcgacccaggcgttagggtcaatgcgggtcgcttcacttacgccaatgtcgttatccagcggtgcgcgggtgaactgatcgcgcagcggcgtcagcagttgtttttcatcgccaatccacatctgtga

SEQ ID NO: 382697 - DNA, 222 bp, Salmonella enterica
atgctgccacgcgtggaccgtggtaatcagcaccgcgtcggcaagcgtatctgccgtgcactgcaacaacgctgcttcggcctggtaatggcccgccgccttccagcgttcgacccaggcgttagggtcaatgcggccaatgtcattatccagcggtgcacgggtgaactgatcgcgcagcggcgtcagcagttgtttttcatcgccaatccacatctgtga

SEQ ID NO: 382698 - DNA, 924 bp, Salmonella enterica
gtggcaaagcaaaagttcaaaatcaccaactggcccacctacaataaagccctcatcaaccgtggctccataactttctggctggatgatgaagctattcaggcctggtatgagtcggcaacgccttcatcacggggaagacctcagcgctattctgatctcgccatcaccaccgttctggtcattaaacgcgtgttcaggttgaccctgcgggctgcacagggttttattgattccatttttacactgatgaatgttccgttgcgctgcccggattacaccagtgtcagcaagcgcgcaaagtcggttaatgtcagtttcaaaacgttcacccgaggtgaaatcgcgcatctggtgattgattccaccgggctgaaggtctttggtgaaggcgaatggaaagtcaaaaaacacggcaaagaacgccgtcgtatatggcgaaagttgcatctggccgttgacagcaaaacacatgaaatcatctgtgcagacctgtcgctgaacaatgtgacggactcagaagccttcccgggtcttatccggcagactcacagaaaaatcagggcagcatcggcagacggcgcttacgacacccggctctgtcacgatgaactgcgccgcaaaaaaatcagcgcgcttatcccgccccgaaaaggcgcgggttactggcccggtgaatatgcagaccgtaaccgtgctgttgcgaatcagcggctgaccgggagtaatgcgcggtggaaatggacaacagattataaccgtcgctcgatagcggaaacggcgatgtaccgggtaaaacagctgttcgggggttcactgacactgcgtgactacgatggtcaggttgcagaggctatggccctggtacgagcgctgaacaaaatgacgaaagcaggtatgcctgaaagcgtgcgtattgcctga

SEQ ID NO: 382699 - DNA, 519 bp, Salmonella enterica
gtggcggtagccgagcaggttctggccgcgcagcagcatctgcagcggggttttgggcatggcttttttgagctcgcgcaggcggacccacgggtcttcgccgaggaagcggatgcaggcgtcaaaggtggcgccgccccagcactccagcgagccgtagcccacgtcgtcgagctgagcggcaatcggcagcatatcgtcaagacgcaggcgggtggcgaacagagactggtgggcgtcgcgcaggacaacatcggtaatggcaatggtcatggattcctccgtaaattaagggttaaggcggcgatggtggtggatagcggcggcaatcaccggcttgaggcgggcaaagtcgtccgcgggcacggcggcggcaggtgccagttttggcgccggagccggttcagggaagaaacggttgacggcggcggacatgccgcggatggcgaaaatcagcaggaacagaaatgccagcacgaaccccatgccgaggaacatcagagtgaagccttcacctaa

SEQ ID NO: 382700 - DNA, 471 bp, Salmonella enterica
gtgggcgctgatggcatccgccagcaccagcgtgtggctgtcctcgctgtgctcaaaccaccagtagatgccccactcctgcatcagtcgctgaagaaaatcaaaatcagtttcaccgtactgcacctgccaggtgcgtaccgggtagctttccaccagccgcttttccaccgggtaggggtattccgccagaacctcatccagaatatccaccacagttttattctggaatgctttgtagtcgctggtatgggtcagcagttttacccacggctccatacgcagctcataggtaaccgaacgcccttcatggcccaccacccgcgccgccgtgaccagcccgctgatatgtcgtttaccgccaccatccagttcgatgttgacgcacagatctttgcccaccatcggtttgagcggcaggttggccgccggggagacatagcccagattcagggtgtcgggcgtttttag

SEQ ID NO: 382701 - DNA, 1188 bp, Salmonella enterica
gtgaagattacgaagatagaaacacttgaaattgatctgtccgggcaaaatggacttgatttgtggcgaccaatttacgtgcgaatacatactgatgaaggaatctctggtatgggggaagcgagccttgcttatggtacggcatcagaggctattgctccgatgattcgtatacttgctgaacgttttcttctgggacaggaccctaatgatactgaaacgctatgggaaatcatgcgacagcgttcattttgggccttagggggaggccccgtgatatttggggctatgagcgctttggatgcggcactttgggatataaaaggcagagccgcaggcttatcggttcatcgcctgctgggagcaaaaacaccagcacctttgcgttgctatgcgagccagcttcattttggttggaccgatgaatcattgatgcttaacgatcctgctgaatttcgagaaacagcacaaattgcgcgagctgaaggctatgattgcgtgaagctttgtcctgtttatgttgatgctaatggggaacgtattcgtaaacggggagtgtttactccagccgaacgcaaactggcgcgttctcgtatggaggcggtccgtgaaggaattggtgaggagtgtgacatcattatcgaatggaattcacttacttcaacctccggagcgttacagctagccgattacttttctgatttaaatattttgttcatggaagaacctacccactacaatagtccagaggcgcaaataaaagtctccagggagtcatccattcctgttgcaacaggggagcgattatatacccgatggggattcctgccgtatctacaacaaggtgccatcgacatgattcaacctgatattggcctggttggtggtatcacagaaggtatgaagattgctcatttggcacatgcttttgacgtcggggttcaggcgcataattgtggttcgccacttgctatcgcgatggcattacaatttgaagcagctattccaaattttgagatccatgagcaccactcttttaatcttaaatcttgtaaccgggagttgtttgaagaagatttacagccagtaaatggaaaaattgctgttcctgtaacacccggttttggtatgacacttaggaaagatgctgaaaaacggatgaatatagtaactatctgtgaaaaataa

SEQ ID NO: 382702 - DNA, 780 bp, Salmonella enterica
atggaatggacttcactgaatatagcgcaccatatcaccgctccgaatccgttagccatacggaaagaatttatacctgcagctcattgttttcctgagcataagcataaatggcatcaggtcgtttatgcaacagcaggtgatttaatggttaaaacaattgaacaatcatttttgatttcgccgaaattacaggctgtctggttgcctgcgggaactcaacatcaggtcggctcatcacaaggggcttattttaatagcttatggatagctaacgatgctcataatcaatttgacatgtcggaacctaccatttttgatgtttccccattccttaaggcgcttatcttagaaatatcagacagaagaataaatgatgaagtttatatagagaaactaatacagttaattttataccatctgggaaatgttcgtagcgctcaatttattttaccctggcctcaaaatcgatcattggtaaaaatatgtgaatcattatgcgaaaacccgtcggatacacgatcacaggaagaatggtgccatgaactgggaatgtcggggcgtacattatcaagacgttttactatcgaaacaggaatgagtttacgttcctggaaaaaacgcctgcgattaatgaaagctattgagttactcgactgtggtaaaggagtaacagaaatagctatagacttaggatatagctcgagttctgcatttgtttatgcatttcatcttactatgggacatgctcctctggattatatgaagagaaggtattag

SEQ ID NO: 382703 - DNA, 2430 bp, Salmonella enterica
atggatcgttgtgaggaagaacggttaatcgaagttcctgtctcccggagaaagctaattcaggctggggcaacaacaggactaatggccgcagtgggaggattatcattaccattcagtttcacaagtcaagccgcgaacaaaaccgctatcgtcgaagataaggccgtctggagttcctgcacagtaaactgtggaagtcgctgcctgcttcgattgcatgtaaaagatgattctgtttattgggtagaatctgataccacaggcaacgatgagtacggaaaccatcaggtccgggcctgccttcgtggacgctccattcgtcgtcgtatgaatcatcctgatcgattgaaatatcccatgaaacgcgttggtaagcgtggtgaaggtaaatttgagcggatatcctgggatgaagcactggatactatcgcggataatctgaaacgaattattgcaaactatggcaatgaagcagtacatgttatttacgccacaggtgtcgctggcggaaatattactaaatcatcaatgcccttccgcctgatgaattcctgcggtggctttttaggtcgttacggtacctatagtactgcacaaatcacagcgggcatgaattatctctatggtggcagaagcggaaacagcccggatgatatcgctaatactaaattggttgtaatgttcggaaacaatccagccgaaacacgtatgagcggcggtggtgttacctattatgttgaacaagcgcgcgaacgctccaatgcgcggatgatcgttatcgatcctcgctacaacgataccgcagccggacgagaagatgaatggttacctattcgtcctggaacggacgccgccttagctgcagcacttgcctgggttctcatcaccgaagatatggtagataaaccctttcttgataaatattgtgtaggctatgacgaggttacgttaccagcaagcgcaccaaaaaatggtcattataaagcttatatactcggcgacggtccggatggtatagcaaaaacacctgagtgggcagctcaaatcacaggtattccggcagacaaaattattaagctggcgcgtgagatcggccaggcgaaaccagcctatatttgccagggatgggggccacagcgtcaatcaaacggagaacaaacgtcaagagccattgcaatgctcgccattttgaccggcaatgtcggtatttctggcggcaactctggcgatcgagaaggcacctttgatctcggtgttgaaatgttttcccctctaaaaaatcctgttaaaactgaaatatcctcctttacctggaccgaagctattgagcgcggaactgaaatgacctctactcgtgatggcgtacgaggtaaagacaaactggatgtgccaataaaattcatgtggtgctacgccagcaacacgctgataaatcagaacagcaatattagtcgcacacatgaaattttgcaggatgaaaataagtgcgaaatgattgtctgcattgaccatttcatgactgcctcagcaaaatatagcgatattttactccctgacctgatgcctactgagcaggaagatcttatcccgcatgaagaggccgggaatatggcatatgttattctgggacaaccatcaacatcgccaaaatttgaacgcaagcctatttactggacaatgagtgaaatagcaaaacgccttggacctgatgtttaccagacttttaccgaaggccgtacacaacatgaatgggttcaatatctttgcgccaaaacgaaagaacgtcatcccgatatgccggattatgaagagatgaaaactgcaggtatttataaacttaaatgtccggatgagcatgttgtcgcatataaggattttcgcaaagaccctatctccaatccccttaaaacaccatcggggaaaatagaaatctattctgaacgactggccaatatcgcaaaaacatgggaactgaagcctgatgaagtcatcgatcctttacccatttacactccaggctttaatggctgggaagatccagcccgtcgcgagtatccattgcaaatgaccgggttccactttaaaggccgcgtgcattccagctacggcaatattgatgttctgaaacaggcctgccgacaggagatttggataaaccctattgatgcccgggatcgcggaatcaaaaacggagacaccgttcgggtatttaatcagtatggccagacgttgattcccgcaaaagtcacacctcgtatcatgcctggcgttactgctatgggcgagggaatgtggctgaatgccgatatgtttggtgacaaagtcgaccacggtggctcaattaacattctgacaacacatcgcacttcaccgctggcaaaagctaatccttcgcacagtaatctcgttcaggtcgaaaaggtataa

SEQ ID NO: 382704 - DNA, 618 bp, Salmonella enterica
atgacaacccagtatggattttttattgattccagccgttgcaccggttgtaaaacctgcgaactggcctgcaaagactacaaagatttgaccccggatgtcagcttccgccgcatttatgagtatgcgggtggtgactggcaggagaataacggcgtctggcatcagaatgtctttgcctattatctctccatttcgtgcaaccattgtgccgacccggcatgtaccaaagtctgtccgagcggagcaatgcacaaaagggaagatggttttgtcgtggtgaatgaggaggtctgtattggctgtcgctattgccatatggcctgtccatatggcgcgccacagtacaacgcggccaaaggtcatatgaccaagtgcgacggctgttacgaccgggtggcggaaggcaaaaaacctatctgcgtcgaatcctgtccgctgcgagcgctggactttggtcctatcgacgagctgcgcaaaaaacatggcgatctggcggcggtagcgccattgccgggtgcgcacttcaccaaaccgagcatagtgattaaacccaatgccaatgcacgtccgtgtggcgataccactggctatctggccaatccgaaggaggtgtaa

SEQ ID NO: 382705 - DNA, 858 bp, Salmonella enterica
atgggaaatggatggcatgaatggccgctggtactgtttacggtactgggacagtgtgtcgcgggtgcgctggttgtcagcggacttggttggctggcggaaaaaaacgatccgcccgccaggcagcgtattgtacgcggtatgttttttctttgggtggtgatggggctgggctttctggcgtcaatcatgcatctgggttcacccacgcgggcgttcaactcgctcaaccgcgtcggcgcgtccggattaagtaatgaaattgccgcagggtcgatctttttcgctgtcggcggtttctggtggctggtggccgttctggggaaaatgccagaaacgcttggtaaactctggctgctgatcagtatggtgctcggtatcatcttcatcctggcgatgacccgcgtttatcagattgaaaccgtccccacctggtatactggctatacgactctcgccttttttctgactgcattcctcggcggcccactgtttgccgcactcctgttccaggcatccagagtcccctttaacagcacgatattttccagcatcagcttacttgctctattggtctgtattgctgtcatcgcgttacagggtatggctctggccagcattcatagctcagtacagcaggccagcagtctgataccggattatgctgtattgcaggtctgccgtgtggcacttcttgtcatcggcctgggctgctggatctgcccattggtacgtcgcaaagagccacatattgttgggttactactgggtcttatcctggtgcttggcggcgaaattttaggccgcggcctgttttatgggctacatatgactgtcggtatggcagtggcaggttaa

SEQ ID NO: 382706 - DNA, 615 bp, Salmonella enterica
atgactgatttcacacaatgtgacaatttttccatgacggcacgcgtactgggcgccctcttttactttgcgccagagagtgctgaagcctctccgctggtttcagcattcacatctgatgaatggcaaacacaatggccgctgccgtcggaggagttgcctcaactggcaagaatgtttaaagatggcggcgatgactctcttactgagtcctttcagcgtttatttatcgggccttatgccttaccgtcaccgccatggggctccgtctggctggatcgtgagaacgttttatttggtgaatccacactggcgctgcgccagtggatgcgggagaacagtattcagttcaagatgcagcaaaatgagccagaagatcactttggttctttattactgatggcggcctggcttgcagagcagcgtcgacacagcgaatgtgaacagttactggcatggcatctgttcccatggtcatcccgtttcctcggggtgttcattgagaatgccggacatcctttttatctggctttgggaaaactggcgagtttaacactggcaaagtggcaaaccatgttatcaatcaatactaaaaacctacctctccaccgctaa

SEQ ID NO: 382707 - DNA, 2103 bp, Salmonella enterica
atgtttaatatccgcaatacacaaccttctgtaagtatgcaggctattgctggtgcagcggcaccagaggcatctccggaagaaattgtatgggaaaaaattcaggtttttttcccgcaggaaaattacgaagaagcgcaacagtgtctcgctgaactttgccatccggcccggggaatgttgcctgatcatatcagcagccagtttgcgcgtttaaaagcgcttaccttccccgcgtgggaggagaatattcagtgtaacagggatggtataaatcagttttgtattctggatgcaggcagcaaggagatattgtcaatcactcttgatgatgccgggaactataccgtgaattgtcaggggtacagtgaagcacatgacttcatcatggacacagaaccgggagaggaatgcacagaattcgcggagggggcatccgggacatccctccgccctgccacaacggtttcacagaaggcagcagagtatgatgctgtctggtcaaaatgggaaagggatgcaccagcaggagagtcacccggccgcgcagcagtggtacaggaaatgcgtgattgcctgaataacggcaatccagtgcttaacgtgggagcgtcaggtcttaccaccttaccagaccgtttaccaccgcatattacaacactggttattcctgataataatctgaccagcctgccggagttgccggaaggactacgggagctggaggtctctggtaacctacaactgaccagcctgccatcgctgccgcaaggactacagaagctgtgggcctataataattggctggccagcctgccgacgttgccgccaggactaggggatctggcggtctctaataaccagctgaccagcctgccggagatgccgccagcactacgggagctgagggtctctggtaacaacctgaccagcctgccggcgctgccgtcaggactacagaagctgtgggcctataataatcggctgaccagcctgccggagatgtcgccaggactacaggagctggatgtctctcataaccagctgacccgcctgccgcaaagcctcacgggtctgtcttcagcggcacgcgtatatctggacgggaatccactgtctgtacgcactctgcaggctctgcgggacatcattggccattcaggcatcaggatacacttcgatatggcgggtccttccgtcccccgggaagcccgggcactgcacctggcggtcgctgactggctgacgtctgcacgggagggggaagcggcccaggcagacagatggcaggcgttcggactggaagataacgccgccgccttcagcctggtcctggacagactgcgtgagacggaaaacttcaaaaaagacgcgggctttaaggcacagatatcatcctggctgacacaactggctgaagatgctgcgctgagagcaaaaacctttgccatggcaacagaggcaacatcaacctgcgaggaccgggtcacacatgccctgcaccagatgaataacgtacaactggtacataatgcagaaaaaggagaatatgacaacaatctccaggggctggtttccacggggcgtgagatgttccgcctggcaacactggaacagattgcccgggaaaaagccggaacactggctttagtcgatgacgttgaggtctatctggcgttccagaataagctgaaggaatcacttgagctgaccagcgtgacgtcagaaatgcgtttctttgacgtttccggcgtgacggtttcagaccttcaggctgcggagcttcaggtgaaaaccgctgaaaacagcgggttcagtaaatggatactgcagtgggggccgttacacagcgtgctggaacgcaaagtgccggaacgctttaacgcgcttcgtgaaaagcaaatatcggattatgaagacacgtaccggaagctgtatgacgaagtgctgaaatcgtccgggctggtcgacgataccgatgcagaacgtactatcggagtaagtgcgatggatagtgcgaaaaaagaatttctggatggcctgcgcgctcttgtggatgaggtgctgggtagctatctgacagcccggtggcgtcttaactga

SEQ ID NO: 382708 - DNA, 210 bp, Salmonella enterica
gtgaagtttattgagacagagctatttggagccgtggttgttccaaatgatatctcacaaattttagagattatagatgaacagcctgataattcgatttctcatggcattttcatgtggagaggtcaaggtgatattggctgggctattcacagtgctgcctacagacgtttagcaaattccattgcgggtagattaccagatgagtag

SEQ ID NO: 382709 - DNA, 609 bp, Salmonella enterica
atgcgcgactatgagcgaactcttattagtgaagcgcggcatcaggggtatggtttcgaaggtggtcgcaaactgagcgacttcgagttgcttgcaaagctccaacaccatggagcagcaacaagactaattgatgtatccagaaatatgcttgtcgccttgtggtttgcatgtacatctcggccagaaagtacagggctgttgtttggtatttccgctgcggtagttctcggcctcgaaggtagttatggctatgacaacgggaattacaatgaaaaatttccgcatagtgaagctgaaggtgaacaacatggtgatttacccattgtctggcaacctcccgttgttactaaaagaatagctgctcaaagtgctcagttcgtttatagcgatgtttcgcatggacgtatggggagtttggttcttgacagtgcggtttgccacaatggggtactggcactggcgatcacgtcagatatgaagaaaaaatttttgaaagttctggaacgctcttttgatatacgttcaataactctttttcctgattttgacggattttgccgcgctaactctgagggcttcagtctcttaagtaataaccgttggtag

SEQ ID NO: 382710 - DNA, 354 bp, Salmonella enterica
atgatggctgttggtggttttgtgatatgcccgtttcacgggtaccaggagccggtattcacccagcagattaaacagacgatcccgtccgatattcagcgttttatcggcctgcatgttcagcagatagtgcagtttacgcgtaccgattcgcggctgacggcaccgggtacgggcaacaaaatcaagaacctgagcatgatgctcctgccgtttattacatcttgtattgtactggtaccacgcctgtctgctgtgccccaggaactggcatgcacgcgtaactgttattttgggggcctgactttgcgtgaggacttgccgggccgcttttttacaacacttaccccgtaa

SEQ ID NO: 382711 - DNA, 537 bp, Salmonella enterica
atgattgatgaaaaagacaccgaaaatgcagagcgcatttttatatatgaaggcataatgcgatttaaagataggcttgaggaggcgatgggaaatgactcaagtcgcgtatttgccgcaaaatgtggcctttccgatggagttataaggaattatttatctggtaaaacatacccatcactagacagacttgctcaaatagcaagtgcttccgggcgccctgttgaatggtttatacgcgatgaatcagttggtgaggttgagcataaaaatgctcaggccgacaaatcaacttcatatgaccgcgacaggctgaaaacaaagttaattgcgattgttgagttgctagaggacagagaactggcctcagctatcgagttgttcagaaaaagggggtttgaagctctcatgccagagatatttaataaccctgatgcgcgcagcgaaaagtgtgtggccgaacgtgattccgttagacatagctcgtcagcggcatctttagaaaaagagccgctaggcaagaagcatattggttga

SEQ ID NO: 382712 - DNA, 228 bp, Salmonella enterica
atgtcagcaaaaaaccaagactggcacgcggaacaggtaaaagcagctgttcgcatgaaaggtaaatcgctctctcagttgtcacgagaggcaggattaaagcctgacactatgcgcaacgtgtttcgctgccatattcctcgttatgaggcgattattgcagggtatctggagatggacccggcccatatctggccaagtcgttatatggagaaaacatcatgttga

SEQ ID NO: 382713 - DNA, 2001 bp, Salmonella enterica
atgttgaaccaatgggtaacagcgcaggaatgcgtgggagtttcatgtttccctgggcatgacgtaaatattcgtcgccatttggagaaacttgtggctaaccagcctgaactacgacgtaaacgtgctggttcaaaagcgctggaatttcatatatcagctttgccagttgcagcacgcgcagagttacttttgaaatccgggcaggttgaaactagccaggggattattgagatcgtccgcccacagactgaatctctggattatggacgtcaggaattatggcggcgctgggacagtgccagcgatgcacagcgtcaactggccgggaaatggcaccctgttgtcatgttagccgatgagcttattaactctggcgttaccgctaaaacagcctttcagacagcggcccgccagtttcaggtaagtgcggcctctctgagagacaaatactaccaggtgcagaaatacgccaaatctgactgggtggccgttctcatcgacaaacgcggtggctcaaagcatgaagcaaagaaagtcgagtttgatgaagatgcctggcagttcctgcttgccgatttcctgcgccctgagcaacccgcgtttcgtaaatgttatgcacggctaaaacttgctgctgagtcccacggctggaatatcccgtcttactcgacggcctatcgccgggtacagcaaaacgttgataaggcaatggctgtggcctgccgcgagggcgaacatgccctgatgcatctgttgccagcccagcgccgcacggtggagcatctgaacgccctgcaatggattaacggcgatggttatctgcataacgtctttgttcgctggtttaacggtgaagtgatccgcccaaaaacatggttctggcaggatgttaagacacgaaagattgtaggctggcgctgtgatgtgagtgaaaacaccgattcaatccggttgtcattcatggatgtcatcaaaaagtacggcatcccggaagattttcatgtcaccatcgataacacccgcgcggcggcgaataagtggctgactggcggtgtaaaaaaccgttatcgcttcaaggtacgtgaagacgatcccgtaggtctgttcccgctcatcggggcaaccattcactggacgtcagttgttgccggtaaaggctggggtcaggcgaagcctatagaacgcgcgttcggcgttggcggcctggaagagtttgtggacaaacacccggcactggcgggtgcttacaccgggccaaatccgatgaataagcccgataattatggctcgcgtgtcattgatgcagagttattccttgaaatcctggcagaaggcgtggcgatgtttaacgcccaggaagcgcgtaataccgaaatgtgccagggcaaatggtcttttgatcaggtatttgaacgcgagttcgcaaataccatcgtgcgcaaacccaccgccgagcagctgcgcatgttcctgctgcctgccgaagccgccacggtaagcaataaaggtgaattcagcctcaccgctggcggtacgctgaaaggcgcgaaaaacgtttattacagtatggcgttgatgaatgccggggtaaaaaaagtcgttgtcagattcgatcctcagaatctgcatggcaacgtctactgctacacgcttgatggcaaatttatctgcgaagccgaatgtcttaccccggttgcatttaatgacacccaggccggacgtgaatattcacgccagcaaaaacggctcaaaactgcgaccaaagctgttattgccgcgcagaaacaaaaagacgcgctggaaattgccgaacttatgccccggttggcagagccggagccgcctgagtcgcgcgttgtcggcattttccggcccgtgacgcaaggtaacaccgttgcatggtcgaaatacgatgaggattcagccactgagaatgatgaactgattaaccactctctggatattctggaattaaataaacgaaagaacgttatttaa

SEQ ID NO: 382714 - DNA, 948 bp, Salmonella enterica
atggctacggtgaatatttccgatattcgcgcaacacttcgctcatttgttgatgcaggtaaagtgacgtttgcacaggttgcccgagagacgggactgtccagcggtacgattagcggttacatgaatgaaaaatacaacggtgataacgcccgcgttgagcaggtgcttgcaggatggcttgataaccagaaatccgctgccgaattacccgagccaccacgcttcgttgaaacgcccacggtgaaacaaatctggacaaatttccgtttcgcccgcctgacggaaagtatcgcggtcatttgcggtaatccgggcgttggcaaatcagcagcggcgcgggaatatcgtcgcactaatcagaatgtctggatgattacgatcaccccgtcctgcgccagtgtccttgagtgcctgacggaactggcctgtgaacttgggatgaatgatgccccgcgccgcaaaggcccgctgtcccgtgccctgcgccgccgactggagggaacgcagggactcataattattgacgaagccgaccacctgggcgcggaaacgctggaagaactgcgcttattgcaggaatcgacgcaggttggcctggtattgatgggaaatcaccgggtttattccaacatgactggcggcaaccgcacggtggagtttgcccgcctgttttcacgtatcgcaaaacgtactgcgattaataaaaccaaaaagcacgatgtgacggccattgcagacgcctggcagattgagggggaaaaagaacgggaattattacagcagattgcacagaaacccggtgcgctacgcgttcttaaccactccctgcgtcttgcggccatgaccgcacacggcaatggtgaacgggtaaacgaaaaatacattctggatgctttccgcgatctggatctggacgtggatgtatcaaccctgctgcgtggctga

SEQ ID NO: 382715 - DNA, 240 bp, Salmonella enterica
atgattactgaacgtattgccgaacatatcaacatggcggaggccgcgcaggaatggcttcgccagcgaggaagccgtgtgaccaatattcgaatcttcatgcggcgtccgttgcttgaaatcgcctgccctccggtagagctggttaagtctgcaaatcgcattgtggaatgctgtgataccggcacccgttctgtctgggttgctgcattaaatggttgccagattatctggcgctaa

SEQ ID NO: 382716 - DNA, 258 bp, Salmonella enterica
atggcaaaagtcgtctttgaatttaaaagtgatttcaccacgtccgttgagaaaggggtgattgacgggatcaccacccaaatacatgtcgagtttgatggtgataaaaacagcccgacaggcgcactcgccatcgtaatggctaataaccgtcaggagataatcagcctcgctatgaataagctggttgaggtattacgcgcgatggggcaagtcgctgagtgtggcatttatacgccagataatctgaaacattaa

SEQ ID NO: 382717 - DNA, 252 bp, Salmonella enterica
atgaaaaaaatagttgcttacgcctgggcctccggccttattgagttcggtcagacatgtccgggcggagcattaccgattctgatcggtgaagaaaatagtgtccgggagcgtgtggatgttcttgcccgtcactctcgtacatctgacgacatatttgtaccaggcatacctgaagcagccagtcaggatgaaggaatgaacgctctgacgcgtttcgtaaaagaattgaataaacgggagaataaatag

SEQ ID NO: 382718 - DNA, 525 bp, Salmonella enterica
atgtcatctaaaccaaaacgtattaaagctgctgcggctctatatgtgtcgcaatcgcgtgaagatatggtgcgtgatattcgcatgattggagatttccagcgtgagattgttcgccttgaaaccgaaatgaatgaccagatagcggctgtcactctgaagtatgccgacaaaattaaaccacttcaggaacagcttaaaatcctatctgaaggtgtgcagaactggtgcgaagcaaaccgcagtgacctgacaaacggcggcaaggtcaaaactgcaaaccttgttaccggcgatgtacagtggcgcgttcgtcctccatcggtcacggttcggggtgttgactcggtcatggagacgttgcgccgtcttggcctcagtcgctttattcggattaaagaagagataaacaaagaggcaattcttaacgagcctggtgcggtggctggcgttgcaggaataacggttaaatcaggagttgaagatttttcaattattccgtttgagcagtcagcaactaattaa

SEQ ID NO: 382719 - DNA, 264 bp, Salmonella enterica
atgaatgagcaacaattaatttcgatgattatcgaactgaaatcatggcatcaaaatcgcgtcgaaaaatgccagatgattattgatgagaaagatgccgatattcgtctggatatgggtgagagcggcgcaatggagtttggggctgacactagagaagcccgttttatcagagtcggtgttcaactggcccttcttcagttccagccattccccataactatgaaacaagctgatgatgcggaggatgacagcgatgagtaa

SEQ ID NO: 382720 - DNA, 471 bp, Salmonella enterica
atgagtaagccactgatttacgatgctgctattgcccgctgggggtatgacgcgcaagtactaaccgtagcggaagaatgcaacgaactggccgctgcctgcgcccgttttgttaaccacaaagcgaacggtaacagcgtcgcggaagaagccgcagacgtcgagataatgattgaacaacttcgccataacggtatggacgccatgattgagcagcataaaaccagaaagttaaaccgtctggcccggcgcgtagggctggacagtgaacctgccagcgtattttcgccctcagtccgtgaactactttcggaggcgggtgacgcgcttgatatggctgagtcactttatatcgatataaacgccagtaatcgccatgccgcagcacaaaccagaatggcgatcggcctgcttatgcaggcggcacaaaagatgattagcgaacagcaacggcgggaacaaaaagcatga

SEQ ID NO: 382721 - DNA, 459 bp, Salmonella enterica
atgagtgaacaatccttaatcagcgtaattaaaacatacatccgggcttctggcccggttacatgcacccagattgcctgcgcaattaatgctgctccacaggatgttatttctgttattcgcgaggcagttgatcgcggttctctggcggaaaaaaacggctattacgatatctgccgtcaaccttccgagtcccgccgcagcagttattcatgggttgaagggaatacgtttcctgcatgggttatgcggctggcccgtggcccaaaaacatgtgagtccgttgatgttgtggccgaggttgacagggccaaacgggcgcagggatggcctccgtttattcttgcgagtattgatgtccggttgagtcattttaagtgcgtttcaacgggtgaaatcgttgaccggcacatactgcgttacctgccactggatacaacggaggttattgttttatga

SEQ ID NO: 382722 - DNA, 684 bp, Salmonella enterica
atgagcaatcaacgatatgaagacgagatccgctggagaaatgatgcgattaactgccttattcgggctattaacggcctggaactcaatgttgatgagcagttcctgcccgatatggtacaggaagcgatcgagacggtacgcagtcagcgtcatacggttctgatcctgtcggcgcgtcagattctggaagcggcggagtttgccgggctggatgtttgtgttgaccctgtaaacgatgaacttgatgaagaatattgtatccggcccggcactattgcaggttgtccgcaggaagggctggagccgtatgaaggtctgcttattgaatcccttttgtatccagaagaaggcgctgtaccactgtccggcgaacaaccgtttaaagagtatgagccggttattgatgaaggttttttgcgtcaggcagcgaagtgtaacggctgggccggagaactggcccgcagactgcttgatgaaaatatgaggaagcctgaactcgttatgctgatcaaacgccttggttcttcactgcgtagtgcgcggccagaatgtaaattgccagatacagcaatgcattatttaagtaagcacgggcttatcagcgtcaatgattgcctgcggaccagtctccctcaacgtattcgggaaccgggtctgtatcaggagaataaaccgttatga

SEQ ID NO: 382723 - DNA, 450 bp, Salmonella enterica
atgactatttcaaaagaacagtggaaaggtatccagaacatgctgggcgacctgtattgtcaagtaaaatttaagttaccttcaggcgaagtaattagcgtcatgaagtcattcgtctctgagaacaaaaccgcactgattgtctggatcgatgatacccgctgcgaggcgtggggctggaaaaaacatgatgtgtatcggcccctcactgagcttgtgtggcggcgtaagacctacaaacccggcgcttcaatcattcgtcgtgcgtctaaaaccagagacgggcaacgctggctgaagcggaaagaaaatgcgtatgtgcatgaggtggtggaataccgtgtgtgccatttcagtaccgctgcgtcactggtcagccagtaccgtaaaattgacggtctggagcttttaactcccctctgcgaggtgatgaaaaatgcagagagctaa

SEQ ID NO: 382724 - DNA, 507 bp, Salmonella enterica
atgcagagagctaacttaatcaaactgatccacgtcgccagaagaaagctggcgcttgatgatgaaacctaccgttctgtgctttccggggctgtccccggaaaaaaaagctgccgtgatatgaaaatcggcgagctggaagctgtgttaaaaattatggaacgtaagggttttaaacgagagaaatcattgcgtccatcacagcccaaagcagccccgacagtgacagataagatccgggttatctggaaaataatgcatcgtcagggctttatcactgatggttcagacaagtcactcaatggctttgtcagacgcattacgcgccttaagaacggcggcgaaggtgtcgccagcctggagtggttgcgaggtgatcaggcatcaaccgtactggaaagccttaagcgctggcatatgcgctgtatgcgggaaaaacttcccgccaaaggctatggactgagctacgaacgaacgtgcgagcaataccgcaaacattcatattaa

SEQ ID NO: 382725 - DNA, 453 bp, Salmonella enterica
atgatgaagaaagcctttatggttatgggattagcagtgatgggactggtagccacctcaacagcggctgttgcaaatagcgatgatggtgttgatgcattagcggaagcctatctgaaggagcacccatcaaaagctgaaaattatgatagcgaacctgtgaaaaaagaccccgcgtcaggcttctggacgtgcaacggtatccgtatgcacatgggtgttgacatgaactcatggacagacctgaataccggcgatatgtatgtgattttggaaaaaggcacggtcgatgataaagataaagacgagaaggttaaggggactgattacttgtataaatggacaaaaaacccagccgtgattaaatattttattgtcgataaaacgggtaaaaatctctacatccgtgatgatttgaagtttttcaaggcttacaagtgcaaacgaaactga

SEQ ID NO: 382726 - DNA, 423 bp, Salmonella enterica
atgacagaacaacaaacagatatgtttgagcatgacccgaacatgagccaactgctggcgcatatggacagtattcccgccgccgatttagagtcacgctggccacgttcgctggttgaattgattgatatccttgaagctgagttaaaacgccaggggatttctgacgatccgcgaacgctggcccgcaaacaggcgctggcgctgtcacattacctcggcgggcgacagtattacatcccgtgcggcggcagtatgttaacagcgctgcgcgacgatctgatttactgccagtttaacgggcgtaacatcgaagacctgcgtcgtgctcaccgcctttcccagccgcagatttatcagattatcgcccgtcagcgccagttgcacactcgccgacgccagcctgatttattcccttcctga

SEQ ID NO: 382727 - DNA, 513 bp, Salmonella enterica
atgccaggaattcccaaaaagctgaaagcaaccctgcttgccgctgcacttgccggtggtggtatgggcggttatcaggagatgacccggcagacgctggttcacctcgaaaatatcgcttatgagccttactacgatgtggccggggtattgaccgtctgtgtgggccacaccgggccggatatcgtgtggaagcattacacccataacgagtgtatggatctcctcgacagcgatttaaagccggtttatgccgcgattaatcgcctcgttaaagtgccgctcacggattaccagcgtaccgcgctggcgacattcgtctttaacaccggcaccggtgcgttctcctcctcaaccctgcttaaaaagctgaacgttagcgactatgccggtgcgcgtgaccagatggcccggtgggtctttgctgcgggccataagtggaaaggtctgatgaaccgccgtgaagttgaaatggctatctggaacgtcagggggccggatgacctcaggtga

SEQ ID NO: 382728 - DNA, 387 bp, Salmonella enterica
atgacctcaggtgataaagcaatcgtctttctggttctggggctgggtctttttacaggttatgtctggcgccagtccgttctgacacagagtgaaaatgagcaattgacccgtgatcttcaaatccagacacaggcccgaaataccgctgagtggctgttgcacgggcaggaacagaccatgcaggtgttttccgccatccgtgcagcaaaccgcgccgcacgcctcattgatgagaatcaacgtaatgaagcgaaacaaactatcagcgccgctacagcgcaggatgattgcggcgatcggcttgttccttctgccgctgctgacgagttgcgcaggctcgaacaatacgcccgcgctcccggtggtcatttctccgcagattga

SEQ ID NO: 382729 - DNA, 195 bp, Salmonella enterica
atgaacaaagaccagaacggggcggcgcaggcgctactccgtgaatactggcagggtgacgcgtcaacgtgtccccgtgtggcggcatacgatccgccgcgagtctgcgccggttgtggcagacctttagcgcctgatgtgctgaccattcagccgatggctacacactgtcaccactgtcgtgcagggaaataa

SEQ ID NO: 382730 - DNA, 312 bp, Salmonella enterica
atggattcttattacgcaattcttggcctctggccctatgcgctggcattgctcggttctgttggcgggattgcatggtgggcaatacggcgcacgttcgccagtaccgaacgcgtggagcgtatcgagaaccggctgaccgaaatggaaacacgctatgccaacgcgccgggggccgaggatatgcatgaaatgcgcctgcgtatggctgatatggccggagaagtaaaagtgcttacaagcaccatgaaaggcatatcacaccagcttgaactactgctcgaaaacgccgtaaacgggaataaacgatga

SEQ ID NO: 382731 - DNA, 1665 bp, Salmonella enterica
atggcgaccaaagtgaagaaagccccaaatctggtcgcgcttactgaaccccgtaaaatcgaccttcaggaagaagccactaaactcggcgtcgatattgttaccgatattgccagcgcccagccagctaacgaggccgttttccttggttatcaacgcaggtggttcgaagacgaaagccagatttgtatcgctgaaaagtcacgccgtactggtttaacctgggctgaagcgggtcgcaacgtaatgacggcggcgaagccacgtcgccgtggtggccgtaacgtgttttatgtaggctccaaacaggaaatggcgctggaatacatcgccgcctgtgcgctgtttgcccgcgcctttaaccagctggcgaaggccgatgtctgggaacagacgttctgggacggcgacaaaaacgaggaaatcctgacctatatgatcaggtttcctaacagcggctttaaaatccaggcgctgtcctcccgcccgtcaaacctgcgcggtcttcagggtgatgtggtcattgacgaagccgcattccatgaatctctcgacgagctgttaaaagcggcatttgcgctcaccatgtggggcgcacgcgtgcgtattatctccacgcataacggcgtcgataatctgtttaatcagtacattcaggacgcccgtgaaggtcgcaaggattacagcgttcaccgcatcacgctggatgatgccatcgctgacggtctgtatcgccgcatctgttacgtcaccggtcaggaatggacgccggaagcggaaaaggcgtggcgggacggattgtataaaaacgccacgtcaaaagaggatgccgacgaagaatacggctgtataccgaagaaatccgggggtgcgtacctcagccgcgtactgattgaaacggccatgacgcaggagcgtgatattccgattctgcgctttgaagctcctgataacttcgaatctttgtccccggccacgcgtgaaaaaatcaccctggactggtgcgaaaaagaactcgcgccgctgctggccgcgctgaatccgaatcataaacacgccttcggggaagactttgcccgtaaaggcgatctgactgtttttatcccgctggaaatcaccgcagaactgcgtaagcgcgaggcgtttcgcgttgaactgcgcaacatgacgtatgaccagcagcgccagattatgctgtttattctggcccgcctgccgcgctttatcggtgccgcgttcgatgcaaccggcaacggcggctatctggccgaagcggcacgtctgatttacgggccggacatgattgactgcgtcaacctctcgcagaactggtatcaggagtggatgccaaaacttaagggagaatttgaagcattcagtctcaccatcgcccgccaccagaccacgcttgacgatctgctgcaaatcaaggtcgttaacggtgtcccgcagattgataaaggtcgtacaaaagacactgacggtaagcaccgccgccacggtgacagcgccgtggcactatgcatggccgtccgggcatcgttcatgaatggtttcacgattgatgaagacagcgtgcaggccatcccaccacgtaaccgagacgattacaacgaagacgatcacgacgatgaatatcacagttttgaacgaggaggctggtaa

SEQ ID NO: 382732 - DNA, 1545 bp, Salmonella enterica
atgggccagattgttgatttaaccggtcagccgttcgattttgacgatggattacagacagagcaggaagcgctgtcactggtgatgaagcgcacgcaggagcacccgtcgagcggtatcacgccgaaccgcgccgcgcagctgctgcgcgatgccgaacgcggcgacctgaccgcacaggcggatctggcgtttgatatggaagagaaagacacgcatatcttttccgaactgagtaaacgccgtctggcaatccagtccctccagtggagcatcaagccaccgaagaacgccacagcgcaggaaaagaaagatgccgaaatgctcgacgaactgctgcgtgacgccgcatggttcgaagacggtatttttgatgcaggcgatgcagttctgaaaggctactcgatgcaggagatcgaatggggctggctggggaaaatgcgtgttcctgttgccctgcatcacagggatgccgggctgttctgcgctaacccggacaatctgcatgaattacgcctgcgcgatggcagctatgaaggtgtcgcgttacagccgttcggctggttccggcatcaggccaaatcccggacgggttatgtcggtacgtatgggctggtacgtactctggtatggccgttcatctttaaaaactacagcgttcgcgactttgctgaattcctggagatttacggcctgcctatgcgcatcgggaagtatccgacaggtgccacggcccgtgagaaagcgacattaatgcaggcggtaatggatattggtcgtcgcgccggtggcattatcccaatggggatgacacttgattttcagagcgcggctgacggtcaggctgaccccttccttgcaatgatagtctgggctgagaaatcacagtcaaaagcgattcttggcggtacgctgaccaccgatgccggagataaaggcgcacgttctctgggtgaagtacacaatgaagtacggcacgagattcgtaacgctgatgtggtgcaactttgccgcagccttaaccgtgatgtgctgtaccccattctggccctgaacagcagtaccccggttgatccgcgtcgcctgccatatattgattttgatatcagcgaaccggaggacatcgcggtatttgctgacgccatcccgaaactgtccgcagggatgccggtgccggtttcgtggatacaggaaaaactgaatattccgcagcctaacggtgacgagccggtattcactgtcgcacaggctgaaccgtttgtcgcgccgggtcaggcgtctctctccgcagaggatctaaagcatcctgagcaggacgcgccggatcaaatggccgctggtatcaggccggatgaattgcagaacgccatcgatccggtgctcaggccgctgattgccaccattatcaaagacgggccggaatccgccctgcaacaggccggagcactttacccggagatggatgatgcggcgctgattgatgttcttacacgggctatctttgtggctgacctgtgggggcgtctcgatgccacagaccgttga

SEQ ID NO: 382733 - DNA, 1332 bp, Salmonella enterica
atgccacagaccgttgatctggcgtatgccgcccgtctgccgcccaaagaggccgtggcatacttccgggctaaaggacacaacatcacctggaactggtatgaacaactgaccgacgcccacgcccgcgcttttactgtggcaaaggcggcgcgtcttgatgtgctgaatactctccgggaggaagtggacagagccattaatgatggtattacccgcgaggagttcacccggacgctgacgccccgcctgcaaaagttgggatggtggggaaaacagatcgtggttgatggtgacggcaacgcaaaagagatccaactggggagtccgcgccgccttgccaccatctacaacgtgaacacccgcacggcatataacgcgggccgttatgcgcagatgatgaataccgtggatgagttcccgttctggcagtacgtcgcggtgatggacagcagaacgcggcctgaacacgcaaaactgcatctgatggtttttcgtttcgatgatgtgttctggcagacgcattacccgccaaatggctgggaatgccggtgccgcgttcgtgccttatctgctgcgcgtatgaaatctatggggttgaaagtcagctatggcgcatcgtttgtgcatacccacgatgtggacgccggtgtcgatgaaaccacgggggagctgttccgtaccacctcagccacatttgacaatggccgcgtgaaaatgacgccggatgtgggctggtcatacaatccgggttcggcggcatttggtactgaccaggcgttgattcgcaaactggtggaaacccgcgatgcgcagttgcgtgagcaggttgtccagtcgctgaacaacagccgtgagcgtcagttgtcattttcactctgggccagacgtctgatggatacccgtcgcgctggtcacggtgttcagacgctgggcttcatgaccgagagcgtcgcgaacgccgtgcgtcagcgtaccgggaatgagccgtcacgcctgcttgtgatgagtgaaaaaagtctgatgcacgccgacagtgcgaaacaccacagaaccggtgtggcgctgctgccggaagatctgcaggtgttacctgcgctgatggccgcgccacaggcggtattgtgggataacgtgcataaaaacctgatctatctggtcagcgcccgcgatggcgtggcgaaagtagtagtcaatgccccctatgcaataaaacgccaggctgatctgcttgacgttctgatcaacgcataccggttgccagatattaacgacataaaatcagatattgcgggtggaaaaatagaagtactggaaggaaaagtggattaa

SEQ ID NO: 382734 - DNA, 471 bp, Salmonella enterica
atgagcattgatttagccatggtactggatattcgccgcattcagaccgcgtttaaagaactgggcgaaatggcgaacgacagcgacattccgcgcgttgctgcgggggcgttgttatcctccacagagcaggcgtttgaaaaacaggctaacccggtaacgggccagcactgggcgcaatggagtgacccttatctggcgtggcgagaggatcatggttatattccggggcaaatactgacgttgcacggcgatctggcccggagcatcacaacggattacggtccggattatgccctgattggttcccccaaaatttacgcagcgattcatcagtggggtggcacaccgggtatggcacctggcccggcagcgattaaaccccgtccgtatatgggtctggataagccaggacgccaggatatttatgcggccattgaaaaacgcgccaaaggcgctgtaaccccctga

SEQ ID NO: 382735 - DNA, 1101 bp, Salmonella enterica
atgaaacgaaacataatcgcaatcggcatcgctgtcctcagttcactctccatcactgatggctggtgtcagcttttgcccgctggtcatttcagcgcccgcgatggccgcccgttcgatgtggaaaccggcgaaggctggttcattgatggtgtaattgccacacgtctgattgatgacgttcgtgcgctcggtcaggacgtgctcattgattatgagcacaaccagttgcgcaaggacaaaggtctgacgccagatcaactggcggctgcgggctggtttaacgctgatgaaatgcagtggcgcgaaggtgaaggcctgttcattaagccgcgctggacggcagcggcacaacagcgcatcgatgccggagagttcggctatctgtctgccgttttcccttatgaccgcgcaacaggttacgtgctgcaaatccgtttcgcggcgctcactaatgaccccggcgcaaccggtatgcaaaaactggcggcgcttgcggccacgcttcccgactctgacaacccccaacaggagaagactcccatgaatgaaaagctgcgtcagttgctggcgcgtctgggcattaccgtgcctgaaaatgccgacgtgactgatgaacaggccacagcagctctgtcggcgctggatacgctcaaaacggatgcgggcaaagtggcaaccctttctgcggaactgagtgcagccaaatccgctggtgacagcgttgacctgaccagatacgtaccggttgaaacctataacgccgtgcgtcaggagctggcagaggccaaagcggaaggtgcaacggtcagcctgagcgccgttctggataaggccgagcaggaaggccgcatttttaaaagcgagcgcggttatcacgagcaactcggtaagcaaattggcgttgccgcactggcggcgcaactggagaaaaaacagccgattgcggcactgacggcaatgcagaccataacggtgcaagtcccggatacccggaaagaaggtctggccgcattgtcagccgatgagaaagcagcagctaaagcgctcggcatgaccgatgcggaatatcagaaactcaaagaggatgaaaacgcatga

SEQ ID NO: 382736 - DNA, 921 bp, Salmonella enterica
atgatcatcaccccggcaagtatcactgccctgatgacctccttccgtaaggattttcagggtggtctcacagctgcgccatcgcagtaccagcaaattgcaatgacggtgccctcctcatccaaatcgaacacctacggctggctgggtcagttcccgtcgctgcgtgagtgggttggcaagcgcgtgatcaagcagatgcaggcgcatggttatgtcattaataacaaaacctatgagggcactgtcggcattccgcgtgatgactttgaagatgacaacctgggagtgtatggccctatttttgcggaaatgggacgcgccgcaggtgtgcagccggatgagttgattttcagtctgctgaaagagggattcagccagccctgctatgacggacagaatttctttgacgccgagcaccctgtttacccggaggtggatggcaccggtgatgctgtcaatgtcagcaatattttcaaacaggctgaagactggaaaggtactccgtggtatctgcttgactgctcccgagctgtgaaaccactcattttccaggatcgtcgcaaagctgaactggtcactaaaaccaaaattgatgacgaccacgtctttatggagaacgaggtgttattcggtgccagcgcccgtcgtgccgttggttttgcattctggcaaatggctgttgccatgcaggcagatctgaacctcgacaatctctggacaggctggcagatgatgcgaggtttcaacgctgatggcggtaaaaagctggggctgaaaccgacgcatctggtggttccgactcagctggaaaaagccgccacgcagttgcttgagcgtgaactgatcaccacgcagaacggcaccgccagcaacgaaatgaaaggcaagctgaagctggttgtcgctgactacctgtaa

SEQ ID NO: 382737 - DNA, 426 bp, Salmonella enterica
atgtctgagcaacttaaagacaacgctggtactgattgcgggcaggctggcccgttgtgttgcggcgtggtggtcaaatgttcgcgcccggtgtatcgccgcgccggtttcgcgttcgttcgcggcaaaaacaccctggaaaatgtttcgccggaacaactggcgatcctgcgttccgaccctgtgctttcactggtatctgaagcgccagtgccgccggatgctctaccgggggggatggacgttctggatgtgggcggcctgaatgcccgtatccgtgacgcggtagccacactggataaggcaaatgttgaccacttcacacagagcggtgcgccccgcgtggcggcggtatccggtgcgctgggtgaaaacatctcggcggcacagcttaaagccgcgctggaagaggacgccgcagaatga

SEQ ID NO: 382738 - DNA, 426 bp, Salmonella enterica
atgacttatgccacagtcagcgacatgtgtctgcgttatcagcgacgcaatcttgatttgctcacaagggggaaatctgaaaacggtcagtctgatgatgctctgattgaaattgcgctgggtgacgccggggcgatgattgatagctacatttcggcccgctacacattgccgctcactgtggtgcccggtgcgctggcgcaacattgctgtgtcatcgcctggtatctgatgaatgacgtccgggctacggaacaggccacacagcgctacaaggacgcgattcgatggctggaaagtgtccgtgatggcaaaaccccgctgggggtggaggctgatacggcaacggctcctgaaagtgaaaatctggcgcaggtgcagtctgacccacctgttttttcccgtaaacagcgagggtttatctga

SEQ ID NO: 382739 - DNA, 537 bp, Salmonella enterica
atgatcgggaaaaccgaaaccgcactactggagcgcgtccgggcacttttcggggcaaccctgcggcaggtcgatactcatcccggcacctggtctgatatcgatattcgccggattctgaccaccccaccggctgtttatctggcatggctcggcttcggtgaagggagaacgcgccacgaagtggaaagccgctgggtgttttatgttgtcgccgaaatcctgaatggccgtgaatctgaccgcctcggaatctatcagatggttgaacggctgcttgccggaattaacgggcagaaattcggtgacaccaccggcatgagagccaccaaagggcagaacctctataccgacgcacagggtaatgccggggttgcgttgtacggtctgtatttcagcggcataacgccacttccgaagcagcccgatgaaagcagtctggatgattacgaacgccactggcagacctggaagtacccggacggaacgcctgagtttgccgcacacatccacgttaacgagaaagccaatgagtga

SEQ ID NO: 382740 - DNA, 177 bp, Salmonella enterica
atgagtgaatttaccgtaaaaccagcgccggataagtccgtgcgtgatccccgtaccatgcaactgcttggcgcaaagggagagagaaaaccccggaacgcatactggctgcggcgtgttgctgccggtgatgtggtggtggttgaaaccagaaagaaaggtggtaaggcgaaatga

SEQ ID NO: 382741 - DNA, 1500 bp, Salmonella enterica
atgagcgacatttcctttaatgaaatcccgacaaacctgcgcgttcctctgacgtatatcgagtttgataacagcaatgcggtaagtggtactccggcaccgcgtcagcgtgtgctgatgttcggccagagcaataccactggtgcgggggaaccaaataacaagcccgtgcgcatcttctctccgtcacaggcagctgcagcgttcggtcagggctccatgcttcacctgatggcgaaagcatttatagatattaatcgcgtggccgagctgtggtgcatcgcccagggcaacggtactggtgatgctgccgctgccacaattaatctgcatggcacggcaacggaaaacggcgtacttgtcacctacgtcgcaggcgttcgtctgcctgtggctgttcttaagggggataccggtgcggatatcgcagatgcgcttgcggcattaattaacagcaacagcgatctgccggtgaaggcggaggttgtcccggatgcgggtggtgacggtgctgatgattcacatgctgatgtgaagttgacggcaaaatttacagggcgttcttcggtgactgatgtgcgctggaactactatcgtcaggaagcgatccctggcgggatcgtgacgaaggtaacgtatccgacaggcactccgtccaacccggatattgccccggccatcgccgcgctcggtgaactccagtacaaatacattgttatgccgtatctggatgaaccgaacctgaatcttctgcgtactgaacttcaggagcgatggggaccggtcaaccaggctgatggtttcgccgtaacgtcttatcacggctcgctgggcgatatcacaaactttgggattagccgtaacgaccacctgattagctgcatgggagtcccgccaacgccgcaaccgcaatacatctggtgcgccagtatctgcgcggtagcagcacaggcgctgtcaattgatccggcccgtccgctccagacactgaccgttcccggactgatgccgccagaaatgagtgagcgtttccagtggagcgagcgcaatgctctgctgtttgacggcatttcaacgttcaccgttgatgacggcgatcaggtgcagattgaacgccttatcacgatgtaccgcaccaacaagtacggcgacagcgacccgtcatacctgaacgtgaataccatcgcgacgctaagttatctgcgttactcgctgcgcctgcgtatccagcagaaatacccgcgccacaagctggcagacgacgggacatttatctcacccggtcagccaattgtgacgccgaaaattattaaggccgagctgctggcgctgtttaccgaatgggaaactgccgggctggttgaagactttgatacgtataaagacgaactctacgttgtgcgtaacaaagacgataaagaccgtcttgacgtactgtgcggcccgaaccttatcaaccagttccgcatctttgcggcgcagatccgtttcatcctgtaa

SEQ ID NO: 382742 - DNA, 357 bp, Salmonella enterica
atggcaggaaatcagcgtcagggcgtggcgttcatccgcgtcaatggccgtgaacttgagtctcttgagggggcgtcattcaccccgtcaggaaccacacgcgaggaggttaccggctcccgcgtgtacggctggaaaggcaaaccccgcgccgcaaaagtggaatgcaaaattccgggcggcggtgatatcgggctggatgaagtgattaactggacggatatcaccgtcgagtttgaggccgatacaggagaaacctggatgctggcgaacgcatggcaggccgatgaaccgaaaaacgatggtggagaaatctccattacctttatggctaaacagagcaaacgcattgcgtaa

SEQ ID NO: 382743 - DNA, 438 bp, Salmonella enterica
atgcaaaacgaaactgaaatggccccggaggcccaggaactccacgacagcattatcagcgagctacaaaacaacgcgttttgcctgattgatggtctgccgttcggcaccggcaatgacaaagagatgcagtttgacgtcacttttcgcgagctgagtgccggtgatctgattgatgcgcaggttgcctcagaaaaagtggttatgacaaaagaaggcccggtgctggttagttctccggcactgatgggtctggaaatgctgcgtcgtcagattgcaaaagtgggctgcattaacggtccgctgccgctgcatcttctcaaatccctgtcccagcaggatttccagcgcctgtccattgcgacggaattgcgcgatatggcaatggccgcctccctgagtaatgaccgggggcgagtggttgcggtgtcggaatga

SEQ ID NO: 382744 - DNA, 2076 bp, Salmonella enterica
atggccgggcaacgtttacgcgcctccatcatcattgatctgatgggcaacattgcccagcgctcccgccagttcgcgggcaacctctcctcaatggcccacagcggccagactgctttacgcggattacgcagcagcgttatcggcgtttctgactccatcgacaggctcggggcatccgccaccggcacatttcggactctgaccgccggtgcgctgggcgtggccgggatgggctacacggccaataaactctttatcagcattgcctccacccgagaaaaccagcgtattgcgctgaactcactgtacaagggtgataaagagcacgccgacaaaatgatgcagtgggccatccagaacgcgaaggacagcacctgggggctgaccggtgtcatgcaggagtttgtttcgtctaaagcgttcggcatgagtgatgatgagacgaaaaacttcattaccatgcttgaggatcagggagcgctcaagggctgggatttaagtgcagcacagggtgcatcactccagctcaaacaaatgttttcccgtcagcaaatcactgcggcggacgctaacttgcttacagggtacggcattaacgtttatcaggtattggctgacctttggggaaaagatgtaaaaaaagtccgtaaacaaggtgaagaaggcaagctgggcatcaagtccatcatccagttatttcaagcgctgtccgatgaagccaaaggtgcacagaaaaatgccatgaactcttggacggggcttaccgcacaaatgggcgatgtgtgggaagattttgcggacaagctgatgaacaaggggccgtttgaacggctcaaaggccagttgcgcgatgtactgggatggtatgaccgggtaagtgccccggacgccagcggtctcagtgaacttgatcgcatcactgatcagcttgcgggtaatttcaataccgcttttaacatcattcaacgcacggcgcggcagacgtggcgctatcttcaggcggggaaaaacgccctgagctgggtcgatgagaatattgtcagccttaaaacgctggcaaaagtgatcggcggtgtctggctggcaaacaaagccctgcgtgcgggcgcggctgtcgttcgcccgacatggcgggccgcgacgtctccttaccgcgcttaccgatggtggcgtggccgcaacaatggcggcagcggcccggcctcatccctgccgggtatcacggctaatccttctcttatccagcatgtatttgtcactaactggcctgtgggtggggtcggtggtgacatggtgtatggcggcgacgggaaaggaaaacgtaaacgtggccccggtcgtggacgttcccgtaaggttcctgttgttccacctgctgcgccggtcgtcgccccccgtgccgggtttatgtcccggatgttcgggggcgcgggtcggatattcggcagcgtcggtcaggcaatcagcggagccggacgcactgcggggaaccttctcacctcagccgggaaagcggttgcaaacagcagtacaggccgcatggtggccggagctggtcgcaccgccagtaattttttaggaacaaccgggcatcttattgcaaacagtgccataggccgcgtggcgtcaaaaggtatgggcgcactgtcatggatggggaaagtcggtggccgtctgttctctcggcttggcgggcctctgctttctgcggcggctgtcgctcctgttctgcttgatgataacgtcacccttcaggacaaaagcagtgcagtcggtggcacagccggtgcatgggctggtggtgccattggctcacttgtcgggccgctcggcaccgtcgccggtgccacgctggggggcgtcgttggcgattatctcggcggcttcgtggctgacctttacagcaagtggaatgaaccgaaagaccagacgccaccgcctgagcagaaagtcagtgcaaatgcctccctgcgcgttgaactggcggacgggctgcgtatcaccagtacgacagtcaacgaggatggtatggggatggatgtatttaccggcaataactttttagcgtggtga

SEQ ID NO: 382745 - DNA, 1437 bp, Salmonella enterica
atgtttgaaagcactgtaaacagtattaacggcgtgcgtgattatcccggccttaaacgtgctgattcggggcaagggacatttcgcaacgtgccgttccttatcctgaaggaacaaaaacaaagcggtggacgtcgcattgttaagcgcgagtatcccctgcgggaaacgggcggcgtgaacgatcttggtcgaaaacttcgtgagcgatccttttccgcctgtgtgctggggaaaaacgcagacaaggtgaaagacgcgctgattgaagcgcttgacgcccccggcgcgggcgagctggtacaccctgattttggttctgtcagcgtcatggtagatacgtgggagtgccgcaacaacgccgacgaatcagactattttgaatttacgatcaccgtttatcctgcggccaccgacaacgcaccggaatcacagcaaaataccgctgcggccgtgagcagccagaaaaacaaccttttcggctcgctgggcgacacgctcagtgatgcctggcagtacgtgcaggaaggcaccgcaggggcggcagctgtactcgatgccatcaccggcgttgtggacgatatctatgacacggtggagaacgtcggcgttttgcaggatgttaacagcctgctttcatccctgtctgcgctgaaagggtcggtttccgggctgcttaatcagcccgcaatgctcggggccaacgtgctgggggcgctgtccggcctgtccgatattctggatgcctcgacagcgttcagcgcatacggacgtcttaatgtacatctgaaatcgcgccagtcttccattgatgtaaaccataaacccgccgctgcggtgggcaacgtggtcgcattgttccacgttgccggaaatgcgtcgctgattagccaggcggctgcggccagtggcgtactgacacagacgattgagagcagcaacagtgagagcacaaccccgcgttcgccggaaatctccgccagcgtatcccgcaccagttcggtttcatcaccggttacaggcagtcagttaaacaccataaccaccatcggcaacagcgcctccgtaatatcaacagatgaagtgcaggccgaaagccacccgatttttgagagctacacggacattgagcgtgtggcgctcgaaatcggggagcagatggacgcagccgcattactggccgcagattctggtttcataactgacagcaacggcattactcacatgcggttgctgaccgtttacgacttacgcaatcgcgggctgcgtctgccgggtgtgaccacaacaacgctgaaacgcagtgaaccggcgctggttgcgctctatcgggttacgggcaacagccgacagtggcagcgaatggcccgcaggaacggcgtgaagaatcctttatttgtccccggtggcattgaggttgaggtgattgatgaataa

SEQ ID NO: 382746 - DNA, 1131 bp, Salmonella enterica
atgaataacgttgaactgaaagtggacgggaaaatattctcgggctggacgtccgttacggtcaatcgttccattgaaacaatggccggatattttgacctgggcgttaacgttcagacctcaacagacctttcctcactggctccgggaaagccgttcacgttgtccattgacgggcagacagtcattaccggttacaccgatggccgtcgccgccagatgggtgctgacagcatgaaaatcaccatcgcaggccgagataaaacggctgaccttattgactgcgcggcgatctataagggcggtcagtggaagaaacggacgctggagcagattgcgcgtgacctgtgccagccctacggtgtggtcgttcgctgggaacttaccgatgcagaatcagcggccccgtttaccagcttcacgcttgatcattccgaaaccgtatacgaagcgctgggccgcgcagcccgcgctcgcggggtgctgattaccagtaatgctgctggcgatctggtctttacgcgggccgatgaatcccactcagacaggctcgtactcggtgaaaacctgctgtcggttgattttgatgaagactatcgcgatcggttcagtgaatacaccgtcaaggggcatggccgctcaaacggcaaggtcggagacaccgttgatgcccgcaccatcgccagccagaaaggcacggccacggacagcgcgatcacccgttatcgcccgatgatcatccttgcagacagcaagattgatgcacaaagcgccacggcccgcgcactgcgtgagcagcgtcgccgcctggcaaaatccgtgacctttgaggcgcaactggacggctggacgcgttccaacggtcaaatctggatgccaaacattctggccgaaatcgacgcgtcgaaatttgccattcagaccggcccgctgctggtgagcaaagtggtgctgacccttgacgatcgcgaaggtgttaaaaccacgcttacgctggccccgcgcgacggtttcctcgttcctgtcgaaaaagaccgtaaaggcaaaagttcaggcagtaacgccagtgccggtggtatcgatgcgctggccgaagaatattaccgcaatcacccggagaaacgcccgtga

SEQ ID NO: 382747 - DNA, 585 bp, Salmonella enterica
atggacgaatctgtatttggtcgcatgatggccccgtttatgcgccgtgttcgtctgatgctgggccgtgccgtggtcaatgtggttaacgatgcgctgaaggcacagaacgtgcagatcagtatgctggaagacgaggagccggacgacgtggaacgcctgctcaattacgggcaaatcagcgtcccgttgccgggttctgaggccattgtcgcctgcatcggcgcacaacgtgatcatgccgttgcgctggttgttgaagaccgtcgctatcgtcctacagggctgactgccggtgataccggtgtgtatcactatgaaggccaccgtatgcgcctgacgaaagatggacgactgattattacgtgtaaaaccgtcgagatttatgcagacgagagcatgacggtggacacgcccaaaaccatatacaccggcgacgtggagatacaaaaaggactgaacgttaaaggtaaaagccagtttgacagcaatattgaagcaccggacgccatcattaacggcaaatccaccgacaaacataatcataaaggcgacagtggcggcatgacggggccgatgctatga

SEQ ID NO: 382748 - DNA, 450 bp, Salmonella enterica
atgacggatttagccattgtatggaaagacggcagcggcgatatcgctcaggacgggatcgacatgctgaccgacaacagccttacgacagaggttgttatttcgctttttaccgatcgccgtgcgcaggattctgacgaacttcccagcaacgatggcgatcgccgcggatggtggggagacagttaccgcagccgtcccattggatctcgtctgtggttactttcccgtgagaagacgctcccatccgtactggagcgtgccaccgattatgcgcttgaagcgctccagtggctgaaagatgccgggcgcgtcacccgcatcgcagtcggggccagccagcccgtcagcggtacgctacagctggatattgcgctgacattgcctgatggttctgttgagccgttcacttttaaaactgatttaaacggggttttaaatgccatataa

SEQ ID NO: 382749 - DNA, 1083 bp, Salmonella enterica
atgccatataacgcgccgggactgtctgacttaatagcccgcacagagcagaacattgaacagcgactgcccggaacatggccgcaggccagagagaagacgctgagtgcgctggcctatgctcaggccgggctggccgctggctgtcatgagcacattcagtgggtaagccgtcagatcatccccggcagcgctgatgagactgaactgcttgagcattgtcagttctggggcgttcgtcgcaagcaggcggcgcgggccagtgaagagatcaccgttaccgttacggatgcggtgaccattccggccagaacgcgctggcaacgagctgatggtgaggtattcgtcagcatggaagacgccagttctggcggtgccggtgatattgccgtgaaagtatcggcagtcaatgccggtaaaggcggtaacacccctgccgacacggttctttcccttattacgccgatggctaacgttctgcctgatgctgttgcaacaaagggcatcactggcggtgctgatattgaaagcgccggagagttgctggcgcggcttgaatatcgcgttcagtatccgccgttcgggggcaatcagtacgattatgtacgctgggcgcgggaagttccgggcgtaacccgcgcatggtgcctgccaacatggaaaggtggcggcacggttggagtaacgtttgtgcaggacaataacgacgatatattcccgactgaatctgatgtgacccgtgttgatgattatatttcaggccatccagatccagtaaccgggcttattgtcggaaaacctgacggaataatcgttacgacctttgcgctgacacgaaagccggtggatatggagatttatatttctccgaatacagaagcgatgcagaaagcggtaaggcagtcgctcacggctttattttataacgaggcatcgccgggcggcgctatggctccatcacatattatccgttctgttgccggtgtcacagggctgaatgattttgacgttcgtaagccgcttgatattcagtattctgccgcaacggaattactggtgccgggggtaattacgtggaaataa

SEQ ID NO: 382750 - DNA, 546 bp, Salmonella enterica
gtggaaataaccagatccccttatcagggagcctttctggctttattacccaccggaaaggcatggaataaacagccatccggtacgctcgggcgtttatcgtgggcgctcagtgattctgttgaacaggctgactctgccgcgacgcagttgcttaaggagcgttttccctccacagccgtcatgttgcttgaggactgggaaagtttcctcggtttaccggactgtacatctgaaagcggcactatgcgtgaacgacagagcgtcgccgcaaacaaaatgcggatggtgggaagcctcaaccgtcgtttctatgaatggctggttgcgcagtatggatacagggtccgtctgaccgattctgacgaggggcaatatacaacggttgttaatgtgcttaatagtgtcagttaccggaatgccacagtgcttgataacgttctgacgcctctgcgtgtttatgattccggggcgctggaatgtttgctggaaaaatacaaaccggctcaccagatttataaattcatctacgctgatgaggattaa

SEQ ID NO: 382751 - DNA, 519 bp, Salmonella enterica
atgagacattttacaaatttcactaaaacaacggaattaacacctgttcagcaggaattatcagagaactgcagtatccagtttattcatgatgaagcaggtgttgactggtatatattacaaaaattatttcagcccgacacactgaaaatgcagtataacaaaacaggactgattattgctgcggataaagatgcgacaaagctattcccgctgaattgttctgttgttgaatttgctgatactgatattcccgatggtttccagactggtaattttacctacagcaacggcgttatcgcccctgttcagattgattacgttgctttagcgacggcagagcgtgacaggcgtatgacgtcggtcacatctaaaatcaatcggcttgtagaagctcaggacgacggggatatcactagcgacgaactgacagaacttgccactttacgcgaagttcgaacaaaactgcgacgtctggatcttagcatggcccctgatattgactggccggatatgtaa

SEQ ID NO: 382752 - DNA, 567 bp, Salmonella enterica
atgctgataggctatgtacgggtgtcaacaaatgaccagaacacagcattacagataaacgcgctcgagtgtgcaggatgtgagcaggttttcgaagacaaaataagcggaaccaaagccgaaaggccgggactaaaacgagctttaaaacatcttagtcatggcgacacgctggttgtatggaagctggatcgtttggggcgaagtatgcgacacctggtgcttctcattgaagaactacggcagaaaggaatatcgttccgcagtcttacagatagtattgacaccagcacaccaatgggacgttttttcttccacgttatgggagcgcttgctgagatggagcgagagcttatcgttgagcgcacacgtgcgggacttgctgtggcacgaaagaaaggacgtattggtggaaggcgtcaaaagttaacacttgaacagtgggagcaggctgggaggctgctggcaaatggtacatctcggcgacaagttgccctgatttacaatgttgcaatcacaacattgtataaaaaattccctgcctctgtaatacataacattggttag

SEQ ID NO: 382753 - DNA, 714 bp, Salmonella enterica
gtgggaaaacaaaaaaaatcacgcattctgacaaaaccctgcattattgagtatgacggtcagatcgtagggtatggctctaaagaattgagagtagaaactatcccttgctggctggcacgaatagttattgcaagtaagcattactcacgtcgctttgtgaataactcatatttgcaccttggtgtgttctgtggtcgtgatctggttggcgttctacagttcggttatgcacttaaccctaacagtggaaggcgtgtggtacttgatacagataatcgtgggtatatggaactgaaccgaatgtggttgcatgacgacatgccccgtaattctgagtccagagcaatcagttattcactaaaaacaatcaagttactccacccatctgtggagtgggttcagtctttcgccgacgaacgttgcggaaagtctggcgttgtttaccaagcatcaaactttgactttattggaagtcatgagactacgttctacgaactagatggcgactggtatcacgagatagctatgaatgcgattaagcgcggaggaaaacgaggggaatttctgagggcaaataaggaacgtgctgttgttcacaagttccggcaattccgttacatcaggtttctgaacaagcgggcaaggaaacgacttaactcaaaatttttcaggattcagccataccctaaatcagaacattcaggccaatag

SEQ ID NO: 382754 - DNA, 165 bp, Salmonella enterica
atgtactggaccgtgagctggtcgggagagcaatgtacgggaaagagtgcaatactgtcattgatggcaacagatgatgagcgacaaatggaaaaatacagggtgttggtaaaccgtgtggacacatcaaaacctgactggcctgacaggcctgtaagccagtaa

SEQ ID NO: 382755 - DNA, 276 bp, Salmonella enterica; identical to SEQ ID NO: 36843

SEQ ID NO: 382756 - DNA, 1272 bp, Salmonella enterica
atgaaaatgatagttatcgccgacgattttaccggatcgaatgataccggcgtccagttggcgaagaagggggcgagaacggaagtcatgttgagcgcgtcgcaaaaaccgtcccgccgcgccgatgtgttagtcattaacaccgaaagccgggcgatgcccgcagatcaggcggcatctgccgtttatgccgcgcttttcccatggtgtgagacatcgccagcgccgctggtgtacaaaaaaatcgactctacatttcgcggcaatatcggcgccgaagtgacggcggccatgcgcgccagtcagcgaaaactggccgttatcgccgccgcgatccctgcggccggacgcacgacgcttgaaggaaaatgtctggttaatggcgtcccgctactggaaacagaatttgccagcgatccgaaaacgcccattgtctcttcccgcattgccgagatagtggcgttgcaaagtgagatccctgtgtatgaagtctttttgcaggatgtccgacgcggtgggttaagcgccttacttacggcttatgcggctgagggcgaagggattatcgtcgtggatgcggtggaagagcgggatctgacgttgattgcgcaagcggcgtgcgaacaaccgtcgatgccgctgctcgtcggcgcagcgggtctggcgaatgcgttgccggttgaactttttatgcaagaccggcagcggctgccggtgctggtggtggccggttcgatgagcgaagccacgcgacgtcaggtggataatgcgttgtgccggggacgtgcggaggtcgtggatattgatgccgcgcgcatggtgtcggatagcgcggagcaggaaatcgcgtctgtcgtagagcaggcctgcgcgctgttaagtcagcatcgacatacgattttacgcaccagccgtcgcgcggaagatcgacagttaatcgacgcattgtgcgaaaaatccgcgatgagccgtcagcaattgggcgagcgactgagtcagcggcttggcgtcgtcacgttaaacattatcgagcaggcgcggattggcgggctgtttctgaccggcggtgatatcgctaccgccgtcgccggcgcgcttggcgctgaaggttatcgcattcagagcgaggtggcgccctgtattccctgtggaacgtttgtaaacagcgaaattgacgatctgccggtcattaccaaagcgggcggattcggttcagacagtacgttgtgtgacgcgctttattatattgaggagatgtattgtggagactaa

SEQ ID NO: 382757 - DNA, 1134 bp, Salmonella enterica
atgcgttattttttattggtgttgatgatggtttgttgcaatttatatgcatcagatatgttcccgctgaagcctgatgaaaatccacgcggcgctattgcattaacgctacgcgaggaggttgggctattaaacgcccgcttcgatatcaagcggattgaaatcaacgagacgcgcgaactggcctatttttgcggcctgctaaaagatactgacggtcagtatattaaagatgaagatgataaatattatctcttcgatcgtattctgctggacagcggtaccgaagggtgggtgagtacggtttacctggatgaagagtttagcgcgccggagcaagcgaagtgccactttgccgggaatgttgacctgaagtcacaggaattacgcgcgctggtgaaacagtacgggcgcatcgcagcttgcctgccggtagaaaaaggcgatccgttgcgcacgcaactgcttgacgcggtacgtgaaaactacgttggcgatcttaatcgtaaaacaacgctgaataatacgcctgtgccatccttcgtagtgacgcagctatgcgcggcgcaaaaatatgcctatttttgtggcgaacctgccaatgccgatgctgactggtatagtcaggatagtaaaaagctggatgtggtattgcagaaagacgctaataatacatggtggttgcccgttcctcaatttcagggcattagtcgccaaagctcactggcctggtgtaaccacagcaccgacattttgccagtcaaaacggttgaagaaatggcgaaaaaacggcaacagcgctgcgtgcgggaaggcgataccgtgtcattgcgcggaatactggcagagcaaaaaagcggcgcgcagcgttattgggtggttaaactcgaagaaccgttaacctgcgtccaggatgccgacatgcagacagccgactggaatgggcaagtgcaactcttgttgagcgatgagatcatagaaagagttaaagtacagtacggcgacgatttgttaaaccaagaaattgttgtcacaggtgatgttttactggcattaagttcagatcactacacgccactggtactggagaatattgtgaaactcatgcccgtgatggaggggccgggctggtga

SEQ ID NO: 382758 - DNA, 933 bp, Salmonella enterica
atgaaaaagatcgcgttcggtttcccgttattgctggcagtattgcctcatccggcgcaagccaatgaggccgtggcgaatagttcattacatttactggcacagagcgatattcaactggcgaaagagcgtctgttaattgaacgcgatcggattaatgccgattatttgtttgtgaatccgaccgcgcaggatattaccgttcctgtcgttttccccatgccgccgctgtcatttagcgacgttgacgaagccggtgaagattacatccccggcatccgcaacattaaaatccgcgtcgatggtcagatcgtgaccccgcaaccacgctggaccgtagtactgaatgctccgcaggaagagatcaccgataaacttcagcaggctggctggacggtggagcaactgatcgccgcgctaagcgatggtgaattttcgcctccgacgaatctcccggcgctgccgccggaatggtttaaggataatcagccgcagtttactatccagcgcaacttcatctggcagcagacctttccggcggggaaagcggtgactatccaccaggtttacaccccgagcgtgtcactcagcgcgctaatgtcaacggatgagctggacaatgacaacacctgcccaacagcggaaaaccgccagcaaatacagcaggcgctggatcagttaatggcgacgcaaggcccggcaggcgctttggggcaaaaccggatggatgtggtgctaaccggtgatcccgcgtggaaagagggggacatcggcgagtttacgctgcgccttcacggcgacgtgatcaccacctgctttcagccgccgctgacgcggattaacgccactacgctggaatttaagcagaaaaatttccggcctgcgaaaaatctggcagtgacgttttattctttatcatccatgtacgaatga

SEQ ID NO: 382759 - DNA, 309 bp, Salmonella enterica
atgctatgcggcaacgctgatgcggcggctaaattacagtatttacacgttactaacggtgggatgatggcattttacgatgacggtaacgcaaaaatgtgcgcgcgctgcgaaccgatggtgcagaatctcaaatcaatgaataacaaggcgccttatgcccgttggaaacaaatgggggatgtcataaaactgaagtcgccaaatggcgagagtgattatgaattttaccagcagggtaaaattctttctacctggtggatttttaattataagacgcttcatgcgctcgtggatttgagtgagtaa

SEQ ID NO: 382760 - DNA, 1089 bp, Salmonella enterica
atgcggtattatttattcttattattaataatttgccaaaatacatttgccgaagaaataaagccattgccacaaggtgatacctggcgcaaatatattgccctgtcgctgcgcgatgaagaagggcttgaggatgggctgtttaacctgcggcggattgaagcaaacagtagcattgcttacgtttgtggcttaataaaagacaaaaacgataattttctgacggatgggcaaaatcaatatcatctttatgaccgcgtgatggcgataggttatcgctggagttgggtcagcgttgtgcgctttgataaaatcattgcttcgccgcaggatgttcactgccattatggtaaaaacgtaccgttaacgtctgcgctcttacgtgagcaggtcgccgcgcaagggcgcaaaaatatttgccagccggtaaaagccagcgacccgctgcgaagcgatattctgaacggcctgcgcgccagttatattggcgacagcaatagcttaacccttaacggcccgctgccgacggtaaaatttatcgtcgaagacctttgcgccacggaagattatgcttactttttgggtaaggcgacgggagataaaacgagtttttttatccatgatgacgccaataatcggcttcgcgtcgtgctgaaaaaatccccggatggcatgtggcgcccgcagccggaaaacaacctgctgacacaacaatctaaagtgagcggcgggtactgtagcgatggcacgctgcgagaaaccgatttagcgcaactggcgcaggcgtgcagggtggagggagacaccgttaacctcaccggcacgcttcgccagcagggtgacggcgagtccgcttactggaccctgaccccggataacccccttgtctgcgtgcgcgatgccaataagcagcagcctggctggaaccagacgatgcaactggtgctaaccccacaagagcgggaatcgctcaacaatttggtcggtaaaaaagtcagcgtcggcggcgatatttttctggcgctgagcgcctcgcatcatacgccgctgttactggataatatttttcgcttaacggaaataaagtga

SEQ ID NO: 382761 - DNA, 972 bp, Salmonella enterica
atgacatattttaaatggctgagcgtactcctgtgttttattaccagttaccatgcttatgcaaacgactcggcggtcggggaaaccaatggttccattgaatttctgcaacaaaatgagatcagcatggcgaaagagcgattgttgattgccagcgatcgtatcaatgtcgattatgtatttattaatcattcggcgcaggatattaccgttccggtagcctttccgatgccggctatttcccaacgatatatgggagatagtacaggaggtattgccaactttaagatcagcgtggacggtaaaccggtgaaaagcgagtcccgatggcgagtcatccatgacttaggcggtaaaggtgaagaagacattacggcgaaactactgcaaaccggctggacgatcccacagctacgccatgtcctcaatcgcgagggcaaagcctctattgaagaaggatataaagagggaaaacagcaattaccgtcagagtggtttgatgacggctatctgaatattgccgttcaacaatattttatctggcaacaacgttttccggcgggcaaggagatcgttattcaccactcatacacgcccagtaaatccaccggcgtgcctgacagccttgactgtcttcttggtgatgagctcggcgatcaatgcctgaccgccgccactcgcaaggcgttaaaacagctggatgcaggaataaaatataaaaacgaagacggtagcgcgaatatcggctggggctatctgggctatattctgaaaactggcgctaactggaaagagggtgtcattggcgactttaccttgcgcattcataagaaggatgagactgaagtggttgtcccctgctttaattacccgctaaaacaaattgatccgttaaccctggagtttaaacaaaaaaacttcaagcccgatgaaaacctggatatccatttttattacgattcttcgctgtaa

SEQ ID NO: 382762 - DNA, 618 bp, Salmonella enterica
atgaatattgcattcaggaaaattgaatcagaccctaaagtcgcaacatttcgcgctctcagggcaagtcggatagcatatattatccttgttgtgtctgttcttttttttgcgttttcatttatgttttcaaccaccccggaacaagcaaagatggggatttctcaaaatacatcagcgctggcgctgatggcaaagattatccctgaaaacactggcggatttataccagtactttcggttttactaagcatttctgctattttaacttctttttttggtatttatctcggtttttacgatgcattatcaggaattattattaatattgcagaccgcttcattgtacgtggtaagaaatttaataattttctcccttatttggttacacttactgcgatcgtgcttctttggggatgggttgttgccgatgtgtctacaatggcattactccaatggactgtgggaacctttggattagtttcttgccttattccgtgctatctgatctggcgagtgccatctttacaaaaatataaatcccctgcggtaattttcgtatcactaatgggctttatgctggtggtatcgccattatttaaactccttgaaaaataa

SEQ ID NO: 382763 - DNA, 777 bp, Salmonella enterica
atgagcgcattatttacaggtaaaaaattgttagtagtaggtggtaccagcggtatgggtttcgaaacagcgaaacgggtattgaaaaacggtggtagcgtggtgctgattggcaatcgccaggacaaagcagagcaagcccgtcaggctctggcgacagaaggtcaggttgccattattgttgccgatttgatgacagaagaaggaatgaaacatgtgctggataccatcaatgcggagcataaagacgttagcttgctggtgaatgcggctggcgtgttcttcccaaaaccgtttaccgagcacgaaccttccgattacgacatgtatatgagcattaaccgtgccactttcttcattacccgtgatgttgtgcgcaatatggttgaggcaggtattaagggatctatcgtcaatattggctctatgtgggcacggcaagctataggcgctacaccgtcttcagcttactccatggcaaaagcgggtcttcatgcgttgactaaaaatctggcgattgagttgggcagcaacgggattcgtgtgaacgcagtttctcctgcggtcgtacatacaccgatttacgaaggttttatccctaaagacgatgtgaaggatgtaatgaacagcttcgatagcttccatccgattggtcgtgtagggacatcggttgatatagctgaaacggtagcattcctgctgtctgacaagacaggctgggttagtggcgcgatttgggatatcgacggtggtgtgatggctggtcgtaacgcctga

SEQ ID NO: 382764 - DNA, 1344 bp, Salmonella enterica
atggtttgtgacacaaaacataacattgagggcgatttaattccgagctggggcaaagacgcactttacaagctaaaagcaggaaaggaacgttatcaaattgtactcgccatgaatcaggataatttaactaatgacattggaacacacgctgccacgctgccagtagctgcgcagaataataatatcattcgcttatctttagctcaggcgcttgccggggctaactctgtagtcttctacgctaccggtgccattgttggtaatgccatagctcccagtggtgctctgtccacactccccatcactatatttgtcctgggcatggccgcctgcattcttccttttggcgcactggcgaaaaaaaagggacgtaaagccgcatttatggtcgggacgggggccggagtgattactggcttgattgctgcccttgcggtttttattagttcatttttgctattttgccttgccgctttcctgggaggggcttacgctgcagtggcacttagttttcgctttgctgcaacggatggagtgacatccgaaaggcgagcgcgtgcattatccctggtaatggggggcggtgtggtagctggtgtcattggaccaatgctggtgacgggaacaatgaatcttctgccaccacacacatttgttattacctttatagctcaggctctggtagcaaccatttcagctttcattcttaagggcgtaattcctgccgagccagccgtggcagccaaatcaggagggcgttctctgaaggaaattgttcggcagccgggtttcctgaagaccgtgtttagcggcgcggttgcgtatatggtgatgaatttcctgatgaccgcagctcccctttcaatgcatatgcatggaatttctcaacaagcctccaatctgggtattcaatggcacgttattgctatgtatgggcctggattcttcaccggtaggttaattaaccgtttcggcgcgctgcggatttccgcaactggattgcttattacggcaggttctgttcttgccgggctcagcggaacagatatcttccactactggctctctttgatattactgggagttggctggaattttggctttaccggcgcttcagcgaagatcattgattatcatcgccccgaagagaagactcaggtgcagtccctgaatgattttgtggtatttggcgtaatgattgtcgggtcgttttcatccggtgcgttgctgaatctttatggctggaatgccgtattatgggggtcacttatccctgttggcattgcatttctgtgtatcttaaaaaggagtcacaagacagttgtcgtaaagcatgagtaa

SEQ ID NO: 382765 - DNA, 144 bp, Salmonella enterica
atgttgtccagtttgattaaccggcaaatcagccatttgcatcaacctggggtgatgttcataaaaaaggccgctttcgcggcctgttgcatcaacgacgcgggcttatttgcctttgttttccagattctcaacctgcggtag

SEQ ID NO: 382766 - DNA, 369 bp, Salmonella enterica
atgaaaaagacactgattgcactggcagtggctgcatctgctgtggcatccggctccgctatggctgcgtggacaccagattttgaggggaacggcgaagtaaatcttgggggtactttaacccccggagctaaaagtggcgtatgggaagcccaagttggcctaggaaatcaaggtttgaacggaagtattgacaaaggtagtaattctgccagcattaatgtttccgaatccattccggtcattggtattcgtactaaggaaggtgcgaataagcaggtcatttcttcccaagttgactcgctgattaaaatttcgcggatctgggccgatttttttcccgcaaacacatcgaatcagcctatttag

SEQ ID NO: 382767 - DNA, 504 bp, Salmonella enterica
atgaagaaaacaatgatggcgacaaccctggtcttaagcgcgctctgcacgcagtctgcactggcagttgaatacagtgagaagacgcagtacctgggcgtggtgaacggccaggtgtcgggcaacagcgtggtgaaggtgacgcgcaccccggcggacccggtgctgtaccggacggagagtaacggtccgctgccggagaccctggtcatccgtaatgcggaaagccgtccggcctccgggaacatggtttatatcacggtgaaacggaccctgggggacggccgggatgcacggctcacgctgaagaccaccctgatggtggacgggcagcgggcagccattacagctggtcagcagggagaggatgtggttatccgcgtaccggcggtgacccggcaggtggagctgagaagtgacgcgccggcggagctggaggtgccggcgaattaccgggggaatgtgcaggtgccggtggaagtggagggagtaagcgccggttaa

SEQ ID NO: 382768 - DNA, 2439 bp, Salmonella enterica
atgaacgggaataacgtaagacagccagcctgccagatgtcttttcgccatgccgtgctggcatttgcgatagcggttgccctgggcagcggtaccgcaagtgccggagagaaactggacatgtcctttattcagggcggggcggggattaaccctgaggtctgggcggcgctgaacggagattatgcgccggggcgctacctggtggacctgtccctgaacgggaaggatatcgggaagcggatcctggacgtaacaccacaggacagcgaagcgctgtgtctgtcagaagcgtggctggcaaaggccggaatttatgtcagcgcggagtacttccgtaagggatatgacgccacgcggcagtgctgggtgctggcgaaagcgccggcggtgaaggtggactttgatgtcgccacccagagcctgtcgctggccattccgcagaaaggactggtgaaaatgccggagaacgtggagtgggactacggcacggaggcgttccggatgaactacaacgcgaacgccaacagcgggcggtacaacacgtcggcgttcggctcagcagacctgaaggccaacatcggtcgctgggtggtgagctcgtcagccacagccagcaccggggatggcgggagcaacgaggccacgataaacatgttcacggccacccgggccatccgctccctgagtgcggacctggcggtcgggaagacctcgaccggtgacagcctgctgggcagtaccggcacgtacggggtgtccctgtcgcggaacaacagcatgaagccgggcaacctggggtataccccggtgttcagcggcattgcgaacggtccctcaagggtgaccctgacccagaacggcaggatgctgtactcggggatgatgccgtccgggccgttctccgtcacggatgtgccgctgtacagcagcggggacgtgacgatgaccgtcaccggggatgacgggcgggtgcagacgcaggtcttcccgctgtcggtaatggccgggcagctgagtccgggacagcacgagttcagcgtggcggccgggataccggacgacgacagcgacctggagggcggggtgtttgccgcatcatacgggtatggtctggacgggctgactctgcgcacgggaggcgtgttcaaccaggactggcagggcgccagtgccggtgcggtactgggactcggttatctgggggcggtgtctgctgacggcgcttatgccacggcgaagtaccgggacggcagtcgcagcgggaacaaggtgcagctggcctggaacaaacagctggagctgaccggcaccgggctgcgggtgagctggtcccggcagagtgcggaatatgaggacatgtcctcctttgacccggctgaaacatggctgcagcagaaccaggggcgccggacccgggatgagtggaatgcgggcatcagccagccggtgggcgggctgttcagcctgtcggcgtcgggatggcagcggagctattacccggcctccacgaccggcagttaccggtaccgggatgataacggtaaggagacggggattaccggctcgctgagtacgcagataaaaggcgtcagcctgaatctgggctggtccggctcccggaacatgaacggggagaacaactggtcggcctccgcatcggtgtccgtgccgttcaccctgtttgagcggaagtacagcagcagcacctcggtgagcaccagtaagggcggtggcaccggcgtcagtaccggtgtctccggggctctgaacgaccggttcagttacggtctggggggcgggcgcgacagtgacggcggtgtcagcagttacctgaatgccgcctacagcggtaaccgggcgaacctgagcggctcggttaaccactcgtccggttcgggcaccagtggctcggtgtcagccagcggttcggtactggcggtgccggcggcacgggacattatgttcagccggaccaccggcgacacggtggcggtggtgagcgtgaaggacacgccgggggtgaaggtgatgtccggcaatgaaacgtcggacagtggcgggaacctggtggtgccgctgaacagctatgactggaacacggtaaccatagatgcgggcacgctgccgctggacacggagctgtccacgaccagccggaaggtggtgccgacggacagggcggtggtgtggatgccgtttgatgcgctgaaggtgcaccgttacctgctgcaggtgaggatgccggacggagcctttgtgccgggcggcacgtgggctcgggacagtaagaacacgccgctgggcttcgtggcaaacaacggcgtgctgatgattaatgcggtggaccgccccggtgatatcacgctgggacagtgccggatacctgcggtgaagctgcaggagacagagaaactacaggagattaagtgtgattaa

SEQ ID NO: 382769 - DNA, 582 bp, Salmonella enterica; identical to SEQ ID NO: 143943

SEQ ID NO: 382770 - DNA, 1188 bp, Salmonella enterica
atgtccacccccaaacgcttccgttttactaatcagctcattaaatccctgccccctaacacatccgatgcacgcagtaccgatgccgaatacagcgacaccgagatttccggcctcaagtgtctggtcagcagaagagaaggtcgtaaaaagtttttgctacgctacctttatcatggacgaaaacgcgccatcgccattggtcactggcctgaagtggacgtcaatcttgctcgtcagattgccatagaacacaaacgttcccttgccaccggcactgaccctaagcaggagcgtgaaaacaagagaatggagctgacgttcgatgaactctttaatcagcattatctgccatgggcaaaatccgctaaacgcagttggggaaaggatgttcagcgctaccgcgatcatatccgtcccgccattggtcagaggctgctgagcgatatcacaccagcgagcattctgcgccttcagcagaagttaagtacttccctgtcagcggctacctgtaaccgtgtcatcgtactcattaaagccgtctttacatgggccggaaggcaaagcatgacctctgtccatccggcaagggtggtacagctactcagggagaacaacgcccgacagcgttattttaccgaggacgaaattcgtcgtatttttctctccgccgataacgataccagccctgtagctgcccgctatgtcaaactgctgttattgaccggccttcgccgcgatgagctgcgtctggcaaagtgggagcatgttgacccggttaaacgcaccctgtggctccctgaaaccaagaatggctatggacggattgttcaccttaactcactggcgatggacgtaatcagaacgctgccaacgcagcggggaaatccgtggttgtttattggtaaaaaacagggaatgccgctgagtaacccggttaaagcctttcagcgtatcgtgcgtcgggcgggaattttcgacaaggaagtgtgtattcatacctgccgccattcggttgccgccctcatcgtgtcctacggcggaacactgtatgacgttcaggctcaactggggcaccgcagcagtcagtcttcacaacggtatgcgcatcttcatcctcagcgcttacagaacaccagtcagttactggcggaaaggataacggctcagttaccttccttgcgataa

SEQ ID NO: 382771 - DNA, 351 bp, Salmonella enterica
atgactgaattctgcgaattagatgaaaatcacacttttcctggtgctattacaggctgtgaaacttttcgcccaccacttacgccttatggtcttatcatgacgcaggctaaatgcaatttttatggtatctgtagggaagtgaccgacggtaagtatcctgaattaaaagcaatgattaaccggaatgaaaacattcgtttcttcaccagttatattttcaaaggtaacgttcgttatgattatcttggcgaatttccaacactatcaatcgatcaggctcgcaataaagcccgatatcttgccagaagtaatgaggatgagaccgattatgagcatatcccgttctga

SEQ ID NO: 382772 - DNA, 1932 bp, Salmonella enterica
atgaataataaatcaacaccatcccccttgactacaacgacccccgctcgttttgcctgcaggaaattaaatgcatttctggctcgtcgtgctcttcatatgaaggtggtaagaaaaaacctgaacaaggctgctgcaatcgacatcgatctcgatgacatttctaagtgcggatgccgtgatggtctgcctgaaggctttgtcaatactgcaaaagggcttttctattatgaaggaaaaaaatggtaccagttaagctcgacccccattctccctgtctacaggcattattctgattgtaaaacgcgcaatatgggcgtcgagttgatgactatcaaccatgctggagagttcgcctgtgctgatgtctcattaagtgatgcaatggtaaaacctgatcacgtcatggcttctctggcgggcaaaggttttggtatctccctgacgataaagtctaaagagcttctggtgcaattcttacaggtgtgtatgaagaaatcgctggaattgcctacttatcttgtcgcagattcgatgggttttgtgcctggcaacaaagcatttcttcacggcagtatacctatcgcgcagcaccttttggaatttgactatttgattccggcttcccgtgttccacgagggcttgtcgagtcgggaacgctggatgactggaaaacgatggtagctgagctggttcatggctggcctcaggtctttgcattatccacagcttttgcttcgatgctgctgtcgttgtgcaaaatggatgtcgcattgtttcatttttacggggggtcaacgaccggaaaaacaattcttcttcagcttcccatgtcagttcacggccatggtggagaacccggcagtgcgccagatgtgaacattttacgctggaatactacagcgaatgcgcttgagaaaaacctgagtcggtattcagggatattagcctgtattgatgagttgggtgcttacaaacagaaggactttgcttccttgctgtacaatattactgcttcgaagggtaaggatagaatgaatcagcatctggagatagatgaggcctttacctggaaaatgtttattctttcgtcaggggaaatgtctatccctgagaagcttgccacgcagaaagagcaaattcagggagggcaggagcatcgtgccatcagtcttaacatccgctccgaagatgcccgtaaagacggtgagacctctgaagacgtacgtaatcgagctgagagactgaaacatgggttgtgtgagacttacggcactgcgggtaaggaatttattgcctgccttctaacgttgaagggtgaaaatgatgaggccttatcttatcaggagatgtgtaaattcatccagggtgcatcaaaagattgctatggcattctgatcggtgagttgcagaaagaaggctattctctcagtaatattcagaagcgtgcattagaacgttttgctctgtgctggtgcgctgggattctcgcaactgaatggaagattcttccctttgatgaggatgttattgcagatgcggtaatgagtgccgctcgacgctggcttgatgataaacctaaccagtataaccccgtattgctggctcttattgatattcagcgtgaccttgtaaagcgagaaggtgcgcattttatcggtcttaaagaaccggacaaccgtaaacccgcaaatcactgggggtatattcatcatgctagtgaagattttttagtcttcgcacctgtatttgaagagtggtgtcagaaacattccttaagcgccagtgacgtcgctaaggaactggtacgtcgaaaactgctgcgggcagaaagtaaagggcattacaaaaagcgtcctcttactggtatggacaggtgttactaccacattaagcgagggtttatcagtgctgatttgaattgtgcttag

SEQ ID NO: 382773 - DNA, 1323 bp, Salmonella enterica
atgaaacccgatagttctttaaaccaaataacgcagacaatgaaacggaatgatgttgattctgtggatagtcgcttttttgagtcagcgcaaaacatgaaaaccagcgttgacgttgaagattgctgcgttgaagtgatggttcgacatcacagcccaaagaatcaaagagaggcattcactaaagctttttttgatgagtgtaaaatccgtgcagtacaaactggccggactatcgaagccagcgatacaaaatgtaccgggcttaaggctatattccactcatccggacgcattaagtttattgtccgcaaaagtattcgcggaaagaatgtttacgttgcagtaggaagttaccctgaattttccattaataacgcaagggaacatgcctttaaaataattcaggagcttaaggcttccgttgagacttatggtgagcgttttcttacgcacagcaaaataacgtttaatgaacttgtggaacagtatgtgaaatgcgtacttaacacgggcgttaagcgttcagctaacaccgacctttctaagatccgtaaatacctgcgccctcttctcggtgacaaaaagctggcaggtatgacggaggcagatgttctgagctatctgcacgatctcgatcttaagcctgccacacgcaaccgccacctggcgctcattaaagcggtctttacctgggctatacgcatgggatacaccagccgctctccggcgctttatatcaaagcgctgcctgaagtgacgtcagatcgccgcgccatggatgactcccagcttcagcgctggatggaagtctgtgagtgctggcgtaatggtaaacccgatcatgaagcccttgctctgctcatgttccttgccctgacggggctgcgtctgggggaaacccgtcaccttcgtcttgaagatgtggactggagccgcaaggttatcacccttcgccataccaaaaacggcaaactccgccgtgtaccggtatgtgataaggctttcgttcttctgacagaacagcgtcagcatctgggtgatgaaggctgggtatttccgggcaaggggaccgacaatccggtttctgagccgcgtcgcctgcaaaaacggctttgtgaggctgcgggtattccaccgttcaccatccatgagatgcgcgatacctttgcgacaaaactcattgagagcggggccgacattcacaccgtcaaagacttactgggccacagcactatcaaagtgacggagctttacttgcacgcttccccggcgcgttaccacgaagctgttaaccgggcgatgaatgtttttccggcctaa

SEQ ID NO: 382774 - DNA, 354 bp, Salmonella enterica
atgtttaaactcacgactcccaccagtcttccccttctcaacctgcccgcctccgcactggtggccctcagcaatgaaatccttggccctgtcgatgatatcgacctgtttaccgccttctggaacgaaacgggaaccctgctctggcatctcaaccacgatgacacactccccgaagacccgctgctggcagtggcactggctaacccggaatacgtcaccgcacttgatgatggctggtatctcctgctcggtatcgtctgcgataacggacagggtatctatctggtgttcccggacacgacagttatcactcaactccagaacctgattgaggcgctgaaccatgagtaa

SEQ ID NO: 382775 - DNA, 432 bp, Salmonella enterica
atgagtaagaaaaaaatcgctaccgaagccgccgccaccgaaagctataccgtgttctacaggggtgaagccgagaaaatcagtccccacagtaagggtctgctgacgtatgagctgggtaaagagggtgaaaccggaagccttgccctgcgcttaaccgccaatggcgaagggggcctgttctcccgtgaatggatagcgcttgatgcgattcacgccattctggaacagcagccagacagctttccatcccgtgtatttcgcccactgtttggtcagggcagcaccaataacgcaggttttcttgctgctgtgctcagaagtccggatatctgccttatcgaagcggacagcagcagactctttatgcaccgctgctatgccgactggcagcatcgtatgacgcagcttgctacgctcagccaggactaa

SEQ ID NO: 382776 - DNA, 429 bp, Salmonella enterica
atgtcatcacccgtaatattgcagggcggctatgtgctgccgctctcccggtcgttcacccaactgcttctgggtatcgttgcgcaaaaaccgccccatcgtcaccccatcaccggattaaccattaactttcgtgaccctgaatactcaccggaaaagggcggctggcatccggtcgaaatacgcctcatccctgccggagaagactggcagctcgattacgtcaccgattttcactatgcagggcatccatggcctgagcttgaaaaagatgtcgatgtgagctggacgcaacaatacacgtggctttcccgttgtggcgatatctctcatgtcgacgcccgtgagttctggtcgctgtgggaaagtaactttatggcttaccacgatatgggggttttcacggtccgtacgttgtgggaaagctga

SEQ ID NO: 382777 - DNA, 465 bp, Salmonella enterica
atgtaccggcttctgctgctgaacttcgtggattcatttatcgataactgcattctctcctgcgtcgatgaaccagcttacggtggtatcgtgcagtgcgaactgctttttggccttgccgcacacagcggtatctatgtgggtaacggcgatattgttcatcttgatggcgatggaaccgttatcaaaagtaaggctaaaggatttcttgaccggctcgatggctggaactccgctatctcggtgtatacagactgtatggatttgacgcctcagggttgtgcgcgggccgctgaacgggcaaaggcggcagtgggtcagcgctatccctacagcctgctcgactttaactgccaccggtttactgcccgctgcgttaccggcaattcatgccctgatatctggcttgccagacacctcgattcttttcagaaaggggaccgatggcgcgtatggcaacgatga

SEQ ID NO: 382778 - DNA, 240 bp, Salmonella enterica
atggcgcgtatggcaacgatgaacgttaatcgtcgcaggcaacacgctaccggacagggagaacggctcatccggctgaccatggtgctgttttacggtcagacaatatctgttcgctacatcatccggcagtttgacgtatctccccgtaccgcaagacgggacctcacccatctggcctttgtgctcgaatccgctggccctcaccgctggcgactggctccctcgctgaaaccctga

SEQ ID NO: 382779 - DNA, 384 bp, Salmonella enterica
atgaaaattgctaaactgttaaccatcacaattctgctttcggccttcagccacagcgcgttcgccgacgagcaggctgacgctcagatgataaccaactcgaccttctgtgcgatgtactccacccgcctgacccagaccagtgacagcggccttcaggtaaaaggcgtcaatctcaatgcccgcatcaacggaccggtattcaacagggtacttcaggtgatgaacaagacctatggcagaacctggctcgaatcaaatgcccgtaacggcagcatgaccgccatgcagctttcgcagtcggagctgctctataacccggaatatgcccggcagtgcgatgcctttgcggataaagtggaaaaggaatggcgcggaaagtaa

SEQ ID NO: 382780 - DNA, 750 bp, Salmonella enterica
atggctacctaccgacacgaccccgaccttgagtttctgcgccactgtcatcgtgacgatctggatttactggtttctgtgcttatctgcgatccgaaagacggactggcacgcatcacggaaacgctgacctatgatcctcagtataaaaaacacaagcccaaccacccgcgctactgggatgccattgccgccgaagttcagacgtttggggcgaacagctttgccacgctgctccgctggggtaaaggggtgctgtaccgggaaattcttaccgatgcctgcgataaaatgaaggtgaactacaacaacaaatccagtgttgaaaccattgaaatgaatctgctgatgaagatcctggagaaaagccttgagaagatgacgcccgatcagctaaagaccgtggcggaagaattgcagacaggctacagcaaccccacgccggagttgctgaccatggcaatccaggcggggataaaaacatccgggtttgcggcctatcagatggcacttgttgtcacaaatggtgtggcgaaagccctgttaggcagagggctgaccgttgcaggaaatgccatgctgacgcgtaccatgggcgcttttgccggtcccgtgggctgggtgctcagttctctctggctgctgattgatttagccggtcccgcataccgggtgacgctaccatcctgcatttttattgcctacatgcgccagaagcatctttattcacctgagaatactgacgtttag

SEQ ID NO: 382781 - DNA, 714 bp, Salmonella enterica
atgacgctgataacacaagaaaatgaacatgacagactggcaacccgcctttccatcatcctgagccgtttgtttcagggtgaaaagctgcatatcgggacgctggcagaagaatttggagtgacgacgcgaacactgcgacgggatttcaacgtccgtctgacgtaccttgatattgaacagagcaacggcgtgtatcagcttgcctcacattactttcgtcgccgcacggaacgggatatgaagatactggcgagactgctgcatcttgaccgtctgttacccgcgatggatgccaaactgctgagccttctgcttgacggggagcacccttcaccctaccggattatgctcccggagccgcgccagaaacccacccttttcggtgatttcagcagactgacgctcgccatacttaaccagacccaggtgcgtatcagaaccgacgaaaacgtcagccataccgttcatccctaccgtctgctttgcagccatgcggagtggtttcttgccggatgtacgtcatcgggcgtgttcgttatttccctgtcccgaatcaggctggttgaggtattaccggatacaacgtttgagatcgataacacactcatttcgctgattgaacagtctgactttatggaagccttaccccacatgaacattattcatcagataatgcattacgggagtaaacagacgaataatcgtaattaa

SEQ ID NO: 382782 - DNA, 312 bp, Salmonella enterica
atgattatcgataaagaatacgcacttgtagatgcaacagcaagacttaacactgacctgagggattatgaatatgaaataaacaacgccgccattataacatttggcaatgacctcattgaggtaatcgtatatcagttcagctttatcatcagcatcagggcagagggtgaaaaaataaagcacggccttcttgttaacttcggtaaaaatatagcaagacaggtttcatcactttgtgcatccgcaatgcgagtctacccgaatgaaaaacacaaaccgagccgtcagcttttccactgcataaattag

SEQ ID NO: 382783 - DNA, 1866 bp, Salmonella enterica
atggctggccagtatgaaaaagcaataacgataaaacaagcgatagattcaattaatttacgccactatcttctgcctgcaattcagaggaagttcgtctggagcagcagtcagatatgtctgctgtttgattccatcatgcgagactacccgataaactctttcatgatgtgggatatccgtagtgccagtattaaaaacgattacaaattctatgaattcctgaaagaatactgtcagcgatttaatgaagaaaacccctgcgtagcaacaaatgctggatttcatgatttcaaggcggtgattgatggtcagcaacgtctcacatcattatatattggattgtgtggaacgtatgcgtataaacagccccgggtgtggtggccttcggcacaggatgatcgcatcctgccgccaagaaagctttacgtcgatttaacagcgccacttaattcagacgatgagctcatgatgaagtataacttcaggttcctgaccgacaagcaatacactgattcacttacagacaacaaacatcactggttctgcctgcacgaaatattcaaatacgagcaacatgattctcctgatgatattttatttaacgttgtcgtaccagaactcgaaaaaagaggactcatttccagtgaattttccagaaaaactctgcttaaactttataccaagataagaactgagaatcttatccactacttcaatgagagcagtcaggatattgatcatgtgctggatgttttcatccgcacgaacagcggggggacaaaacttgagttctccgacttactgatgtcaatagcggtagcgcactggcagggggatttcagaagagaactggatgaactgacaaaaaatatttatcagaataatgaaatgggtttttatattgaaagagactggttcttaaaaaccagcctgatgcttattgactctgacgtccggttcaaagtaaaaaacttcacttcagaggaggtcggtaagatacaacaacaatggtctgaaataaaatcctgcatcaaggagacttttattcttatcaggcgattcggcatcaatccacagtctttgatatctaaaaatgcagtcattcctgtggtctactggctttacaaaaagcaaaccagtggacatccattatatacaacgattaacctcctgaataaaaaccacaatgaacgctcagtaattagtcagtggttttacatggtacttctgaaagggatctttggaagccaggccgatgcgctactcacgagcatcagagatgtaatgaaaaatagtctttcagatattcatttccctcttgagaagattattgacagatataaaggctcgaataaggacctcagatttgacgacgaatacatcgaaagccttctcaatatcagatatggcgaaggtcgttgccgcgcactattgcatcttctgttccctgaaatgaatccgaccgaggtgtttcatattgatcaccttcacccaagaaatcacttctcaaagaaatatcttgaaaaattagattatgttgcgaactcaccagagaacctcagcttttatgaaaacccggaacactgggacaccataccgaatcttcatttactgaatcattctcagaatataagtaaacaggatacttccctgaaacaatggctatctcagccatcaaacaactattcgccatcaatgctgttagtttcagatgacaatattgagttcagtcgcttcccggatttctacaatgagcgaagaagcgccctgaagcaaagactgctgaatcgggtatttcttacaacaaaaatagattcatcaccatccacaatggatacggatgaagaaattctcaccgactga

SEQ ID NO: 382784 - DNA, 1557 bp, Salmonella enterica
atgacaagccttcaacaacgtgcagagcttcatcgtcaaatctggcaaattgctaacgatgtcagaggttcggtcgatggatgggattttaagcaatacgttctgggcgcgcttttctaccgcttcatcagtgagaatttttccagctacatggaagcaggggatgagagcatacattatgcagcacttgatgacagcatcattaccgatgacatcaaagacgatgccatcaggactaaaggctatttcatctacccgagccagctgttctgcaacgttgcggcgaaagcaaatactaatgacagactgaatgcagatttaaacagcatcttcgttgctatcgaaagttctgcttacggttatccttcagaagctgacatcaaaggtttgtttgctgatttcgataccaccagtaaccgcctgggtaacaccgttaaagataaaaatgcccgcctggctgcggttctgaaaggggttgaagggttaaaacttggtgacttcaacgaacatcagattgacctgttcggtgatgcctatgagttcctgatttctaactatgcggcaaatgccggtaagtcaggcggtgagttctttacaccgcagcacgtctctaagctgattgcacaactggcaatgcatggccagacccacgttaacaaaatctacgacccggcagcaggttccggttctctgttattgcaggctaaaaagcagtttgatgaccacatcatcgaagaaggtttttttggtcaggagatcaaccatacgacctataacctggcgcgtatgaacatgtttttgcacaacatcaactacgacaagtttgatatcaagctgggtaatacactgactgagccacacttcagagatgaaaaaccgtttgatgccatcgtttctaacccgccgtattcggtgaaatggattggcagcgatgacccgacgctgattaacgatgagcgttttgccccggctggcgttctggcccccaaatccaaagctgactttgcgtttgtattacatgcgctgaactatctttcggccaaaggtcgtgctgcgattgtctgcttcccgggtattttttaccgtggcggcgcagagcagaaaatccgtcaatatctggtcgacaataactatgtcgaaaccgtgatttcactggcaccgaacctgttctttggcaccaccattgccgtcaatattctggtgctgtctaaacataaaacggataccaaagttcagtttattgatgccagcgaattgttcaaaaaagagactaacaacaatatcctgaccgatgcccatatcgaacagattatgcaggtatttgccagcaaggaagatgttgctcatctggcaaaatctgtcgcgtttgaaaccattgtagcgaatgactataacctgtcagtgagcagctatgtggaagcgaaagataaccgcgaaataatcaatattgctgagttgaatgcagagctgaaaaccacggtcagcaaaatagaccagttgcgcaaagatattgattcaatagtggctgagattgaaggtgacgaggttcaggaatga

SEQ ID NO: 382785 - DNA, 1158 bp, Salmonella enterica; identical to SEQ ID NO: 145296

SEQ ID NO: 382786 - DNA, 762 bp, Salmonella enterica
gtgcaaaaaaacttgttacaactttgctacgaaggggagtgtggcgaaaattacattcgtagtatgaacgaaaaaggacagctttttgtttcactctcggacgttttgaagactctttcagcagaaaacagaaagcttgatggtaaaacatcccaaagtcttatcactgttcttaaagcagtaattaagacgctagatccagatgaattcagaaacgttcctcttattgtagatggcgagacaatttctgaaactttcctcactgagccaggtttatacagggtccttgctcaagatacgacggcagcagggaaaaaattccagcgctggctctttcatagtgttctgccctcaattcgcgagtttggtgtttatccgccccctcctaagcaggaacgttcggaactgagtgctttcgcaaatagtcttcagcaaacagttcaagctttagtgatggagattgaaaggcgtgaagaactcgagagccgggtaaaccaggttgaactaaaagttaactcgttagaaagtttaagggatttatcaaaattcaggagtgttccgcaacgcctgttagaacttggccttgatggatactctgtcgaggagatctggcagtggtgtgagaaactacgtagcgaaactggtgccgagaagattaaatgcccttcagggattaatatcaacacttgctatccattggccctggttgatgaagcaatcacactgtatcaaaaagttatcgaggcaagaattcgactttga

SEQ ID NO: 382787 - DNA, 351 bp, Salmonella enterica; identical to SEQ ID NO: 78599

SEQ ID NO: 382788 - DNA, 537 bp, Salmonella enterica
atgactattgcgaaacgagaacttggccatcgcgtttcacctctcagcaatgacatgattaaatcttatgcgcagcgtttgagggatgttcttcagatatcgaatcatacatatctgagactggatgtattgctagaaggtcttatggcctcagaaagcatcgaccttgaaattgtggaagatcacgagttgcctaaacggtacgcagtgacttacccagacaaaaacaagattgttttgcaacagtctgtttatgatgccctctgttgtggagaaaatcatgcacgatttactgttgcacacgaaattggtcatctgattatgcaccgcaatcaaggagcatacgctcgtagtaagagcaatggtggacacaaaatttatgaggacagtgagtggcaagcagatgtctttgccagccatttccttatagatgcaagattagtctctccagcgatgaatgctgaggacgttagcataacattcggggttagcttgcaggcagctgaaacgtggatgagaaaaaatgttaaaagataa

SEQ ID NO: 382789 - DNA, 162 bp, Salmonella enterica; identical to SEQ ID NO: 78597

SEQ ID NO: 382790 - DNA, 390 bp, Salmonella enterica
atgggctttccttcacctgcggctgattatgttgaaaaaaggatttccctcgatcagcagctaatcagccagcccgcagcgacttatttcatgcgggcatcgcgttcacatttcagggaaggaatacttcagggggcgctgcttgttgtggatgcgtcgctttcagcctgtgatggttcactgctgatatgcgcaatcgacggggaatttaggatcaaacgataccgaactcaccctcagccccacctgataaatctggagaacgggagaagggaagcgctgccagaagacggtgatggctacggttcatcacacgcaatattcggagtgattacgtacatcattaatgatgctaggaatgcggagtttgatgattgtcctgctatataa

SEQ ID NO: 382791 - DNA, 243 bp, Salmonella enterica
atgttcgtggaactcgtttatgacaaaagaaattttgatgggctgcccggtgcaaaagatatcattctgggcgaattgaccaggagggttcaccgggtcttccccgatgcggatgttcgggtaaaaccgatgatgacactgccggcgatcaacactgacgccagcaagcatgagaaggaacagataagtcgtactgttcaggaaatgtttgaagaggctgaattctggttagtgagtgagtaa

SEQ ID NO: 382792 - DNA, 426 bp, Salmonella enterica
atgtcacaagaaagcagaagtaacatgtatatttacgatgccaaaacaaatggcttttatccggtcttgcttaaagaaagctatgagttggcagggacatggccaaaggctggagtagaagttactgaagaagagcacaaggctctgatggatggccagtcaacaggaaaagtagtttcagccgatagtgaaggtaagccggttcttactgatatagagattgattatgttgctttagcgacagcagaacgcgacaggcgctcggctgctgtcacggcgagaatcaatgaacttgtcgaagctcaggacgacggggatatcactagcgacgaactgacagaacttgccactttacgcgaagttcggacaaaactgcgacgtctggatctgagcaaggcccctgatattaactggccggatatgtaa

SEQ ID NO: 382793 - DNA, 1779 bp, Salmonella enterica
atggctgattactactcaattatcactaaccggggtaaagaactggaggctgaggcgcttgccagtggtcgcctgattgtactgactcactttgtggtgggtgacagtaatggcaagcaggtcaaacccgatccggcacaaatccggttgatcaatgaaacgtaccggggcgatattgccgagctggtggtgtccccggaacagtccacacagctaatggcgaaaatcgtcctgccgaccgggattggcggatttaccgttcgcgaagtcggtttaatgactgacgccggggagctttacgcggtggcaaactgcccatcgatcgataagcctgttggcggtgtcagcgttaatatgcagtttcgcctggcggtatcagacacctcaaatatcacgctgaatgttgcaacaggcgacgggttattcctgcgcattgaccagaacctgaaagagataaaagtgcggggcgctgaagcacaaaaaacatcgcgtgagtccattggtgtcctcgatagcacaacacaacaaagagggctggttcaacttagcagttcggtgaacagcaccagtgaaacgcaggccgccaccccagccgcagttaagatcgcaatggataatgcgaatgcgcggctggcaaaagaacgtaatggcgctgatattccgaacgtcccgttatttctacaaaaccttggtttagtagacgttctttttaaaggtgacgggcgattcctcgcgggaacgtttgtcagtgacgcaattgaccgaacatcaatcggcgcacgcgctgcgactggatgccagtttatgcgtgcgcatcaggctcccgacgcgccagatcaggtcagttactggcaagttatcactcttactgaggtcgtgagtccgacttctgtggtggatgtgcttgccatcagtggcaataacgtcgtctttggtcatggtacaggtgcaggtattacctcatggcggcatgtggcgatgctggaaggtgctgcctttaccggggatatttccgcttccaatgtgcgtggtggtaattctgtcactattggtgatggcacaggggggttggctacaggtggcgttgatggcgcaggttttaacggcaataacatgaatgttaagtcatgggatggcattggttttcagaacgcagcagaccttgttattcgggcgtatatcagcacaaaacttgggattatcgcagccagtgaatctgtgtatgcaggtagcgctaatctgtataaaaacggtgatgtgtatggtgacaaatggagcaccggaaatggagcaaactggctgagtctgtatcttgagcaacttgactcacaaatcagaaacaacctcacttcgtggacatctaataactttccaacaaaggcagatgtttcagttgctctgtctggtaagcctgggcgtcagtatatcaaagaggtcggcgtatatcagaatgacaaaacaaagccatttatgcttcatgatgataacagtggaatattcctggcaactatgtcctcagtacacctcgatgcaaatggttggcatagggatgcctccacaggactgattactcagtggggttctggcaatgtcgctggcaatcaacagcaacgagttaacttcccaatggcatttcccaatacctgtacgactgttattgccagtgacacaggaagtggctcaatagccctatcaactatgtcaaaggataatggcggttttactgttaggggtgcttcgtcaacttttggcttcaactggtttgcaatgggatactga

SEQ ID NO: 382794 - DNA, 564 bp, Salmonella enterica
atgacggctaagtttcgatctctgcttcctcctggcgcatttcatgaagagcgggcgcaggagcaggccagcgctgagcaaattgccaccctcgataccaacatggtgcgcaagtctaaaaatcctgatacctgtccggcgcatcttctcccctggctggcctgggagcatgcagttgatttctgggatgacggctggacagaggcgcagaagcgacaggtgataagagatgccgcgtatgttcatcagcacagagggacggcaggagcagtacggcgttctctgggttctatcaatctacctacgaccgttgttgaatggtgggaagaagaaccgcgcgctgcaccgtacaccttccgaatagaagtacagagcagtgaggtggtcagcgacgctctctatcatcagatccgccagcttaccgaccgggccaagaacctgcgcagctatctgagcaaaattgatgtgatggcgaatgtgggtatggacggggctttttatatttcgggtgcgacaacatcgcatatcgatgtggatatttttgccgggggatctcatggctga

SEQ ID NO: 382795 - DNA, 921 bp, Salmonella enterica
atggcaagcagctatgacgtgatcaacctgtccgaactggacgtaccggatgccattgtggtgccggatgcgactgaaatcttcacccggtggctggcgcgcctgcgggaacttgataagcagtttgatgcgctggtggaatccgatccaacgtttaaacagggagaggtgaatgcctaccagctgacgctggcgtttcagcgggttaatgatgccgtgcgggcggtatttctcgcgagtgcaaaagaggcagaccttgaccagataggtgctgcattcaacgttaaacgtcaggttattaagcccggcgatccgcttgccatcccgccagtggagccggaactggaagacgatgcggcatttcgcgaacgtatccagctttcatgggcgcaactgaatacagcaggcgcgcgtaactcataccgctttcatgcgaagtctgccgatacggatgtgctggatgccgatgcctatgggccggaaactcataaccggccaggctacgttgatgtttatgtcctgtcacgcacgggggatgggacagcgggacagcccctgcttgataaggttaacagtacactgaatgcagatgaaatccgcccgttaactgactatgtgacggtaaaaagtgccacgattgcaaactatgccgttacggcggagctggaaattccggaaggaccggacgccagtacagtgctgaataatgccatcgatgttttacggtcatacaccatgctttcccatcggattaaaactgtcatcccgctgtccgccatttatgccgcgctgcagcaatccggtgtggtacgggtaaggctgatttctccggtagcagatctggaagcggaaccgggtaaagcgccgtggtgtaccgccattaatgtcacccgcagggaggtaagcagcaatgacggctaa

SEQ ID NO: 382796 - DNA, 354 bp, Salmonella enterica
atgaacggtgtaaacaaccggaccgggaaacgcctgtccggcgtcgcccatttgcgccagtccgtcagcgacatactgaccactcccatcgggagccgggttcttgtccgtgactatggcagtgatctgttttcgctggtggataaccctcgggatgatttgacccgactacaaataatcgccgcgtcagcgactgcactggcccggtgggaaacgcggctgaaggtaacacgtgtgcttgtttcctttcctgaaggggagtccggctgtgtgctggatatcgaggggatcaacaaggaaaccaatttacctgtcagaacgggagacataacgatttatggcaagcagctatga

SEQ ID NO: 382797 - DNA, 1119 bp, Salmonella enterica
atggcagatcagacagcgatgccggaatatgcgccggccttcagcattcaggccgaagggaaagatataacccgggtgctgcaacaatgcctgagtgaactgaccctgacggattatggtggggcaacagcgaaagccgatgaactgaaaatcagcctcatctctgaaacgctggcgcttcccactaaaggtgcccggcttcgggttgctatgggattcaatgaccagctgatcgataaaggctggtttgttgtcagtggtgtctcgagcagcggcccgccaaggcgtattgagctttatgcgaccgccgcgccgatgaacgcccagaaacaacccggagatgtgacaagccagaaaacccggagctgggataaccttcgccttgccgatattgtcaaaacagtggccaccgataacgggctgatcccccgcgtggccgacgcgctcaaagatattcatatcaatcacatcgatcaggtggcggaatccgatgccaacctgctcgcaaggcttgcacgtgactacaacgcagtgagcaaaccatcaggaggctactggctttttttacagcaaggggccacggcaacggcttcagggaaacagactggcgggatcaccatcacaccggatgaagtatcaaactggtcctacagtgaaggtgagcgggggagttcgacaggtaaagcgacagggagtggaggaaaagccaaagagaaaatcggcgtgcgttattacgacgaggaggacggcacgacaaagacctcctccgttgaacatgatggcccggcgatgaccaatccctatacccagtcggagaaaaacaccgccgagaaacaggcaaactccaggaaaacacaggcgaagcgtaacgagcagaaaatgacgctcacggggccatgtcgccctaaacatgttccgctgacagcggaagcaagtgtgtcgacttccggttttggctcacgtgaggatcgggcctgggtggttgagtctctggtcttttctctgacgtcagcaggattcagctacacctacaaccttgtcgtggatattcgtaaacccgcagcagcttcgaaaaaatcagaaaagcaggacaaaaaaggcccgtcctacttcggttaa

SEQ ID NO: 382798 - DNA, 216 bp, Salmonella enterica
atgccgacgatctatcaaacccgtgacggagatgtactggatgcaatttgtgccgtgcattacggtactgaaaatctttcagactcagtgactcaggttcttgaagccaatcaggggctggcggatcagggggctatgtatccttccggcctgtatatcacactgccggatctggtgacgcccgtagcggaatcgccattcagtttatgggattga

SEQ ID NO: 382799 - DNA, 471 bp, Salmonella enterica
gtgagtgaaattatcccgatatttgaagattccggccagcgcagtacaggcgcattacggggtgggcaggaagcccgcgtgatgatgatgctggggaatttcgccttttcgattgatacagcggcttatcatcagctcacccgtgaggccagctggcgctggagtgaacaggaacgcataggaaaacaggaccttcttcagtacaccggaaagcccgggcgtaccgtcaggcttgaagggcagtctcatgcctttttccgtaaaggggtggaaggggtgaatgatttatttgatcttgccgatcaggcaaaaccccagcagcttgtcagcggagaaggcgatgtactggggtggtgggtggtgaccgacttttcagacacgacgagtaagtttttaccgggtggcggtcaccgaaacaaaaactggacgatgacgctaaaacactatgccgacgatctatcaaacccgtga

SEQ ID NO: 382800 - DNA, 1926 bp, Salmonella enterica
gtgggcggaataagccagaaccttaaggccgtcattacctttggcggaaacctggataattcatggaaacgatctgcagatggtctgcaaaaaagcctgaaagatgtcggaaagcagtccgaacgactgacaaaagaccagaccagactggcagcagaaatcaagcgcgccaaactggccggtgaaagcctgggggatttgaagcgccgctataccgatgtttccagggaaatccgcaaaacggaggcggagcagcagaaactgaatgtacagatgcaaaaagcacagcgcattcaggcattcaaaggagccggtaaaggtcttttccggcgcggtctggggatcgccgggcaggtgggcgggatgtttgggtccgggctggctattggcggtggcggtgtggtggcttcagcacttggcacactgatagcgccagctgccacaaatgctgaaacggcaacccgcactaatgtcgcaaaaagttacggcgtggacgtggccacgtttaatgcctgggattctctggcgaagcagtacgacatgaatgcggaaaacattggcgatctctttgaagagtatctgcacaaatccggggagtataaacagaacggtaagcagggctcgctgcaggatgcgtttgaaacgctcgggttcaaagcgggtgattttgccgggctcagcgatatggcgcagtttgacaaaattgttgaacgggcgctcagccttcaggacgagtcaaaagcctccttcgcactggattctctttttggcggggaagcgagcaaactgctgatgcttatcaagcagtctggccggagctaccgcgacctgatggacgaacagcggcgctacaaccttgtgaccaaagagggggctgatggggcggttgcgggtaatcaggctatcaataatctccgcactgttttctcttctgcggtcgcagaaatttccgggcaactgggaaatgaactggcgccggatatccgtaacctgacaaatgatcttgccgactggttcaaaggtggcgggatcaagcgcattgtgactttcctgcgaaatgacctttatcccggcgttctgtcgttcgggcagggggtggtttttgtcggcaaaattatttacgcgctggctaaaaaactgtcctggttgcttccggatgaacgaaatgaccagcgcgatgtactgaaaacactggccggtaatggaatgaatatggctcgcctcagagctgaacagacaggccagggagaatggttttcgcagcaactggcaactcatcctgacttgccagaaaaagtaaaagagtcatggaacgatacccgtggatggttcggtcctgacagcgacgatgaggcgtttaacaaatcgcttgataaatacctgtcaccggaaggcggcgattcgcttttaaactggaatgcggcgctacagcaaaataaggaccatgtcgcgcaaaccgttaaagaggaaccggaaagcagtgccggagcctgggataattacgcgcatgagccggtaacatctgccagtcagtgggaaagagaaccatcagtactgacgtacagccagggggaaggagaaagcgcccgcgcaggggataagtatccgaatgctcccctttttcccgccgggcagcaggacaggaatgttactgcaacagacagttcacctgctgagccggtgattctgaaagatgagagcacgggcggttactgggaaagtctgcttcagaaaatggatgtactggataagcagccgccatcacggcagataaccgataatcgcaaatttgagtaccacttcgaaattaatgccgcgccgggacaggatgagaaagccattgccgatgaagtgaccacggtgacgaaaaacaattctgcctttaatggtgataacagccttctggatgggggacttgtctggtga

SEQ ID NO: 382801 - DNA, 300 bp, Salmonella enterica
atgagctttcctggtgaaacccgcgttataaaactgtattcccccgtatcacttgatagcggggttgtgatcgatgaggtcaccatgcgtgaaccactggttcgcgatcgtatcactcatgccaaagaccgcggcaacgaagaagagaaagaagcccgtatgattgcgctactgtgcaatctcagtgaacaggatctctggctgatgacagcggcagattactcacagctgctggatgcctttaacgtttttatgctcccgcccgcgaagcgaccgaaggcgggctcctccgggcaataa

SEQ ID NO: 382802 - DNA, 507 bp, Salmonella enterica
atgagcgataaaaacacactacgcgtctggaccttcttccggcaggggatccgtattcagggggcgcatgaatttacgccgccgtctctggctattgttaaaacggatttgcgtaccggcgcacaggatgcgcccaccccggttgatgacggcatggaagcactgacctgtcaggttaaattttatgggatagatacggatatgctggccagcttcggttttgtcagcggcagccgttcacgctttacggcttatcagggctatctcggtaacggcactgcgcgcggtacggttgaggaaattgaggggtttgtacagaccgtcacaccggatgcgcggagtaaggacacgctttccgaaaatgccgtgacggttgatattgctgtcagctactaccgtcagtcactggacgggcgcgaactgttcgccatcgatacagagcgtttcgcccgccgggtgaatggcgtggatgtgctttctggcctggctgccaaagtgcgtctctga

SEQ ID NO: 382803 - DNA, 1470 bp, Salmonella enterica
atgtctcagttacatggcgttgaaactattgaactcacctcgggtacggtggcggttaccacgattcagaccgccattattggcctggtgggaacggcacctgatgcgtcggggggaacagccgcatcgggatcatccggtacacccattctcgataacgttatcgacttcactgcaaccattaaggggcgggaaggaaatgtcatcaatgtcgctgcgctggccggacagccggcagccgaaaatcctgctgcggttgtgacgtcagcaagctgggatcctgaatcgctgacactgaaaatcacactgggttgtgatgagcacggtgttatcacggctaaacccggagacgttgctgaggccgtcggtggtgttgatagcgcaaaagtcagtgcgagcgggcgcggtgacgggattgtccagcccttcagcctgcaattagcgaggggggaagatgaaccctttccactcaatacgccggtggcggttgtcggcaccacgctgttatcccgcctgggtgaaaaaggtacgctgaaacaggcactgacagacattaacgatcagcgtaatgcgctgacggtggtggtgcgtgtggcagatgaaaacgatgtggcaaaacgacgcgctgtggtactgaaggggatcggcaccctgtcttcagcgaaatctgttaccacgtaccagccgcgtattgtgattgcaccgggattcagtgaggacgatgcggttggtaaggggctggaaaccgtggccgggaaattgcgcgccgttgcatatgttgactgcgcctccggtgcgacgctgcaggaagtggtacagcgtcgccagtcctatggcgcacgaactgaactgttgcgcccgcgggtccaggcgagcgatgcagatggccagctggtttatcgcccttactctgcgtttgctgccgggttacgcgcccgcatcgactttgaaaaaggctggtggtggagcaagtcgaaccaggacatcaacaacatcctcggtgttgagcagatcgatgaatttatcctcggggatgagaactgcgatgcaaacctgctcaacatgcagaacgtgtccaccattatccgccgggcgggttttaaacactgggggaaccgtctgtgtgctaccaatccacagtggcgttttgaatctgtccgccgtactgctgatgttattgaggacagcattcaggaaaccatgctggagtatgttgatcgcccactggaccgggaaaatgcggatgacattatcggcaccatcaatgcctatatgcggcaactggtcggtcttggcgccatattcggtgggcgggcctggctggatgaagaactgaacaccgcggaaaccatggcgtcgggtgtcctgtacatcaactatgactttggtccgaaatcgccgactgaacttatcagcctgcgcgtccgggtgaacaataactatgcgcttgaggagatgcttgcagcatga

SEQ ID NO: 382804 - DNA, 618 bp, Salmonella enterica
atgagtgatatagaaggcgacctgcagcgcagactggcgaaccttgtccggcgcggtgttatccattccgtcaggcacgatcgcatcccaaaatgccgggtggatttgggggatatcatcacgacctggctgccgttgtgccaggggttttcaggaactaaccgggcggattcaaatccttatgccgtgggggatgcggttacggtcctgtccgaagccggagagctcaacaacggacgggtgtttccgggctggaacacaggaaagctgccggtgccggaaggaagtgacagcgagcacattacccgttacagcgacgggaccgagatccgttatgacaggaacgcgcatgccctgacgattacgctggctgatggtggaacttacaaaattgtcggtaaaggcacgctggatggtccggttgaaattacagataccctgacagttcagggcaaaacccagattaatgctgacacgtcggttgcagggaatatcggggcgtcaaaggagataacggataaatccggcagcatgagcaagatacgtgaagtatttaacaaccacgatcaccgcggcgacagcggcgggctcaccgataaacctaatcagaaaatgtga

SEQ ID NO: 382805 - DNA, 555 bp, Salmonella enterica
atggccgagccactgttgctggggcagtatcacgatgctgtgactgacgcattaaaaaaaatcggatgggtgcgtgatgccggtgcgtatccggaacgaaatgttccccgcttttcgggactgaccacgcccgcggtgtatttctcgattaacagctgggaacagggtggaggtaatgaggggcaactgggcgttaatttaacctgtgatctcttcgtggtggtggatgccgccggatcgggtgtgagtcagcctgagatttttgtcagaaccgctgcggccgatattacccagtggattgacgggcagcagtttggtctgggccatattgagcctgcggtattcaccacggctgaacgtgatgagtttgatccgcgaatggatgattatctggtctggcgtatttctttcacccaggcggctgcatttggtagtgatccctttgcacacaatggcatgcctctgcagcaggcctggctgggtgctgcacctgatacgggccgtaatcacgtggatgactatcagcttatctgggaggctcagcccgatgagtga

SEQ ID NO: 382806 - DNA, 657 bp, Salmonella enterica
atggcgcgggagtctcgactgcgacgggatttacccgtcgatattgatgtggatgttatctggcgaattgcggacagtatcggtgcgacgcaaaaacagttccgtgcagcatactcgcgcgcgctcaggcgtactgccgccacgctgcgaaagaaagcgatggcggatctgaaagacgggctggccccacgcagtatggatctggtccggcgccgtctgctgtcttttcgcctggacaggggatcgcaactggataacttccggctctggttcgggctgaatgccattaaggtgaaagaccttaaaggacgaatcaacgggcggctgcgaccgcaccatacccggcgtgaccccaacacggggcgttttattaaagcgcgccgccaggcagataacgccggattttccccgaaagggaatctgctgagcgaacggtcgtttgaaaacggggaggtgtcccgttcaaaacgggataatcgccggacggtggttattcgcgatcccgtgacccgccggacacgcgaagcagaaatggatatctacgaaccgatgctgaactacatcgaggacaacgcatttgcggaagcgatggagatttttatgcatcactttgaaaccgacattcgcgggcgcgtaaaagcccgtatttctgtctga

SEQ ID NO: 382807 - DNA, 357 bp, Salmonella enterica
atgaaccggttccgggaacgtttggctaaagcagatgcccggattaaccgggcgtttgccgaagaagtccctgcatgcctgcaaacgggtgaaggcccgcgtctggcgaccgtgatttttgaatcaccggatgcgctgtcgggtgtaccgggtggcggggaaattcagaaccattccccggcgttcagtgcaataactgcggatatttccggtctcgaaaagcatgacggtgtggtgatcaacaccatcccttaccgggtgacacatatcggcgcggatgaagaagggcggacccgcgtcacgctggcatatggggaacccggcaagacacagcctcagatcgataaatggagctga

SEQ ID NO: 382808 - DNA, 336 bp, Salmonella enterica
atggcgaataactatcagcaggacggtaccacactggattatcacaatgcgggtgttgatgccgtttcatccggtgcgctggtggcggtcggcggaattgccggggtggcacacagcgatattcctgctggcgagtggggaacactgcatatggccggtgtttttgtgctgcctaaagcggcagaagaaattgcggcaggtcagaaactgtatctggctggcggcaagctgacggtggcaaaaggcgatgatgcaacgccaaatccggttgtcggttccgcctggggagcagctgagacagataatgctgatgttgccgtccgcctggggttctga

SEQ ID NO: 382809 - DNA, 2103 bp, Salmonella enterica
atgcagcaaatgataagcccgccccgtcacgggacgatgattaacccccgcgccagtgtggctggtatcgatgccgcaaacggtcagtgctggtatgagattcgcgcactggctgcagggcgtgtggaaatatttctctatgacgtgatcggcggctgggggattaccgctcagcagttcgtctccgactgtaaggaggccggggtgtttgaggccagcgccgtcgatctgcatatccacagcccgggcggcgatgtgatgcagggatttgccatctttaacaccctgtcccgtctgaaggcgaagctggatatctgggtggacggcgtggctgccagtatggcttcaatgattgtctgcctgcccggtgccacggtacatatgccggaaaacgcctggctgatggtacacaagccgtggggcgggatcgccggggattccgatgatatgcgtgattacgctgcctggcttgatcgtaatgaagcgctgatgctcagtgcctacatgaacaagaccgggctggggcaggaagaactggagtcgatgctgaaagctgaaacctggcttaatggagcggaggcggtggaaaaaggtttcgctgacacgcttgaaccagaactgcaggccgcggcctgtgtgaatcaaaataaactgaaggattaccagaatatgccagaacagattaaaaacctttttgggccgcgtgccgaaggccctgcaagtcagccgcaacccgcacaaaacccggcgccgcaggccgcaaataacccaccggcacatcaacccacccagcaaccactggcaggaaatatcgacattaccgcgctggccgcccagctccagcagcaaatgcaggcggcgaatactgaacgagtaagcgcagtttccgctgtttttgatgcgtttcctgcttttggctcgctgaaagcagaatgcatcacggatatttcctgctcagcggaacaggcccgcaccaaattgctcaatgcgctggcggcagggactaccccgagtgccggtccgggtgcagttcacatccatgcgggtaacgggaatattgttggtgattccattcgtgcggcggtgatgaaccgtgcgggttatgcgcaggcggaaaaagataacgcctacaacgggtataccctgcgcgaactggcccgcgcctcgctggtggatcgtggtatcggtatttctggtgtcggtaccgcacaggcgatggttgggctggcgttcacccacagcagcagcgatttcggcaatatcctgatggatgtggcgcataaggcggcattgcttggctgggatgaggccagcgaaacattcgaacagtggacccgtaaaggcacactgaccgatttcaaaaccgcgcaccgcgttggcctggaatcactggcatcgctgcgtaaggttcgtgccggggcggaatataaatatgtcaccattaaagatcgcggtgagccgattgcgctggccacctatggtgaacttttcagcattgaccgccagactatcatcaatgacgatctggacatgctgacgcgtatcccgcaggcaatggggcttgctgcgcgagccaccgtcggcgatctggtctgggctgtactgaccagcaacccgaaaatgtcggacggtaagccgttgttccacgccgatcatggcaaccttgttgcagccgatctgagtattgaagggctggatactgcacgtaaggcaatgctgctgcaaaaatccggcgatcgtcgtctgaatattcgtccggcctacatgctgacgccagtggcaattgagtcacgggcaaaccagctgattaagtccgccagcgtaccgggcgcagacgcgaacagcgggatcgttaacccgatccagaactttgtgacagtggcttctgaggcccgcctggatgacagcagcccgacggatttttacctgactgctgcgcaggggcgcgacaccattgaagttgcctatctggacggtatcgacacgccatatctggaacagcagcagggctttactgtggacggtgccgcattcaaggtgcgcattgatgcgggtgtggccccgcttgactggcgcgggctggttaaagtcaccaaaaaataa

SEQ ID NO: 382810 - DNA, 1512 bp, Salmonella enterica
atgggattttttgaaaaggcactgggcgcaatatcgcccgggtgggcggcatcacgcgcacaaaaccgactcagactcagagcctatgaggcagcaaatccgactcgtctgcataaggggaaacgtgaatcccggtcagcggacaccgctgtatttgcagccggtacttcattacgagagcaggcccgctggctggatgaaaaccatgatctggtgattggtctttttgacaagatggaggatcgggttatcggtgctcacgggatccacgttgaaccgcagccgcttgatcttgagggtaatcttcactctgagtttgctggtcagttatccgcgctctgggcggaatggtcggttcgtccggaagtgaccgggatgtttacccgtccggaagcagagcggcttttgttacgttcagcactgcgtgatggtgaagtgtttacacagatggtgcggggaaatgtagccggtttgcagcattcaacccaggtaccgttttctcttgaaatgctggaggcggattttgttccgtttaacctgaacagtacctccgggcagcagatccgccaggggattattgtcaatgcctgggggcgaccgacgggctacagagtttataagaaccatcctgccagttttgcgggactcaatgctgatttaaaaacagtttcggctgacagcatgctgcacctggctatgcgtaaacggcttcaccagttaagggggatcagcctcatccatggcgtgatcacccgactctccgatattaaggattatgaagagagtgagcgcgtggcggcacgtattgcggcggcgctgggtttctatatcaaacgtggggatgctcagtctcttgatacagaaaccgagttttcaacaccgggtggacagcgccattacgatattgcgccggggatgatttatgacgagctaaagccaggcgaggatctgggaatggtggagtcgaatcgcccaaatgttcatctgtatgagttcaggaatggtcagatgcgcgctgtggctgcggggactcgtggcagttattccagcatcgcgcgggattacaacggcacctacagttcacagcggcaggagctggtagagagttttgaaggttacaacgtgctgcagcagtggtttgttgggcagcaaagccgtcctgtataccgaaactggctggcaatggcgttgctcagcggcgttaccatccccaaagatgtcgacaaaaaatccctttacaacgcgctctatcttgggccagtcatgccatggattgatccgggaaaagaggctgctgcctggaaggcaattgtccgtggaggggcaggcacggaagccgaatggacgcgcgcacgtggtcagaatccgcaggaggtgaaacgtcagcgtctccgggaaacccaattcaaccgagaaaacgggctggtgttcgactcagacgccgccaacgataaaggagtgctccctgatgcagcaaatgataagcccgccccgtcacgggacgatgattaa

SEQ ID NO: 382811 - DNA, 216 bp, Salmonella enterica
gtgacgaaatcagaaattcagcagatgctggtaactgtgcgccaggcttaccgggattctctggacggtaaaagcgtgtcattcacgggggttaatggccgggcaattaccaaccatgaccccaaagccatacgtgacgagcttgaatactgggaaagacgctggcgcgctgtctcaaaccgcagcggctcgttcaaactcgctaactttctgtaa

SEQ ID NO: 382812 - DNA, 2118 bp, Salmonella enterica
atgcgacaggccacggcggcggagctaagaaaaaacactgccgggatcatcagagcaccgcgccgaatgcctgtagccgaagccgtgcataaatatatgcgtgttccggtcggcgtgggtaactccgttgagtgggatcctaatcttgccccttatgttgtggagccgatgaactgcctggcatcacgcgaatatgatgctgtcatttttgttggccctgcccgaacgggtaaaaccattggtctgattgatggctgggtggtgtacaacgttgtctgtgatccgtctgacatgctcatcattcagatgacggaagaaaaagcgcgtgaacactcaaaaaaacgtctggcccgaacatttcgtgtcagcccggaggtggcatgccggctgagtccttcacgcaacgacaacaacgtacatgaccggactttccttgccgggaactacctgaagataggctggccgtctatcaacatcatgtcgtcctcagattttaagtgtgttgcgctgacggattacgatcgcttcccagaagatatcgacggggaaggggacggattttcgcttgcttcaaaacgtaccaccacctttatgtcggctgggatgacgctggtcgagagttcaccgggcagggaaatcaccaatacgaagtggcggagaaagtcacctcacgaagcccctcccacgaccgggatcctttctttatataaccgcggcgatcgccgtcgctggtactggccatgtccacattgtggggaatatttccaaccggccatggaggcgatgacaggctaccgggaaacgtctgacccggtaaaagccagtgaagcggcgcatattgattgtccgcattgtagcggcatgattaccgccgacaggaagcgggaactgaacggaaagggggtctggttgcgagaggggcagactatcgaccgtgagggtaagatcaccggagaagcccgacgctcgcgcattgcctcgttctggatggagggaccagcggcggcatatcagacatgggcgcaactggtttacaaattactgacggcggaacaggactatgaggccaccggcagcgaagaaacgctcaagacggtaattaatacggactgggggcttccttatcttccccgtgcagccagtgagcagcgacgtgctgacgtgctgatgctgcgggcagaagactatggcaaacggctcgtgccgccgaaagtccgttttcttctggcgtcggtggatgtgcagggcgggaagaagcgccgttttgtcgtccagatcatcgggtacggtgaaaacggcgaacgctggctggtggaccgctataacatccgccagtccctgcgttgtgatgaaaatggtgaggcacagcaggtgcatcccggatcctatccggaagactggcaactgctcatcacggatgtcctagaaaaaacttatgcgctgcagtcagacccttcgcgacggatgcccattcttgcaatggctgtcgacagcggcggggaagatggggtaacggataacgcctataaattctggcgccagtgtcgtcgtgacgggctgggtaaacgggtttacctgataaaaggtgacagcacccgacgccagaaaatcattaccaaaacgcaccctgataacacaggccgaagcgatcgccgggcggatgcgcgtggtgaggttccggtttatctgttgcagacagacctgctgaaagatcagctcagtaacaaccttgaacgtgaaactcccggtgcggggtatatccattttcctgactggctgggggagtggttctacgaagaactgacctacgaagaacgtggcacggacggaaaatggcgcaagcccggaaaaggcaataacgaagcctttgaccttttctgttatgcccacgccgtcgctgtcctgcgtggttatgaaaaaatccgggactgggaacagcccccggcatgggcagcagctcaggagaataactcaaacatcattgacggggatcgccccagggagattgctgtgaaaaaagcggtacctgtacgttcgtctcctgtttcagtaactgaacagcccagcccgctttctggtggctggctgggtgtcagtgacaacggaggctggctgtga

SEQ ID NO: 382813 - DNA, 507 bp, Salmonella enterica
atggataacgaactgaaaaaccttcgcctcaacatcaatcagctggcagcggtgaccgatcttcatcgtcagacgatcgcaagcaggctgaataacgttgagcccgctccaggcagtaattctcgtctcaagctttattctgtcgtggatattctccgggaactgctgggccgaaccacagcacccgagctggtggatatcgataagatgttaccgccggatcgtaaggcgtggtttcagtccgaacgtgagaggcttaaattccagcaggaaacaggtgagttaattccggcatcgacagtgacccgagaattttcatcgatggcaaaagccgtcgttcaggtgctggaaacgctgccggatattcttgaacgtgattgtgcgatgacgcctgcagctgtcgttcgggtacaaaaagtcattgatgacctgcgggatcaaatagccctgaaggttgagcaggcagatacgccggaacaggaggacagttcgccagaagaggagtaa

SEQ ID NO: 382814 - DNA, 342 bp, Salmonella enterica
atgaaaatcagatatgtaattgcgttaacattatcattgctcgttgccggttgtgataatgcgccaaagtttgatggttcaagccaggaatctttgcgttactctggcgagaaggttgttgagtctctttctgatgcaaagaaagaagaacttaaatcggcaattctggatactttaagttattacgatactcaagccatcattaataacgatggcagttattcttccgataaaatgcgtttagtcatattgaatggaaagactgctgaacagattatttcagaggccgatagctatcgggaaaagaaagagcaactactaaaaaaacaccaactgaattaa

SEQ ID NO: 382815 - DNA, 282 bp, Salmonella enterica
gtggtacaaaatgacccatcggcaactttaaatgcattgctttgcgctggggtagtgctgaccctgatgttttatcgccgtggcgattcgcgacatcgaccatggatatctcgcctggcgtggctgcttacggtcatctacagcgcagttccgctggcatatctgtgcggtatctacccttattcatcgtgggccactatcggggccaacattattttcctgtctgtgctggtcgctgtcagaggcaacgtggcacgcctggttgatcatctgaggcaataa

SEQ ID NO: 382816 - DNA, 387 bp, Salmonella enterica
atgtccgatccgatttccggtactgggctggctggtggtgtcctgacgggagccagcgtctatggatttctgtccggaaccgattatggtgtggtgtttggcgcatttgccggggctgtattttacattgcaaccgcagcggatctaagtgcagcgcgccgactggcatattttctggtttcgtatatcgcggggatcctttgttccgggctggtgggttcaaagctggctcaggctaccggctacagtgataaaccactggatgccattggcgccgtaatcgtttctgctttagccgtcaaaatcttgacgttcctgaataatcaggatgtcggctcgctggtggcgctgataacgcgccggggaggttcaggtggtacaaaatga

SEQ ID NO: 382817 - DNA, 1053 bp, Salmonella enterica
atgaaaaatactgtgaaaataaacagtgttgagttaatcaacgctgatagcctgcattacgtcgccaccctcccggataactctattgatctgatagttacggatccgccgtacttcaaagtgaagaccaacggctgggacaaccaatggaagggggacaaggactacttacgctggcttgatagctgtctggctgagtatgctcgtgttcttaaacctgctggcagcatttacctgttttgcggtcaccgactggcctcagatatagagattatgatgcgtgcccggttcaacgttttgaatcacatcatttgggcaaaaccatcgggccgttggaatggatgtaataaagaaagcctgcgtgcgtactttccatctacggaacggattttgtttgctgagcactatcttgggccgtacacaggtaaagaggatgtttacgaaaggaaaagcacagagctaaagcagcatattatgacgccgctgattgattacttccgtaatgcccgtgaatcactgggtgtcagctcgaaagaaatagctgaggcaaccggaaagaaaaacatggcgtcacactggtttggtgcaagccaatggcaactaccaaatgaagtggactatagaaagttgcaggaactgttcacgcggatcgctatcgataagcacattcagcagaagcttgaacatcctcaccatcagctggtggctacctaccagtcattaaaccgcaagtattcagaattgctggaggaatacaaaaccctccggcgctgtttctctgtttccgctcttgttccgtataccgacgtatggacgcataagcctgttcagttttatccgggcaaacatccatgcgaaaaacctgccgacatgctgaagcagatcattagcgccagcagcagaccaggggatatcgttgccgatttctttatgggctctggttcaactgtgaaagctgcaatagaacttggccgtcgggcgatcggggtagaactggaagctgatagatttattcagaccaccgaagaggtggaaaaactgagcaaaacataa

SEQ ID NO: 382818 - DNA, 663 bp, Salmonella enterica
atggatataattcatttgttggaagtgcttaaccctttaaaaaacgttgttactattaaaattgacaatgataaaggcctgtttacaacgatagccgaattcttgattgcaatggcaccgactttaattgcagttattgcaatgtggtattcttataaacaattcaaaattagcttaagaagtcaaagtgagcagtttaggttggggttaaaacaacaaaccaatgcattaaaaattaatacccaacttgccactgaaatcgagttagtaaaggatgaatgtaaagtattaagggaaagctacgttgccttggtggattacacatctatactttatggtagccatcttgagtataagcaacactctgaaaatacaagtgaatacgcaatcgagcacagagataaagcgtacgaaaatataaaaacatatactaataaattacttcaagaaagaatgttaattctttcttatttaaatattgaaaaccgcgaagaggaagagtttttagattgtattaatggacttgttaactttgtagttaagtctaatggcaccgcggcggatttaggaactctacaagctcatggtgctaatttgtgctttgcgttgataaaaaataagcgccaagcaatcctctgcctggtagaaacaatcactgattaa

SEQ ID NO: 382819 - DNA, 690 bp, Salmonella enterica
atgaatcaacaagacctgaattttgtaagaatagaattgcgccgcgcgctacctgacctctctgggggagcaaaagggcagcttgaggctttcagtgaacacccaccagcagacaaaaatgccaccccgcgccgtggaattcatttcgtcgaactcgaaggcgagaagggggcacgctttgttaactcgctttccgcgccactgtatgtgctggaaacacgcagccgccgcaggccaatgccgccgataaaagatgcggaatttgagtccgcgccgtggcgtagggcagtgtccgcgcttagtggataccagcaggcctggttgcggtactgctacggttttgaccttagctatcagcaccaggttatgatgtgtgaatacgtctggaaaacttatcagaaatgcctgggcgataactcccttcaggagcgcgtagtaaagaaactgattggcctggtatggctggcagggcaggaaattgccgcaaccagaaataatgaaacctataaagactatgctggtgcagcgttggcccgcatggttagcgttgaccgttcgacatggttgcgagtctattcagggcattgggctgggttaaaggccgcttttacccagcttgatgaatctgcgttggcaatggctcttgaatactatgaggaagaagaagccctcaaagtggcagaaatgtga

SEQ ID NO: 382820 - DNA, 996 bp, Salmonella enterica
gtgagggctttgttaactcctgaagtcgcccatcgcatggggattgtgttgtttcgtcccggcgcggaactgatgcacctctttatgcgcggtcgcgttctgctcgagcctgaaccagaagaaatggcgtcattcagtacaggagctgttcccgccgccattcagccgctggctgatgatccggtaatgcggcaggtcttcgggaatgatcgggttattctgcgtgccggtgggcttgcttcccttgagcaatggttgagtaatcggtttgaatgccagtggccacattcatcgtggcacgacaagaacttcacaacaatgcggcacccaccaggaagtattcgcctgtgctggcattgcgatcacactttgtcggggcagcataccgaacagcttgcaggtatagcggcaggaaacctggtatcctggattctggaagtcattcggcgtgattctggttttcccgagtcgcatatcctgacgcttccggaactgtgctggtggatggtcagaaacgacctggctgatgttattccggaaagtgttgcgcacaaagggctgcgccttccggatgagaatatccgctctgtcatgagggaaagcgacattgtgccttcagcgtctgcaaccagcctcgtgcaggagaaggcgaagaagatcctcacgctctctgttgatccggagtctccagaatctttcatgctcaggccaaagcgacgccgctggataaatgagacgtacacccgctgggttaaaacacaaccctgtgagtgttgccgacggccagcagatgatccgcaccatatcgtagggcaaggtatgggtggtacagcaacaaaagcccatgacctcttcgtgatccctctgtgcagagagtgccacgacgagttacacgccgatgtaccagcattcgagcagaagcatggtacgcagcttgagctgctactgcgttttatggatcgggcgctggcgatcggcgtaattgcgaaagcttaa

SEQ ID NO: 382821 - DNA, 687 bp, Salmonella enterica
atgagccagttaatcgtgaatggtgtagtaacaatgtccagccgtgatattgcggatctggttcagagtaaacacagtgacgtgaaacgctcggctgagcgtcttgttgctgcgggaattttaaccgcgccgttggcgcagttcgattttgagcataacggtaatgtttaccaggagtatcgttttaacaaacgcgactctctggtgattgttgccagattatcacctgaatttaccgccgcggtcgtcgagcgctggcaggaactggaagaagggcagagtgtcagtgttccccgctcattaccagaagcgcttcgcctggctgctgatttagccgagcagaaagagcaactgacgatccagctggcagccgcggcgccaaaagtggagtttgttgatcgttattgctctgcaaaaggctccatgtcattccggcaggtagccaaattgcttaacgcaaaagaaactgagtttcgtctgttccttattgaacgcaatatcctgtatcgcctcggcggcacacttacccccatggcgcagcacatttccgcgggaagatttgaagttaagacgggaacatcgagcgcatccaatcacgcattcagccagacgcgtttcactgccaagggagtacgctggattggtggtttgtgggctgaacatattgcaggggggcaggcggcgtga

SEQ ID NO: 382822 - DNA, 387 bp, Salmonella enterica
gtgaaactgatcctgccttttcctccgagcgtgaacacttactggcgcgcccctaacaaggggccgctggccggtcgtcacctcattagcgctgatggccgtaaataccaaagcgctgcctgcgtggcgatcattgagcaattacgacgtctcccgaagccatcgactgaactggcagcggtagaaatcactctgtacccgccggatgcgcgccgccgggatatcgataattacaacaaagccctgtttgacgcgctgacgcatgcgggtgtctgggaagacgacagccagattaagcgcatgctggtggaatggggacccgtagtgccgaaaggtcgggtagagataacgatcagcagatatgaaccggcgggtgcagccgcctga

SEQ ID NO: 382823 - DNA, 879 bp, Salmonella enterica
gtgacgttaaacaaatattgccaggcgctggcggtactgcgtagccaaccaacccatgaattgaaagaagttggcgatcagtggcggacaccggatctgcttttttgggggatcaacgcgcaatttggtccattagttctggacctgtttgcagacgacgacaacgcgaagtgcccggcatggtacaccgccgaagataacgcgctgacgcaggactggtctgaacgtctggcagaactgggtggcgctggctatggcaacccaccgtatagccgttcgcagtaccacgagaaacaggcgatcactggtatgacgcacatcatgaagtacgcagcagcccagcgcgagaagggcggtcgctatgtattcctgataaaagctgcgccgagtgaaacgtggtggccggaagatgccgatcacattgtattcattcgcgggcgcattgggttcgatctgcctgtgtggtttgtacctgctgacgaaaaacagaaacccaccagcgcgttttttgccggtgccatagctgtattcgataagtcatggcgtggtgagcggttcagctatatcaaccgcacagaactggaggaaaaaggtcgggcatttatggcgctggctcaattcgctgttggaaaagagccgacaattgcaatgcgtgcaccccaggagccagtcataccatcggaaactgagtcacgtatctggcctctcgaagttggtctggtgtttaaccaggtggaaggcgttgacgtattgagtgaggttcagcagaacaagctgaaagccaacatcaatcaactctggttggaacgaacggccaccagcgaaatcattactgcagcctctgaacttgttcgcaatatgcggggagaggccgcgtga

SEQ ID NO: 382824 - DNA, 978 bp, Salmonella enterica
atgggaacattgattcagttacttgatcgtccaattgcttacaacccggcttttgccaagctgagagttggcaaagttaaagctggcccggttgcggctgtttttctttcgcagatggtctactggcataaccgtatggatggcggctggatgtataagacccaggcagatattgccagcgagactgcattaacccgtgatgaacaggaaacggctcgcaaacgtctgatacagcttggcgttctggaagaagatcgccgtggtgtcccagcaacgatgcactaccgcattaatcctgaacgcctggaagcgctgctgctcgaaactacgcagtcagtgaagaaggccgcacctcagaacaaaaccagattgcggaacatccagaatgtggaaatgccgcaatctggattggtgcagtcccgcaaactagattgcggtgattccacaaacaaggatgtggaaaccccgcaaacaagtatgggacaacccaacgaacaagcctgcggggatcccacaaactttcatacaggagattacacagagaatactcaggagagtacacaggataaaaaaacttattgtccggttgcgcagcaacccgaccctgaagttgtgattaccgaccaggcaaaaaaggttttaacccatttgaaccagaccaccggctcaagattccaggtatgcaaaacctcgcttgagcatatccgcgctaggctgcgagaaggttttacccctgaagagatggtgatggtcatcgactacagcaaagaaaaatggggggctgatatcaagatggctgaatacctccgcccaacaacgctgtttatcccgtcaaattttcctggctacctccagtctgcaaatcgctgggattctgctgggcgtccggaacgtaaggattggggaagggcacgaaagcatgacccaatgaaattcggcccggtcgataccaaaatcccagaggggttcagagggtga

SEQ ID NO: 382825 - DNA, 297 bp, Salmonella enterica
atgactgaagccgatatcgtatttgattacaaatttaacagcccattacatcgtttaatcatgttgtttatccaagtaagcggaagcggtgatgggggtaaagaaaagcttatttcagataagagatttacagacatatgctgttgcagctcagcagattttataagcgctatcaattacctgaccgaaaacggctttcttttgagaaaaaattacgggatgcagttcggtgaggctaccagcggttatgtcattactgtgccggattggttaaggaaggaaccatgggaacattga

SEQ ID NO: 382826 - DNA, 552 bp, Salmonella enterica
gtgggtaacgaacctatttggaaagttgaacgtcagccagcctggctggtggccgcgattaaaaagacgattaccgatctgcctggtggctacgccgaagctgcggaatggttgggcgtgacagagaacgcattgtttaaccgccttcgtgtggatggggatcagatcttccctatgggatgggcgatggtgctacagaaagcagccggtgttagctacatagcagatgcgttttctcgtcaaacagataacgggattcatatccctggcgcagcaccagaaacagagaacgaagaaattggcttaaagctggctgagctggtgggcaggcttggggatctggtcaacgcataccgtcgatacatcgatgatggtgtagttgataaaggggagtgggacagtctgaatgaaatcgcctaccagttccgggtaacgcttatgacgttcctgaacctgatttcacgagtttattgccttccagaaaagagtgacgcccgcgagtgtgcagctccgggcgccttggcgaacaactcttcgagtatggagaaataa

SEQ ID NO: 382827 - DNA, 246 bp, Salmonella enterica
atgcaatcaccgttacgaatcttgcgtaaatcgcaaggtatgactctttcctatgtagcaaaaggggttgatatcgacccgggaaatctaagtcggatagagcgagggcagcaaattgcttccctggatattgctgaacgtctagtccgtttcttctcgggaaaaatcaatgagctagaaatcctttatccacatcgctattcgaactgtacaggcgtgagtacagacataaaaccacaggaataa

SEQ ID NO: 382828 - DNA, 435 bp, Salmonella enterica
gtgtttagagtggagattcttgatgttagtgccagtgctggtggcggctttattcaaggcagcgacatcattgatgtcatcaggtcaatcgaatacaacaatgaacgtgcgctagcgatgttcggcggaagaacggcagatcaagtaaaggtaatcaacgttcgaggcgacagtatggctgagacaatcgagccaggtgatcttctcttcgttgatatctctattcatgagttcgatggtgatggaatctatgtatttggttttgatgataaaatttacgtcaaacgattacagatgatacctgataagttgttggtgatatcggataacccaaaatatagagaatggtccgtggacaagaccaacgaacaccgtttttacatttttgggaaagtaatgataagccaatctcaatcattcaaacgtcacgcctga

SEQ ID NO: 382829 - DNA, 372 bp, Salmonella enterica
atgagtaatgaccgcatgaccgtagtgccagattttcttggcgaactggatgccggcgtgttcatgaacaaaatcgcggcagcacttaataccaccgcgcttggcgttctgaacaatggcaacaaaggcaaagtagtcctcacctttgattttgagagtatgggtaattccgttgaagagaagcgcgtgaagatcaagcacaagctgaactacagcaccccgacaccgcgtggtaaagcctcagaagaggacacaaccgaaaccccgatgtgggtcaacaaaggcgggaagctcaccatcctacaggaagaccagggcaacttgtttaccctcggcggggatccggacggaaagttacgcgcggcgaaataa

SEQ ID NO: 382830 - DNA, 828 bp, Salmonella enterica
atgtctcagttagacagcggcaccttcaagcaggtcaaagacctggttctttccggttatcacctgaatgatattcatggcctggcttgcccgaccgcattactgccagagggtactggcattgaaagcctcgagcgcttttctctggagcgtttccgctttcgtggtgcaatgaccacaaccagtattgacgacttcgcacgttattctaaaggctatgccagcgaaagtgagccagctcgttgcttcattgacgctgacaatatgaccgcccgttcagtgttcaacatcggaaccctggataatcccggtcacgccgataacgttgcttcaatcaccctgaagaaaaccgccccgttccgcgcgttactgcagatcgatggtcaacgtctgaagcaaaagcaaattgctgaatggctggaagactggagcgattacctgctggcgtttgatgctgatggcaatacgatgcagatttcccaggcggctcaggctgtgcgtcgtatcactattcagcaagcaacacagcaggaccatgaaactggtgatttcgctggtaaaaaatcgctgatgcaaagcgttgaagcaagcagcaaagacgtaatgcctgtggcgttcgagttcaaatgtgtgccgtatgaaggtctgggcgaacgccgctttaacttgcgtaacagcctgctgaccagcgatgaaccctgctttgttctgcgcatcgtccaactggaagcacaggaagaagcgatcgccaacgaattccgcgatttgctgatcagcaagttcgacggtgaatcagtggaaactttcatcggtaactttaaagcgtaa

SEQ ID NO: 382831 - DNA, 540 bp, Salmonella enterica
atgagctatattcagacattttccggtaaaaaatttaactacctgaccgccacaatcgacgatatcgatgttgaggatatcgcgacagcgctttccaatatctgtcgattcgctgggcatctgccagagttctacagtgtggcccagcactctgtgcttgtaagccagattgtaccgccagagttcgcctttgaagcgttgatgcacgacgctgccgaggcatattgccaggatattccggccccactcaaagcattgctgcctgactaccagcgcatggaaacttatgttgatggtcttatccgctttaaattcggtatctctcttgaacaagctactgtcgtgaaatatgccgatctcaccatgttagccaccgagcgccgtgatctggaaatcgatgacggttctaagtgggaaattctcgaaggtattccctgctctgatctcgttcaggttatccctctccgtcctggtcaagcctatggcctgttcatgaatcgctttaacgaactgatggatctgcgccaatgcgccgcatga

SEQ ID NO: 382832 - DNA, 186 bp, Salmonella enterica
atgcgccgcatgaaggtaaaagagctcgtagcggaggcttttacctccgttgctgaattaccaccaaaacatgcaccgcttatgcgcgaagtcgccaccagactggacgctacgttcgcagcattaaaagagtctctggtgcaactggaacaggaacgtaaaggtaaacgccatgaccgtatttga

SEQ ID NO: 382833 - DNA, 255 bp, Salmonella enterica
atgaccgtatttgaatatctccaggctcatccgaataccaccagcggtgaaatcgccaaaggtatgaacaaaaagacacccgcggtcgctggcgcattatcgcaactctatggcaccggccggatcgtgaagtctggtgttcgcaagggaattcctacttaccgtgttaacgatatgccgtttgggtgtagtaacagcctaaccatgatgtttaaccagctcttgagcagagccagacaaggagcagcccaatga

SEQ ID NO: 382834 - DNA, 531 bp, Salmonella enterica
atgacagtccatacaattaagcaatgccgccctgaccagaaagaaaccgagtatttctggaaattgtttcatgcggcgcaacgcaacgatgctcgctggcacggtagtgaaatcagcattatcgccgatgagctatcccgaacggatttagatcgtaaccaaaaactgtttcttctccgcgcctggcaagtgcttgtagacgacaaaggtggattcgggcgctttatgggtgcttttgatacttacgtctacaacatgcaggacccggatgatgactgtgtagcgtggaagcctgaacttagcaaactgctgtgtgacgggcaattgttggacgtggttatcgatgcttatcagtctgctcggcagcgcatagcagaactggaggcgcggacggttgcagtaaagcaattcgatgacttccagattgtccactatggcggttctgaggattacgcgaaaggttatatcgactgccaaaacaactacaacaaagctttgaccgccgctggcattggcgtggaaggggagtga

SEQ ID NO: 382835 - DNA, 558 bp, Salmonella enterica
atgaaaactaacaaccacccggcgcacggtcctgtatcactcgatcgcctgcacaagatacgcgaaatactcagtaaagcagcagcacaaagcgacggcggtaatctcggctacgcaatggctgatgctgtgaaggtgattgatggggttctggagtcgatagcccgtgaacaagtacgccgtgaacatgcagcatggtcacaggctactttcggcgatgtcggtccagttggtccgttgaagcacctttccaaagaagctctcgaggcggctgctgaaccaggcgaccttagcgaatttgctgacatgcaattcctgttatgggatgcgcaacgtcgtgccggtatcagtgacgagcagattaccctggcgatggtagaaaagctggcggtgaataagcagcgcgaatggcctgagccgaaagacggtgaaccgcgactgcatatcaaagagaaatcagaactggtgcttccggaaattgaatgcgatatctgcggacatgtatctactgacccagaggggcggcactactgctacgaggataacagtaatgattga

SEQ ID NO: 382836 - DNA, 336 bp, Salmonella enterica
atgattgataaataccgtttggaggatatgcggcgcgaaagcggtgaaaagggagaacttgcccgatgggtaatccagttgcaaacagacctggatagtgagcgccgcaaagctggcaactctcctgtaattccggatggctatgtgctggtgcccatcgttccgaccgagggcatgattattaacggcttcgaatcggttccagatccacatttcagcgatgaaaaagagtgggaggagtacgaagcattgagtggatgccgtcaggcggcgcgccgggctgagttatgctgggcagcaatgattaaagcagcaccgaaacaggagaatatttaa

SEQ ID NO: 382837 - DNA, 570 bp, Salmonella enterica
gtgaacaatttaatgatcgaccttgaatccatgggcaaaaaaccaaatgcccctatcgtctccattggtgccgtgttcttcgatccgcaaagcggtgaactgggtcaggagttttacaccgccgttaaccttgaaagtgctatggaacagggagcagtgccggatggtgacactattctgtggtggttaagacagagctcagaagcgcgatcagcaatctgtgttgatgatgcgatgccgatatcgtctgccctatctgaactgagccatttcattaatcggcattctgataacccaaaatatttaaaagtttggggcaatggagctactttcgacaacgttatattgcgcggcgcatatgagcgcgccggccaggtttgtccgtggcaatcttggaacgatcacgacgtcagaaccatcgtcacattaggcagagttgtgggtttcgatccaaagcgtgatatgccatttgatgggatagcacataacgcgctggctgatgcccgccaccaggcgaaatatgtttcagcgatttggcagaaactaatcccaaccaccagcaacagctaa

SEQ ID NO: 382838 - DNA, 840 bp, Salmonella enterica
atggcggcagaaagctgggttaccataggtggattttttgctacaacagcttcagctattgcagcgttctttgctgtaaaacaaaccatgttacaaagaacgatttcgacaaaaccgcagctcatcattaacaatcaggaagtaaaagctattcactccctaagtaacacattcgcactaaaaattgaagaaaataatttttattttgatattcccattataataaaaaacgtaggattagggaccgctttaaatataaaatacaattggtcatttgactacaagaagtatattaaaaaatgtggatttaaagaaataggtgaagaccctgtattctcaccttcaaaaataatggaaaatgtatgggataaacactatcactactctaatgacgaaaattcgagttatgaatactataagtttattaaaaatcaaaaattaaatcattatggaataaaaaaggaacattgcgaacttgaatatattatgccagttactcaagagagtaccccttcaaaaattgagttccctacactgataatgttattgttgactgaatacctatattctaaaagaacatctgatagcacaatatttgatgtattagatgcaggccaactacatctaaaatatgaggatatctctggaaatagaaataaaatcatctttaattgcaccatacaattgataagctatcagagtaaaagcgagaacggtccaagatcaacattcagaatcgaattcactcgtgttcattccgggtctaagttaggactacaaaggatacgcaaaagctacgcagattttataaatgaacacgattacaataaaaacaaatag

SEQ ID NO: 382839 - DNA, 1242 bp, Salmonella enterica
gtggcaagaaaaaccaagccgttaacggatacggaaatcaaagcagccaaatctaaagatgccgattatcagttgtatgatggtgacggactgacgctgctaatcaaatccagtggcagtaagctctggcaattccgttattaccgacctctgacaaaacagcgaactaaacagagcttcggttcctatcctgctgtctcgctttccgatgctcgtaagctcagagctgaatccaaagtattactggcaaaaggaatcgatcctcaggaataccaaaaagaacagataagaaattctcaggaggccaaaaccaacactttcttgttagttgccgagcgttggtggaatgtgaagaaagccagtgtaaccgaggactatgctgatgatatctggcgttcgcttgaaagagatatatttcccgcaattggcaacgtaagcgttacagatattaaagcccatacactggttcaagccgtgcaacccgttcaggcccgaggagcactggaaactgtccgccgtctttgccaacggatcaatgaagtcatgatttatgcccaaaacacgggcctgattgatgcagttcccagtgttaatattggcaaagccttcgagaaacctcagaaaaagaacatgcccagtattcgtccggatcagttgcctcagttgatgcaaactatgcgtacggccagtatcagcctgtctacgcggtgtctgttcatgtggcaacttctcaccatcacccgccccgcagaagccgcagaagctcggtggaatgagatcgattttgatgctaacgaatggaaaattccagcagcccgaatgaaaatgaaccgggaccataccgttccattatctgatggggctctggctattctggaaatgatgaagccgctcagtggtggccgagattttatttttccaagccgcattaagcccactcagccgatgaacagtcaaaccgtgaatgctgcactcaagcgtgccggtttagggggagtgctggtttcacatggtttgcgttctatcgccagtacagccctcaatgagcaaggatttcctcctgatgtcattgaagccgcacttgctcatgtagacaaaaatgaggtacgtcgcgcttataaccgcagtgattatcttgagcaacgtaggccgatgatgcaatggtgggctgattttgttaaaagagcagataaaggaagcatggtagaatctagtgccggtgcattaaaacttgttgtttga

SEQ ID NO: 382840 - DNA, 762 bp, Salmonella enterica
atgcttgatattttttgctcggaatttgaagaaaaaagaaacaaattaaagacctaccttgaaagctcgggatttctttataggcattctatcatcaaaaaaatgtctcttttggatggtatggatgaaagccagaattttgagttgttgcaggcgaaacaatataatcgtgatgatatacaatgctgggagtatattagctctaagtggaccgtcgttcctattatgatgggttcgcaaagccttaaacacttttttacatggaattttaaggccgctgggatatttcagcgatatggaaaggatatgtgggatatcaataagataattgcagttaaatctttattgtttgctagttcagtcttaggtagttgccttggggttgcaggctatggcccgttgctgccttcggagcttgcattagacaaaaagaagctaactaagaaaaaacagtcagcaagaatgggagggatatctaaggctgaattatatctcccgataaaagaagagacgataagattgctccaccaaaatgttcctgtggatggtagatggaaaaataaaacggttgcagcaaaggcaatagaggcagatttagtcatctttgtacaaaatttgaaatctcaaaaccaaaatctggatcttaatgaagaagatattattacagtcgtcaaacgttgggaacgcaatgatgaaagagtaaaggctgcatttgagggaacggtgaagcaaaaaatctctggcaagaagggctcgggttag

SEQ ID NO: 382841 - DNA, 396 bp, Salmonella enterica
atgggcgcttttctcgtcggtctgcacgaacacctgttgcagcgccgcacggaccaccgactggtttgcacggctgacgcggctcagcacgttgcgcatgaagtggacccggcagcgctgccagctggcggagaacatctgcctatcgccgccttcaggctcagcaggaaggtcagccaggatgccgtttatccatgcttcctggataaccgcgttgagcgccttctcagacaatctgtgggcctccaggaagggcgggaagtacgtccctttaagcagcttcggaatacgcaggtccacagcgtgccgagctggcggggactgacggtcacgatagccgttgtggtaggtttcgcgctcatcgctgcgctagtgggctccgcgttgatgtgctga

SEQ ID NO: 382842 - DNA, 213 bp, Salmonella enterica; identical to SEQ ID NO: 39282

SEQ ID NO: 382843 - DNA, 522 bp, Salmonella enterica
gtgactctggaagaatactgttcgttaatctggaaaacgaacatcatgagcccattaaaaatcccaattacagattactttaaactgaacgctaatgatgaattcatggggaaagatgaaaaaacagttatacgtgaaaggctatcctcgctaagggaaaattacgatatggaaaaagccatttacatttacaatcagaggaaatttgatgtaaagaaacaaagtatctcaggagattcaaatattattcttatccatagaacaacctttgagggttattactttgatgccgggcaggctctactcttgtcagcatcccaattgattatattcgggataaatgaagttcttagaagaaaggagatcgttatgccttatccagttgtttgctggattgatatttaccatgtcaatgagatggtggttatgctgccagtgatccgcaaaacagatgtttccaaccgcgttaatgcaccggatgacatcattataaacccatactcacaggagagcagaacctaa

SEQ ID NO: 382844 - DNA, 699 bp, Salmonella enterica
atgagaggtaaaatactactttaccagtcaaagtatcgctggcaatcactctctatttttggttgttttttatgcaaaatgacattattcaggtatcaaaaaataatttatgacaccggagtgcatcagatgcgttcatttttttacaccatatgcagtagcgaacagcaagaaagcattacagatcatcactcacttgctgagatatgccaaaaatttaatattctatctgaacatgttgtgatcgagcgggtagatattaaagaggttgtttcagagcaacgtttactcagacaattgattcatcatgaaatgaaccggcaggacacgcttgtaattccagatctaagctgtcttggcagaactgtggaggatttacagaatattttatttttttgccttcaaaaagaaatatttatctacagctaccatccagcttcaaggatagagccttctgctgaaagttgcttgtcttttttgattgctcgtcaggatacgattgacattcacaatctgaaatcaactaaaagccgatatcgacatgttaagaagaaattaggacgaaaggagggaagcaaataccgacgtgatatcacaatacttaagaaaggtggatttactcaggctgagattgcaaagaaattgagtatcagtttatcgactgtgaagcggcactggaataacggaatcatcggttaa

SEQ ID NO: 382845 - DNA, 627 bp, Salmonella enterica; identical to SEQ ID NO: 21323

SEQ ID NO: 382846 - DNA, 2574 bp, Salmonella enterica
atgaaatttactctcaaggactatcagcgcgatgcggtacatgatgctctggcgaatctcaggaaggctcgacgttactggcacaacgagagcgacaaaagcgccttctctttaacggctgtaaccggtgcgggtaagaccgtcatggctgctgctgcatttgaagcattgtttcatggtgacgacgaatttaatttcgatgcagatcccggcgcggtggtgatctggttcagtgatgatccagcactgaatgagcaaacccgttttcgcctgatggaggcgagtgaccgtatcaactacaacgatatggtggtagttgaacatcccttcagtcggcgtaagtttcaggctggaaaaatctatttccttaacacgcagaagtttggcaaaaaaagcctcctggtgcgcgggttcgatgataaaggcggccttttcgaagcagcccctgatgcacaggcttatacgctgtgggataccatccagaacaccatcgaagacccggatctgaccctttacttagtgctggatgaagcgcacagagggatgggctcgtcaacggcttccagtgaagctgctaagagtactattgtacaacggcttatcaatggttcggctggagtgaagggtattccagtagtgtggggtatttccgccacagttgaacgtttcgacaaagccattgccaatgctggtcatcatgtcaaactgccgaatgtggtggttgaccccgctaaagtgcaggaatctggacttatcaaggacgatatcattctgggtgtgcctgatgaagctggtgacttcgataccgtgtgggtacgccgtgctgccgacaaactcagggaagcgaccgatgcctgggcagagtacgcaagacagcaggaaaccgtgcgcgaagtagtgccgctaatggtattccaggtacctaatacgcctgacccgaatgaggtggggcgttggctggatacgttattctcccgttatcctgaattgtccattgacagtgttgctcatgtcttcggtgaacacaccacacaacgtttcggccaacatcaggtgccttatattgaaccgcagcgggtgcaggaatcaacctggatgcgagtactgattgctaaagatgccatcagcactggctgggattgcccacgtgccgaagtgatggtttccttccgcgcagccagccacaggacgcatattacgcaattgttggggcgtatggtgcgtactccattggcgagacgtattccgggtaatgagcgtttaaactctgtagaatgcctgttgcccaagtttaataccaataccgtgagagatgtcgtcaataccttgtttaagggcgatgatacctctcctccaagcggacgcatcctggttaaccctgtggagatgaaacctaacccggctgcttcagctgaagtatgggaagcatttgaagcgctaccttcgcaaacccgaccacagaaaggagccagacccgccagacgtctgaccgcgctggcacaggaactggttgatgacggcattcttgatggggcagtcaggaaagcccatgctgctttgcacgctgttctggacaagttccagatagaaaatgccgagaaaatcaaaaacaaacgcaatgcagtgctcgtcgtagatggtaaggctgtggttgccagcctcaagaacaaagcaatgaccttcaacgaattctgggaggaggcggacgtaacggtgattgatgacgcctaccggcgtgcagcccgaattttcagcccggatgtttcacgtacctatgtcgaatatctggccgataaggttgcggatcgagaagaggatgcagaggaatatctggaagcaatcatggaggctcgtgttaccgttgctggcatggggctggtgatggaggtgcaggattacttcgatggcgaggccgatagactggcgaaggcgtggctggccgagtacacaccgcaaatcaagtcgttgaaagatgagcgtaaagaggcctatcgtcaaatcgtcgaaatgagtaccgaaccgcaggatgtggatctggtcaggccggcgaacaagtttgaaatgaccagggtgcgtgaaggtgaaaaggaagctgaccttccagtctggaaacaccatttgttgtgtgacgaaagcgggaactatccggctctgttgaaccattgggaaaccaaggtttttgagatcgaaaccaaacgtgaaggatttgctttctggtatcgtaatccacagtacacagggcagtcgtcactgggaatcgcttatgttgaagctgaacagtacaagattgttcgtcccgatttcctgttctttgccgaacaggatggcaaaatggttgtggacctggtagatccacatagcctacatctggctgatgttttgcccaaactggaaggacttgcgctatatgccgaacatcattctgatgcttacaggcgaatcgaatctgtcgccgaagtaaagggtaaattacgagtgttagatttgaaacggcaggatgtgcaggatgctgttgctaccgctgaaaatgcagaaacgttatttagtagcggacttgctgatgactatcagtaa

SEQ ID NO: 382847 - DNA, 222 bp, Salmonella enterica; identical to SEQ ID NO: 142262

SEQ ID NO: 382848 - DNA, 408 bp, Salmonella enterica; identical to SEQ ID NO: 194083

SEQ ID NO: 382849 - DNA, 897 bp, Salmonella enterica; identical to SEQ ID NO: 108036

SEQ ID NO: 382850 - DNA, 513 bp, Salmonella enterica; identical to SEQ ID NO: 194081

SEQ ID NO: 382851 - DNA, 1290 bp, Salmonella enterica; identical to SEQ ID NO: 153640

SEQ ID NO: 382852 - DNA, 165 bp, Salmonella enterica; identical to SEQ ID NO: 197342

SEQ ID NO: 382853 - DNA, 285 bp, Salmonella enterica; identical to SEQ ID NO: 197343

SEQ ID NO: 382854 - DNA, 771 bp, Salmonella enterica
atgacaaaaaacacctcacgctacccacagcgcgtgcgtaacgaactacgttttcgcgaattaaccgtgctgcgcgttgagcgtatcggccaggcgttccagcggatcgtgctggggggcgaggcgctggatggctttgtttcacaaggttttgacgaccacaccaaactgtttttcccgcaggcgggcagcgtatttacgccgccggaagtgaccgacgaaggcattaactggggcgagggcgtgcgcccggcgacccgcgactacacgccgctgtacgatgccgaacgccacgagctggcttacgatttttatatccacgatggcggtattgccagccgctgggcgctggaagccaacatcggcgataagctggtgatcggcgggccgcgcggctcgctggtggtgccggaagattacgcctggcagctttatgtctgtgacgagtcgggcatgccggcgctgcgccgtcgcctgctgggattacgtcagctgccggtgacgccgcaggtgacggccatcgtcaccgtcgcggatgcttcgtataaagattatctggcggatctcggcggctttaatatcgaatgggtggtaggccacaacccagcgttcgtcgccgagcggctggctcaggtcaaggtgccgtcagaagattattttatctggctgaccggagaaggcggcgtggtgaaatcgctgctggcgcgctttgaggagccgagtatcgatcagcaactggtgcgttcgcaggcgtactggcatagcaaataa

SEQ ID NO: 382855 - DNA, 1650 bp, Salmonella enterica
atgtctcaattcttttttaaccagcgcgccagcctcgttaacgacgtgatcgagggaaccattattgccagcccgtggaacaacctcgcccgcctggagagcgacccggcgatccgtgtagtggtacgccgcgatctgaataaaaacaacgtggcggtgatttccggcggcggctccggccatgaaccggcgcacgtcggctttattggtaaaggcatgctgaccgccgcggtctgcggcgatctgttcgcctcgccgagcgtcgatgcggtactcaccgcgattcaggcggtgaccggcgaggcgggctgtctgctgatcgttaaaaactacaccggcgatcggcttaacttcggcctcgcggcggagaaagcgcgccgtcttggctataacgtagagatgctgatcgtcggcgacgatatttcgctgccggataacaaacagccgcgcggtatcgccgggactattcttgtgcataaggtggcgggctatttcgccgagcgcggcttcaacctcgccaccgtactgcgtgaagcgcagtacgcagccaacaacaccttcagcctgggtgttgcgctttccagctgtcatctgccgcaggaagcggaaagcgcgccgcgccatcagcccggccacgccgagctggggatgggcatccacggcgaaccgggagcctcgacgatcgcgacccataacagcgcggaaatcatgcagattatggtagagaagctgaccgccgccctacctgaaaccggccgcctggcggtgatgctcaataatctcggcggcgtgtcggtggccgagatggcgattctgacccgcgagctggccaacaccccactccatgcgcgcgttgactggttgattggcccggcttcgctggtaacggcgctggatatgaaaggcttctcgctgaccactatcgtgctggaagagagcattgaaaaggcgctgctgtcggatgtcgaaaccgccagttggcagaagccggtgcagccgcgggctgttaatatcatgccgtccgcgctcgccagcgcacgcgtcgcctttacgccatcggccaacccgcaggtgggcgattacgtggcgcaggtgaccagcaccctctccggcctcgaaacccatctcaacgcgcttgacgccaaagtgggcgacggcgataccggctccactttcgccgctggcgcgcgtgcgattgccgctctattgcaacgccagcaactgccgctcaatgatttacccacgctgttcgcgctaattggcgaacgcctgacggtggtgatgggcggctccagcggcgtattgatgtcgattttcttcaccgccgccgggcagaagctggagcaaggcgccagcatggcggaagcgctgaacgccggtctggggcagatgaaattttacggcggcgccgatgagggcgaccggacgatgattgacgctctacagccggcgctggcggcgctgctggccgaaccggataatctgcaggccgctttcgccgcggcgcaggccggcgcggatcgcacctgccagtcgagcaaagccggcgccggacgcgcctcctatctcaatagcgagagcctgctcggcaatatggaccccggcgcccacgcggtggcgatggtgtttaaggcgctggcggaacgctaa

SEQ ID NO: 382856 - DNA, 1419 bp, Salmonella enterica
atggtaaacctggttattgtttctcatagcgcccggctgggcgaaggtgtcggagaactggcccggcagatgttaatgaacgatggctgtaagctggcgatcgccgccgggatcgacgatcccgacagcccgatcggcaccgatccgattaaagtcatggaggcgatcgaatccgtcgccgataccgaccatgttctggtgatgatggatatcggcagcgccctgctcagcgccgaaaccgccctcgatctgctcgatccggcgatggcggcaaaggtgcggctgtgcgccgcgccgctggtcgaagggacgctggcggccaccgtcagcgccgcctccggcgccgggatcgacaaagttatcgccgatgccatgaacgccctggaagccaagcgggttcagctgggtttaccttcgcacacgcctgacgccgccgccccaacgcttgctgacgacggcgatgctaaatcggtttcagtcattattaacaatcacaacggcctgcacgtgcgtccggcatcaaagctggtcgccgcgctggcgggttttaacgccgacctggtgctggagaaaaacggcaaatgcgtcaccccggacagtctgaatcaaatcgctctgctacaggtgcgccgccacgataagctgcgcctgctggcccgcggtccggacgccgatgcggcgctggcggcgtttcaggcgctggccgccgataacttcggcgagtcaccggaggcgcagccgacagcggaacccgccatacctgcgcgtgttgaaggcgccgcgatgctttatccgctggcgccgatccaaccggcgctccccgccgccgccgacatcgcccgcgagcagcagcgcctgcgccaggcgatcgaccagacgctggccgatctcaatgcgctcaccgagctggcggaacacaaatttaacgccgatatcgcggcgatcttcgccggtcatcacaccttgctcgacgatgaagatctgtttgatgccgccaacgatcgcctgctcaccgaacagtgctcggcggaatgggcgtggcatcaagtgctgatggagctcagccagcagtatcgtcagctggatgacgcctatctgcaggcccgttatatcgatgtcgacgatattctgcagcgcacgctgcgccatctgcagggtattaaggagacgctgccattcgccagtgagccgacgattattatcgccgacaatatttatccctcgactgtactccaactggatgccagcaaggtcaccggcctgtgcctgcgcgacggcagcgaacaggcccacggcgcgattatcgcccgcgcggcggggatcgcctggctatgccagcagggcgaagcgctgaatgatattcagcctggcgaagccatcacgctcgatatgcgtctgcaacgtcttattcgtcgctaa

SEQ ID NO: 382857 - DNA, 633 bp, Salmonella enterica; identical to SEQ ID NO: 197348

SEQ ID NO: 382858 - DNA, 1071 bp, Salmonella enterica
atggaaaaactgattaaccgtgtggaagatgtactgagtgaacagcttatcggcctggcgaaggcgcatcctgaactgacgctgcaccaggacccggtctatgtcacccgcgctgatgcaccggtcgccggcaaagtggcgctgctctccggcggcggcagcggacacgaaccgatgcactgcggctacatcggccagggcatgctctccggcgcctgtccgggggaaattttcacctcgccgacgccggacaaaatgttcgaatgcgcgatgcagattgacggcggcgaaggcgtcctgctgattatcaaaaactataccggcgacatcctgaattttgagaccgccaccgagctgctgcacgaaagtggcgttaaggttaccaccgtcgtggtggatgacgacgtggcggtaaaagacagcctctataccgccggacgccgcggcgtcgccaataccgtgctgattgaaaaactggtcggcgccgccgccgaacgcggcgactcgctggaagcctgcgctgaactgggccgccgtttaaataaccttggtcactcgattggcatcgcgctgggcgcctgcaccgtaccggccgccggacagccctcctttaccctgaaagatgatgagatggagttcggcgtcggcatccatggcgagccgggtatcgaccgccgccgcttcagctcgctcgaccaaaccgtcgatgagatgttcgataccctgctggaaaacggcgcatacagccgcacgctgcgccagtgggataacgtcaagggagcgtggcaggaagtgaaacagagcaaaaccgcgctgcaaaacggcgatcgggttatcgcgctggtcaataacctcggcgccaccccgctttccgaactgtacggcgtttacaaccgccttgcccagcgctgcgaagcgtccggcattgtgattgaacgcaacctcatcggcagctactgcacctcgctggatatggcgggtttctccatcaccctgctgaaagcggatgatgacacgctggcgttatgggacgccccggtccataccccagcgctgaactggggaaaataa

SEQ ID NO: 382859 - DNA, 1098 bp, Salmonella enterica
atgctaaaagttattcaatctccagccaaatatctccagggacctgatgccgccatgctgtttggcgaatacgctaaaaacctggccgacagcttttttgttatcgccgatgacttcgtgatgaagttggcgggcgacaaagtattgaacggcctgcatagccacaatattagctgccatgcggaacggtttaacggcgagtgcagccatgcggaaatcaaccgcctgatcgccattcttaagcagcacggctgccgcggcgtggtgggtatcggcggcgggaaaaccctcgataccgcgaaggcgatcggctattaccagaagctgccggtagtggtgatcccgacaattgcctcaaccgatgcgccgaccagcgcgctgtcggttatctacaccgaggcgggcgagtttgaagagtatctgatctacccgaaaaacccggatatggtggtgatggacacggcgattatcgccaaagcgccggtacgcttgctggtggccgggatgggcgatgcgctctccacctggtttgaagccaaggcctgcttcgatgcgcgagccaccagcatggcgggcgggcagtccacggcggcggccttgagcctggcgcgcctgtgctatgatacgctgctggcggaaggcgaaaaagcacgcctggcggctcaggctggagtggtgaccgatgcgctggagcgtattgtcgaagccaacacctatctgagcggtatcggttttgagagcagcggcctggccggcgcgcacgcgattcacaacggtttcaccatccttgaagagtgccaccatctgtatcacggcgaaaaagtcgctttcggcaccctggcgcagctggtactgcaaaatagcccgctggaagagatcgaaaccgtgatgggcttctgtgaaaaagtcggcctgccgatcacccttgcccagatgggcgtgaaagagggtatcgaaagcaaaatccacgcggtggcgaaagccacctgcgcggaaggtgaaaccatccacaatatgccgttcccggtcaccgcggatagcgtctacgccgccatccttaccgcggacctgcttgggcagcagtggctggcgcgttaa

SEQ ID NO: 382860 - DNA, 756 bp, Salmonella enterica
atgacagctcagactcagggtgcggaaaatgaagtttcagccgttatcagccagtcgtggcatcgctgcagcaaatttatgcagcgtgaaacctggcaggcgccgcatcaggcgcaggggctgacctttgaatcgatctgccgtcgcaaaaccgcgctgctgaccatcggccaggcggcgctggaagatgcgtgggagtttatggccaaccgttcctgcgcgctgttcatccttgatgagtcggcctgtattctgagccgctgtggcaatccgcagaccctggaacagctggcggaactgggatttcgcgacggcagctactgcgcggagagcattatcggcacctgcgcgctgtcgctagcttctatgctcggtcagccggtcaacaccgcgggcgacgagcactttaagcaggcgctgcggcgctggtcgttcagttcgacgccggtgttcgataaccatggccgcctgtttggatcgatttcgctatgctgcctgcgcgaagagtgggccccggcggatctgtcgctgacgttgactattgcccgcgaagtgggtaactcgctgcttaccgacagcctgctggcggaatctaaccgccaccttaatcaaatgtacggcctgctggaaagtatggacgacggggtgatggcgtggaacgaacagggcgtgctgcagtttctcaacgtgcaggcggccacgctgctgcatctcgatacccaggctagccagggcgaaatatcaatgagctgctga

SEQ ID NO: 382861 - DNA, 459 bp, Salmonella enterica
ttgctgcgccgcgcaattaaacaggcccgcggccttaatcatgtggaagtgaccttcgagagccagcatcagtttatcgacgcggtgatcaccctgaagcctatcgtggaggagcagggcaatagcttcattttactgctccacccggtggagcagatgcgtcaattaatgaccagccaattgggcaaagtgagccataccttcgagcagatgtcggcggatgacccggaaacccgcaggctgatccactttggccgccaggcggcgcgcggcgctttcccggtgctgctgtgcggcgaggaaggggtgggtaaagaattgctgagccaggctatccataacgaaagcgagcgggcgccgggccctacatcgccgtcaactgccagctatatgccgacagcgtgctgggccaggactttatgggcagcgcccctaccgacgatgaaaatggtcgcctga

SEQ ID NO: 382862 - DNA, 744 bp, Salmonella enterica
atgggcagcgcccctaccgacgatgaaaatggtcgcctgagccgccttgagctggccaacggcggcaccctgtttctggaaaagatcgagtatctggcgccggagctgcagtcggccctgctgcaggtgattaagcagggcgtgctcacccgcctcgacgcccggcgcctgatcccggtggatgtgaaagtgatcgccaccaccaccgtcgatctggccaatctggtggagcagaaccgctttagccgccagctgtactatgcgctacattcgtttgaaatagtcattccaccgctgcgggcgcggcgcggcagcattccttcgctggtgcatagccgcctgcgtcggctggagaaacgcttttcatcacgcctgaaggtcgatgacgacgcgctggcgcaactgaccgcctactcgtggccgggcaacgattttgaactcaatagcattattgagaatatcgcaatgagtagcgataacggtcatattcgcctgagcaatcttcccgaacatctcttctctacccggctgggtagcgaggcgtcctcatcgctactgccatcaagtctctccttcagcgccatcgagaaagaggcgattatccaggcggcgcgagtgaccagcggccgggtacaggagatgtcgcagttgctgaatattggccgtaccacgctgtggcgcaagatgaagcagtacgacatcgacgccgggcagtttaagcgccgggggcaggataagagttaa

SEQ ID NO: 382863 - DNA, 696 bp, Salmonella enterica
atgagtcgtattcaaacgccctattcccacatcatcgatgaatataataagatgatttcaaagaatataaaggcgatagactcattaagtcatagcagtaatatacgccagattgccgatgatacgtctttcaccctgagtacaggcgagattattattgttcttgagggcgttattgccgttgagatgcaggagcacaactttattctcgccccaggaaaagcgaaaacccaggcgaaaaagttgtttcaggtcggcaaaggcatcaaaggaatgttttttggtattgtcgaaagttatggcccgggtattcagctgcactataccgccaaaaaaaatgtcaaagtgttcagctgtaatctcgaatactttgagaaacattttactcagcccgataaattcaccttcctgatgaacatgatggccatcacgctggcgtttttgctcgatgcgcatgacgaaagagctattggcacccgctattttgtcattcgctccatgatttatcgctatctcaagcagaaaaatgagggtgtattacacgacccgagcctggcgaactttatcctgcgacgtacaaaaatatcgcgtagctatctgtttcaggtactttccgatctgaaaaacggcggctatatcacgatgaaaaacggcgagctcgtcgatattgtcaacgagctgccggaaaaatattaa

SEQ ID NO: 382864 - DNA, 330 bp, Salmonella enterica
atgtctcaattcttttttaatcaacgcccccatctcgttagcgacgtgatcgacggtacaattatcaccagcccgtggaataacctggcgcgtctggagagcgacccggcgatccgtgtagtggtacgccgcgatctgaataaaaacaacgtggcggtgatttccggcggcggctccggccatgaaccggcgcacgtcggctttattggtaaaggcatgctgaccgccgcggtctgcggcgatctgttcgcctcgccgagcgtcgatgcggtactcaccgcgattcaggcggtgacctgctccccgttgattagtacaccccgatgttag

SEQ ID NO: 382865 - DNA, 1098 bp, Salmonella enterica
atgctaaaagttattcaatctccagccaaatatctccagggtcctgacgcttctaccttatttggtcaatacgctaaaaatctggcggacagctttttcgtgattgcggacgacttcgtcatgaagctggcgggagaaaaggtactcaatggcctgcacagccatgacattagctgccacgcggaacgcttcaacggtgaatgcagccatgttgaaattaatcgcctgattgccattctgaaaaaacacggttgccgcggcgtggttgggattggcggtgggaaaacgttagataccgccaaagcaattggttattaccagaagctgccggtagtggtgatcccgaccatcgcctcaaccgatgcgccaaccagcgcgctgtccgttatctataccgaagcgggtgagtttgaagagtatctgatctacccgaaaaacccggatatggtggtgatggataccgcaattattgccaaagcgccggtacgtctgctggtggccgggatgggcgatgcgctctcgacctggtttgaagcgaaagcctgttatgacgctcgggcgatcagcatggcgggcgggcagtccaccgtggcggcgctgagcctggcgcgcctgtgctatgatacgctgctggcggagggcgaaaaggcccgtctggcggcgcaggccggggtagtgaccgaagcgctggagcgcatcatcgaggcgaacacttacctcagtggcattggctttgaaagcagtggcctggccgccgcccacgcaatccacaacggtttcaccattcttgaagagtgccaccatctgtatcacggtgagaaagtggccttcggtaccctggcgcagctggtgctacagaacagcccgatggacgagattgaaacggtgctgggcttctgccagcgcgtcggcctgccggtgacgctcgcgcagatgggcgtcaaagaggggatcgacgagaaaatcgccgcggtggcgaaagctacctgcgcggaaggggaaaccatccataatatgccgtttgcggtgaccccggagagcgtccatgccgctatcctcaccgccgatctgttaggccagcagtggctggcgcgttaa

SEQ ID NO: 382866 - DNA, 351 bp, Salmonella enterica
atgccgatcgccggcggtgttgatcggctggccctgcatcgcggccagcgacagcgcgcaggtgccgataatgctctccgcacaatagctgccgtcgcgaaatcccagggcagccagctgggccagggtttgcggctcgccgcaacggctcaggatgcaggcagactcatcaagaataaacagcgcgcaggggcggccgtccataaactcccaggcgtcttccagcgccgcctggccgatggtcagcagcgcggttttacgccgacagatggagtcgaaggtcaggccctgggcctggtgcggcgtttgccaggtttcgcgctgcataaacttgctgcagcggtgccatga

SEQ ID NO: 382867 - DNA, 420 bp, Salmonella enterica
atgctgactttcaaaggtgacttcgacgtgattcaggccacgggcgtgtttgatggcgcggcgcagcagcgccgggagggtcaccagatcggcgatatttttcccctggctggcctgagcatcaagatgcagcagtctcgccgcctgaacattgagaaactgcagcacgccctgttcgttccacgccatcaccccatcgtccatgctctccagcaggccgtacatctgattgaggtgacggttagattccgccagcaggctgtcggtaagcagggagttacccacctcgcgggcgatggccagcgtcagggagaggtcggcgctggactggtgctcgaccagacagcaaagcgagatagagccgaacagccgcccgtggttatcaaacaccggcgtcgagcaaaaactccatggctgtag

SEQ ID NO: 382868 - DNA, 1179 bp, Salmonella enterica; identical to SEQ ID NO: 197314

SEQ ID NO: 382869 - DNA, 2046 bp, Salmonella enterica; identical to SEQ ID NO: 197313

SEQ ID NO: 382870 - DNA, 2787 bp, Salmonella enterica; identical to SEQ ID NO: 142282

SEQ ID NO: 382871 - DNA, 1062 bp, Salmonella enterica; identical to SEQ ID NO: 142283

SEQ ID NO: 382872 - DNA, 636 bp, Salmonella enterica
atgaaattactcacctcggcggcgctggccgccagcctctgcattacctctgtgaccccggccatcgcagaaaatatcgtgggttcagttaaggcctggcagtacatgcaggctgatggctggaaatccgctgatggatacgatgataaccgcatgcataacgagttataccaggcggtcgttcttgataattatccctggacgaatcactttctgcttcgtagcagaggcggtagttcgctttatctggcagacaagaaagctaaaactgtcaaatacatcgatataaaacctcgcgacgagtatccgttacatcttcaggttgtttatcggggaactgatgacgggagtggctgttatttcgccattgtagatgaccgaatggcaaactactggacgattgttgaagatcgtcttctctatcaggacccacctgttgaagacgtcgatgcgaaagcagctgagcttagaaaacaactcacgccagaagtcgtgatgatggtgaaggataattgtattgacaaacagcagcaggctgcactggcagctaagcgttctgaaaaagatcgagagttgcaacagtgggtggcgaaacagagcctggcggaattatgtcgtcgtaccggcaactgctga

SEQ ID NO: 382873 - DNA, 453 bp, Salmonella enterica; identical to SEQ ID NO: 39289

SEQ ID NO: 382874 - DNA, 234 bp, Salmonella enterica; identical to SEQ ID NO: 39290

SEQ ID NO: 382875 - DNA, 819 bp, Salmonella enterica; identical to SEQ ID NO: 39291

SEQ ID NO: 382876 - DNA, 471 bp, Salmonella enterica
atgaccgataacactctgccactgttcacacccgcagcagatgctcctgctgcggctcagcatcagattatcgctataccggtaaccgatgagaaccgcatcagcttctggccgcagcactttggcagcattccgcagtggataatccttgagccgaccatcttcgcgtggatggaccgcttctgcacggactacagcggcggcatctggaatttttacacgctgagcaacggcggcgcgtttatggccccggaagtggagaacgatgaactctggtcgctgtttaacacgatgaacggcaactgcggtgacatgagtgccgaagctgcagggattgcggtctgtctgatggctttcagccaccatgcctgccgtaccgaatgcgacgccatgacggagcactactaccgcctgcgggactacgcgctcaaccacgcggaatgcaacgccatcatgcacatcatcgactga

SEQ ID NO: 382877 - DNA, 480 bp, Salmonella enterica
atggagcaacagttaccgttgtttgcccgtgaattagcccctgccgaccagcagacagtcaggaaagccttatctctgctggagtgccagctacgtgaaaccggcgcgtcatttacttccagccatgccgtccgcgactggctgcgcctgcagctcgcgtcactggagcgggaagagtttaccgcgctctttctcgataaccagcatcgcctgatagcccacgaaacgctatttaccggcaccatcaaccatacgcaggtccatccccgcgaagtggtgaaggccggtctgaagcataactgcgccgctgtcattgtcgcccatagccatccctccggggaggctgaacccagcaaggcagaccgtcaggtcacgacgcgtattcagcaggcgctggacctggttgatatccgcttgctggaccacctggtggtcggcggcatggagatcacctcgtttgcagatcgtggctggctgtag

SEQ ID NO: 382878 - DNA, 375 bp, Salmonella enterica
ttgtcgaataaaataccgacagtaaaccacgatatcactgaaccctggtgggggcttaaacgcagtatcacgccctgttttggcgcacggctggtgcagtcgggcaactgtctgcattatctcgctgaccgggccagcatcaccggacagttcagcgacggggatttacggcatctcgaccaggcatttccactgctgctcaaacagcttgaactgatgctcaccagcggtgaactcactccccgccatcagcactgtgtcaccctgtatgcaaagggactggtatgcgaggccgactcactcgggtcgtgcggctacatttatgtggcgatttaccccggagactcccctgaaaccggaggtatggcaccatga

SEQ ID NO: 382879 - DNA, 648 bp, Salmonella enterica
atgagtcgggtcatttccaccacggtgtatctgtctgatgaactctcagagtctgcccgcgagaaagctcgcgcctggtactgcgaagagggtgggctggagtatgagtggtacgacgctgtttatgaggatttcatccagatttgcaacatcctgggtgtaagactcaaaacacgtaccttcaccaccaccggcggcagatcccacgaaaaaacctgcatctggttttccggtttctgctgtcagggggatggcgcctgtttcgaaggtgattaccgctatcagcccggtgccgcacaacacatcagaaagcatgcgccgcaggacgaagtgcttcaccgtattgctgatgagctgcaggcaattcagcagcgtaacctctggctgcttcaggctgatattcagcatcaggggcgctattaccatgaatacagtatgcacattactgttgagcgtgattcccccatcggccagcaggccaccgacgacgcagactgtgtcctgagtgacgcgttacgcgacttggcccgctggttatatcagcaactggaaacgcaatatgactggctgacctcaccggaagccgtggatgaggcgcttatcgccggcggttacaccttcaccgaaaccggccagcgcctcggttaa

SEQ ID NO: 382880 - DNA, 492 bp, Salmonella enterica
atgaagctgtccatgaccgtggaagccggtgcgattaacgtccgggcccttaatgggggccggatcgtcgtggatatcgacggtattgaactcgccagcctgatcgacgtggtctgtgataacaggtattcacttcgcgttgtcgacgggtctgataaacaggccactgaagccacggtgccgccgtttaccgccctgccgggtatctgctgctctaccgcccatatcaccgaagacgacagcgccctgctgtttgccctttcgcaccagtatgaaaactacggcgagtcggagtggatccactatacaggttcgggttatctgcttcgtctggaagcgtggtcatttccggttatgcggctcaaacggctggggctgtcgaaagcctgccgccggttagtcgtgacgcttattcgtcgttattccatcagcatcctgcaccttgatgctttcggcgaactcctgccaggatttgtcaccttcgactggtaa

SEQ ID NO: 382881 - DNA, 849 bp, Salmonella enterica
atgtcagaacacactaatgccgaccctgaagtcctgactgaccataccgatgtgatttgctccaccagcattgaacgtattgttaccgggcgtaacgccgcgcttcaacagactgaatcacttatccaccagcttaacgatatctcgacgctgacccgcagtatcggcggcaaaagtgcactggactgggcgatgaagcaggatttccgttgcggttgctggttgatggagaaaccacaggcggcgatgaaagccattacccgcaatctcgatcgcagtatatggcgagacctgatgaagaagtcgggaatgctggcgctcatggacgcacaggcccgcgacgagtggtacaatagcctggagaaagacgatattcccgctgttagtgaaaagaatattcttagcacgtttgaacaattacaccacagcaaaggcgaagtatttgagcgtggggtgatcaacgtgtttaaagggctgagctgggattttaagagcaatagcccgtgcaagtttgggaaaaagatcatcgtcacagggctggtcaaatatgatcgctggggatttgggcttaactggggctggcagcgtgaccgcttagcagaccttgagcgtatgctggtgctactggatggaaagccagtgcccgataaccgctctgacgttacccgtcgtctcagcgatcatatccatgctaatcagcacagcacccgctataaggatgagatgtttaccatcaggtacttccggaaggggactgcgcatatctcgtttaagcggcctgaactggtcgataaactgaacgacatcattgtccggcactatctggggatgttagcgtgcgttaactga

SEQ ID NO: 382882 - DNA, 261 bp, Salmonella enterica
atgaatcttggtattttaaactcaagtgtggtgaaatggaaacagaacacattttctatctatatttcgattgtgcattttaaatttaaagtagttatgaatttttacatacaaaaaggaatgaaacatcttgtattagtgagattcaatcagtatatccgtatagttactctatatatttttccccgtctctccccatgtcccagagccgttgaagtcaccgccagcgcctccttatggctcaacccccgttcctcgtaa

SEQ ID NO: 382883 - DNA, 1179 bp, Salmonella enterica
atgaaaatttcatatttaaaatcgtctccgtcaatgattgaagtgttaaaaaatgactatgaaacatttataattcaaaactataaattcaatcacttaggtttattccatgacaaggaaaatatttatgctgtaatacagaattacaaagaatttaatactacattagatgaaatacaagaactttacaactacagatttaaaaatgcaggtgttccaggaccaacgtttacagaagaagtaaaagacaactatataaaaatagatcttagaaatatatatgaaaaagtaaatttatttggccaaccatttaacgcattcgaatttaataatagtatacgcatagccataccatctaaatttcatccttttcatgttgacatgaagtggtccgataacagttttacatttaccttcaataaagaacttacgtctaacgaaactgatgaaataattttaatatgtgaaagcttaggtttttatggttataagtacaatattaaaacagaccatgaactacttgattataatcatcaaaaaaaggaaagtaatacacaaggaaatcttacattaattgcgagccgataccttaggagcaaccaacctaaagaaatcttggaaaaatatgaagaggatcaagacttttggacagaaaaaagaatgaatattttttcagatgtaagtttcaccagagatgagtgtcttattgactcatttaagaagagtcaaaacagatgttttgtcgatgccagtattttcccacgaaataacataagagaatatctgtcactgtatgacactgtaattattgcaattccattagcagactcacccaatactcaaagtttttatgatatttttaaaataaacaggattgagctattagagttagtccgacgcggacgtataaaatttgtcgcattccaaaacctccagcgatatgattcaaattttttggcagatgttctgtctgttgatccagaatgtgtattattctcaagaagattagctgcctcgacattattagcaattagagaaaaaacaggattatttggattcgcatttgatagcagcactcaatataacttattgaaagaatgctacaattcaaaaatcgatgcacttaaaatgttagcagagtcgttatcggaaaatataccatttttgagtatgaaataa

SEQ ID NO: 382884 - DNA, 450 bp, Salmonella enterica
atggagatacagactttactatcaaatattttcactattaataacgacatggatgttctcgagttagatgacatcttaagcaaatacagtcggcgtatgatcccacaaatattacaagagtatgcccatctgacacctgaagaattaagctttaagatatactctctaaataaagatatcaaagcaattgaaaagaggaagcaaaacttgtctattttagacttatcaggttttgccccagcagttgcaggggcagtgatggagtataagggactatcgggagcgggttatatcgcgttgctgccatggactttcaaattattaaaagtcaccaccaataattcaaatatattcagcaatgaaacgtttagtaatttagaagctttaactttaaataccccaagaaacacaatattagtacataaaataagacaagacatgcctaaatag

SEQ ID NO: 382885 - DNA, 285 bp, Salmonella enterica
gtggacatagacaacaaaaaggggctacgtattcacgttgccccttgttttatttgctggcgtccttgtaattggtgggggaggtggctgagtttgttggggatttttattttttgcgcgaaggcaaaggcgcaaaagagtggcgatagtgttgatatggaagaggtttttgtatattttttgatttttaaggttatttttatagtgctgaagtttattgtattgattgatgcctgcaatagatgcgaaacgaactatactagaaagagaaaagatcggatttag

SEQ ID NO: 382886 - DNA, 132 bp, Salmonella enterica
atgctcaatgtatacgttatttgtaacaacgctcttgtgcataaacaatacgttattgccaacagcactgaacgggtacagtggttcttgctgacaacaggcttaaagatcgccttaacacgggatacctga

SEQ ID NO: 382887 - DNA, 276 bp, Salmonella enterica; identical to SEQ ID NO: 101078

SEQ ID NO: 382888 - DNA, 1458 bp, Salmonella enterica
gtgacatttaatagaaatgacaaaatgtttgtatcaatctttttgagtttggtactcatttacacgttccctttactaactcaacaagcatattacattgatgatttaggaaggtctctttatggtgggctaggctggtctgagaatggcaggcctcttgctgatgttatattttatataataaattttggcttaccaattacagacttatctccacttccattgattttaggattgactgtattagttatttcattagcgtacattagagattatttgttcggtgatgattatataacagcggtactttgctttatgatgattatagcaaatccttttttcatagaaaacctatcatataaatatgattcattaacaatgtgtttgagcgtcgccatatcaattatggcatcgcgtaaatcgtacagccgtgaaatttcaaacatcataatcgctgtcactctaacaattgcatacctcagtctatatcaagcctcattaaatatatactctatatttttatttacttttatactttcagatataaaaagtggtgaagacttaaagtcaatagtttataaaactatttcatcgctattttgcctgataacaggatatttgatatactctttttttatagcaaaaaaactggttactggtggttacaatattgagcacagcaagattatagagttaaactcgaatattattgaaagtctttacaataatatagtttcattctataaaatgataagcgtcattttcgatggtgcttatagctttgtttactactcaatgctggtagtgttggttgtttcttttttaattattgtcttaagaatcttattaagcgaacaaaataaagcaatgaggataacattgttggctgttagtttattggcttctttattttttattattggccctatgttgctacttaattcaccaatttatgctgcaagagtactgattgggatgggcggttttatgtttttctgttgttactcaatgtattctgcatttggggataaaaaattaatatttagaatttatttttcttttgttttattaatgtctacatttttttcttacggcgcgtatcactcaattaatgcacaatttaagtttgaagaaaacattgttaatagaatatctcaagacatccaattctttggtattgggaacaatgctgaatatataaaatttataggtgtagagccatacacatcaactaatgaaaatataataaaaaaacaccccattatggaaatattaataccgcgcatcattaataatgactggatgtggtcaggtgtattaatgcaaagaaatcctttttccaaaaaatttaaactatatacaaatcatgtcacccttaatgatggatgggaaaaaagtcgaaatgatgtgtattctattggtttagtaggtgaaactatagttgtaaggtttaattag

SEQ ID NO: 382889 - DNA, 552 bp, Salmonella enterica
atgacgacccgagccactcccgaccaggcgcttaccggttttcgaaatgcccgtattctgtgggccggacatagtgaaagccgaaaagtcgttgaacaacaaatagaatctctcctcactgccacggagaaaccagcagattatgcccgacagctccaattacagcgggaacgtctggatgtgctgaaatggcaaattaactgtgctgcgcgtgagtgtatttactcgcagcatttactgatggaggcctgtacagaagacgctctcagaaattttatgcaggcgaacggagcggccctgacatctgcactggctccgtttcttaaggggcgcggagggttggaagttgcgtcccgtatgttacgcagtgccctggttcgccagctcgcaatcaccccgcctgaaattgcgggggattatcgtgagattctggatgaatcgggtgtaataccggaccccgtgatggttcgtgactgccagagtacttacaccccggcacagcatctgcgctttcagcaacgcctgaattacattaacgacatgcaggagtga

SEQ ID NO: 382890 - DNA, 312 bp, Salmonella enterica; identical to SEQ ID NO: 208453

SEQ ID NO: 382891 - DNA, 135 bp, Salmonella enterica; identical to SEQ ID NO: 168788

SEQ ID NO: 382892 - DNA, 2634 bp, Salmonella enterica
atgagtgataaaaacctgcgtctgcaggtcgtgttaaatgcggttgataaactcacccgacctttaaaagttgcacaggctggatctaaggaactggcctctgctgtccggcagacccgcgagcagcttaaacggctcaacgatgcgggaggtcagttaaaatccttcgatcagctgtcccggagcctgagccggaccagtaccgaactggaccaggcgcggctgcgtgcgcagatgatgacccgcgaaatgtcagccctcgaatcccccaccaaaaagcagacagcggcgcttgaaacgcaatggcgggccgtgtcgaggctggagcaaaagcaggagcaggaaacgcggcagatggcggcagccagggcggaactgtaccgcctcggcatctctgcgggaggcggtgcccgtgaaacggcacgcattacccgtgaaacggatcgctataacaaacagctggcagagcaggagcggcgcttgcgtgacgttggcgagcgccagcgcaagctgaatgcgatcagggcaaaagccgataagatgcgcgatgtgcgcaatagccttgccgggaacggcgcaggaatggtggctgcaggtgtggcaacgggggcaacgctgatggcacccattcgcgcctactcggaatcagaaaacgccgctaaccagctggcaggctcgatgatggggcctggcggaaaggttgcgccggagtttgagaagctaaacaagctggcaatcgccctgggtgaccggctgcccggcaccacggcagactttcaaaacatgatgaccatgttacgccgccagggtatgtctgcgcaggtcatcctgggagggctgggtgagtcggcggcgtatctcggcgtgcagctgcagatggccccgacggatgcggcagagtttgccgcgaaactgcaggacgccacgcagaccaccgaaaaagacatgatgagcctgatggacgtgatccagcggggttattacgcgggggttgatccgggaaatatgctgcagggttttgcaaatatcagcagcgctatggacattatcaagcagaagggcctggatgctgcgaaaacatttagtccacttctcgtcatggccgatcaggcagggatggccggagagtcagcgggtaatgcctatcgtaaaatttttcaggccacgctggatgccaaaaatattaagagcgtaaacgacgggctgaaaggaaaaggtatcaggtttgatttttccgacgggaaaggcggatttggcggcctggaaaagatgtacgcgcagttagaaaagcttgaaaaattaaatgatgaaacaaaacttgcaacgcagaaagccctgtttggtaacgataacgaggtgctaaaagcgctgaataccatgacgtcaaaaggcatcgagggctaccgtgaaaccgtcgccaaactggagaaccaggcgactctgcgcgagcgcgtcgatgcgtctcttaataccctgggcaacaaatgggaggcggcaacggggtcttttactaatgcgatggcaagcattggggaaactgtctcgccagtgcttaaaacgctatctgactggctggggaatctggcttccgggctggatgggttggttaaacggcacccgcggctgactgctgcaatgtttacagtcgctgcagtattcgcggttgctgcgacagctgcgggcgtggtgtcactggcgctggcatctattctgggaccgatggccgtagtgcgggtaagtgcaggcatcctccagcttaaatttgcttctgtgtttggtctggtcacaaaagttattggcgcagcaggccaggctatcctgtggctgggcaggctgatgtttgctaacccaatattggcggttattggcttgatcgctatgggagccatttatatctggcagaactgggaaacactggggccaaaatttaaagcgatgtgggatgctatctcatcgggagtgactggtgcatgggcggttattaagcagaccatcagtcagaaatggactgaaatactgagtgatgttgccgcgctgcccgcgaagtttaaagcggtgggaggcgcaatcattgacggcatcctgagcggtatcaatgagaagtgggagacgctcaagagcaagctggcatcggtgaaaagctatctgccggactggatgaccggtggcgacaaatcaccgggaaccccacaggcaaaaggtgtgggtggattttttgccgggatgtatgacagcggcggatatattccgcgcgggcagtttggcattgctggtgagaatggacccgagatcgttaacgggcctgcatacataacgagcaggagacgaacagcagccattgccgctgccacctggctgactctgggagggctggcaccggagacagaggctaaaccactccacccatacagcctgcctgtctccgcatataagagtcagcaacaaaagcccgctatagtcacgcaagccctgcctgcgtcgatagggacagttgaaatccatattcaccagcaaccagggcaaagcccgtcagatgtggcagatgaagtgatgagacgtattgaagcaaaacagagaaaactggcagcccgttcacgtagtaactttagcgaccaggggggatacgatgtatag

SEQ ID NO: 382893 - DNA, 327 bp, Salmonella enterica
atgactaatagtgaatctatcaccattaaaaatatcagtgcgggaagcatttataaattacagtttcttggattttgttgctcgttagttccattaggtgtaataaacggtttgcttagtgccatagggataaacctctttatcctgcactggaatggcgaacccattaatggattgagttctataatcatcagtcttatttatttctttgtgctggcgctgatcctgagtggttttgtcggcagttttgtctggctcggattatggatatacagcaggtttcgcaccttgaatctgcatattttcccggccaaccgacaatcttaa

SEQ ID NO: 382894 - DNA, 933 bp, Salmonella enterica
atgtgcaatgaaaatgaatttctgttcaattctgattatctaaacaggtttttcccaaaagattctgatgggtataatatatcgcagttagtttactattttgttttcttttttcctgatggctataagagcgagtatagaaataaagtcatcgcggtgagtgaagaatactggagcctgtgtggtagtgaactaaaatggatgaccgatccctatagtcttcactggaaaaaaatccccggagactatgattttgcaaaatggcgctcagcctatccggagggagattggtgctggcagatgatttttcattctggtcgggtaaaatatgagtctccccagtattgtattgacggtctgggtaattctacccaaacatacaataccagtcatctgtatttatgtgttcctgttatctggttttctgaccatccagaaaaacatccaatacagatttatctgcgctgggctgaaatgttaaaagccaggcacggtacttcggggattggtgttttcccagcctatgatatgacgaaaagaggccagtctgctgttctgacccgaacgttatcacgctatttccctggaattgaaatatgtgattgttctcaggctatttctgctggctcaggcattctttcaccgaactggcttaatctgctggatgatgaatatctgaaagcattaggtggctatgataatgttttaaaaaacttacaaggcagtaatgctcggatctacaaatatgatggcggtgtaattatttctgcatctgaacatccacaattgtgtggaaatggtgaaccattaactgttccagaagattatcgcatcatatccagaatgctaaaaccaatacggagtgaacaactatttggattctggggagtggataccgggcactcactggagtggcgggagcgaatggattaa

SEQ ID NO: 382895 - DNA, 351 bp, Salmonella enterica
atgtccgttttttttcttaagattaaaaatatcttcttctatttttcattacgaaaaatacttattttaatattattgttttctctgattggaatcgacaaggaagaatattttgaggaagggaacagaccatgggtgccaagatttttcattaaacataagatttcattttacattatatttgaagtgccagttgtcccttattatatattatataacgccgaactatctacagaacaatccgatgaattacagaaatattgtcaaatacggtacggagttagcttaccaaattgtaagaatgttttatttaaaagaatgatcgataatggattttataaaccagagtaa

SEQ ID NO: 382896 - DNA, 279 bp, Salmonella enterica
atggccctgatctcattacttttgacctccgttttcatttgccccagcacacgagaatgcacttaccatatgaattactccttttctttttcctttatcgtaggagcctcttatggtctttccatctattgcaataatttcaccatctgttattttatggtgtacctgtatccattcaataaacattttttcaaatgctacactatcaatactactcacaacacgcgcaatgctatcttcgactggaataccattatcgaaatcaccatatttctttag

SEQ ID NO: 382897 - DNA, 672 bp, Salmonella enterica
atgatagaattaaaaatttccttatccattaaaaataatattctatttgatattaaagaaacatgcagtgcttatttgttttttttaaaaatattaaattcttgcgatcccaagataactggtttttatggtcagggagaatctttggagaatgctttgaataataaattgtttagcattgatggatatatctcttcaagcgctcaaatatatttgagcgaaaggttgccttatgcaacatctctatgggatggaaatcctgacgaagctatgtcaataatatttgcaggggttaataacaaaacaaatataatcattgagttggaaagatataaaggaatatatgacattgaaaagctaataaaaattcttacatcaatcgcagaaaattatactttaaactatttttctgttttcttctccaataatgaaaatgtgtttcctgaacgtcttaatgtaggatgggtgatatacttaccagtcaacaatattattgtcacgacgaatgaatgtgaaagaatagagtatgtaaacattggtggcaataagggtcgattatttattgttaaggatgtatataattgtcttaatgagactcatcgatatgcctctaatgatctcgaaattgaattagtggatgctggatttttacctctatataaagacatttaa

SEQ ID NO: 382898 - DNA, 2067 bp, Salmonella enterica
atggaaaatgaagaatcgattgcctgggttacaaaggcatttcatctatcggataataatgaaattgccgaagcgctaacaactcatcttgactggttgctgtggctggaaccagattataatgaagatgaaaatttatcctttctctcatgtctgccgccatttgccgcattaggtatttttcttggtacggcggcgatgatccgctgcggagaagcattcagggcgcagtactggctggaagaagctgtggagtcataccattgggtgtgtcccaatggatctggctcatggaggggaaatacgccgcttcatgcagctaaaaagcgctatcccgcactcaatatagtgttgtttgatgccgcatgcgctaatggcgaatggcagcgcgcgtccgcaatactggagtctcttggcgcggccagcgatgaggttggcgagtatccctgcgtgggttttacccgcacagcgctgaaaaatgtggtggcggaagagcactctctggggccattttactatgatgaagcctggttgctggaacagcaggagcgactgatcaacgccaatgtattgaatgagtattgtgaagatacctggcggcaatataagcgccatcttcatcatttgatcaatgtggggcgcaccgatgacgcgctactatttgccagagaaaaaataaaaaaattaaaccatattgaagatagatttgagttttatctcactacgattggactatattcatctctggggttactcgatgaagcattatctgtgctgatggaactcatcagacgtaacacacatctttattattttatttgtgctgacggcgatggtattcagttaacgcccgaactcaaggcctggatgaaaaatcttctgaaaagcccgcagttcagggcgctgaaagaacaatatctcacgcggaacgcagaagaaaaaggtcgcgatgtaaatgccaacgcgtttcgcagcattagcgaaaaaatattagggggaaaaacacgcaagcgttgtgcggttagtcgaaaactgatttctcctggtgagccgatttatcgataccgtatgatggatggcattgaatatatcgcggggaaagcggctttcgaagcttcggatctctatattcaggcacagcagcaggcgacagctgccagtcgctggcggcagtttgctgagcgtcgccctgggcgaggtgtatttgatcacccggatattgcccgctttgtctttgagcgcattgagggcaaatcttttgatgctgttggatttattcgtctgattgctaactcgcttgttttcccgatgcgttttaagtgggtcgcaggactggattttacagaacaccatgctgcggacgatttctttgttaatgacgatcttgctggcgaatttgttaatgcgtgctgggtggcgatgcaatgcggacatgctcgtgacatttttaaccagcttgcgcaggaaccgcaggatattgccgatcctatttatgccatgctcgcgactttcgaccggccagaatgtcgggcggcggcggccgcgcattttgcgctgccggaattgccggaggtcatggcgcgggcgtttagttcccgaatatcgctggataatttgttgaaactggccgattttggccgcgaccaccttcgtttcgcgcaggcgcttgccgtagcgctctcacgctataatttacacctctactcaaattatcggcctcaggttgactggtatcttcaggggcttgagcagtacggcaaagggaaaggcggccagttactctatttctttatccatattcctcaatatgttcccgtgctctccgccatgctggagcgcggcgtgattccgtatgggattggcgagggagcttatgatgcttacaataacagcgtcaattattttcatcatgcggcggcaatgcattgtatgctgcactcaccggataaactggctcactggatggaaacgtcgtggatagagacgctattgacgggagcgccgtttcgggaaactaaacgtcacgttgccgcttaccaaaaaatgttgtcaaagcagaagcggtaa

SEQ ID NO: 382899 - DNA, 531 bp, Salmonella enterica
atgaacgttattaaaacagaaattcctggtgtattaatttttgaacctaaagtgtttagtgatgaacgtgggttctttatggaaagttttaatcagaaagtatttgaggaagcggttggtcgaaagattgaatttgttcaggataatcattcaaaatcaactaaaggtgtgttacgtggtttacattatcaagttgaaccttatgctcaagggaagcttgtacgctgtatagcaggagaagtttttgatgttgctgtagatattcgcaaagattccgaaacgtttggtaaatgggttggtgtcaatatttcttctgaaaacaaaaggcagttgtggatacctgaaggttttgctcatgggttcttagtattaagtgaagaagctgaatttgtttataagacatcaaactattactctggcgaacatgaaagaggtattatttggaatgatcctgatattgatattacatggggaatagatagtccaattctttcattaaaagataagattcataaaggtttagtaaagtaa

SEQ ID NO: 382900 - DNA, 270 bp, Salmonella enterica
atgccgccgcttcgtcgtatgcaggaacgggctacggcaagttgccgggtgttcatgccggaggcaacggcagggattgtagcaatggcagtttacaaaaagcaaaaacccggctgtaggccgggttctgaactcagcgctggcttagcttgctatcgctacctgccgcgctggctgcaatgggcgcaccttagagcagtcttcaatgcctgtcgtcagttaaaactgtcgcaggagacactaaaatactatcataacttttgggtttag

SEQ ID NO: 382901 - DNA, 267 bp, Salmonella enterica
atgaaaaacactgaatctaacgtaagcagcttacccgaactcaccagttttgaagtaggctattcccttcgaactaatgaagtttacctgtccgcttcattcacagataacatggcctgtataccaaactggccaattaaagagtttcctgaccagtttatgtgtatctctcgtactcgggcggttgcactcatagaagagcttcaaaaggctatcgactacatgaacgcggggatagaacgtcgctcagaaaatttaatccagtaa

SEQ ID NO: 382902 - DNA, 192 bp, Salmonella enterica
atggatgaggaaaaacaagctgtttttgacgatatatgcagggttattggacgcgcagtagtcatgctaaaagaaactaatcagccagttaccaaaaacagcataaacctgatgctgcaagcgcactcggatcagagtgatgatgcgtatctgtccagaatctatgctgttgcaaaagatgtaatggaatag

SEQ ID NO: 382903 - DNA, 723 bp, Salmonella enterica
atgaataaaattggtatagtagttttgttgtcattttttatgatcggttgtagtgcttgggataaaggtaaagcaaaaacaatcgagcaaaagcgggattacctattggagtatggtccgcagtacgtgccaagttttttagttcctcagtcattggtacaacagcctcctctaagcgttactgtgttacgaactaaactagttgataatggtggggagacaagtgaatttctccaccgattggttgataaatgctttgaatcttcggataggtattgcactgttagtatgtattattctgagaacgaaaaaatagagaagaaacggcaaaaaatagccaataaaaataaacaaacatcagtaaaaaaaggagaccttttttattgtcgaatgacgttaaatcaatctggtgggccagttgatactagtcgcatgagagtacgtgtaaaggacaacgttgattccgttggtttcctttttcctgacgataagcagattatctcaccaaaattagaagttgttgattctgactcaggtgagcgatatggacgggcggctgatggctccataaccgtatcggctagttatgatggtcatgcttacgaaattcaaatatttaatactttgcctgtaagccaatttaacggggcggtggtaacacacacttcggcactcgaatttgcgggtagtattgatgtatttgattgtaaaaaggttaaataa

SEQ ID NO: 382904 - DNA, 207 bp, Salmonella enterica
atgccgccagatggcaaatattccaaaaccgcaataattcacaactggatttacgacaacgcgctgcgcacgaaaaaagaagccgatttgatactcctggacagaatgaccgtacttggcgtgccgaagtggaaacggatagtgatgcatctggcggtcaggtggtttggcagggggatgtatgggaaagaacgttgcaacagatga

SEQ ID NO: 382905 - DNA, 1134 bp, Salmonella enterica
atgcgcacaaagttacactctctgcaagcactgcgtggtattgctgcgttactggttgtgttgttccattatagaggctttctgaatgatggagctaaaggaaaccctacaatatgggataaagtatttagccctggaattatcggtgttgatattttcttcattattagcggttttataatggtttatactacctggagttatatgcgagggaaagcatctctggttcggttcttgcttaacagggtaatacgtatcattccgttatactatctttgtcttgtcatagcctttcttcttgaaggcgctatgagcacttttcattatccagacaaagtgcaaaacattttaagtgcgttgacattcacattatacaaaacctctacaccgccactctacattgacgatggtggtacgtataatattcgatggacactcaactacgaaatttatttctaccttgtattcgctttatgtctgctggttaaacaccgagttctggcgctcgtcacttggggcgttctggtaaccagcatcatacctgtgatagcaggataccaaccaacaataaatgtacaaggttatcctttttcatctccatacttcggttttctgacaaaccctcttctactggagtttattattggagttatagttggctggctgtacatcaaaataaaacaaaactttccttcaagaaaaatagaattattatcaggtattagtgctatcgtactactaatatatattatttggggaatatatactggaaacatccatgcgttggacaggaaaagttcccttgttttggggttctttgttcttgccctcacgcttggggaatctttattgctggcatttatcccccgttttttgacttatgtgggaaacatctcattttcgttatatctgctccatagcgcagttggtcttgctgtggtaaaaagagttggagctgtcggatattcggattttaagatgatcccatccgtgttgctggctatcgggatatctatcctggcagctcactttacacataaatacatagagattaatctgactcagaggataaaaaataagttaaaacagaaaaatctattaaagaaccctcttccatacggcagtctgcaataa

SEQ ID NO: 382906 - DNA, 174 bp, Salmonella enterica
atgtggcgtgaagcgcgtctggcttttacggattccctggctgcgctggattgttccgtcgttccggcgcatccgtggattcacggtttggggcaacagacagataactgggcaggtatgatgcaggcaatggtcttcagggatttaaaatccatgggcgccaactgcaaatga

SEQ ID NO: 382907 - DNA, 348 bp, Salmonella enterica
atgaaaatgcacaacgatccccattcctggcagggctggctggagctgttccagagctggtggcgaggagataccccgctgggcgctgttctgatgtcgttatttatggctggtctgcgcattgcctattttggcggtaacggtggctggaagaaaaaaacactcgaaattctactttgcggcgccctgacgttgaccttctcatctgcgctggaatatttcggctggcccaagtccctgtctgttgcgataggtggcggcgtcggccttatcggcgtggatgcgatccgcggctttgcaatgaagtttatcagtggtcgtatcggtggggataataacaaggtttaa

SEQ ID NO: 382908 - DNA, 357 bp, Salmonella enterica
gtgggcgtcgatggcggcgttgtcgcgatcggcataccacgtcaacgtctcgaccagatcatagtgtgtgtcattgacgtttttctgccccacgacggtaatgaacgcatccgggttcatggcgttgccgttgatagtgatgtcgtcaaaatcgccgctaatggcgttgtccgattcgataagcgccagggagatcagatcgtcggtgctgcgtatcggctcctggctggctggcgaggcgacattcagcgtaccgtccagattcacgttttttgcgcggatggcggggccgctggtctccgtcaaatcggccgtcagcgtgctgccgtcctgctgggtcagggtattggcctgtag

SEQ ID NO: 382909 - DNA, 954 bp, Salmonella enterica
atgccagttacgttaagttttggtaatcatcatcactatgaaattaatcattcacggctagtccgtttgatgagttctgacaaagaagaagcgctatacatgggggtatgggatagatttaaggacaacttcagaacacaaaaaaaacaagaggcgctggaggtattatatacactcatccacggatgtggacgtgaaaagcaagcggagcgtgacgttgatacagacgccatggataaaatatatgcctttgaaaaattaagactctatgctgacccatcacaacaagatcgttttgttatggattttgatattactcagacacaaattaaattttggattgatggtgaggtaattagtaaatgtagtttgcaacgtattctcaatctttcagatagttatgttttaaaaccaatgacggatgaagaagaagagttgtttttaaaaatatgtgtttattatggtagggctatttctctcaatccagagttgttacaaaatatggctctcaaacttagaaacgccgttaacgaagatgaagatatcatggatggactttataagcttatgcgacctggagaagatcgaaaaatgccatccgttgaatggaatggtacgcttactgctgacgaggaaaaaaaattatgctgccttaatatgggttcttatgaacctggtacccaattttttaaaatgggttaccgggaaagtaatggggaagtcatatttgaaatggttcatccaacgcttctttatctgctacgagggtatacgccgtcattaacctttacagaaagtaacaccgaactgttaacaggagtattaaacagagattatgacgactattataatgataaagaagagattgattgcattttggatagaatatataagtcacataatggcactttatttataggtagcggtactattagccgcaatatgcttttataa

SEQ ID NO: 382910 - DNA, 693 bp, Salmonella enterica
atgaaagcatttgatttgcaacgaatggcgctggataacgtgccggtagcgtttttgggggaagtggcgctacgtagcttttacacctttgttctggtgtttcttttcttaaaggtgacaggacgacgcggcgtacggcaaatgtcgctttttgaagtgctgatcattttgacattggggtcggcggcaggcgacgtcgcgttttatgatgacgttccgatgctccctgttctggtggtattcatcaccctggcgctgctctatcgcctggtcatgtggctgatggcgcatagtgaaaagttggaagatctgctggaaggcaagtcggtggtcattgttgaagacggcgaactggcgtgggaaaaactgcagcgctcgaacatgacggagtttgagttttttatggagcttcgcttgaatggcgttgagcaactggggcaggtcagactggccatcctggagacaaacggacaaatcagcgtctatttctttgaaaataaagacgttaagccggggttaagcattcttcctgagcactgtacgccacgctttatcgtggcgccggaggctggcgactatgcctgcgtacgttgcagtgaagtgatacgcatgaacgtcggggaaaagcaattatgtccgcgctgcgcaaatccagaatggacgaaggcaagccgggctaaacgcgttgtttaa

SEQ ID NO: 382911 - DNA, 618 bp, Salmonella enterica
atgcttgaagccagagatctgtactgcgagcgggacgagaggacgctgttcagcgggctgtcgttcaccgtggaggccggggagtgggtgcaggtcaccggcggcaacggcgccggaaaaaccaccctgctgcgcctgctgaccgggctggcgcgcccggacggcggggaggtgtactggcagggcgaacccctgcgccgcgtgcgcgacagcttccatcgcagtctgctgtggatagggcaccagccggggataaaaacccgcctgacggcgcgggagaacctgcatttcttccaccccggcgacggcgcgcgcctcccggaggcgctggcgcaggccggtctggcgggatttgaggacgtgccggttgcccggctctcggccggacagcagcgccgggtggcgctggcccgcctgtggctgacccgcgccgcgctgtgggtgctcgacgagccgttcaccgccattgacgttaacggcgtggcgcgcctcacccggcggatggcggcgcacacggcgcagggcgggatggtcattctcaccacccaccagccgctgccgggggccgcggacaccgtccgccgcctggcgctgaccggcggggaggcagggctgtga

SEQ ID NO: 382912 - DNA, 276 bp, Salmonella enterica; identical to SEQ ID NO: 36843

SEQ ID NO: 382913 - DNA, 1386 bp, Salmonella enterica
atgagtgatttaatgcctaaagaatggattttaggaaaagccagtgattttgtcgttagcccccaaaatgacattgttgatggcccttttgggtcgaacctaaaagcatctgaatatcagctcagcggaacgccaataattcgcttacaaaatataaagcgactacgctttattaacaaaaacataaagtatgtttcaaatgaaaaagccattgaactgtccaggcattcatataaaaaaggtgatattgtcataacaaagctgggggaccctttaggtttagcgtgcataattccggaaaacttccaggatggggtcattgtagctgatctagtgcgcttacgtattaatgatcttgcatttgataaacagtatttaacttacttgttaaattcaccattggttattagtcaacttaataaacatataaaaggcactacaaggcctagaattaatttaggaattattcgagatttaaatcttccgatagcttcgatttccgaacaaaaaatcatcgccgaaaaactcgatacgctgctggcgcaggtagacagcaccaaagcacgtcttgagcaaatcccgcaaatcctgaaacgttttcgtcaggcggtattagctgcggcggttaacgggaatttaaataaaaatgcaaaaccaaataccaaagtacgtactcttcaggatgttggcataataattaaaacaggcccattcggaagtgcgttacataaaagtgattatatttcaaatggcattccggtaatcaatccaatgcacattaatgatgggataatctcaccatcactctccatgacaatatctgataaaaaatatgcagaacttagctcatggtctttacaagacggtgatgtgattgtgggtaggagaggagagatgggcagagctgctgtggttaatattggtcaatcaaaaatgctttgcggcactgggtcaatgattctcagaactaatagcaatatcaattcaaaatatcttgaattgatattaagatcaccgattgccattagctatttcaataaagaagctgtcggctcaacaatggttaatctcaatcaaaaagtgattaatagccttgaggtttatttaccaaatattgaagaacaacaaggaatcgtccgccgtgtcgaacaactcttcgcctgggccgacaccattgaaaagcaggtcaacaacgccctgacccgcgtcaacagcctcacccagtcaatcctggcgaaagccttccgcggcgagcttaccgcccagtggcgtgcggaaaacccaagtctcatcagcggtgaaaacagcgcctccgccctgttggaaaaaattaagaccgaacgcgccgccagcggcggtaaaaaaaactcgcgtaaaaaagcctga

SEQ ID NO: 382914 - DNA, 150 bp, Salmonella enterica
atgaaaaagacccgttataccgaagaacagattgcatttgccctgaaacaggctgaaaccggcacccgcgtcggggaagtctgcagaaagatgggaatttctgaggccacattttacaactatggactacctccgttttgcaagtactga

SEQ ID NO: 382915 - DNA, 1017 bp, Salmonella enterica
atgaatatcgtatttctgggtattgatctggccaaaaatgtttttcagctctgcgggttaaaccaggccggcaaaccggtttatacgaaacgcactggccgaaaagaattgctccagacgctggcaaatattcctgcatgtctgattgggatcgaagcgtccaccggggcattttattactggcagcgtgagtttgagaaactggggcacaaagtaagggtcatcagtcctcagtatgtaaaaccctttgtccgcgggcaaaaaaatgatggtaatgatgcacaggccattgtagtggctctgatgcaaccgacaatgcagttcgtgccgccaaaaagccccgaacagcaggatatccaggctttacaccgggcaaggcagcgtattgtcaatcaccgcactgctacagtctttcaaataagggggctgttacttgaccgggggatccccattggcagtgctgtctccagagctcgccgtgctattcctcttatccttgaagatgcagaaaacggtctaagttcccgtatgcgcagaacaattgccgaactctatgatctctttaacgatcccgggcgtcggatccatttttttgataaggaaattgaaacagtattcaggcaatcagaagcctgtcagcgtatcgccaaagttaaaggcattggtcctaaaacggccacggccgttgttgctattggcaaaggaactgaatttaagaatggtcgccactttgctgcatggctgggtctggttccacgccagcattcgagtggcgacaggcaggtgctgatgaatatgacgaaaaaaggcgacaagcatctgcggacactttttattcatggtgcccgcgctgtcgtcagggttgccacgaataacaatgatggtcatatgaatcagtgggttaaccggttaaaggaacggcgcggatttaataaaacgaccgtggcggtcgctaacaaaaacgcgagaataatctggtcgatgctgagaaatgataccgggtatcaggtagtgtga

SEQ ID NO: 382916 - DNA, 291 bp, Salmonella enterica
atgcggtttctgatgtcgcttgcgctccgtatggggcgcacgctgtcagagcttcgggataccatgtctgccagtgagctcaggctttgggctgagtttgataagcacagtccgattggtgacatccgcggagatatccaggctgcgcaaatagcaacggcggtatttaatgcccagggagttaaagccacgatgggcgacatgttgctgaactggcagaatgatcctaaagatgaaggggccgacccgtttgccgggctggaagctgcacttactgcggcgacgcagtga

SEQ ID NO: 382917 - DNA, 369 bp, Salmonella enterica
atgaaatccattaaagaactcgcgctttcccgtcagtcggcatttcggcatacttcggtcaacgtaccggaatgggatggtgtaacgattatgctcagggagccatcagcagaagcctggttgcactggcaggatgttattaagccaggagatgctgagagcgaattgtccgtgtctgagcgggcgcatcgtaaccttcgtgctgacgttacgctgttcattgacgttttatttgacgaagaggggcagcaggtattcagcaaagatgattttgcggaagttgaggcggtgtacgggcccgtccatgcgcgtctgctgcgccaggcgcttaaccttactacagatccgaaggacgctgagggaaagtag

SEQ ID NO: 382918 - DNA, 348 bp, Salmonella enterica
atgacggaagatgatctctatccactgctagcgccgctggctggagggcaggtttatccctacgttgcccccctcggcagtgacgggaagccttcagtctcgccgccctgggtaattttctcgattattaccgacgtggctgctgacgttctttgcggccaggcggaatctgccgtttcggtgcaggttgatgtgtattccagcaccatcactgaagcgcgcacgatcaggaatatggcgcttgatgccctgcaggtgctgaagccggaaagcattgtgaaaacgccgggctatgagcctgatttgcgctatcaccgggccacgctcgaatttcaggtcaccgtctga

SEQ ID NO: 382919 - DNA, 306 bp, Salmonella enterica
atgcttcagggccagctcatcaggctgtccggtggcaacttcacgtgcagacttacctgcgtgacattcagtgcagagtgtccacaggttgcgttcggagttatcgcctccgaactgaagagcaatgcggtggtcgagttcgctgtcagtcagatcgacaacccgaccgcacatgcagcagtgaccaccatcacgcgcgtagatgcgacgcttcaaacccactctggcacttccgcttatgcggcgttgttcaccgtaaaccggcttgatgcgacgtgtatcaatggctttcaggcgtggctttaa

SEQ ID NO: 382920 - DNA, 591 bp, Salmonella enterica
gtggctgaagacattaggtttgtggtggtcggccatcacagccgcttagaacatacacaacgtcttgctgcactgctggatgcccatctgctgattgatgacggtaaccacggcgcgaactggaatcaccgacacgcgcttgaatgggctgctgagcaaccttgccgggtggttgtgctggaagacgatgcgatgcccgttccttggtttgcagagctggtggtcgactggctgacccgcttccctgacgacatgctgagcctttatctcggtactggccgcccgccgcagtaccagatgcagatagccgaacggctgattattgctgataagactcaggctgactacatcacactgccgcggctgatacacggcgtttgttatagcgtacctcctcagcatattgaacgagtcctttctcgatgggacagcagcaagcctgccgattatgccgttggtgatgcctatggcggcgctgtggtttatccgtgttactcgctggtggatcatgcagatggtgaacctgttgaacgtcaccctgactcagcgccacggacagaacgccgtcgggcgtggaggttacatgtctaa

SEQ ID NO: 382921 - DNA, 288 bp, Salmonella enterica
atggaaagagttatcaacgatcttaatcgccaaattcacgatcttaagcgtgagaatcaaaacacaaaggttgcagcaaactttttgctatacagcatagtgaaagttcttgatgaacaaagtggtgatgcaaagtttagcgaagcactcaaagctcaactaaacaatgagctaggcaaaatcaccatgggtggtacatcacatgctaagcagaagataaatgagcttatgcaaccaccagtcaagtctatgtttggcaattcactgtccgaacctttcttgaaataa

SEQ ID NO: 382922 - DNA, 225 bp, Salmonella enterica
atgaaaaaattcagtattaaagttaaatcgattcatttagagaatgaattggttattgctgctataaccgtgcatcaaattaattcgcaaatatttccggtgctaaaatttgatgttgaaattgagcaaaataaagttgctaattattctcattatgaatcattggcccttaagaaagccgcctcacttattcaacaagtcgctgatgatgtggcgacggcttag

SEQ ID NO: 382923 - DNA, 228 bp, Salmonella enterica
atgcgtatcactgtattggatgacgatcctgggcgggaaattaatctcgctcaggaaagatataaagtctatatcgatggcgttgaagttaagcacgtattcactgctgatgatgaaaaaggcgaggtgattgctgccgtgctgaatgatcgcggatacattacggcagaatacggcgaagtgaagcgacagacgctttacgggaaagtcaccattaagcgtcaataa

SEQ ID NO: 382924 - DNA, 888 bp, Salmonella enterica
atgggtcagaaaatcattacgttgtccggcgctgcgacggatgttctttatgcgctgtttttccgtggcgcgcttcagtctggtgacctgccagctaaatcaggcgctgctgagcttcgagagctgggattcgctgaaacacgccataccgcgacggagtatcaaaaggaaaattatttcaccttcctgactgctgaagggcaggagtttgccattaagcacctggcagacacccgctttggtaagcaggttgaaaagcagtattgcagcgcaatcaccattggcgttgagctggacacatcagacgcacaaaaggctcttgatgagctggacgatgaaatccgtaacagcgacgcagcattcaaggcgctgaatgatatttatcaacttcctcgcatgaaaattagtgcggaccagcaggtaatgaacactattgccgacgcacttgacgaggtatgccgccgctactttgaggtattcgggcaccccgaatcaggaaaaacaaacgcagtatctctggatggacgctgggtagctgtcgaagggaacttcacccatgaagaagtccgcgatgcggtggaatacatcaagcgcctcaggaagcagaaagccgacgaaaaggcgatggcagaatcatctccgtttgccatgaaggacgggcaggtttttatcaaggatgccgtcatccagaaggttcaactgagccgtactgaaacggacccgcgaaaaggttatgccataaatgttggcatcggtcccgaaattaagaccagtgtgaagctatcccctgaaatggaaaaagcgatttcagatgttgtatctgcggaactgaaaaagaatcttcagccgggcggctcgatcagggctttcttgaagcgtggattctga

SEQ ID NO: 382925 - DNA, 468 bp, Salmonella enterica
atgagtcggttaaccgcaatcatctgcgctgtggttatttgcctgctggtttcaatggggtgggctgttaatcattaccgtgataacgccatcacctacaaaggccagcgcgataccgccacccataaattgaaactggcgaacgagacgattgacgacatgcaggggcgccagcgtgacgttgcttccctcgatgcaagatatacaaaggaactcgctgatgcgaaagctgaaaatgatgctcttcggcgcaagcttgataatggtggtcgggtgctcgtcaaaggaaaatgccctgtatcatcctcagccgaaacctccagcgcctccggcatgggcaatgatgccaccgtcgaactctctccagttgctggacgaaacgttctcggtatccgggacggaatcatcagtgaccaaacagcactgagaacgcttcaggagtacatcagggcgcaatgccttaaataa

SEQ ID NO: 382926 - DNA, 498 bp, Salmonella enterica
atgaacagcacccttcgaaaaagcgtactggcagccgttggtggtggggctatcgcaatagcttctgcactgattactgggccaactggtaatgatggtctggagggggtcagatataagccataccgcgatgttgttggtatttggacagtttgttacgggcataccgggaacgacatcatgatcggcaagacttacacagaatctcagtgtaaggcgctgctgaataaagacctgaacacggtcgccaggcaaattaacccgtatatcaaagtaccaatccccgaaacaactcgcggtgcgctttactcgttcgtctataacgtgggcacaggcaatttcagaacatcgacgcttcttcgcaaaataaaccagggcgatatcaaaggcgcatgtgatcagctacggcgctggacatacgctggcggtaagcaatggaaagggctgatgactcgccgtgagattgagcgtgaagtctgtttgtgggggcagcaatga

SEQ ID NO: 382927 - DNA, 303 bp, Salmonella enterica
atgttgagtgaaagcgcaaaagatatcgcaggttacgaaggtaagtacgctgtaacgactgatgggcgagtttattctcattctcgagttgatgatggcggaaagttaaggaaagggcgctggcttaagccgaatgtagatggttatggatatttgcaggtatccctctactcggaaggcgtagcaaagaaacataaagtgcatagattggtagctgaaacattcattgataataaaaaattgtgcccacaggtaaaccacaagaatggaataaagactgataataacgtatctaacctatag

SEQ ID NO: 382928 - DNA, 309 bp, Salmonella enterica
atggacgaatcgagaaagcagtttcagtcgtggtttgaagaatggtttggcgaaccgcctcttacgccctggaatgaactttggtgcgatgatggttattcagcagaagatattgaccatatgtgggatgcatggaaagggtctcgcgcagctatcgagctggatatcgactggcccgaatcgaatgacgacttttggaaagatggcgaagaaggcgcttatgcgatgggtcatgaggatggtagagacaaaacggtaattgcagtaatgaaagctatcagatccgctggaataaaagtgaaggagtga

SEQ ID NO: 382929 - DNA, 537 bp, Salmonella enterica
gtggcaaagaaaaacgagagtcctctgttacagtcggatgttgatcgcgtcataaactccaagaaaatagtggatgttagcagcataaaatggggtaagaagccgccacctggcaggtcaccgatgtggttacaaacggctatcacaccttatgaggatggctcacctttgcctggcctaaagtttgttttacagtggcgaccagctgatgaatacggagattcccctaaaattcagatggtggcgctttactttggtcgaagaatttttggtgtggactcttacccaaatgatagacatactaacagagtccgggtatgccatcctgactatgctgaaagcattcttggcccacattatcacctttactttgaaccagcgttgccgtatgaaataggtctgatcatacgcgagaagatagccccggatgacttgttaggacactggcgctttttctgctataaactgaatgttacatgcaaaggaatactgcctttgccgacccaagaagattcgggacaaattccattgctatga

SEQ ID NO: 382930 - DNA, 759 bp, Salmonella enterica
atgatgtgctcaacgataatttccagactcggctatgaatgcctacccataggtgaagagtccttgagaataatcagtccgtttccctattgtgacgatggggagcatgttggcgcattcgtacagcatattaatgggagtttcaaagtaactgatcgatgcgacgcacttatgaacatggaggctcgtggaatttcacttaaccaaagtcgccttgatgtgatcaggcaggcactcgcgcgagaaggcgctgagctaaatgaaagaggcgaaattcttaagtgggctcatgatgaaggtgagcttggaaaggtaacatcagatgttattagggctggtattcttgcttcagctatgtccatcgattggtattcatctaaccaatctaaaagatttgaagctgaagtgattgatttcatctcaaaaagttcactatcaaatttaatgtcccttcgagaggaagtcagtggcatgagtggtcacaatattgtcatacctgttaccattaaaaccgcaatgcccaaatacatatttacctcaagcattaaagaaggtggatcatggaacagcgcatattcattgcttggaaagctgatggatctttatcaggccaacaacgctgttaacaatcgatacgtagttattgacaatgaatctatcggctcgcaaatgcagcaactgatactgctgttcaacgacgtaagccaagttcttccattcgaaagcagaagtttatggcttccaaaattagctgcataa

SEQ ID NO: 382931 - DNA, 279 bp, Salmonella enterica
atgaaaaagtttaaaggtacgccaggtccttggagcggaaaggatgtacgcatttgcaggcaagatagagctgggttgcagcttggttttatcatgacccatgacgaaaatcgcgtagctgaatgtgaggccaatgcacacttgatagcagcagctccggagttattggaagcgctacaattgcttctcaactcctggtcaaatggtagttctaaagatatttcaaacgctgagagaaaagctcgctcagccatcagcaaggctcttggggaggagtga

SEQ ID NO: 382932 - DNA, 480 bp, Salmonella enterica
atgaagacctgttccagatgcaatcagcagaaggaagaaagggactttcaaataagaagagcatccaatgatggattaactgccgcatgccgtgtttgccttgctgagtacgacaaagagcgcgcgggattgccacatcgagtatcggccaggagggattatcaatcctcagatcgcggtagagaacgatgtaacgcagccaaaaagcggtttattaagcgcaacccatggaaaagaaaagcccacataatcgtgggcaattttttgcgcgatgggaagctaactcgaccatcacggtgcgagtgctgcggatccgaatgtaaacctcaggctcaccactgcgactacggtaagcctaccgatgtgatgtggctatgcaaatcctgtcatgtcgaatggcataaacataacaaaccaatctatccggacgaggcaccggtaactcttcccttccctcgtcacgctatccacgccatttaa

SEQ ID NO: 382933 - DNA, 285 bp, Salmonella enterica
atgtcggcacctctcaccggggctggatatctgcgcccaccaaagcgatccggcactaaagaagaggtgctggctcgttgcttttcagctatcgctaatgacgatttccagaagccgaccatggaagacaggcttctggagttgcacgaaaaggaagtctggtacgccaacttagaagcgtcattcaggccgggatgggtggtagttggacctgtagaacctgattacgttgatgaccgtatgcgtaagtatcgcggtcgttacggacaagtaaggagcgactga

SEQ ID NO: 382934 - DNA, 168 bp, Salmonella enterica
atgaaagtctggagcatagaagaactatcagcgctcatgcgctacaccaacgcagaagtagcagagattaccggtcggagtatcgaagaggtcggagataagcggctggctgtgaatattgagcgcaacaggtgggatgtgagaaatcctgaacgggaggaagcatga

SEQ ID NO: 382935 - DNA, 552 bp, Salmonella enterica
atgactgattacaccggaagtaacacgccagcagatcagcgtgatttgtggcgtacaccaccggcactgttcgcagcactggatgctgaattctgctttcaacttgacgcagcagcagcgccgcacaacacgctgtgccggaagttcatcaccgccgagcagaacacgctggaaacatcctgggctgattatctgaatgtacctggctacgtctggctaaatccaccttacagcgacatcacacctttcgtgaaaaaggcggccgccgagagcagaaatcagatcggtacggtgatgcttgttccggcagacacttcggttggctggttcaaggaagctatccagaccgccagcgaggttcgcttcatcaccgccgggcggctggcatttatcaacccggtcaccggtaagccagtcagcggcaataacaagggaagtatgctcatcatctggcatccgtacccgcgcacacactgccacttcgcaactgtggagcgggacgagctaatgactttcggagcgaaacttctcgctcgacgggaggcagcatga

SEQ ID NO: 382936 - DNA, 222 bp, Salmonella enterica
atgacatcagaaatcatcgatcaggccagcgctctcgaagagatgatgcgcgaccatgctattcaggctcacagactcaaccactcagcagtatcagcaacgcactgtgaggaatgcggggatctactcagtaacgagcgccggaaagcgtatccgggatgcacgatgtgcgttagctgccagggtgagcaggaattgcggaataagcagcgaggtgggtga

SEQ ID NO: 382937 - DNA, 1074 bp, Salmonella enterica
atggcagcctattacaacgagattgattcgtatgcagcgcaatggctgcggaacctgatcgccggcggtcatatcgcaccgggcgaagttgatgaaaggagtattgaagatgtcacacctgacgacctgcgaggattcacgcagtgccactttttcgccggaattggcgtctggtcacattccctccgcctcgcaggatggcctgacgataagccagtctggacaggctcctgtccgtgccagcctttcagcgcggcaggcaaaggcgatgggtttgctgacgagcggcacttatggcccgctttcttccacctcatcagcgagtgcagacctcagcacgtctttggcgaacaggttgcagcaggtaacgcaaatgtatggttcgaccttgtacaagcagacctggaaggaatgggatacgccttcgggcttgtgccgtttacgtcagcgggcatcggtgcgccgcacattagagagcgagcttactgggtggcccacgccagtagcgaatacgaacccgcagccagaaacgaagcggggcttgcaacatgtctccggagcggcgcggctgtcggactggccaactccgcaggtgagcaatatcaccaacgcgacgaccgtgcaaatgagcggggatggtcgagcaactccgaacaaaatcgggtgggcagcggcgttggcgggatgggttacgccaacaactcgcgactggaaagacacatcaggaatgacagcgcagcgggatgggaaagaacgactggatcagttgccgaggcaggcttacacagcaggccccttgaggttaacggtttttggcgagatgcggactggctcttttgtcgagatgggcaatggcgtccagttgaatccggcacattcccgctggttgcaaggtttgccaaaagcctgggacacggcaagtcctcattacgagcaatggcaggccgcaaccgcacaggccgacttaagggttacggtaacgctataaacgcacaggcggcagccgctttcattggtgcttacatggagactgccaatgttccagctaattcaacggggccagatatacgctga

SEQ ID NO: 382938 - DNA, 243 bp, Salmonella enterica
atgttccagctaattcaacggggccagatatacgctgaccagcataactggctcgtcatcatccactcagtcacatcacagatagtccgctactggcgacaaggccgggtcaacaccgcttcaatcgaccgctttaaccaagatttcgaatatctcgactttcacgaggcgagacgtattcgtgccgaacttgaaactagcgaacacattaaatcgctacgtgcaatgcagcgcgtggcatga

SEQ ID NO: 382939 - DNA, 324 bp, Salmonella enterica
atggcttttgtatccgttcgagaattcgccattaaagcgctcggcagagaggccgagcagccaaacgtagtgttcagaatttccaagtcaggatcagctaatggaagatttaataaatcctgcccgtttggcggtcatcgcgtcgactttcaaattgatgagcattcaaaaaaaattcgggtcagagctgatgattctggcctgtcagtacataaagggacaggacagttttccgcgtcaaaggaggtatttaaaattcttggccctcagaagatttttattaccgagtcggatgacggttggtggtatggaagctacgactga

SEQ ID NO: 382940 - DNA, 216 bp, Salmonella enterica
atgctgaatatagagctttattacctccccccttacagcccgaatctgaacccaatagaaaggttatggaaggcgatgaatgaaaaggtgataaataaccgctacttcacttctccgaaggtgtttcgggggaaatacagcgcttctccaatgagatattaccggaacttgccgggatgctggcgtgccgcattaatgacagcctccagacgctga

SEQ ID NO: 382941 - DNA, 624 bp, Salmonella enterica
atgaaaaatctatttttcatatttcttttacccgccatgatatcactcagcggatgtgtcaccatgatgttagacgaccacgttaacgacgttcaccaaaaaggtcaagttatcacaaccgataagatcatcggcttaatcaaagatgagaagagcgataagtggttgttggcgggggagaagtcgaattatcctgtaagaagcctaagcggcagcctggcaaaagccctaaacagccctgaattcgataaacgctttatatactccccccgtaattcgatcactattttttataacaaaaactacggtgcctatttattttataacgtgaggtcgctcaatgaacagcaactgaggaaggtacagacattcgcgcctgatattcaaaaaagacaaaatacctatgcctttgagttaagtttttatctttccagggatgacgttattgctaaaaacgcgactgatcgaatcgagcgcatcgataaacccttcaccttcgaaatcagagaggaaggtaccgcttatagcaaggcgttatatccgctagcggttaccgctgatattgtcacctcgccgctgcaactgcttgcgctgccgtttgtgataccgaaactgcaccagtag

SEQ ID NO: 382942 - DNA, 687 bp, Salmonella enterica
atggaaatggttgcttatttcactataattcccacagtattgttgctcagtggttgcaatactatgatgttaaaagatcatgtaaatgatgttcaacgtcgagaggtggtatggaaaacggacaaaattatcggcttcactaaagacaaaaaaagtaatagttggatgctggctggtgaaaaagaaaattatctttttcctcgggctcatccggaacgaacaaaggataactatcgtgatagcttggcaaatgctatggaaaatcaagagtttgataaacagtatttgacacttagctacgatcgaaatactaatgagtgtttctacgcctataagctcgcttgttctattagcatggattatgatatcactacatttaatagtgaaaaattagcccagatacaatcgataattcctggcgatcatagtttcaaaagggaaaacaggagttattactcctttatctttaccgaggaagacgtacaaggatctattctcaaaaaaagtcgtgacgatcgggttgagcgtatcaataagccatttacgttaatcattaaaaaacaagatactgcctacagccaggcattttatcctttcactattattgccgatattgtgacagctccgttacagttaatcgcactgccgattctttggtcttcactgaaactacctgctcagggttaa

SEQ ID NO: 382943 - DNA, 522 bp, Salmonella enterica
atgcctgtttcatgtggtaatggtttagccgaaaaccaaattagagatctggaaaaaaatttttcattatcatttcccgatgactataaggattttctgtctcggtataacgggtttgttgttaagcagcctgatttttgtgaatttgactatgattctgttgatgatggggccattgccttttatgcgttattcggatacggaatttcaaatagaaacgatgaattagtttaccagaataatgaatatctcgacgagatagatttcataagcaatgcatttattatcggctccgacccgggaggaaactactttgtcttagtatgtgaaggtgaaaagaaaggcgtttattattgggataggactcatttacactcggaagatgatttacaaaaatttgatataaatgctgagaatgtaagtgggcctctctataaatttagtgataacttctatgacttttttgagagactagttataaatacgttaagcgcagggatgaagttgtaccgagacttgtag

SEQ ID NO: 382944 - DNA, 468 bp, Salmonella enterica
atgaataaatatagttttgcaatttctatatttgcgttattagtatcggcgcttagtttattcaatgcttggcgagctaacaaaaaggcggagttcaggtctattaacttattaagacttgaagtcttaagtacttatcacgaattagagagccgattacttaccataaagctaagggctgaatctttaatttcgggaaactcggaattttataaggaaaattctaaaatcgatttagagttcaagcaagaagctgaaacattaggtggtttggcctcaaaactgttggatgaataccgaaagacactttgtattgataaaaattccgtagaaaaacttcctgaaaaggaacttatcgtaatgcaacgaaagcttatttcatgcaaacactttttactccttgaaagtgaaagcatcgtgaaagcaattgaaaaattatctgacaaagttcaacggataaaaaaataa

SEQ ID NO: 382945 - DNA, 714 bp, Salmonella enterica
atgaatgtaaaagatttatcaattacaacagttctcttggccgccctttattttatggccttttctttttacaaagggtacagctcattttatgggttccctgttagttttatttctattggtatcggggaaatagttaaattttctgttattgcattagggcttttgtgcacattagttgctttgctgcatatcgataccgaagagaaaaatattccatggtgggtgtatttatttttcttcattttggcctctttactttcatactggacaatgtatttatatggtgggagttcatatctttatgaaaaagccacaagggatgtggctactcaggcagtactattaggattttttagccttgtcagtgtcagggcagtatctgtttttattagaagtgaatttagaataaaaaacaaaactcacggagttatgctatttatatccatagcaatgcttccttcagtccttggatgggcgtgggcgtatttatctgatgagccacttttttattctaaaaaatatgatgcatatattatcgaaagttataacggaaaatttgttttggggaactgtaaaaaaaatattgccgaatttatgagtgttgaaggaatcgaggggaaactaacccctgtaagcactaaagaaacacaacaactaaaagtatgttttttgaaagcagctaagctcaagagaaaccactcagagcgatag

SEQ ID NO: 382946 - DNA, 243 bp, Salmonella enterica
atgcgagataaaaatctcactgatgatgtaatagacgagatcataacagcgccaaaaacgtcattagaacaactgctggccctggagttaaagcacgagagaaaacagacaggagcccccttaaccatcgttctgccaactacacggctttgggctggggttgttgattgttatgccaaagatgaagtgatcgcagcaatcgaagctgctggtggagcggtgattgatgacctacgaacgtga

SEQ ID NO: 382947 - DNA, 204 bp, Salmonella enterica
atgaaattcgtttttatggtaatggatagccgtgcgcagttcgatacggacagcgccgccatcctggaatgctacggcgataaacaaccttcatggcacgccctgcgcaaggattggggcgatcagggcgcagttctggtccgcttccgcctggttaacagcgatatggctaccgaccccgaggttgtcggcatcatcaactga

SEQ ID NO: 382948 - DNA, 303 bp, Salmonella enterica
atggcctgtaactgctttaaaaatatcaaagagcgtatggacgcacgtttgcgcgaggctgtcgccagcaactgttccgaggttgacgaatctgatttcgataatcgggtcttcattcttgataagggcgatttctgcaacgtaatgctgccttaccgctttcgctattaccgccgtaagaagaatggcgaacccgagcagcgttgtacgaacgctgataccagaatcgcaatcaactactgccctttctgcggcaccaaattcaacggtaaagccacctcaaatgaggaagttaccgcatga

SEQ ID NO: 382949 - DNA, 525 bp, Salmonella enterica
atggaattaacaatcccaatttcaacgatgttaaccacagccttgggctttttaggtgtgtacataattatgcctatagctttgattattagagaccaattaataataatgtatgtagaaaaatgtattctcacgcctaagttttgggctttcatacatgagctaactatagaaaaggcgtattataatgtaatatatactaaaaaatatgaagttagggtgcctgaaggttttgagaatattgaggagaaaagaacttattttattgatgatgtggaagttagtttggaaacttttagcgattttttaagcaatcaaaggaaatatgttgataaaattgccaagaaagaacccagagcattagctaaaactaatttaatgaaatggataagtaaacatttcaaaatggatgctaaatttgtagatgttgtagatgactatgtcaagcatgtttatgatttgaccgtgtccgatattaaaaataaaaagaaagatattatttattcagacataaattccaactaa

SEQ ID NO: 382950 - DNA, 624 bp, Salmonella enterica
atgtctctcgcagcacgcttcaaagcccgccgcctcgagctcggaatgacacaagtagaagtcgcgaactctgcgggggtgagtcaacaatcgattgagtctattgaaagtggacggacccgaaagcctcgcaaccttttggaccttgccaaagcgttaaaatgcagcccggactggcttctgaatggcaagaacatcatgccgcttactgaaataagcaccagaagaatacctgtactgagctatgtgcaggcaggttgcctcacagaagcaagaaacataaccgatctgacaggcgattttgaatatattctggctgactccgatgtaccagagacgtgttttgcactgcgtatagatggtgatagcatgcaacctgaatttaaagaaggggatattgttattatagaccccgacctatgccctgctcccggcgaatttgtcgtcgccaaaaacaacgggcatgaagcaacgtttaagaagtaccgcccgttaggaatagggattgacgatttcgaactggtaccacttaaccctgactatccagtattacgtagcgcggagctgccattacgcgttattggagtgatgattgagcaccgcatttaccgccgtaaacgttaa

SEQ ID NO: 382951 - DNA, 213 bp, Salmonella enterica
atgactctggctactcgagtaaaagagcgacgtaaagagctcaaaatgacacaggtcacgctggcagagctaacaggggttagtcagcaggcgataaacagaattgaaagcggtgttatctcccgccctcgttatcttcttgaaatgtccgttgcgcttgattgcgatcctaactggttgttgcacggcctccaaaacgacaaaaaggcgtaa

SEQ ID NO: 382952 - DNA, 435 bp, Salmonella enterica
atgcgtaatattcaactggttttagagcgctggggcggctgggctgccgatagcaacactgcagtaagctgggctccggtcgctgccgggtttaaaggacttgtggtcagcagttcgtccaacagactgagttgctgcgacgacgacggactggttattgatggctgtgtctgccgtctgcagcaggtgcgcaagcccgaggagctggacgtcatcatgctgtactacgtccacgggttgaccaaacgcgagatagggcgaagggctaaaatttccgaacgtgaggttcgccgcctcatgtctaccgcagaagggtttatcgaagggtgtctttgcatgttaaatgtgcgtttgcaaatggatcctgaggttgaaaaacaacgaagtgaaaaaagtattagtgcgggccgcaaaaagtgcgctacgctggtatga

SEQ ID NO: 382953 - DNA, 384 bp, Salmonella enterica
gtgaacaatcaatgcgttacaacgctgacggatcaagacttcaatcgcatggcgctctttttccgcctcatgataactgttgccaatgagaacatatttctggtgctgctgcgcgaccagatctacggctttcaccagagcgccgaaaaaggcatcggaaacatccatgaccacgacgccgatggtgtcgctcacctgggtggccagcgcttgcgcattcgcatttggccgatatcccagcagggtgacggcctgcataacggcgtcacgggtgtcgggactgaccaacgcgctgttattcagtacgcgggaaacggtcgctacagacacgccagcctggcgcgctacatcacgaatggtgatcatattcactgccctgtttga

SEQ ID NO: 382954 - DNA, 204 bp, Salmonella enterica
atgatatttatcgacagattacccgtcgcccggatgggcgacccgctgacgccacactccaaaccggagcatccgccccatccgcgtaaaattgcgggtggctcctccacggcatttatcgacgaccttcccgctgccagaacgggtgatgggatggactgtgacggggtggttatcggcggcggcacggtaaatacaggctga

SEQ ID NO: 382955 - DNA, 168 bp, Salmonella enterica
gtggaaaatctgctgatatgggacgcccaaggcaaagccgtagatgtatttagtcacccgttaactggcgttcacctcaatagctttaccctggatatgctcaggagcggcgaaagcagcaagagttcgatttttgccaagcttgcccggttgatggtggagaattaa

SEQ ID NO: 382956 - DNA, 276 bp, Salmonella enterica; identical to SEQ ID NO: 36785

SEQ ID NO: 382957 - DNA, 336 bp, Salmonella enterica
atggctttaagcgcgaattccgacgccgtaacgtatgcaaaagcggcgaataccagaaccgcggcagaaaccggcgatcgtatcgaatgggtgaagctatcactggcttttctaccgctggcgacgccagtgagtgacgcgaaggtactgaccggtcgccagaaacctttgaccgaagtggcaatcatcattgccgaaatccgcagtcgcgatggctttgagggcgttggttttagctactctaaacgtgctggcggccagggtatttatgctcacgccaaagagatagccgataatctactgggcgaagatcccaatgatatcgacaaaatatag

SEQ ID NO: 382958 - DNA, 276 bp, Salmonella enterica; identical to SEQ ID NO: 101078

SEQ ID NO: 382959 - DNA, 633 bp, Salmonella enterica
atgaaccagacactgaataaatccattaaagagaaaatcgtggataatgcactggcaaaagctggtattccgcaacggaagaaagccctgcgtgctgcccgggcagactgggcggaacgtgtaaggctggcggcaattggcggaccggaagccgagtctgaggtattaaaaaccgaaaagaaaattgcagcgcttattgcgaaactgcccgaagaactgaggacaaactatacgtttgtcagatatgacagcgatatttatctgaatctggcgggttcgcgtgttactgcatacttcaacggcaattaccggcacaatgagccgggttcaccagaccatatccaaaaaataaccccctatgaatacaccttactggcagatgacccactcgttaccgagttctacagcttcgatgcgctttacagggaaataaaaagcgacgaaacagacatccgccagaacgtcaccgccgcactggataaagccagaacggttaagcgactgctggaacagtggcctgaagccaaagaactgttacctgctgaagatgcggttgttcccctgcctcctgctattcgccgggaagcgctgaacgagatgattgggctaccttctgaagcaattcaggagtag

SEQ ID NO: 382960 - DNA, 414 bp, Salmonella enterica
atgtataaatcaaatatttacaatggccctatgagaaaagaagaacccaacctcgctttggtagagcggcttacagagatcgctgatcgcggtatcaccaaagcagacatggcacgcatagccggagttacaccccaggcggtaaacggctggttcaaaaaaggtgtgatcagtaaaaagtctgccttggccatagccgatgcagttggaatttctgttgcatggctacttggtgaagaagttagtgaaacagatggattaaaacccaatgaacagcgtctattagagctatatcgccaactgccagaagaagaacagcaaaatatgttacgtatcttctctatccgcctcaaagagctggacgagttgtatgagaaatacatgaaaggacggattcgaactcatagagagtga

SEQ ID NO: 382961 - DNA, 1110 bp, Salmonella enterica
atgtctacaccgcgttcttctggagatgtgactttgcctaagtctatttgtttttttaatcacaaagggggagttagtaaaactaccactacctttaatctgggatggagtattgccagcaagggcaagaaagttttaatggttgaccttgattctcaatgtaacctaagcggcatggtccttggttttgagaaaatggatgaaggccttgaaactttttacgagagtcgtgaaaatttgacaatgggtccaatagtcgactatctcattaatggtggccaacctgaaacctatctttcacaagataaaggtaaattgacccccacgttaaatgaaaatctttttttgttacccggccatttaagcgtatctgatttagactcacagatcagcgtttctcttaaaatcgctgctggtattcctgccacaagaaatattccaggtaacctccccaagcttcttcaaattatagcagctcataatgaagttgattatatcctctacgatttgagcccaaacgttggtggtttgaatgaagttatgcttatgtcgagcgattactttattgtaccaacagcaccagattttttctgttggcaagctgttagttcattatcaactaatattcttaaatggtatcgcgagattcgtaattttaaagcacaaaatgaatcacatgctagcgctgccagatcaattggtaatagccctaaatttttaggaacgattcagcaaagataccgacctcgtaacggatctccagcgaaatcttttgagaaatggattgataacattagccaagccgtggataaaatcctagtaccacaattgttagagttgaactgtgtaatgccccgagagagcgttcaagaggcattagctaaaactgactctgatttatcggcttataatctggctcaaatatctgacttcaactctctgattgcaatcagccaacggttatcaacaccagtattctcattaacaaatcaacaaattgcggaagcaggtcaatttggtcatgcattaaacactatgcgggaaagtcgtgaccaatttgcttatcagtttgaaaaattagctgatcgggttcttattcttaccgagtaa

SEQ ID NO: 382962 - DNA, 243 bp, Salmonella enterica
atgatgaaacttattaacagaagcaagcaatcaccagtcggtcgtcgcgcatgtgatattgcactggctgcgcatcatgagaagttcggcgattacggcagacaaaagcacgttaccaattacaccgttgtagtggatggcgtaaaggttcctgtcgaagtagttaaccgggccaccagctacgtagccaccgcaatgatcggcgtccggaaacttagaaatctgccggcacaggcaaactga

SEQ ID NO: 382963 - DNA, 207 bp, Salmonella enterica
atgaacgatattgcacagaacaatgttggtatgattgacgaaaaagaagctatgagaatgatcaaagtatcttcacggatgaccatttcgaaatataccaagctatataattttccaaaaccaatccgaactcaccccaaacaataccttcagtctgaggtggtacagtggatcttaaacggggggatcaaccagaaatcttcctga

SEQ ID NO: 382964 - DNA, 1182 bp, Salmonella enterica
atggcaatcagtgacactaagcttcgctctgtctatggtaaaccatattccggcccatctgaaattactgattctgatgggttgggtatccgtattactccaaagggaatcattagcttccagttccgttttcgctgggatgggaaacagcaccgcatgggacttggtcgctatcctgctctcactctgcgtgacgcccgtaacatagtcgcagatttaagagagtccgtcgataaaggcattgatcctcgtgagcttgccggaaacaacaagtcaaagaaaaaaccaacggtaaaagactgcctggattactgggaggcaaactatgttaacgtggctttgagggaaaagactaaggcactttacaggtcgacggtcataaagcacatgagtgatgcgttcgccggtgttccgattgaagaaattcctgttcgcctgtgggttgaacgatttactgacgaagagcgattaaacccacgcagggctcgtcagttactggtacaacttcgggcagctattggctggtgtacacgcagacaatttatcagcacggctgatttaatgctgttacagccaaaagatgtggggacaaaaccaaccgtgggtgaggtgacactcagttataatcagcttgctaaaatctggctggcgatagagcgtagcagagggtcaacgtctaaccgattgctccatcaactactgatgctgtatggcgcaaggaatagcgaacttcgcctggctgttaaggaggaattcgatcgtgaggaggggatatggaccgtacccgccgaaaaaagtaaaacgaacagaattatcagacgaccaatttttgacgcggccgatcagttgcttaaaaaagcagaaatgacatacgggaatattcttttccctggtccggatctgaaaaagtccatgactattgctggtgcaaacagatttcttggaaggatagaatcatccctgggtattggcgaattttccgctcatgattttcggcgtacactggcaaccagactttcagaagaaggtatagctccgcatgttattgagaaaatgttggggcatgagctgggcggcgtactttctgtttataacaaacatgactggattgctgaacagaaagccgcctatgagctgtacgctgaaaaaatattctggcatatcaggaagatttctggttga

SEQ ID NO: 382965 - DNA, 276 bp, Salmonella enterica; identical to SEQ ID NO: 36791

SEQ ID NO: 382966 - DNA, 216 bp, Salmonella enterica; identical to SEQ ID NO: 10294

SEQ ID NO: 382967 - DNA, 435 bp, Salmonella enterica; identical to SEQ ID NO: 129439

SEQ ID NO: 382968 - DNA, 1401 bp, Salmonella enterica
gtgaggttcaaaatttccctgaccacacgcctgagcctgattttttctgcggtgatgcttacggtatggtggttatcaagttttatcctgattagcacccttaatggctatttcgataatcaggaccgcgattttctgacaggtaaacttcagctcaccgaagagtttcttaaaacagagacgttcaggaacaaaacggatattaagtcattatcagaaaaaataaacgatgcgatggtggggcacaatggcttattcatttctataaaaaacatggaaaatgaaaaaattgttgaactctatgccaaaaattctgttgttccagcggtcctgcttaataagtcgggtgatattctcgactatatgatccagacggaagaaaataacaccgtgtaccgcagtatctcgcggcgggttgccgtgacgccggaacagggtaaaagcaaacatgtcatcattacggttgccacggatactgggtatcacaccctgtttatggacaaactcagtacctggctgttctggttcaatatcggtctggtctttatttctgtttttctgggctggctgaccacacgtattggtctgaaaccgctacgggaaatgaccagtctggcttcctccatgaccgtacacagcctggatcagcgtctaaatcccgatctggctccgccggaaatctctgagaccatgcaggagttcaataatatgtttgatcgcctggagggggcattccggaaactgtcagatttctcgtctgacatcgcgcatgagctgcgcacaccagtcagtaatctgatgatgcagacgcagtttgcactggctaaggaaagggatgtttcgcattaccgcgaaattttattcgctaacctggaagaactgaaaaggttgtcacgaatgaccagtgacatgctttttctggcacgttcagagcatggtctgctgcggctggataaacatgatgtggatctggcagccgaactgaatgaattacgtgagttgttcgagcccctggcagacgaaacaggaaagacaatcacggttgaaggagagggcgttgttgccggagacagcgatatgctccgacgtgctttcagtaacctgctttccaatgcaatcaagtattctcccgataacacctgtacagcgatacaccttgagcgtgacagtgactgtgtgaacgtgatgattacgaatacgatatccggccaggttcccgctaatctggaacgtttgtttgaccggttctatcgcgcagactcatcaaggttctacaacacggaaggcgcggggctgggattatcaattacaaggtcgatcattcatgctcacggcggcgagctgtcagcagaacagcaggggcgggaaattgtgttcagtgtgcgtctgttaatggattaa

SEQ ID NO: 382969 - DNA, 681 bp, Salmonella enterica
atgcagcgtattttaatcgttgaagacgaacaaaaaacaggtcgttacctgcagcagggactggttgaggaaggctatcaggccgatctctttaataatggccgcgatggtctcggggccgcgtcgaagggacagtatgatttgataatactggacgtgatgctgcctttcctcgacgggtggcaaatcatcagcgcactgagggagtccgggcacgaagaaccggtcctgtttttaaccgcaaaggacaacgtgcgggacaaagtgaaaggactggagcttggcgcagatgactacctgattaagccctttgattttacggagctggttgcacgtgtaagaaccctactgcgccgggcacgctcgcaggccgcaacagtctgtaccatcgccgatatgaccgttgatatggtgcgccggaccgtgatccgttcggggaagaagatccatctcaccggtaaagaatacgttctgcttgagttgctgctgcaacgcaccggagaagtgttacccaggagtcttatctcgtccctggtctggaacatgaattttgacagtgatacgaatgtgattgatgtcgccgtgagacgtctgagaagtaaaattgatgatgactttgagccaaaactgatccataccgttcgcggtgccggatatgtcctggagatcagagaagagtga

SEQ ID NO: 382970 - DNA, 930 bp, Salmonella enterica; identical to SEQ ID NO: 19850

SEQ ID NO: 382971 - DNA, 381 bp, Salmonella enterica; identical to SEQ ID NO: 19851

SEQ ID NO: 382972 - DNA, 897 bp, Salmonella enterica
atgcgaatgaagagaaatttgaaggccatacctgttctggtcgccggtttgtttacctcacagctttctattgcggcgggctccgtctctgcagatccccacgccgggcacgacatgtctgccatgcagatgccagcagatgagaatttcactgagatgacgtcaatggagcccattgtaactgagagcagaacgccaattccgcctgttaccgatgccgaccggaaggctgcattcggcaatttacaggggcatgcgattcacgacagtgcgattaattatctggttctgctggatcaactggaatggcaacggtcggataacaccaacaatttcagctggagtgttaacagctggattggaggcgacacagatcggatttggctaaagagtgaaggtgaacgaagcaatggggaaacggaggcggctgaagcgcagttactctggggacatgcggttggcccatggtgggatttggttgcgggtgtcaggcaggatttcagacctgcttctgcccggacctgggctgctgtcggttttcaggggctggcactctataattttgagtctgaaatttcgggttttgtcagtaatggcggaaaagcagcccttcgtctgggaggagaatacgacgttttactgactaaccggctcatactccagccatcctatgaggtgaatttctacagtcaggatgatgaatcgcggggtcgcggcaggggactgactgacacagagctggggctccggctgcgctatgaaatacgccgtgagtttgcaccctatataggcgtttcctggaatcaactttacgggaaaacatccgatatggcgaaaagagaaggtgagaaagaccatcaggtagtattcctggcgggagccagaatctggttttaa

SEQ ID NO: 382973 - DNA, 1818 bp, Salmonella enterica
atgctgttgaaaacgtctcgacgaactttcctgaaggggttaaccctctctggcgtagccggaagtcttggcgtatggagtttcaatgcgcgttccagtctgagcctgccagttgccgcatccctgcagggtactcagtttgacctgaccattggtgaaacggccgtcaatatcacgggcagtgagcgtcaggccaaaacaatcaatggaggcctgccggggcccgttcttcgctggaaagaaggtgacaccattaccctgaaggtcaaaaaccgtcttaatgaacagacgtccattcactggcacggcattattcttccggccaatatggatggtgttccggggctgagttttatgggcatagagcctgatgatacctacgtttacacctttaaggttaagcagaacgggacttactggtaccacagccattccggtctgcaggaacaggagggggtatacggtgccattatcatcgatgccagggagccagaaccgtttgcttacgatcgtgagcatgtggtcatgttgtctgactggaccgatgaaaatcctcacagcctgctgaaaaaattaaaaaaacagtcggattactacaatttcaataaaccaaccgttggctcttttttccgcgacgtgaataccagggggctgtcagccaccattgccgatcggaaaatgtgggctgaaatgaaaatgaatccgactgacctcgcggatgtcagtggctacacctacacctatctcatgaacgggcaggccccgctgaaaaactggaccggactgttccgtcccggtgaaaagatacgcttacggtttatcaacggctcggcaatgacctatttcgatatccgtatccccgggctgaaaatgacggtcgtggctgcagatggccagtatgtaaacccggttaccgttgacgaattcaggattgccgttgccgaaacctatgatgtcattgtggagcctcagggtgaggcctataccatcttcgcacaatccatggacaggaccggttacgctcgagggacactggccacgagagaggggttaagtgctgccgttccccccctcgatccccgtcctctgttgaccatggaagacatgggtatggggggaatgggacatgatatggcaggaatggaccacagccagatgggaggcatggataacagcggagagatgatgtctatggacggtgctgaccttccggatagcgggacatcctccgcgcccatggatcacagcagcatggccggtatggatcattcccggatggccggaatgccgggtatgcaaagtcatcctgcgtcagaaacggataacccactggttgatatgcaggcgatgagcgtctctccgaaattaaatgatccgggtattggtcttcgaaataacggaagaaaggttctcacgtacgcggatttgaaaagccgctttgaggatcctgacggacgtgaacctggccgtaccatagaactgcatttaaccggccacatggaaaagtttgcctggtcatttaacggaatcaagttttcagatgccgcaccggtgctgctgaaatacggtgagcggctcaggatcacgctgatcaacgataccatgatgactcaccccattcacctgcatggtatgtggagcgatctggaagatgaaaacggtaatttcatggttcgtaaacacacaatagatgttccccctggtacaaaacgcagttacagagtgacagcagatgcgcttggccgctgggcgtatcactgccatttgctctatcacatggaaatgggaatgtttcgtgaagtccgggtggaggaatga

SEQ ID NO: 382974 - DNA, 618 bp, Salmonella enterica; identical to SEQ ID NO: 100888

SEQ ID NO: 382975 - DNA, 276 bp, Salmonella enterica; identical to SEQ ID NO: 101078

SEQ ID NO: 382976 - DNA, 339 bp, Salmonella enterica
atgagcgtaactataaaagacgatcgactccgtaccatcgctacctttgacggtaaaaccctgaaagacgaccgactcaggaccatcgcaacgtttgacggtaaaaccctgaaagacgaccggctcagaaccatctcaacttttgacggcaagaccctgaaagacgatcgactccgcaccatcgctacctttgatggcaagaccctgaaagacgatcgactccgcaccatcgcaacatttgatggtaaaacacttaaagacgatcgactcagaaccatcgcgacagttaatggtaatgtcagtattgttgttttggcgtttgctgctcggctattttag

SEQ ID NO: 382977 - DNA, 2439 bp, Salmonella enterica
atgaactgggcaaagtcggataacactctgattaaggacctgaaggactttaccgccactttcttccagaagcatactctgctgaatgttctgtttaattacagcgtgtttgacagcagccagacgctgctcgtcatgcgcccctatcagattgccgccaccgagcgcattctctggaaaatcaacagctcttttaaagcgaagaactggtcaaaacccgaaagcggtggatttatctggcataccacagggtcaggaaaaaccctgaccagctttaaggccgcacgtctggctacggaactggactttattgataaagtcttcttcgtggtcgacaggaaagacctcgattaccagaccatgaaggagtatcagcgcttctctccggacagtgtaaatggttcggataatacagcaggcctcagaagaaacctggataaggacgataacaaaattatcgtcacaaccattcagaaactcaataacctgatgaaagccgaagctgacctgcccgtctatcagcagcaggtggtgtttatctttgatgagtgtcaccgcagccagtttggtgaggcccagaaaaacctcaaaaagaaattcaggcgcttttatcagtttggttttaccggtacgcctattttcccggaaaatgcactgggggcagaaaccaccgccagcgtcttcgggcgtgaattacattcttacgtaattactgatgcgattcgtgatgaaaaagtactgaagtttaaggtggactataacgatgtccgcccacagtttaagtcccttgaaacggaaacagacgagaaaaaactcagcgcggctgaaaaccagcaggcctttctgcacccactgcgtatccaggaaataacgcaatacattctcaataacttccgccagaaaacgcatcgtaccttcccgggaacaaaaggcttcaatgccatgttagcagtgagcagcgtggacgcggcaaaagcttattacacgacatttaaaatgctacaggaagaagctgagaagaaatctggcagctataaacgtcttcgtgtggcaaccatcttctcttttgctgctaatgaagagcaaagcgctattggtgatattaccgacgaaagttttgataccagtgcaatgaacagcagcgcaaaggaattcctggattcagccattgatgactataacaatcactttaaaaccaatttcagcaccgacagtaacggtttccagaactactaccgcgatttagctcagcgagtgaaaaatcaggatattgaccttctcatcgtggtgggaatgttcttgactggctttgatgctccgacgctcaatactctgttcgttgacaaaaacctgcgttatcacggtctgatgcaggcattctcacgcaccaaccgtatctatgatgcaactaaaaccttcggcaatatcgtgaccttcagggacctggagcgtccgaccattgatgccatcacactttttggcgacaaaaacaccaagaatgtggtgctggaaaaaagctacgaagagtacatgcagggctttaccgatgcggcaaccggtgaggctaaacgaggttttatggctgttgtttcggagctggagcagcgcttccctgaccctgccagtatcgacagtgaaaaagagaaaaaagccttcgtcaaactgtttggtgaatatctgcgggcagaaaacatcctgcaaaactatgatgaatttgccacgctgaaagccctgcagaaggttgatattagtgacccggaagcgatagaaacctttaaagcagagcactatgtggatgatgaaaaatttgctgaattacaaaccattcgtctcccggtagaacgtaaagttcaggattatcgctcagcatacaatgatatccgggactggcagcgacgcgaaaaagcagcaaacgacagggataaatcaaccacagactgggatgatgtggtgtttgaaattgacctgctgaagtcgcaggagattaacctggactacatccttggtctgattttcgaccacaatcgtcagaaaaaaggtaaagaagccctgactgaagaggtcagacgcttaatccgctcaagtctgggcaaccgtgccaaagaaggtctgattgttgactttattcagcaaactaaccttgatgacatgccggacaaggccagtatcattgatgcattctttacctatgctcagcgtgaacagcaacgggaagcagaggcgttgattaaggaagaaaacctcaatgaagaggctgcaaggcgctatatccgcacatcactaaaacgggagtatgccaccgaaaatgggacggagctaaatgagacgctaccaaagctcagtccgctgaatcctcagtacaaaacgaaaaagcagactgtattccagaaaattggggcatttatcgaaaaatttaaaggggttggaggacacctctag

SEQ ID NO: 382978 - DNA, 912 bp, Salmonella enterica
atgaccactattaccagagaatggctacagcagaccatcgctgaatttgaaaacactcgcgacgatattccgtttggcctgagcgacgacgacgccaaaattctgattgtgctgaagcgtgcgctggccgtgattgacgctgagcctgtgcgatatctgaataaattttccggcacatgcgtgacgttagagcagcagtcaaacgctgctgatgatgttgccgtgtatattccgctttacgccgcaccgccagtacaggaaacaggcgtttacaaggatatgctcaatatcatcagcttgctggaaaacaacgaatgggccgagcattgtacgagtacagttttaggttcactcctggaatcagaaataacgcgtctggttggcaaagagcagcctgcgccggtagtgcctgatgaaatggcgacatctgatgacatgaatctttatcaaaagagctttgcgcaaggctataacgcctgccgcgccgccatgcttcagggtgctgaacctgtaagtaatcatgatgagttggcgctgtattatctgcaaggtcaaaaagacggccttgaatgggctgcgcagcttgcagaagcaaaccacccgcttacaggcgactggctttacgatgacccgctggagctggctaaagctatcagaaaaggtccagatatgcccgggttcgccggaagctctccagtaactcaggatggttggataagctgtagtgagagaatgccggataatgatgaatctaaacccatcgcaatttttaccggaaaatgtctgggtcaggggatgttcgttgctacatacgacgatgatgggttctttgactattgggagggtatggaaattatcggtgtaagccactggatgccactgccagcagcaccagaaccagatcagagctaa

SEQ ID NO: 382979 - DNA, 474 bp, Salmonella enterica
atgtcacagcaaacaattttggacgtgtgttgcggctcccgtatgttctggttcaacaaactcgatacccgcgcagtgttcgcagatattcgggcagaagagcacacattgtgtgacggtcgccgtctggttatcagtcctgacctcattgctgattttcgtgcgctaccgttcgctgatgcctcgtttccggtcgtggtgtttgatccgcctcacctagaacgtatcggccaaacggcctggatgggcaagaagtacgggagactcaacaaaaaaacatggcgttctgacctccgtgccgggttcaaagaggcgtttcgggtactgcggccacacggcgtactcatatttaaatggaacgaaacgcagattccggttagccagattctggcgcttactgacgtgaaaccaattattggccagcgcaccggcaagaacgataaaacccactggattatttttgtgaaggactaa

SEQ ID NO: 382980 - DNA, 783 bp, Salmonella enterica
atgacagtccatacattgaagcaatgccgcccgaaccaggaagaaactgagtatttctggaagctgtttcatgcggcgcaacgtaatgatgctcgctggcacggtagtgagatcagcattatcgccgatgagctatcccggacggatttagatcgtaaccaaaaactgttccttctccgctcctggcaagtgctggtagacaacaaaggtggattcgggcgctttatgggtgcctttgatacttacgtctacaacatgcaagacccggatgatgactgcgtagcgtggaaacctgaactggcccaaatactgaacgacggcaattgtttcgacgtactgcttgatgcgtaccatgaagcccagcagcgcatagcagaactggaggcgaagcttgaaactgccgacaggttgcaggatagcgcattccgtgacggcctgaaagccgggttcagctatgggcagacagatgaccagtccggattcatgcagtgcatgtctgcatatagcacccgcgctggcattggcgtaaagcagcagcaagatagcgtcgattctgatgtaggtggcaggaatcagccaggtatggttactgcgatttatatcggcgcaggtgactttgtgaaagtcaaaggacaggtgtttgaggtcgaggaaaccgactttgacgaccacgacgttacattatggtttgtgggtggcaacgcattgaaatgttccgctggttgtccggttgaggtggtatctgcgccagttgccgctggcatcaaggttaaggagtcgtga

SEQ ID NO: 382981 - DNA, 465 bp, Salmonella enterica
atgagcaacaaaattgagaaccctgtcgtgcttatctataagcgcgagaacagtgactcctacgccgtggcgatcaccagtggcagccaggactatcacgatgccgttctgatggcgacgatggaaccggacatgaccggcgataacgtcgatacctggagcaaaaccggctattacatggcggcagagattgagcgcttacgtcagcagcttatcgctccgctgagtattggggaattattacaacgcctggaatcacagactggcgagaaatgggagagagcggttaacgatgtcaccactggtaaaccgttgaccatcaccctgccagataccagctcgaaagcattctggagcggtagcggtaaaacggaggtattccacccggaaacctataaacgccaggtgaaagaagcgatcaagcgggcttgtgttagcgctgggttcggtgtggaggtgaagtaa

SEQ ID NO: 382982 - DNA, 216 bp, Salmonella enterica
atgaccagcaaacgccgtctcagacgcaagcagtgcggatgtaaaaaaagacataagactgctgacggtgcgcagatagaactctggattattcgtaaacgttacggtcatcaggggcagatgggcgtttaccgctgtccgttctgcaataactatcacgtcgggcatacaccagggcgtaacggcatcggttcaggttatggaaggtggagatga

SEQ ID NO: 382983 - DNA, 147 bp, Salmonella enterica
atgaacaaagaatttgagatatgggtgctcaggaggtatggaaaccgctatgacctgacgcgtgacgactacggattctactgccgggaagtggttaaacgaatgttcgaaacgtggtgccactgtcgtggccttgacgtggtgtga

SEQ ID NO: 382984 - DNA, 195 bp, Salmonella enterica
atgagtgacttaatgacaacaaaacaggttgctgactattgcggggtctccgtatcgaccgtgcttcgctggaatagcgtcaaccggaagacagggcagaagtaccgccccgagtttccggatccggatatcaaatcctgtccgaacaaatgggcgacgcataaaattcaccagttcgcaggggttacgtcttaa

SEQ ID NO: 382985 - DNA, 1206 bp, Salmonella enterica
atggcgctatcggatacatggctgcgttcggtaacaggcaaggaacgcgataaggttatggttaagtcagatcgagatggcttgtccgtcagagtatcaccgaaagggcgagtggtcttccagtaccgctatcagtgggcgggaaaaggcgagcgtattgatattggaacttatccgtccaccggtttaaaagaggcccgcgatgaagttgtacggctacgcggggaacttgaggcaaatagaaatcctaagctggtccgcctggcagagaagcgaaaagtcacggaggcgctgacggtagaggcggtgatcagaacctggtttgacgcctattgcctgaaaaataaaaaaggcgcagatcaaatcatccgttccttcgagattcatctattcccccggataggtggtatgccacacgatgctgccagcctccatgactggctggaggtactggagcctttaagcgtaaaactaccgggcattgccgacaggttgttggtgaacgctaagcaggctcatgtctgggcgtacaagagaaaattggtggagaatcgcccactgtccgacataaccagtaaggatatggatatcagaaaagggcagggtgaacgattccttagccatgacgaaatcaggatcctgtatgccgcaattgaaggttcccgcatggttcccaagtaccgtgcctttatcaagttgctactgcatttcggctgccgttctgctgagttgataagcgccagagtcgaggattttgattttgtagataaagtctggacggtgccggcagagcgtcacaagacgggagccataacaggcaagccgctaaaacggcctattatcaagcctaccgaagagctaattaaatacgttatttcgatgaataatggttcaaatatgctctttactaaagaagggagtcgcgaacccgttggaagatcatcactgcaatccttaccgtataatttaatgcagtattcctggcgtcgcttgggatatcaattcccccactggtcactccacgatttgcgaagaacagcgagaacgaatttttccgatctgactgaaccgcatatagctgaaataatgctcggtcataaactgcctggtatctggcaagtttatgacaagagcgattatcttgaagagcaacgtaaagcctatcaggcctggtgggaaagggttgagtctatcgttaagacgtaa

SEQ ID NO: 382986 - DNA, 1065 bp, Salmonella enterica
atgacaacaccatcctggcggtcgcttcgtattaagaagtatcagttttctttacgtcttttcttgtttctcaacgccgtgtcggcgctatttactctcattttccccctttatcaaatcaatgtattttgcacgccaatgatcggaatagtggtcctgagcgtattactgttgatatggcatgggaaatatgggcaaaaaagaattaatctcccctttatctccctactctttgggggaatatgggcggcgcatattgcgctaaagtatccggcgttaggccattatgatttctcttttttactgatttccctgcttagcgttctgtttatcggctcgatagcctttgccgcgaatatcgtcgcgtttacgctctattcgctaccgccagtcgcggtctgcctgtggctgaacggtaatgaacaaggtttgcgaattctctatttgctggccctgccaatggtgggaatcgctattcaacatgttatccagaaacgctacgataattttgcccaacagctcatgtttaagctgctggccgagcgggaaaccctcaatggcctgagtatgcttgatccattaaccggcttatataaccgccgtggcctgcaaaatcggctggatacgttacaggcgccgggcagccatgaacactacgtcctgctattggatatcgatcatttcaaagcgtataacgatcactacggtcatatgatgggcgatcaggcgttaattcgcgtctcagcggcaattcgggacgccgtgcgatcgcgcgatgtcgtctgccgttttggcggggaagaatttctggtgttgctgaccaccgccgaaccacagcaagcccgcgctaccgcagaacgtatccgacaggaagtatacgatcttaaaatcccgcatatgtttaacgaaagcgtcgccaccaatgtcactgtcagtatcggcattgcgcccctgacggatcgcaatatcggagacgctatcgaaaaagcggataaagcgctctacgaagccaagcatcttggacgtaaccacattctggtcagcgacgacatgcgcgccctatga

SEQ ID NO: 382987 - DNA, 276 bp, Salmonella enterica; identical to SEQ ID NO: 36734

SEQ ID NO: 382988 - DNA, 129 bp, Salmonella enterica
atgagccgtaaaagttctaaggaaggtgcgaataagcaggtcatttcttcccaagttgactcgctgattaaaatttcgcggatctgggccgatttttttcccgcaaacacatcgaatcagcctatttag

SEQ ID NO: 382989 - DNA, 231 bp, Salmonella enterica
atggacagcaatactcagggattcacttcatactggcgtaatagcttagctgatgccgagtctggaaaaggggcattcgagcgtaaagatgaagattcattcaatgacctgacggtcaacctctacaaactctggaaccgaatggcatccgggagctacttcccaccgccagttcggcgggtggaaattcccaaaagtggtggtgaccctggcccaaaggggaaaagctga

SEQ ID NO: 382990 - DNA, 2721 bp, Salmonella enterica
atgaacagaaaagagaaaatatttcaggcagtttgtgagctttgtatcacttttcctaatggattgacaactgagcagattgcactatatacaaatattgccaggcccaatgttagtaattatttaaatcaatttattaaagagaataaaatagtcaaatccggcactcgcccagtactttactctatcaaaaaagaaaaccttaaaaccattcatcagagtgctaatctgcctgtgcctgatgtacaaaaagagcctttccagtattttctggggtataacggaagtattaaaaaacaaatcaatcaggctaaagctgctgttatgtatcctccgcatggattgcatacgctgttaacgggggacactggtgtagggaaaagtctttttgccagtctgatgtataattacgctgtttatcagaatgcgcttgataaaaattcaccgtttatcgtttttaactgtgctgattatgccagtaatccgcaattattggtttctcatatctttggccatgtaaaaggcgcttttaccggtgctaccagagataaatttggcctactcagtgaagcagatggtggaatgttatttcttgatgaagttcatcgcttgccgcctgaagggcaagaaatgatattttattttatggatacaggcacttatgggttgctaggggagacacagcgtagtcgtaaggcacaaatattacttatttgcgccaccaccgaagagcctaattctacgctgctttccacttttctgcggcgtatcccaatcaaaatcaatattcctaatcttgccgaacgttcacctggcgatcaggtcgatctattaaaatatctgctggaaatcgaagccagaaaaatcaactgcgccataactattgataccgacagcgctaaagcaatcatcggctcgtctttctctggtaacgtgggtaaattaaaatcgactatccagtccgtatgcgcccacttttttatcgaagataataatcctaaccagcttaatattacttacgataaactcatctctgatatcaaagtgggaatttttaatctggcgcgtgacaacgattatctggttgggttgcagcatgcactggctggtactatcacgatcatgcctgataactcacattcgggcctggacttatacacagatattgatgtaaataaacataatactccttttcaggtctatgatgttattgataagaaaatccaattcatgctggagcaaaatttttcagatactgatataaataattacatcacttctgaaatcaaccagtatatcgacttgcgtttacccaaaaagcttgaacatgttgatcacggtttaccgaatgcgactctagtcttctgtcagtcgttaaaaaatgaattagagcttcagttgaataaagagttcagccatggatttctgctgtctttggggtaccatctgaataatattatacaaaaaagaacccgctcacgcacgaatacctggataagacattatcgcgttgataaccttgaagaatatgaatctgcgctgacaatcaaaaaacgactgtataaagaatttgatattgatattaatgatgatgaagttgtctatctgaccattcttttggcctcgctggtggttcgtgaacgtgataagcatatccacgttatcgttgcgacccatggtgatatgatcgccagcaacatggtcgacatagcaaaaatattaattgctgaagataatatatcagccgtcaatatgccgttggatatccgcccgaaccaggccattgcgcaaatcaagcaaaccatcacagcttactcaaatgcaaaaggatttttattattagtggatatgggatcgctcatccaggcgggatatctcttatcacaagagtgtaatgtccccgtcagaactctggacatggtttctactcccttagtgattgaagcacttagacgctcggcactgctggatgccgatctggatgacatttatttgagcctgcaacatttcaaaggttacggcgtcagtgaacacaatgcggtagttactggcaataaaccattggcagtactggctatttgttcgtctggcgaagggattgcccggaaacttaaaaatttattaagctcagtactggaagagatgaatcgtaaagatatccatatcattaacctgtcggttgaagaggtgctcaatacgaagcataaaatcactactgaatatcaggtgttgctttcaattggcgtgattaaccccggactggatgtaccctatatttcactgccagatttcttttcaccaaaaggtgaattgacattccagaccattatcggtggggcttttccggtgatggttgaaaataaaaatccggtaacgcttactaaactggctgaacaatatctacaagagtttttaacttacctgaatccgaaaaaaatcgtgcccatcgtcatgctttttctgcagcagttgaaagaacaacgtcactttgatgaattcggttccaatttactcaatatgattgtgcatacctgcgttgcgatagagcgttcggttcgtaatgaaaccataacgtataacaaacttaatcgggaagcatatttgatgagcgaattatttaaaatatatcaaaaggccaatgagatattggaggataaacttgatgtcaaactcaatgatgacgagctacttttcattattgatatgctggaaaaagagtaa

SEQ ID NO: 382991 - DNA, 678 bp, Salmonella enterica
atgaagtcccctttaatcgccccctcgctaatgtgcatggatttattacggcttgaagagcaagttagttttctgaacgataaaatcggttatttccatgtcgatattatggatggtcactatgttccaaatttgacactgtcaccgttttttgtatcgcagatgaagcgggtggcaagcgcccccattgattgccatctcatggtgactaacccgcaagattatatcagtaccctggctgacgccggcgcatccatggtgagctttcatgctgaaacggcaaatgggcaggcattccgtctgattgacaatattcgctcagcgggaatgaaatgtggattagttgtaaacccggaaacccaactcgacatcgttacgttatatctggatcgtgtggataaagtgactattatgacggtggatccgggttttgccggacaagcatttatatccgcaatgctgaaaaagattgctgcctttgcagaatatcggcagcagcatcaactggaatttttaattgaagttgatggctcttgtaataaaaacacctatagtgcattagtggaagccggggctgatgtgctgattgtcggttccagtggtcttttcggtcactcagaagatattggtgaagcctggcagattatgcaacgagatctggcagaagcgctggcataa

SEQ ID NO: 382992 - DNA, 1047 bp, Salmonella enterica
atgaaagtagttgcattgacggccattggtcacctcgagttacaggaacgtaacatgccagtccctcaagcgggtgaggtgttgctgaaagtgatggcttccgggttgtgtggttcggatgtgccaagggcgtatcaaacaggcacgctgagttttccgcgcgtactggggcatgagttcgccggtcgggttgaggcggttggtttgggcggcgatcctgcattgattggcaagcggatggccgtattcccaattgtaccgtgcatgacgtgcgagttttgccagcagcaccactatcctcgctgcctgaactacagctcttacggttcccgtcgtgacggtggttttagtgaatatttaacggttccggaatttaatctcgtcgaattccctgatcatgtcagctacagcgcagcggctatgcttgaaccggctaccattgctttgcatgtcatacggcgtgctaacctggatctgaatgacagtatcgtcattattggcgcaggtccgatagggctaatggcagcgcgttgggcgacgatttacggtgcgcaaaaagtcatgctgattgatgtggatccgaaaaaagtcgagttctgccgcgaactgggattcgaacatgtgtgcctcgccactgaagaggatgcggttgagtgggtgttgaaagagactgatggttttggtgcgcatgtcacgattgaaggaagtggttcatgcgccggattaacccaggcgctgttagcctgtcgtgtttacggcaaagtgatgctgatgggcaatccgcatggtgatatgcaaattccacgtgaagtatatgacaaagtaatgcgtaaagaagcggttatcgccagtgtttataactcagtttataaacaaatgccgcacgacgaatgggctgatgcagccgctgcgattagttcagggaaattacaggtcaatgacttaatttctcatcaggtagaaatcgacagcgttatagatctttttgacacattccaccatcgtcgtggttttacctgtaaaggtatgatggttacaaaggagtaa

SEQ ID NO: 382993 - DNA, 564 bp, Salmonella enterica
atggcaacgaaaaattatcgtgaaaatgtcggaataatcgaaaaagaactctcaatggttctgagcagaattgatgaacggcaaattgatgaatatatttcgacactattgcaggctgaaaaagttttctttgtcggcgtagggcgcgttttactcgcacttgaaatgaccgtcaagcgtcttaaccatctgggcatcaacgcctgtgtcgttggggcagttaatgaaccccctattggacctaaagatattttggtagtgggctcggggtctggtgaatcaatctttccaaagcatattactgcctgcgctaaacgctatgatgcaaaaattgttcatctgacttccagcccgacaagttcaattgctcagcttgcggacgttattgtcgattttcactgtggctcaaaaggtggaacaggggaatatatttcgattcaacctatgaccacgctatttgaacaatctttggtcctgtttggcgatcttgtttgtcttgaaattatggctatcaagcaattatcgctggctaatgtgaagcttaatcatgcaaaccttgaataa

SEQ ID NO: 382994 - DNA, 1041 bp, Salmonella enterica
atgaaagtgttatcattaactgaactcggtaaattcgagttgcaggaaagagctattcctacgccacgagctggagaggttttagttaaaataggtgcggcaggtatctgtggatctgatattccaagagcatttgtcaatggtccttatcattatcctattgttttgggacacgaattttctggtcatattgtggcagtcggcgaaggggttaaagaggatctggtcggtcgtaaaactgctattttcccacttattccttgtaatgaatgtgcattttgtaaagagcgttactatgcgaaatgtacacattacagctattttggctcacgtcaggatggtgggtttagcgaatacctcagcgtgcctgaatttaacctggtattgcttgatgatgatgcagatttacgtgaagccgctatgctcgaaccggctgttgttggtttacatgtaatgcgtcgcgcacatctggatcttaatgatagcgtcgtgatttatggcatggggcccatcgggattatgattgcacgctgggcggcgatctatggtgctaagaaagtattgctggttgatattgaccagaagaaaatagagttttgtcgcgccctgggattcacagatatctgcgacgcaagccagacagatcctgtcgagtgggtgatgcaacagacagaaggttatggtgctgatgtctgtattgagggcagtggttcctcctcgggattcattaactctctgatgtcctgtcgggtatttggcaaagtattgatgctggggaacccacacactgacgtcaatattccgcgcgaaatctacgataaatttatgcgtaaagaagcgcagattatgggcgtctttaactctatttattcacaacggccacatgatgagtggaaagatgctgctgcggctattcagtccggcaagctaaaagtgagcgatctgatcacccatgccgttccgatggaagagttgtctgccttatttaatcttattcgcgacagtaaagtccccttttgtaagggaatgatggtgatgtaa

SEQ ID NO: 382995 - DNA, 873 bp, Salmonella enterica
atggcaacatatcagactctaaatgaatctcagcccaacgaaactccaaatacctctacgcttacccgtaaagagttgcttaaaacatgggctttaaactattcatccgaaacctgttataactatgaacgtttacaggctcttggacaaaccagcgccatggtgccggttatccgtaaactgtatccaaatgataaagccaggcaagtacaagagttaaaaaagtatcttaacttttttaataccgagccttcattttgtggtcatgtgatcaccggtgtttcagttgcaatggaagaacaacgggccaatggtgcccagctaccaccagaggccattacgtcactacgctcaggcttaatggggccggtagccggtattggtgatactctgcaagcaatcgtatattccattctggcggccattgcctgtaatcttgctatacagggaaatatagcgggtccgatactgtttgaagttttctataaattcatcatgatattctgtagcctgaatatgttctttctgggatacagtaaaggtcgtaccgttatccttgatattctgaaaaaaggattaatggataaattaaccgacgcatttggactcattggtctgatggtggttggtggtatggcggcatccagagttaatattgtcactccggcctcaattaacttaaacggagttacggtagtcttccaggatattttaaatacattgctgccatcgctgattccattattgataacgctaggtatcctgaaaatggtaaatagaaaaatgaagcctaatactgtaatcgcggttatctttattgtcggtattatctcctcttatctggggatactggcagtgcctgttacaaaataa

SEQ ID NO: 382996 - DNA, 750 bp, Salmonella enterica
atgcttctctcagctattttagtcgccctcattgctattctcagcaattggtgggttagccatttgctgactcgttcgtggctttatccaattatatcgggttttcttgtcgcacttgcacttggttcccctatcgaggggatgaaagccgcggcctacattaaccttgcctacctcgggtggatgacagtgggcggtacgatgcccggtaacctgccggtagcatcggtttttggtacggcgatgaccattttaagtggtgccgcgccttcaaccgcagtggtatttgccgtcccattttctctgctggggatcctgacttttcaggcatcgatgagttttaacgccctgtgggttcacaaagcagaagcaatgctggatcgcggcaatattaccggtatgcggatgatgaactatatcccatccttttttgtaaatatggtgctggtcggtattcctgcattctgcatggtctattttggcgcggattttatgaagaacatgctgacgatgattccgcagagcctggttaatgcatttgaggttatcggcggtattatgccagcgctgggtattgcaatgctggtctctttcctcggtaaaaaacgtctgatgccattcttctttcttggtttcttcctggttgcatatctgaatctgggaatcatggcaattgctgtatttgcggttatcgctgcggtgattatgaacatcaatgctgaacaaaaagtttctgcaacgaagggataa

SEQ ID NO: 382997 - DNA, 483 bp, Salmonella enterica
atgtctactgtatccttacttcgcattgatgacagattaattcacggccaggtaatgactggctgggtaaaacatatcaatgcaactaaaattattattattgatgatgagctcgtccatgatgattttatgatttctgtactggaaatggctgtacccaaccatatgacactgaacatttttaatgttgcccaggcaatcgacgtgctgagtaatgttaaagacgatggcgaagatgacaaaattattattcttgtaaaaagtccgattccggtactggcactactacaaggcggtgttaattttgaagaattaatcgttggtggcatgggtgtaaatgaaaagcgctctcgactatatcgtaatctggcagcgtcagacgttgaacgtgcggcatttagagaaatcaatcagttaggagtaccaattaatataaaggtattgcccagcgatgccccaatggagctaataccttacttataa

SEQ ID NO: 382998 - DNA, 390 bp, Salmonella enterica
atggattgtacggtaattgtggcaactcatggaaagctggcaaacgaattgattgaaacagtcgcaatgctggtagggcgttatgaagacgttaggacgcttgattttatgcccggagaaaatgttgaaggtcttattttaaaaatgaaacgtgtggtggatgccgttcccggggatatgccagttttgtttgtggtagatatgttctcagggagtccgtttaatgcatctacttactttgttaagcaacgaaaaaataccagggttgtcgcaggtgtaaatattcctatgcttgttaatatttttcttgaacgtcaggagtctacatcgctcgatcacctcgtggatattgccatcaccgtgggacaaacttcaattaaaccattgtaa

SEQ ID NO: 382999 - DNA, 366 bp, Salmonella enterica
atgatgaaccctgttccatggctccagatgacaaacatgatctcatatcagggacttgttcgcaccttccctaaagcactcgtattgaccgtggcggctaccacattctgtctgatgaccagcccggcgttcgcggttgaggaaaccacgccgcagaatatgacctgtcaggaatttatggatatgaacccaaaaagcatgaccccggtggccttctgggtagtgaatcgcaacaccgactttagcggcggcgactatgttgactggcatgaagtcgagaccgtttcggtaccgaaaatgctgcaggagtgccacaagaaccccgccgctaaacttggcgatctcagcgcggtcatcaaaaaataa

SEQ ID NO: 383000 - DNA, 804 bp, Salmonella enterica; identical to SEQ ID NO: 78951

SEQ ID NO: 383001 - DNA, 1824 bp, Salmonella enterica; identical to SEQ ID NO: 78950

SEQ ID NO: 383002 - DNA, 426 bp, Salmonella enterica
atgagcgagaaaaccatgcgcgtgcaggattatccgttagccacccgctgcccggagcatatcctgacgcctaccggcaaaccattgaccgatattaccctcgagaaggtgctctctggcgaggtgggcccgcaggatgtgcggatctcccgccagacccttgagtaccaggcgcagattgctgagcaggtgcagcgccatgcggtggcgcgcaatttccgccgcgcggcggagcttatcgccattcctgacgagcgcattctggctatctataacgcgctgcgcccgttccgctcctcgcaggcggagctgctggcgatcgccgacgagctggagcacacctggcatgcgacagtgaatgccgcctttgtccgggagtcggcggaagtgtatcagcagcggcataagctgcgtaaaggaagctaa

SEQ ID NO: 383003 - DNA, 585 bp, Salmonella enterica
gtgcaacagacaacccaaattcagccctcttttaccctgaaaacccgcgagggcggggtagcttctgccgatgaacgcgccgatgaagtggtgatcggcgtcggccctgccttcgataaacaccagcatcacactctgatcgatatgccccatggcgcgatcctcaaagagctgattgccggggtggaagaagaggggcttcacgcccgggtggtgcgcattctgcgcacgtccgacgtctcctttatggcctgggatgctgccaacctgagcggctcggggatcggcatcggtatccagtcgaaggggaccacggtcatccatcagcgcgatctgctgccgctcagcaacctggagctgttctcccaggcgccgctgctgacgctggaaacctaccggcagattggcaaaaacgccgcgcgctatgcgcgcaaagagtcaccttcgccggtgccggtggtgaacgatcagatggtgcggccgaaatttatggccaaagccgcactatttcatatcaaagagaccaaacatgtggtgcaggacgccgagcccgtcaccctgcacgtcgacttagtaagggagtga

SEQ ID NO: 383004 - DNA, 1668 bp, Salmonella enterica
atgaaaagatcaaaacgatttgcagtactggcccagcgccccgtcaatcaggacgggctgattggcgagtggcctgaagaggggctgatcgccatggacagcccctttgacccggtctcttcagtaaaagtggacaacggtctgatcgtcgaactggacggcaaacgccgggaccagtttgacatgatcgaccgatttatcgccgattacgcgatcaacgttgagcgcacagagcaggcaatgcgcctggaggcggtggaaatagcccgcatgctggtggatattcacgtcagccgggaggagctcattgccatcactaccgccatcacgccggccaaagcggtcgaggtgatggcgcagatgaacgtggtggagatgatgatggcgctgcagaagatgcgtgcccgccggaccccctccaaccagtgccacgtcaccaatctcaaagataatccggtgcagattgccgctgacgccgccgaggccgggatccgcggcttctcagaacaggagaccacggtcggtatcgcgcgctatgcgccgtttaacgccctggcgctgttggtcggttcgcagtgcggccgtcccggcgtgttgacgcagtgctcggtggaagaggccaccgagctggagctgggcatgcgtggcttaaccagctacgccgagacggtgtcggtctacggcactgaagcggtatttaccgacggcgatgatactccgtggtcaaaggcgttcctcgcctcggcctacgcctcccgcgggttgaaaatgcgctacacctccggcaccggatccgaagcgctgatgggctattcggagagcaagtcgatgctctacctcgaatcgcgctgcatcttcattaccaaaggcgccggggttcaggggctgcaaaacggcgcggtgagctgtatcggcatgaccggcgctgtgccgtcgggcattcgggcggtgctggcggaaaacctgatcgcctctatgctcgacctcgaagtggcgtccgctaacgaccagactttctcccactcggatattcgccgcaccgcgcgcaccctgatgcagatgctgccgggcaccgactttattttctccggctacagcgcggtgccgaactacgacaacatgttcgccggctcgaacttcgatgcggaagattttgatgattacaacatcctgcagcgtgacctgatggttgacggcggcctgcgtccggtgaccgaggcggaaaccattgccattcgccagaaagcggcgcgggcgatccaggcggttttccgcgagctggggctgccgccaatcgccgacgaggaggtagaggccgccacctacgcgcacggcagcaacgagatgccgccgcgtaacgtggtggaggatctgagtgcggtggaagagatgatgaagcgcaacatcaccggcctcgatattgtcggcgcgctgagccgcagcggctttgaggatatcgccagcaatattctcaatatgctgcgccagcgggtcaccggcgattacctgcagacctcggccattctcgatcggcagttcgaggtggtgagtgcggtcaacgacatcaatgactatcaggggccgggcaccggctatcgcatctctgccgaacgctgggcggagatcaaaaatattccgggcgtggttcagcccgacaccattgaataa

SEQ ID NO: 383005 - DNA, 429 bp, Salmonella enterica; identical to SEQ ID NO: 78947

SEQ ID NO: 383006 - DNA, 1164 bp, Salmonella enterica
atgagctatcgtatgtttgattatctggtgccaaacgttaacttttttggccccaacgccatttccgtagtcggcgaacgctgccagctgctgggggggaaaaaagccctgctggtcaccgacaaaggcctgcgggcaattaaagatggcgcggtggacaaaaccctgcattatctgcgggaggccgggatcgaggtggcgatctttgacggcgtcgagccgaacccgaaagacaccaacgtgcgcgacggcctcgccgtgtttcgccgcgaacagtgcgacatcatcgtcaccgtgggcggcggcagcccgcacgattgcggcaaaggcatcggcatcgccgccacccatgagggcgatctgtaccagtatgccggaatcgagaccctgaccaacccgctgccgcctatcgtcgcggtcaataccaccgccggcaccgccagcgaggtcacccgccactgcgtcctgaccaacaccgaaaccaaagtgaagtttgtgatcgtcagctggcgcaacctgccgtcggtctctatcaacgatccgctgctgatgatcggtaaaccggccgccctgaccgcggcgaccgggatggatgccctgacccacgccgtagaggcctatatctccaaagacgctaacccggtgacggacgccgccgccatgcaggcgatccgcctcatcgcccgcaacctgcgccaggccgtggccctcggcagcaatctgcaggcgcgggaaaacatggcctatgcctctctgctggccgggatggctttcaataacgccaacctcggctacgtgcacgccatggcgcaccagctgggcggcctgtacgacatgccgcacggcgtggcaaacgctgtcctgctgccgcatgtggcccgctacaacctgatcgccaacccggagaaattcgccgagattgctgaactgatgggcgaaaatatcaccggactgtccactctcgacgcggcggaaaaagccatcgccgctatcacgcgtctgtcgatggatatcggtattccgcagcatctgcgcgatctgggagtaaaagaggccgacttcccctacatggctgagatggctctgaaagacggcaatgcgttctcgaacccgcgtaaaggcaacgagcaggagattgccgcgattttccgccaggcattctga

SEQ ID NO: 383007 - DNA, 354 bp, Salmonella enterica; identical to SEQ ID NO: 181095

SEQ ID NO: 383008 - DNA, 531 bp, Salmonella enterica; identical to SEQ ID NO: 78945

SEQ ID NO: 383009 - DNA, 549 bp, Salmonella enterica
gtgatcgccaccaccaccgtcgatctggccaatctggtggaacagaaccgctttagccgccagctgtactatgcgctgcactcctttgagatcgtcatcccgccgctgcgcgcccgacgcaacagtattccgtcgctggtgcataaccggttgaagagcctggagaagcgtttctcttcgcgactgaaagtggacgatgacgcgctggcgcagctggtggcctactcatggccggggaatgattttgagctcaacagcgtcattgagaatatcgccatcagcagcgacaacggccacattcgcctgagtaatctgccggaatatctcttttccgagcggccgggcggggatagcgcgtcatcgctgctgccggccagcctgacctttagcgccatcgaaaaggaagctattattcacgccgcccgggtgaccagcgggcgggtgcaggagatgtcgcagctgctcaatatcggccgcaccaccctgtggcgcaaaatgaagcagtacgatattgacgccagccaattcaagcgcaagcatcaggcctag

SEQ ID NO: 383010 - DNA, 276 bp, Salmonella enterica; identical to SEQ ID NO: 36734

SEQ ID NO: 383011 - DNA, 450 bp, Salmonella enterica
atgattgaaacgagcctcgacttttccgggttgaatgatatagcaaaagacctggagttacttagccgcgctgaaaataacaaggttttgcgtgattccacacgcgccggggcagaagtgcttaaggaagaagtgatcgcacgcgctcctgagagaaccggaaaactgaagaaaaacgtggtcgttttgactcagcgctcacgacgccgcggtgaaattacttccggcgtacatatccgtggtcgcaacatgcgaaccggtaatagcgacaacaccatgaaagccagcgatccgcgaaatgcgttttactggcggtttgttgagatggggtctgtaaatatgccgcctcatccgtttgttcgccccgcgttcgatgttcgcctggagcaggcgacggaggtcgcgatcaggcgtatgaaccaggcgattgacgaggtattaagcaaatga

SEQ ID NO: 383012 - DNA, 339 bp, Salmonella enterica
atgcaggccggaagactgagagacagggtggtagttcagaacatcacaacatccagagatccttctggtcagcctgttgaaacgtggcatgacggtgcgagtacatgggcagaagtcaaaggcatcagtggccgtgaaattgtagcggccggtgctgaaaccgctgtagccactatcagggtttggacacgatttcgtaacgatataactgctgcgtccagactcagggttatcactggaccgttcaagggtgccattttgaatatcattggcccaccgatttctgattctcgcggtgttcagctcgaaattttatgcaagcagggggcagaaaaatga

SEQ ID NO: 383013 - DNA, 327 bp, Salmonella enterica
atgcttgagcttgttgtggtgaaacagcattgtcgcattgataccgattttacgggtgatgatgctctgctggagatttactcaggtgcggcagcccggtatgtccagacatggacgcgccgcacgctctatgaaaatgaaagcagcccaggctacgcagaagatcctgaccagattctcctcaatgatgatgttaaggcggccatgttactgctgataggtcactggtatgccaacagagaatcagtggccgtcggtcagaccgctacagatgtcccgtttgcagttgaagccctgcttcagccataccgaatttacggtgtgtag

SEQ ID NO: 383014 - DNA, 276 bp, Salmonella enterica; identical to SEQ ID NO: 36843

SEQ ID NO: 383015 - DNA, 357 bp, Salmonella enterica
atgaatatgatgatctcatatcaggaacttgttcgcaccttccttaatgcatattctgatggcgtaggcaagtttttctttggtggtcttccaaacaataaggctaaagtttctccgcagtctgctgatctcgcaaaaggtttaatctcagacattgctgataaatttgatgcgcaaggggctgtaatttctggtgtcgattgggtcactggatctgaggccaatagcacttatagtggttactatgcaggtgggattatgaaggattcagcgatcaaaatccaactggaacagcccgcacaatctgacgctatcgaatggaaggcctctctaccgattactgtgtcttacaaataa

SEQ ID NO: 383016 - DNA, 1131 bp, Salmonella enterica
atgtcagcaggaaccttaactcttaccaatgacacagatgctgttactggcagcggcacagcgtttacagcagaacttgctgctggcgattttattgtcgtaactgtcggcggcatcccttatacacttccggttaaagcagtaaataacaatacatcactgacgctggttagtgtttacacaggcccgacacaatccggcgctgcgtggtctgccgtgcctcgtgttgctttgaacatggtcacggctgccttggtggctcaaagcgctgaggcattgcgaggactgaattacgataagcagaactggcagcaatttttcactgcggacggtgatgtaaccattacgcttcctgataccagccagacaacggggccgtcagcgaaaaagttaatcaacagcgtcagtgacaaggctaaaaaagggaacaactcagatattaccagccttacaggactgacaacgccgttaagtgttgctcaaggtgggacgggaggagcaacccctgcggatgcggcaaataatattggccttggtcaaaaaagcagcccttttttttcgcagttaaacatttctacaacagggtacgcaattattggagtgcagaatacctctcgaggcgcaacagatgttggtgctcgtgtctctattgaagcttcagttgctgccaattcgagaggatcaataatacaaaaaaataaccagaataccgccgaaaaccagatagagtcacttctgccgtcatcgccgggagttcttgccgtacaggggacgtccggaagggaatacaaaaaggatatagaggatgcagacacctgcgaagcaatgcggcgcattatggggctgcgtatggttaatttcgtgtataaggacgatgaactggcgcgtgtccgtttcgggattattgcagaagaagctgaagatgtggcaccacaatatgtcaagcacaaccaatttccggtacctggcagtcaggtttacaatgaagaaggccagcttgtcaaccagcagtatgcagaccgtccgtctatagacaacaacccaattgtaatggacttgttaggaggcattcagaacctgcaagcgcaaattacagaactgaaacttactatagctgctttacaaaaataa

SEQ ID NO: 383017 - DNA, 1146 bp, Salmonella enterica
atggctgaagaaaaactggatttaagcgagctccatcatgacgcgcagaaggcctctgagctctcatcctattactcccacttcgatacaaaggtagaagattttgaccttcatgtatattttaactttaggcataagataaagggcggtgatggaaagtaccgttacgaatatcgggttgcaaaaatagatgatactactgttctgaaagaatcaatcaaagataacgtgataacaaaaacccttaatgatctaagtagcggtggagttgcagtatctgatataaagcagcttagtgatagggctagcactatatcatttttagaagatgcaaagtcatacaaagatgaacagatgtcttttttgacaggtattatttttgataagggatttggaggtgatggggatattcctgtcgtcaattttgagaagtttgataaaatatcaaaggttgactcaattgtttttgtcttaaggaaaggtgataaatgtataacaatatacaaaaaacagtatcctatacagaacctgaccaaacagaaaaatcattacttctcatatagcaaagatacgttatcaaaaatagatgctgacatgatatcaattgatggaaaagcctctattgtttttgttaaaggtactgcatatatctatgatcaggatgtttttgagaaatttttcggatacaagaagtggataaaaaaagttgcgggcgaatttgtttctgaaatgaagcaaaaattttcatcgatagtagactttggaaaagttaccgacaggcttgaaaaagaaagtgctgatgcagatgccttttcaaggaaactggcaagaatatataacaataaagatctaagagcttcctttaatactgttacaccagaaaaaatcagtgattttttagttgaaaatgagtatttcgctagattgctaaagtacaaatcagcggaagaacctttagaagtatcaacccatgatcagcaggaagcatttatattaatagtttctgagggcgttcttcgctcgcttattactggttttgattatttaagccctgccgcgaaaagaaaaattgcgacaggccaaaccgcgcaaaaaccttcttctgtagtaactaggataccctccagcgcatctgacgccgcctaa

SEQ ID NO: 383018 - DNA, 657 bp, Salmonella enterica
atgaaaattaagatgtatgtcttgtctttgttttttttgtttataccaataattttttatttttctggtattgatgatgtctggaacgtttttaccaaagctaatggtttttgtgatggcgtcagtaatcgtattgtctgtataacaggtaatatgggcaaccagctatctctatccgtgtcaaggttatgcgtttgtatttttttggtctttttgtgtggctatacttactggtggtataagagacagctttcatttttggatagggggattacctctgccgaagtggttgttgttggatgcgaaaaagagtcaactgagtatctgtcatttttgtcaacttacataatgcccctggtttttacagacttaacaaaaccttcaaatgttttcaatttcatttttattctagttattgtcggatttcttcatataaaaacaagaaggattcatagcaacccaacgctttcattgtttggtgtttctgcttacaaaattgactatataatcagggttgatggtcaggattctgatatcacaaaaggattgattgtcctgtcgaaggatgagatatctgtgaaaagtgtaattcgaatcataaaaaaagaagactacattacattcgcaaaatacataaggaacgattcaaatggctga

SEQ ID NO: 383019 - DNA, 897 bp, Salmonella enterica
ttgagtaacgccgcactcgaactattcaacgaacgcttgccgcacaagccgtacttttcggacgatttgcactttggtgtacgcattgccggcaaggaacgcgccattctggcgaaatacatccagttcaatcagcctcatgccatgttctggctgggattcgatgttgatcgcgccggtgccgctattgactggagtgaccgcaatgctcccgcgcccacactgaccatcaccaaccccgaaaacggacacgcgcatctgctgtacgcgctaaaaacctcgatacgcacagcgccggacggaaaaatgaagccgctgcgctacgctgccgccgtggagaacgcgctacgtaaaaaattagaggctgacgcggggtattcagggttaatctgcaaaaatccgaaccacaggcactggaaaattgccgtgtggcagccggaactctacacactggactggctggccgatttccttgacctgaacgctgcgaacgataaagaaatcgttgccgactacggattaggccgtaactgcaccttgttcgacaaaacccgaaaatgggcttatcgtgctattcgtcagggctggcctgagtatggacaatggatgctagcttgtgttgaaagagctacagcttacaacatgcagttttcagcaccattagatgaaaaggaggtcataagtatagcgaagagtatatctaaatggacatattctaaattcacacagcaatctttcgatgaatatgttaagaaaacacactcagctgaatgtcagagtataagagggcgcaagagctctggcggagggcggccaaaaataagatctgaggagtgggtctctctaggtattagtcgcgctacgtggtataggaagcactataaaaatgaaaattaa

SEQ ID NO: 383020 - DNA, 237 bp, Salmonella enterica
atggctaagggtgctcaagcaatttctaaagaaataaacgagttaatgagaaaaaacgggaatgagtgcattaccttgaagtgggagcagttctacgagatatgtgaaagagaaaggcttgcagaagtagtcatggaaagagtgtcagaaagccttaaaaaaaatgaccttcatattatctacggtaacaacgtgattatcgtaagagatttctgttggaaacccgtttctctttag

SEQ ID NO: 383021 - DNA, 237 bp, Salmonella enterica
atgaccgagatggaaaaacagcttctgagcgccttagagagcttacagacaagctacgagcaacagcagcaggcatggcaggccagctacagcagtttgcagcacatgttcgagactacctcgcaggcgctggaacgcagcgacagggtctgtcagcacttgagcagtcaggtgaacagcttgcgcgatcaggtcgagaacttgagctgcaacgtcagccggttaatgcgctcgtga

SEQ ID NO: 383022 - DNA, 486 bp, Salmonella enterica
atgagcgagattttaaatttggcgaagggcttcgaggagaaatcgaagcagcaggcgcaggatatcgagcagagcgtgaagcgcgagttcgggaggctggagatgtctatcggcgcggaactgcaatcaagctcgcagagcatcagcaacgctatccgcgagcagaacggcaggctgacgggcatgatcagagcctccgtctcaacggcgatggcgtggatattcaccagcttcgccctgctgatcggcatcctgggcgggataatctggtttcagggcacgatcatcacctcacgcctgagcgaaatggacagctacagccagcagctggcgagcctgaaagcgaaaagtggcgcgggtgtgacgatttacagcgacgactcccgccggaacacctacctggtggtgctgccgaagcaggcacacggtgtggaaacctacacgtcacaggccggaaacactgtagtgaaatacacggcgaaataa

SEQ ID NO: 383023 - DNA, 327 bp, Salmonella enterica
atggaaaagcgaacgaaagagatcaaaatccggctcaccgaaaccgagcatcagctactgcttgagcgctgcgaccggactcatcttgctgagtggctgcgtcaccttggtctgggcgagcacacctcacgcaagcgccgtgtgcccagtgtggcgcccgaactgctgcgacaggtcagcgggattggtaacaacctgaaccagatcgcccgccgtctgaaccagagtgattcccttacgccctctgaacgtgtctcgctgcttgccgtgctgaacagtctcgaccggcagcttggcgatttactggagcagaaccgtgatcgttaa

SEQ ID NO: 383024 - DNA, 159 bp, Salmonella enterica
atggttcaccggatcttccccgatgatgatattcgggttaaaccgatgatgacaatgccggtaatcaacactgacgccagcaaacatgaaaaggaacagataagccgtactgttcaggaaaagtttgaagaggctgaaatgtggctgatttcagattaa

SEQ ID NO: 383025 - DNA, 1203 bp, Salmonella enterica
atgaagctgcaaactgttattcacagaaagaatatacttttctttactgttggcttagcattgttgactatgatgggcattctgggagtggacacttatttgccttcaattcctgatatcgcaaaagaatttgaaaaaaatgtctcaaccacgcagttgtcgattatggtttataccctttgcataggttttggacagctaatttttggcccattatctgattctattggccggcgaaaaattatgcttgcaggtacggttatttatggtgtgacaacatattgcctcacgctctcaaccgggttgagtacgttcctggcgatacgcgtcatacagggtctttctatatcaataacgctggttaccgcaatcagtgcagttcgtgatgtaactcgcggttcagtggccgctacgctgtacgctatcatcataactatcgaaggtgtcgtccccattgtttcgccgctgctgggaggagtaattaatgatgtatggggatggcgtgcaatttttctaatgatcttggggtatgctattataacactaatgtacgtttattttaactttcctgaaacactcagtcatgagaggcgggtcacctattcactgaaatcatcatttaatacgtacaaagagataagtaaacaaccaagattttatctaccctgcctttctcttggactgtcattctcactaatttattgttatgtcacagccgccccatttatcttgatggttgaatttggatactcatcaacgcaatttggtgttctctcatcgattatcggaggattccttctgcttggagcagcattatcaggtaaactgctaaagaaacagtctgcgccacaaattttgagtttgtggctgacactaatcgcttcatttattgtattgtgtatcccactactaatatttagtcatcatgtcaatgtctttatattcttcttcattgttttgatgtttgccggagggatgttcgaatcactctatacctacctgactatgtccagccagcgcaccagcctgggagccacatctgcgttaatgggagccgcctcgctggttattccttcagtcatcggcggaattggtagctttttaattgagcaaagcatcagcatatggatggtgtacttacttttaattattctgataatgacctacatgttaagaaagtatcaaacatttacagcagcctga

SEQ ID NO: 383026 - DNA, 342 bp, Salmonella enterica
atgagtcaatataacaaaacagttaggatgttatttggagtgatagctttcctgttattttcaaaagttagtattatgcttggaactactggttggaaagatgtgtgttttcttattggctgttatttgtttttgtatttttttattttctcccttatcgattcagctgtcggaaaaatatcatcattccatcaagaatataataaagaaaatatcaaaaaaccatttcttaaaaattttattggaaacagaaacttagtatccagaggatataaattaatattcaatttgggatttttacttattttatttctcagattgaagaaggaattattatcataa

SEQ ID NO: 383027 - DNA, 1047 bp, Salmonella enterica
atggttgaattaaaaatgcataaagttctttttattagtgcctttcatcctggggcgagaggttcgatcggtgctggtgaggccatttgtggtgataatttaaaaaaacatgtaaataatggcagtcaagtcgatgttattgttatatctcctgcaacacaatatgaaaatcccgaaattaaagcactatgccattcttatgaagtaatcaacgctaaatataaatcttttattgcgccatggttttttactagagtaaataaaagcttaattaaacggataaataataagatctctcacacgaattacgacttagtatggcttgattttccatcagttttaggagtggtaaaacatattttacatccaaatattcattattttgcccatgatgttgtatcacagcgcacaagtcgttctcttacaaagaaacctatcaataaagagatagcaaaagttgaggcaaacttattctgtaagttgaaaaaaattgtggcaatgtctcataaagataaattgttacttgagcaaatgaattataagggagttatagaggttgctgatcttggagtacaaaaagttggtgaggtattaaattgtattccgattgaagaggttgtagataaatttaaggatagaaaaaatttaattttttttggttacatgaagcgtgcggaaaaccactggtctataatatggtttatattttttgtttttcttaaaataagaaaacaaaatccacatatccatctttggattttaggcttggctcccagacctttactgaagttgatcggcaagtgtatatctaacgtacatgtcgctggtgctgtatcagatcctaccttggcttttcaaaaggccgatttaagtgttgcacctttactatatggagctggagtaaaaataaaggtgttacagatgcttgaggcgggtgcaacggttgttgctactgaggttggggctgaaggtattgaaagccataaaaagcttcacattgttaataaaacacaatttggtaaaaaaatacttgagcttttggactaa

SEQ ID NO: 383028 - DNA, 972 bp, Salmonella enterica
atggtcgtatccacgggggtagtgggagtttttctcggctattttgcattttctaaaatcaagttagtaggaataaaagattttaataatccgtgttttataaatttttgttcagtatgctttattatttcagcgtttctaattttcgccttaggcgtcgctgcatatggtggttacatagcatttctacatacgccttatatagcaatctatgaaggtagtgcagaaaatcaaaccagagatattctcatatcttcatcgggattgcttgctaactatgcactattaactagcattcgtgtcaactttaaagaaatatcaataactaataaagttgtcatagcagtatcgctattaatacttgtttctatatttaaacgtattatcaaagtaagcattatttgtataataatgtttttcattgctggattaggtttatatttgcgtgaaagcacttcaacttcaggtggaagtgtttttacagctataccttttgccgtgatgtatgaaacacatttttctttagcgactttggctaatgaagtgagaacgcatttatataataatttaccttatgggggagtattagatttattttctcccatattatttattatccctgcttttatatatggcatttttggtttagataaacaatctttgttcgagaataatgagatgcgtttttatgaggataaaggtgggcagtttatattcacagaggcttttcattcacttggttatgtcggagtattcctgcatggtttaatcttgggtgtaatgctaatagtattttatcgtgtagccaagaaaagcaggctcataatttatcattttccaattatttccctcatatttgttgcaatgagaaaagaccttacctatggtgttaaatatatttctcttttgttcatatttatgatgattttttatttcatctataagttactcccacttaaaaataatggttga

SEQ ID NO: 383029 - DNA, 192 bp, Salmonella enterica; identical to SEQ ID NO: 10400

SEQ ID NO: 383030 - DNA, 186 bp, Salmonella enterica; identical to SEQ ID NO: 10399

SEQ ID NO: 383031 - DNA, 228 bp, Salmonella enterica; identical to SEQ ID NO: 10398

SEQ ID NO: 383032 - DNA, 765 bp, Salmonella enterica
atgttgggaaaaatatggtgttcactgattacagttactttcacattattggttggatgtgttccacaaccgaaaccggttgataaatttgatataaacaaacttcttaacgtcacagatagtgaaataactacagatcttgcgatcccatcacccgctcaacaagaccctatttggcagacttccttgttgacagggcggcaattgaaggaagggattgacgcaggaaaaataaagcgtggtgatgtgtttcgggcaaaaatcgacctgaagtatacgatagtcaataagtctcaactaccacctgcacttgacgttttccgaagtgtgttaataggggacccatcagcgtggaatgatctcattgctattgatatatctgaccccaagcataccaaaacggggaaatatgtagcccagaatgcttttggcgcaagagttaaggtagatgaggttaaatcagaacgttacttattggcgcttgatgcggcgaatacactatcgactacagcgatcaaaatgggagttgagggatgtgcggtaacagaggactctcttaattcctttgtgctcgagtacgttgctgaattagatgaaagcacataccagcaggagaaaggaattattcctgctgaatacagtagccctacagatattcgtattaacaattactatttcaaaggggaagttagagctgctcgattgattgactcgacaaccgggaaaccatacccatgtaagttaagttttatcataaggtattaa

SEQ ID NO: 383033 - DNA, 1131 bp, Salmonella enterica
atgtcagcaggaaccttaactcttaccaatgacacagatgctgttactggcagcggcacagcgtttacagcagaacttgctgctggcgattttattgtcgtaactgtcggcggcatcccttatacacttccggttaaagcagtaaataacaatacatcactgacgctggttagtgtttacacaggcccgacacaatccggcgctgcgtggtctgccgtgcctcgtgttgctttgaacatggtcacggctgccttggtggctcaaagcgctgaggcattgcgaggactgaattacgataagcagaactggcagcaatttttcactgcggacggtgatgtaaccattacgcttcctgataccagccagacaacggggccgtcagcgaaaaagttaatcaacagcgtcagtgacaaggctaaaaaagggaacaactcagatattaccagccttacaggactgacaacgccgttaagtgttgctcaaggtgggacgggaggagcaacccctgcggatgcggcaaataatattggccttggtcaaaaaagtagcccatttttttcgcaggtaaacatttctacagcagggtacgcaattattggagtgcagaatacctctcgaggcgcaacagatgttggtgctcgtgtctctattgaagcttcagttgctgccaattcgagaggatcaataatacaaaaaaataaccagaataccgccgaaaaccagatagagtcacttctgccgtcatcgccgggagttcttgccgtacaggggacgtccggaagggaatacaaaaaggatatagaggatgcagacacctgcgaagcaatgcggcgcattatggggctgcgtatggttaatttcgtgtataaggacgatgaactggcgcgtgtccgtttcgggattattgcagaagaagctgaagatgtggcaccacaatatgtcaagcacaaccaatttccggtacctggcagtcaggtttacaatgaagaaggccagcttgtcaaccagcagtatgcagaccgtccgtctatagacaacaacccaattgtaatggacttgttaggaggcattcagaacctgcaagcgcaaattacagaactgaaacttactatagctgctttacaaaaataa

SEQ ID NO: 383034 - DNA, 960 bp, Salmonella enterica
atgccggaaggaatactgatagattataacgatggccgtcctgcgatggcgattacagcggggctccgtgccccgtcattctgcacaagttttgctggttacggtacgggggcaaaccagtttcaggttaatactccattaacgtcaggctccacagtttttgttttaccgacacgtccggttgacgttcaggagttcgcagacaatcagacatggatagttttaccgatatatatgacatccgttacaagaaacggagacaacggtgtgactgttaacggtacaaacaggggaaactaccagcgaataccaaactgggcaggaactgtatttgaaattctccctgctgctacttacaacgaaggacttctcgtttccaactctactgatttcactgcaatttcgaatcaggcaagattaatgacatgtgcttatgttggcacggtgacagtcaacggctcgatggcgcttcccgtatcaggaataccattcgggaagtgggataacaataatgtgtctgtaggatttgacggagcaaatattattgtaagagacatcaattactcaggacgggatgatgtttccgcatctgtaacaatggaactggtaattttcaataataccgcgcctgtagccggtgatggcattaccatgactaattcggctgggcaggtgacattttcaacagtgaagcgcccatttgtatatgaccagcagctaacggtaacagacaataatcaatacataggtgataaatattgccagatagtatttacaggtgcgcagtcaagacgagtggatggatattttaatataaggaaaaagggcgtggtaatgtcaggtggaagcatccggtcagcgtataatcaggttgttggtaattacaatgacaacagatttgatatgacatttaatcaaaatatcaatatgccaattcttgtccttccggatatgtattga

SEQ ID NO: 383035 - DNA, 396 bp, Salmonella enterica
atgtctatcgagccatcggggaatagctataaatctaccgttgtatttgccgcggaacagttcggcatttattccggtaataaccccggcaactggcaggctgcattcttcgtctataacggacaggtatttattcgtagcgcattaattcaggaagcatccatcgattttgcgaaaattaccgattcacttcagtctgcaaactttatccccggtggtggtggacgcggatggaatttaccaaaatctggtagcccagaattccatgggaaactctatgccgacagcggtgaatttgcatttaacggagtgaataacgttactcgcattgacggcaatgggatcacagtaaatctctcaggaggtggtcgtgttgttgttggacgatggacataa

SEQ ID NO: 383036 - DNA, 237 bp, Salmonella enterica; identical to SEQ ID NO: 149252

SEQ ID NO: 383037 - DNA, 303 bp, Salmonella enterica
atgagttcaatggtttactgccgaggatgcggcaaggaaatacacgaaacagcaaagtcatgcccacactgcggagccacaaacgcctcttcaggttcaggtgaaaaaagtagaatcgcagccgcgctattagcattcttccttggtggatttggcgcacataaattttacttaggtaaaataggacagggattcctgtatctaattttttgctggacattcatacccgcgatcatcgcgtttattgagtttattatttatctatgcgattccgatgaaaaattcgcaagaaaatatggctaa

SEQ ID NO: 383038 - DNA, 600 bp, Salmonella enterica
atgaaatatataatctgtattatgcttcttttagtgggagggagcacatgggctaatggcaattttgacgctccggcaggattgcaatggggggaaaaaggagagtcgttaatacaaaaatatcaagcagtaaaggttgatgtagaaagtccattagagctttatgaaatcaaaaaaccacctattcttcctgatagcattagtgagatatacggaacagttgataaaaaatacggacttgtacgagtcattttaataaaagtcattcataacgacgcattcggtcatgaaggtatcgaatcatataaaagatacaaaaagatactaagtgataaatatggtaagccagaaagttatgaatactctggtcgactggtttataaaaataaaagtgaattttatgagtgcctggcttatgagggatgtggtggttattcatctttcttttcaccaagtaacgatggtggtttatatatgatgcttaaaggttatcgaagaggagagggagaattaaggattatatatgaatcaaaagaattcaataaggcacaaaaagaaatagaatctatttcagaagagaaagataaagccgctctttga

SEQ ID NO: 383039 - DNA, 258 bp, Salmonella enterica
atgaatgcctccggcgtcagcgtccgccacatcaacagcaaaacccacatgaccacctattactcacaaatccccagcctgcaccttaagggcgactggctggaagaagcgggatttaagaccgggcgcggcgtcaccgtgaagatttcacaggggtgcattgtgctgatggcggacagtaacgaggagcagaagctgcgcgaacagctttacaaggctgaacaggtggttaaggggatgcgggacgtgattgtttag

SEQ ID NO: 383040 - DNA, 339 bp, Salmonella enterica
gtgaatgttaatgatatagtaaatcattctttaaaatacaagggattagaagggcgggtttttgcggattttgataatgaaagaatacaagatattgatattgttggccttacccagactgattatgttaaagctttttcgggagaatcgattcgtataaatgaaggggattatctatatatgtttatgccaattgatgaagtcttaccggaatatattctcgccgaaggttttgttataaagaatccctatgaatttaagccttataaatggtgttgcaagattataggtgagttggagtatattaaagaatacgagttgcgctttaacaaatcgtga

SEQ ID NO: 383041 - DNA, 828 bp, Salmonella enterica
gtgtgggagggggtcaggctgttgcaggagaacgtgcagcagcagggctggcggacatatctgtacgatgcggaacagccgtacacgccggtggcgagcgtgacgggaaagggagaaagcaggcaggtgtggtattaccacacggacgtgacgggcacgccgcaggaggtgacggcggcggacggaacgctggtgtgggcggggtatatcagggggtttggagagaatgcggcggacatcagcaacagcggggcgtactttcaccagccgctgcggctgccggggcagtattttgacgacgagacagggctgcattacaatctgttcagatattatgcaccggagtgtggcaggttcgtcagtcaggacccgataggactggcgggagggataaatttatattcgtatgcgcctaaccctattaaatggatggatccattagggttacacgatattttggctgatacggatattgtttgtcgaggtggagcgtgttcggcagacagctttaaaaacggaagtggtgttgctgctgatgctaatggtaagttgagtagtatatctactcaggcaaaacctaatgcgggattagaaacattatctcagccctttaaacataatcaaattggtgttgctacagtagctgacatagaaaaagcgggtggcacaataactttagatggaaaattaaattcgtctaatggcagcatgatgatgaatcatgcaactgttgatggtttaaccgcagagcaggctgaaaaattatttcgtcctacacaaccaaatccagtaccggttgaacaacgaggtcctaagcgtgaatgttaa

SEQ ID NO: 383042 - DNA, 549 bp, Salmonella enterica
atgcagaaaattatcctcaatgcgatgctggtggattctttgcgctcaaccagtaacagcggttttttcagttcaatcggcggtatgtttggggcgggcgcaggcgctgtatctggcagtactccgtccggcgcttacaactcagcagcgtcaggacttcaacttaacgcaaaaggtggcgcctatgcttctgcaagcctcagcgcatacagtaacagcatcgtcagttcgcctacctattttgccttcgccaaaggcgcaggcttgatgggggaagctgggccggaagctatcatgccgttaacccgctccgctgacggatcgttaggagttcgtgtggttggttcacagtctccggcagccggaaatggcatcactcagcacatcacccagcatttcaccatatccggtaatggtgatgcagcactgaaacaggcaatgctggaagcagcccggctgggggcgaacgatggcgctaaacaggcgcgtcaggatttgcttcaggatttttctaatcgagggcaggcgcgtcgtttgttaggcgtgtga

SEQ ID NO: 383043 - DNA, 312 bp, Salmonella enterica
atgactttagaacaacgagttgagccacttgaatttacagtagggtttccgaaagagaatggagtaagaatttccttcggagaaaatttacgcatgtcatcgacacaacgcattggcagtaatgtgtcggtgaaaattggcaaagaaaatgtggccactatccattacagcgaagacctcgctccagattttacacttgaagggtacaatcagcgtgcaaaagagtatgctcaaaatgttgtcgtgaagattattgaagcggcccggatacagaccgcaaaatatttcgagggtgtagtcaatgtgacttaa

SEQ ID NO: 383044 - DNA, 213 bp, Salmonella enterica
atgtctaatcacaaaattaatattaacattaaaacaaataccaataacttagaggaagttaatgaggaattaactcggttaaagttcattatcggagttctgcttgcaaaattcccaccactccagcgtgatgaatttatcaaagatttgggacggtttggactgacagaggaagctgcactttattcaaatttcaacccgaaacctgaataa

SEQ ID NO: 383045 - DNA, 1020 bp, Salmonella enterica
atgatttgcggcgtctccttttggattgtgtgcgctattgaattactttctaatgtaatacaacttattctttttaacaaactaacattaaaaaaatatccgcaattagtgaagttggatattactgatactatcaataaagaaaatataataagtgtaaaatctaaaataaaaagagagataaaatatacgtttgtacataaaattgccggtgttgttgtatttaatacagattatttaattatatctgtctttctaggtataacggttatcacatctttttcttcctatatgatgttaattcaagcattggcttttctgatatcagcaatagcttccccactgggtgcttatataggagcaaaactatattctgatagtaaggaaaaagttatcaggattatatcactttataattcacttttttttatgctaggtattttttgcgcgtacatgttttatatatcttcaagtacatttgtatccttatggatgggaaaagaaattgtacttagccaacaattagttttgttactttctgttaattgcttcgtattgattgcaaggatctcttttgatgttgcaaaagtaggccttggttatatgtcagatgttgaattacctctactggaagccataattaatattatcgtttcattagttttagtacattatttaggtttaaatgggatagttattggaactatcgttagtaatatcatcgttgtcatgatcttgaaaccagtatttttatacaaaaatgcccttaaatcggataatgcatttattattcatgagcttataagatcatggttctttataagcatattcttgctttccatcttctttattacaagggcaaaagttatagtcagcaatgaatggctagatttctttatacaagtgtgtatgagtagcattactcctttattgttattgataatgatatacagcgtctttgatagcaacgttcggaaattcatgtttgttatgtttaaaaaaaagtatagggaaaattga

SEQ ID NO: 383046 - DNA, 456 bp, Salmonella enterica
gtgaaaaatttaatagtcactgcattaattggtctatgtgctttctcttcacatgcgagacctttaactgattctgaaaagcaagctgtagaaagttcggttaaagagcacctcaaagatccagattccgcaaaattctatcatggtgattttccatatccagatagctcttacgtatattgtggacaggtgaatgcaaaaaattcgtatgggggatatgcggggaaacaattattttccaattttgtcgctgtaaataaaaatggagttatagttgccccttctttggactacagcagaggttctggagagcaattagaccaagaaataatttctgttacatgtgctagtgcaggatatgacattcctattttgagaaagtactttaaagaagttaacaaatctcgaaaagagaatgggattccagcactcagcaaaacatatatcaaaaactaa

SEQ ID NO: 383047 - DNA, 447 bp, Salmonella enterica
atgcgcagagaagggtggttacacgcgctgcaagagcagggggttgctgcgtcggagagctggattggcaccggcacgccggatatgcagggcggcgagtcggcaatggttgagttgctgggacgcaatctgcaactgacggcggtatttgcctataacgataacatggcggcgggcgcgctgacggcgttaaaagataacggcatcgccattcccttgcatctgtctgtcatcggtttcgatgatatccctattgctcgttataccgatcctcagttgactaccgtgcgctatcctattgcttctatggcgaaaatcgcgaccgagctggcgttacagggggccgcaggcacgctggatatcacggcgacgcactgcttcatgccgacgctggtacggcgccattcagtggcgtggcgacagaatgcggtactgatcactaactga

SEQ ID NO: 383048 - DNA, 357 bp, Salmonella enterica
atgaagcagattacccagctgattgaggtcatgctcgttggccgcggtggtgaccaggctgtgggtcaggccactcttggcatcgacaccaatgtgggccttcatgccaaagtgccactgattgcctttcttggtctgatgcatctccggatcgcgttgctgctctttgttcttggtagagctgggtgcctcaatgatggtggcatccaccaaagtgccttgggtcatcatgacgcctgcttcggccagccagcgattgatggtcttgaacaattggcgggccagttgatgctgctcgagcaggtggcggaaattcatgatggtggtgcgatccggcagggcgctatccagggataa

SEQ ID NO: 383049 - DNA, 414 bp, Salmonella enterica
ttgctgatcaatgagcgcagcattctgcaacagggtctgcttctgggactctgtaagcgtcgccagttcgccctggctcacctggtatttcagttttgccagttcggtattttgacctgccatcgcgatctgctctttctgctgcttgatcagcttgtcataagtatcagctgttttttcagcttccgatttaccacgcgtttttttattcttatcacggagctgctgaagttttctctctccctccactgcaagatttatatatttttcatattgcccggcaggaagattaaggtcatcagcttcatatattgcctgttgccgtaccttttccagtccctgcagactatcaagtatagctttacgctccgctttaaccatagcctgctgctgctttgtatcaagctctggtag

SEQ ID NO: 383050 - DNA, 348 bp, Salmonella enterica
atgaaaatgcacaacgatccccaatcctggcagggctggctggagctgttccagagctggtggcgaggagatacgccgctgggcgctgttctgatgtcgttatttatggccggtctgcgtattgcctattttggcggtaacggtggctggaagaaaaagacacttgaaatcctgctttgcggcgccctgacgttgaccttctcatctgcgctggaatatttcggctggcccaagtccctgtctgttgcgattggtggcggcgtcggccttatcggcgtggatgcgatccgcggctttgcaatgaagtttatcagtggtcgtatcggtggggataataacaaggtttaa

SEQ ID NO: 383051 - DNA, 150 bp, Salmonella enterica
atgtcccgcctgagcaatgaacatggcctgatccagtggagcagtaatacagaattcgctcattgccgccgtaatatgtggataccagcgcgcagccagttcggcgctgataccagccgcctgctgaaattgagactcgttcatgattaa

SEQ ID NO: 383052 - DNA, 198 bp, Salmonella enterica
gtgtcagaacgtgcgcaccgcaatctccgcgcagatgtcacactgtttattgatgttttgtttgacgaacatggtgaaccggtattcagcaaaaatgattttgccgatgttgaagcggtgtatggccctgttcatgctcggttgctgcgccaggctcttaatctgaccactgacccgaaggaagctgagggaaagtag

SEQ ID NO: 383053 - DNA, 255 bp, Salmonella enterica
gtgctcagacagggcgattatttcactgttaatgacgagctgaagatggttacggccgacgtgacgagcgcagcgaacggtaccgcaatgattgtatttgccccgatgttgcgtagttcgccgcctgctaatgcagccattgaagtcgcgaaaccctacggcattttcaaactgaaggataaccagcagggtgccggtaaccgagtgccgggtgtttttaccagttacacgctggagcttgaggaggcattctaa

SEQ ID NO: 383054 - DNA, 255 bp, Salmonella enterica
gtgctcagacagggcgattatttcactgttaacgatgagctgaagatggttacagccgacgtgacgagcgcggcgaacggtaccgcaatgattgcatttgcgccgatgttgcgtagctctccgcctgctaatgctgccattgaggtcgcgaaaccttacggcattttcaaactgaaggataaccagcagggtgccggtaaccgtgtgccgggtgtttttaccagttatacgctggagcttgaggaggcattttaa

SEQ ID NO: 383055 - DNA, 657 bp, Salmonella enterica
atgactggccgtactactggtgttgccacctaccgtaacactgacttctttggcctggttgaaggtctgaactttgccgcgcagtaccagggcaaaaacgaccgtgacggcgcgtacgagtctaacggcgacggtttcggtctgtccgcaacgtatgagtacgaaggttttggcgtaggtgcggcctatgcgaagtctgaccgtactaacaaccaggtgaaagcagcgagcaacctgaatgctgcgggtaaaaacgctgaagtctgggctgctggtctgaaatatgatgcgaacaacatctacctggcgaccacctactccgaaacgctgaacatgaccaccttcggtgaagatgcagcgggtgatgcgtttatcgcgaataaaacccagaacttcgaagcggttgctcagtatcagttcgacttcggtctgcgtccgtccatcgcttacctgaaatccaaaggtaaaaacctgggtacttacggcgaccaggatctggttgagtacatcgatgttggcgcaacctactacttcaacaaaaacatgtccaccttcgttgattacaaaatcaacctgctggacgacagcgacttcaccaaagcggctaaagtgtctaccgacaacatcgttgctgttggtctgaactaccagttctaa

SEQ ID NO: 383056 - DNA, 1488 bp, Salmonella enterica
atgtttcgtcagtggttaacgttagtcattattgtgctggtctatattcctgtcgccattgatgccacggtcttgcatgtcgccgcgccgacactgagtatgacactgggggccagcggcaacgagctgctgtggatcattgatatttattctttggtcatggctggcatggtgttgccgatgggcgcacttggcgatcgtatcggttttaaacgcctgctgatgctgggcgggacgctctttggcctggcgtcattggcggcagcgttttcgcataccgccagttggcttatcgccaccagggtattactggctattggcgcggcgatgattgtaccggcgacgctggccggaatacgcgctaccttttgtgaagagaagcatcgcaacatggcgctgggcgtctgggcagcggtaggttcgggcggagcggcgtttgggccgctcatcggcggcatattattagagcatttttactggggatcggttttcctgatcaacgtgccgattgtgctggtcgtcatgggcttaaccgcccgctatgttcctcgccaggcgggccgtcgcgatcaaccgctcaatcttggccatgcggtgatgctgattattgccattttgctgttggtctatagcgctaaaaccgcgctgaaagggcatctgtcgctgtgggttatctcgtttaccctgcttaccggcgcgctgctcctgggactctttatccgcacacagcttgcgacatcgcgtccgatgattgatatgcgactatttacccatcgcattatcctgagcggcgtcgtgatggcgatgaccgcgatgatcactctggtgggttttgagctgctgatggcgcaagagctgcagtttgttcacgggctatcgccttatgaggccggggtatttatgctgccggtaatggtcgccagtggattcagcgggccgattgcgggcgtgctggtctcgcgtctgggactacggctggtcgcgacgggcggcatggcgttaagcgcgctgagtttttatggcctggcgatgacggatttcagcacccaacaatggcaggcctgggggctgatggcgctgctgggatttagcgccgccagcgcattgctggcttccacgtcggcaattatggccgctgcgccggcagaaaaagcggcggcggccggcgcgatagaaacgatggcttatgaactgggcgcgggactgggcattgccattttcggtctgttgttaagccgtagcttctccgcgtctatccgtctgcctgccgggcttgaggcgcaagagattgccagagcgtcatcttcaatgggagaagccgtgcagttggcgaatagcctaccgcccacgcaggggcaggcaatactggacgccgccagacatgcctttatctggtcgcatagcgtggcgttaagcagcgccgggagtatgcttcttttgctggcggtagggatgtggttcagcctggcaaaagcccaacgccgataa

SEQ ID NO: 383057 - DNA, 696 bp, Salmonella enterica
atgcaaatcctcaaagcgattggcctgttgatggagtatccggacgacgagttgtgggaatgtcgggatgaagcgctcacccttatccaacacgatgcgccaatgctggccgacttcactcgcgagctgctttatgcgccgttactggataaacaagcagaatggtgtgaagtgtttgaccgcgggcgcgccacttcattgctgttattcgagcatgttcatgcggagtcccgcgatcgcggccaggcgatggtcgatttgttaagccaatatgaaaccgtgggcctgcacctcaactgccgcgaactgccggatcacctgccgctctatctggagtacttaagcgtgttgccggaagcggaagcgcgcgagggattacagaatattgcccctattctggcgctactgggcggtcgcctgaaacagcgaggagcgccgtggtatcaactgtttgacgccctgctgacgctggcgggcagcacgcttacaagtgacagtgtcaccaaacagattattcaggaatcgcgggatgatacccgtcaggcactggatgccgtctgggaagaagaacaggtgaagtttatcgaagataacgccacgacctgtgacagttcaccgttacaccattatcaacgacgctttagccaggacgcggcgccgcagtacgtcgacgtcagcgcgggaggcccgaaatga

SEQ ID NO: 383058 - DNA, 789 bp, Salmonella enterica
atgaacattgagcttaaaataaccttatgggcgctggcttgtgcgtatgctatcggtaattcatttatttattcttgggctttttggtcagcattcgaaataaatatattacaattcgcgtcctttactgacattctaccatcaatattatacacaatagcaataccttgcattgtagttagcattggcattgtcgcggcagattattgggagaaattaaaaactcaagcatattctagaatagaaaatgagtttgctacaagaatcaagtactatcatgacataaaatatatcttcctgatttccgttagcgctattggtgcaatagttgggataattggtgctgtagccctttacaaatctgacaaggaagcagcatctattgaaaattatccatggggtgacattattcaagttgccataccttttaccatttcagttttagccttctggttgattacaaagaaaactacatttttaaatgagctaaaattagcacgcaggttagctataataataatttgcatccttcccgtggtctcctatctttggggtcatattagctcgaccaaaataataaatggtagagacacatttttgatccaatcggatggtcaatgtaaaacccctaccaatacaaagtatcggtatatttcatcaatatctgataaagtttttgcattatccttatcagatggttctgtttgcgttttcaaatataactcacttcaactcacccctgagcaaaccgcaaacaacatgaagggcattcccagcacgaacatataa

SEQ ID NO: 383059 - DNA, 429 bp, Salmonella enterica
atggcgattagccaggagcaacaaaagcgcggactggaacatttaaaacagatccgccgcaaatacttcagtgaaagcagcgaggccgctgcatggtgggacaacctgacaccggagtggcgcggcgtggtgcttcatgccgctgcggttacttcgggcgccagggcatttaaagcccacttaagcaagtgctgctggcgtgagctttatgaacgcctgggctatcgggacatgattctgctgcgccagggcatttcacgggcgcggttaacgtttgaaggtttcggcagtttacgtgacagcgatttttcaaagcgcaccgcgaaccgcccgatcaaaaaggtacatccaatttatagcagtagcggggtgcagatggttatagcgcctcacatcgtccataagttgcaacaacaggggaatctctga

SEQ ID NO: 383060 - DNA, 330 bp, Salmonella enterica
atggcagtaaaaattcatacggtaaaaatcgcgcccaagtaccttaacgcagtagtcgctggtcagaaaaaagcagaactgcgtaagaatgatcgtaactataaaactggtgatgttctttcgctgtgtgagtggaagcacgggaaattcaccgggcgagagtgggcggcggttattacccatgttttgccggtgaatgaaatcattgccaatacggataactgggtagtgttgtctgttcggccattatcaccccttgaagtgctggaatacatcatttctaacggcgtatcagaattgcttttaagtggggttgaatatggccgttaa

SEQ ID NO: 383061 - DNA, 213 bp, Salmonella enterica
atgatggtggaaataatcaccggcatttatgccttgtttgcctgtatcactttcgtttttctcttgtgggacgaatgccaggatgaatttgatcacgatgctgaggacttagggttaatcactctgagtgcggttttctggctaccgctggtagcgtccgtacttgtggctttcctggtagatttctggcgcaagtgggttaaccgtggttga

SEQ ID NO: 383062 - DNA, 207 bp, Salmonella enterica; identical to SEQ ID NO: 29115

SEQ ID NO: 383063 - DNA, 702 bp, Salmonella enterica
atggcactttctcccgcgcagcgtcacagccagcgcattgcgatggaacaaaagctgaaacgcagcctggcactggaaaccacggaaagcatgcacctgctgattaaggcactggaaacggatgtggagtatgcccgtaacctgccgacaatcgcggatcgcgttgagtttaaacgggatgtgttgctgccgcgctggacaccgactgtggaagcctatctggaaagcgggcaggtgtacgccaacccggtatttgcctggtgtgttatctggctgtttgacgtgggtgatctggataaggcgctggactgggctgacattgcaatcagccagcagcaggcaaccccggatcggttacgcagtaattttcccacgttcgtggccgatacgatgctggcctgggcgcaggaaacatcagggcgcggggaaagtgttgaaccgtatttctcccgcacatttgagcgtgtcgccagtacctggcggctgcatgaacaggtcacggccaagtggttcaagtttgcggggctggagctgctgcgcagcgaagatggtcagacaacggccgcgagtgtggatgatatcgaaacgctggagaaagccgatcgattgctggccacggcagaaaaatactatttaaaaatcggcgtcagaacggcaaggcagacgattgccgcccgtatccgaaaactgacgcaggggtaa

SEQ ID NO: 383064 - DNA, 1128 bp, Salmonella enterica
atgacctggccaaacgtgaccgtgaaccaggtaaaccagttgctgggtgaaaccaatgaagtggaacgcacgctgctgtttatcggtacgggtaccaaaaatgtggggaaaacgctggcggtgaatgcccagagtgattttgatgcactgctgggagaaggggaaagcccgctgaaaaacgatgttctggcggcactggcaaatgctggtcagaactggtgggcatttatgcatgtactgcccgcagatgcagaggacgatgcctgggtgaaagcggttctggccgcgcaggtggtgtgttcggtggaaggggtggtgctgtccagtgatgtgacggcaaaagcccaggtgaatcaggcagcgacgttgcgatccacgctgatttccaaatatgggcgctgggtgtggttcatcctggccgtgcagggaatgcaggaagaagaagcccaggcggattacctgacccgtgtgtctgcccttcaggacggtattgcagagaaggcggtgcaacttgttccgcgtctgtggggaaatgagccgggtgtgctggctggccgtctttgcagtcgtgccgtgactatcgcagacagtcccgcccgtgtgaaaaccggggcgctgctgaatctgggcagtgatgaaatgccggttgatggtaccggggcggtactggagctggccacgcttcaggcactggaagcgcagcgttttagtgtgccgatgtggtacccggattatgacggcttttactgggctgacgggcgaacgctggatgtggaaggcggcgattatcagtcgattgaaaccctgcgtgttgccgataaagcggcgcgtcgtgtacgtctgctggcgatcagcaaaatcgcggatcgttcactgaacagcaccccgggcagcattgctgcgcaccagacgctgtttgcacgtccactgcgtgaaatgtccacggcagccagtatcaatggcgtgtcatttccaggggaagtgaagccgccgcaggagggtgatgtgaccattgtctggaagaacaaaaagacggtggatatttatctggtggtacgcacctgggaagtcccgctgcaaatcaccatcagtctgttactggatgccagtctggaggccgctgcatga

SEQ ID NO: 383065 - DNA, 303 bp, Salmonella enterica
atgcaggaacatgaaaagagcctttattcactgctgattatgggagcgctcattgctgttgcgaaggtgctggccagtgatgatcccattacaccgcgcctgtttatcagccgtgtgattttgggcagttttgtttcagtcatcgctggcgcggtgctgattcaaatcccggaggccagcccgctggctattcagggactcggtgcagcgctgggtattgcaggttatcaggctgttgaaatgtggctgcgcagacgtgcagcgggaaagaaaaacgggagtgtgacaaatgaccctgagtga

SEQ ID NO: 383066 - DNA, 381 bp, Salmonella enterica
atgagtcacgcgcagtggctggttgtggtggtgctggcgtttgtctggggctggctgaccgctgactggcggcgcgacagcctggagctggcaatcaacacggcggcgcaggtggcgggtaatgaatcgcgcaaggtgatgcagggtattgccagtgattccgccagggcgctggaagataaactggaggcgctaagaaatgcgcaaccgcgagaaatccgcacggaagtgcttaagccggtttttactaacaggtgcctgtctgatgagtttgtcagcatgtacaacagcgctgtcgccggtaccgaacgtgcgttatcaggaaaacctgaaaacacgatgcgccacgcagctgccgcgcctgaacggggcaacaggtaa

SEQ ID NO: 383067 - DNA, 258 bp, Salmonella enterica
atggaacaaattaaactgagtgtttgtggtgcggatattgtttttgaacctaatcaaacggcttacaacaaactgattaatgaaatggcaatggataataaagttgcacctgcaaataattatctgatgcgtattgttaccccggaaacgaaagaagcactgattgacgtattaaaacgtccgggtgctgcgttgcaactggtcagtaaggttaatgatatttatgcgccggaactggagattgaagtaaaaaactga

SEQ ID NO: 383068 - DNA, 2061 bp, Salmonella enterica
atgaaacagttagattttacattaagcctgattgataaattgtcccgcccgttaaaacaggcgcagggcaacgtaacgggctttgctgaaaaatcaaaagaagcctttatgcagattggtggcggcgttctggggctggcgggtacagggatggccattaaaggtgcgctgatgcctgccattgaaatgtatgacgcgctgaatgatgcggccgcaaaagggattgatgattctgcgcttaaggccgttcagcgtgatgcgttgcgcttcagtacaacctacggcgccagcgcggtggagttcgtccagtccacggaaagtataaacgcctccattgccgggctgaccgggaatgagctgccgaaagtgacgaaagtcgctaataccctggcgtttgcgctcaaatccaccgcagcggaaaccgctgagtttatggggcagatgtttggtaatttctccgccgatgccaaccggctgggaaaggttgagtttgctgaacagctggccggaaaaatggtgtacatgcgtaaaacctttggcacggaaatggccgctatcaaggatttgatggaaggggcgcgcggcgtgggtaccaactacggcgtggggctggatgaacagctggccgtgctgggacagcttcagcggacactgggcacggaagccagcagcgcttatgaaggctttatgaccggagccattgagggcggtaaaaagctggggctgtccttcacggattccaccggcaaaatgctgtccatgcctgaaatgctgatcaagttacagggcaagtatggcaaaagcctggaagggaatctgaaagcccaggctgaactggatgcggcatttggtgacagttcggcggtggtaaaacacctgtacggtaatgtggcgctgcttcagcgcaatatcactgaactgggcggcgcggatggcctgaagcgtacccaggagatggcgcagaaaatggtgaagccgtgggatcgctttgtcgcaatcctgaaggctatccagaccgtaatcggcctgacgttgatccctgtgctctatccggtcctgaaccgcctggccgatatggggcagacctttgcccgctggatgcagctgtttcccaacattgcgcgtgttgtcgggtatgcggcaatggccttgctcagctttgcggctgtgggcgcagtcgccaatattgtgatgggtgtctccagattcatcatgatggggttgcgcgggatctgggtatcgctgacggccgtcacgaaggtttacaccgtggctgtctggctggggaacattgctgtgattgcctggaatgccacgctgaaatttctgcgcggtacgttgctggcggttcgtatggcggcaatgatggccgggattgctatcaatctgatgagctggccgatcctgcttgtgattggtgccgttgccttacttgctgccggttgctggctgctgattaaacactgggacacggtaaagaacgcggtcatggataccgctgcatttcaggcatgcgccagggtagtggcatggcttgccggggtgtttgcttcagcctggcagtttatcagcgaaggctggaacagttttatttccacgctgacagggttttctccttctcaggcattaagcgggctggccacgggcattgtgtcattgtttgataatgtctggctgtcggttaaaaacggctttctgaaatcatggaactggattgtaagtaaattaaataatattccgggtgttgatattgaactggcgggcgctgcttctgcgggtatcgctaaaaatgaaacagcggtgtatccggtaccagagttaaaacaatctgcgaaagctgagggcgcacttcctgcggtgacgcaaaatagcttcaccccagacaggcttttaaccggaggtgaattaaaaggtattgagaagggcggaattaccaaaacgattaacagtaatgctaagtccgtaaccgacaatagccggaaaattgacacggtaaacatttatccgaaagaaatgattacacccggtcagttaatggaatttcaggagctgggcgcatga

SEQ ID NO: 383069 - DNA, 588 bp, Salmonella enterica
atgaatgagttcatgaaaaagctggccgggatggtgcttccttcctggatgaataagggggagccgaacaagctgctgaaaacagtccggcgattctgggcggaggtttacggatggataacctggccactgaaccagtttgatccgctgacctgcgcaccggcattactcaacctgctggcgtatgaccgggacataacccgctttgatggtgagccattgagtctgtatcgcaaacgggtggcgtttgccttcgtgaatgcgcgtgatgccggttccgttgagggatttatcaacatctttgagcggctgggcattgggtatgtggagctgcgggagcgtcagccaggtattgactgggatgtgatcctggtgcgtgtgacagacagccagatcgcaaacaacactcagctgcttatccagattatccggcagtacgggcgaacgtgccgccgttatcagtttgaggtgatcacatcggaaaaaatggctatcagagccggatgggatcagggggaatatgtggtttatccggcttcgttagcagggacggaaacccgaagcgcgacattcagcgcaggtttgtaa

SEQ ID NO: 383070 - DNA, 2052 bp, Salmonella enterica
atgtcacagacagctattacgctggcgtttgaacactggaaagcgcagcagggcgcgaccggcgagccggtgttactggatgaatttgtgtttgcgaatgtgccagggctgaacccgaatattcccgttgaccggaatgaagcactgccgcctgtggagcagattgtgcaccggcaacctgttacccgcactggcgtggtgaatgaaaacggtgtggtgtattccgccgttctgggtgctgatgtgggcgacttcagcttcaactggatcggtctggtgagtaaggccagcggtaccctggccatgattgttcatgcgcctgtgcagcaaaagctgaaaacagcggaagggcagcaggggaatgtgcttacccgttcgtttctgatggagtacaacggcgcacagaccgaaaccgggattagtacaccggctgagacctggcagattgatttcacggcgcgtatggccgggatggatgagcgtcagcgtctggagaatgtggatatttacggggatgccgcattctttggcgatggctggctggtcggtaaaacgggtaatcagttttttgtcaccaaaggcaccggctatgtggcggggctgcgtacgtctctggctgcaaatcagaatatcactgtgacgacgaagccagtcagcgtctggctggatgtgtgctggacgggatcgcttaccagtgtgtggaatgcgcagtgcaaaatcaccgtggcggaaagtctggccgattacgtgcagaacggtgtgcagcattacgtatttgccgtcgccagcattgatgtgaatggcaatatcacggatttgcggccaaaaggatctctggacaaacaaaagggagacagtgattttctgagaaaggataagaacctttctgacctggaggataaagccagcgcccgcaattcgttagagctgaaaagtgccgcgcttcgtgaagttggcaccctgtttggtgatgttatggaggtaggcgcagggagattacttgccggaactttcatcaatgctgaagaggatgccaaaagtattggtgagcgagctgctactggctgtcagtttatgcgagcgcatcaggctcccgacgcgccagatcaggtcagttactggcaaattatcactcttactgaggtcgtgagtccgacttccgtggtggatgtgctggccatcagtggcaataacgtcgtctttggtcatggtacaggtgcaggtattacctcatggcggcatgtggcgatgctggacggtgcagcctttacaggggatatttccgcttccaatgtgcgtggtggtacttctgtcactattggtgatggcacaggggggatggttacaggtggcgttgatggcgcaggttttaacggcaataacatgaatgttaagtcatgggatggcattggttttcagaacgcagcagaccttgttattcgggcttatatcagcacaaaacttgggattatcgcggccagtgaatccgtgtatgcaggtagcgctaatctgtataaaaacggtgatgtgtatggtgacaaatggagcaccggaaatggtcctaactggctgagtttgttcattgaacatcttgattcacaaatcagaaatgatctgacgacctggacaacgaataatttcccgacgaaatctgatgtttcagccgctctttcattaaaaccaggtcgtcagtacatcactcagatcggtgtttatcagaatgacaagtcaaagccgttcatgctccatgacgataattccggggtatttctggcaaccacggggatgttgcccacggcaggtttgggggctaatggctggcaccgggataatgcaaccgggatgattactcagtgggggtctggtggtttttccagtgggcaacgcatcaattttccggtcgctttcccaaatacttgtggggctgttgttgccaatgacacaggtataggcactcttgcgatatcaacaacagagcaggatgctcgcggttttactgtacggggatcccaggcaaccttcggactcagctggattgcaaaaggatattaa

SEQ ID NO: 383071 - DNA, 441 bp, Salmonella enterica
atggcaacggtagctaagggttattcatatgtttacgacgcaaaaacgaatggcttttatgcgatttcgcttaaagataactatgaaaaggcagattcgtggcctgttagcggcgtgaaaattactgatgaagaacacaaaatcttgatggatggtcagtctgccggaaaagtgatttcagtcgatgaaaatggcaagccagttcttactgatgcagtgattgattatgttgcgctcgcgacagttgagcgtgataaacgtatgtcggtggttactgccatgatcagtcagcgtgtcgatgctcaggatgatggcgatattacggatgatgaactgacagaactttcagaactgcgagaataccgagcaaaactgcgcagactggatttaacttcggctccagatattgactggccggaggtacctgaatatgtggcgtga

SEQ ID NO: 383072 - DNA, 726 bp, Salmonella enterica
atgtggcgtgaatcgcgtctggcttttactgactcactggccgcgctgaattgttctgttgttccggcgcatccgtggataaacggcctggggcagcagacggataatggggcatatctcagcccggtgaatgccgttcgctatcttgctgagaggctggccggaacgggcgggaatgccgatgtgatgatcatgatggtgacaggccagacgcatgagaattttatgacccgcctcaacggtctggtggatgttttcccggcaccggcattcactcaggtaaaacgcctggcacaatccgctgcggcgctgaccatcgaaaaaatgcagatccccgccaaagccggggcggggttgccggtggccattccgctgtctgtgccaaccagcagggcggcattgtctgcggcggctgtcagccaggcacaaaaagcggccagtgcgggattcagcctggacggattaaagcagcaactgggcgagttcgcgcagctgcgtgacagtctgatcggtgatgtggccagcgggctgaatgatttgcaggggaaaagtgccagagcatgggtgtttaccagcaccggcgatacggccaccacgctgctggaactggtaaaggatatcccgcaaccgtctgccgtctataccgcggcggtgatgctggtcggtgacaatctggatggaataaagggaatgattcatgacttcgatcccaacactggcgcttaa

SEQ ID NO: 383073 - DNA, 783 bp, Salmonella enterica
atggctactgatagttgggttacaattggcggtttccttgcttcctcatgctcggcgatcgctgctatttatgcagttaaacaatcagttttacagagaacaatctcaataaaacctgaattaattattaaagatatcgaattaaagactatctatattgataaatctattttcccatgtaaaacatttgacttgaacgctgaatacgacattgacattcctgtattgaatattggactgggaacagcattaaacataaagtatcagtggctttttgagtataacaaacatatagcatcatgcggatttgttaaattagaagaccacccaatatattcgaaacaatcagtagcaaaattcacaaaaggagtgttctatgaggataatgatgaaaatcaataccataattatgatttttttaacaatggttttatgaaaccttactctatccctaaggtaaataaggaaatagagtacatcatgccaatcacacaaaacccagaagtagttagtataaaattaccaagtttaattccaatgcttttaatcactgaagcagatcaaactaactctcttaccgatataatgctagaacctataaaatttggcaaacttaaaattacatacgaagatatatctggcactaagaagaatatccagttagatatcaccatgcgtatgataagcttccaaagcactggtgaacatggtccggagtctgtattcaaaatcaatttccatcgttctgagaaaaaatcaaaattcattcatttatttagttga

SEQ ID NO: 383074 - DNA, 315 bp, Salmonella enterica
atgacactccaggcaaatatcagcagagagacaaaagcggcaaaaacccaggaggtatataagcacgttgttcttttcaaaatggccgccccctcttacataagattacataagacgataactacagcttatgtcccgtgttacataacttttcccgacaggcctcttttacccatgctgaaaaattccgcgtcttttcagatttcaacgcgaattctatctgttcaagcatggaataggaaaaacgaatattcttcgtcacggtcttacttgtccggggctttgctggcatacacacacctgtataacatttga

SEQ ID NO: 383075 - DNA, 243 bp, Salmonella enterica
  misc_feature (15)..(24): n is a, c, g, or t
atggaaaaaatatannnnnnnnnnataatcccggtattcgatgagccaattcgtccacctgaagcagcctgtagaaaagtttttttaaatgaacggtggctggagttaaatatagggagtattacgccaacgtttttgcaagagattttcattaattataaccagtatacgattcttgagcgatatttagtcaacactaaggttgagaccatcaacataataatagaggttattattgtgtaa

SEQ ID NO: 383076 - DNA, 2412 bp, Salmonella enterica
atgaccaaccactgggtggatattaaaaacgccaacgtcgtgatggtgatgggcggcaatgccgcagaagcgcatccggtgggtttccgctgggcgatggaagcgaaaaacaataacgatgcgacgctgattgtcgttgatccacgctttacgcgtacggcgtcggtggcggatatctatgcgccaatacgttccggtacagacattacctttctgtccggcgttttgctgtacctgatcgaaaataacaaaatcaacgctgaatacgttaagcattacaccaacgccagcctgctggtgcgggatgattttgcctttgatgacggtcttttcagcggctatgacgcccaaaagcgtcagtacgataaatcctcctggaactaccagtttgatgaaaacggctatgccaaacgtgatgaaacgttgacgcacccacgctgtgtgtggaatctgctgaagcagcacgtttcgcgctacacgccggacgtcgtggaaaacatctgcggtacgccgaaagcggatttcctgaaggtgtgtgaggtgttggcctctaccagcgttccggatcgcactaccaccttcctgtatgcgctgggctggacgcaacataccgtcggggcgcagaacatccgtactatggcgatgatccagttgctgctcggcaatatggggatggctggcggcggtgtgaacgccttgcgcggccactctaatattcagggcttaacggatttaggactgctctccaccagcctgccgggttatctgacgctgccatcggaaaaacaggccgatctgcaaacttatctggcagcgaatacccccaaagcgacgctggccgatcaggtcaactactggggtaattatcctaagttcttcgtcagcctgatgaaatctttctatggcgatgcggcgcagcaagagaatgactggggctttgcctggctgcctaagtgggatcagtcctatgacgtgatcaaatatttcaacatgatggatagcgggaaagtcaccggctatttctgtcagggctttaacccggtggcgtccttcccggacaaaaacaaagtggtgcaaagcttaagcaaactgaagtatctggtcgttatcgatccgctggtgactgaaacgtcaacgttctggcagaaccacggcgaatctaatgatgtcgatccgacaacgattcagaccgaagtcttccgtctgccgtctacctgttttgcggaagaggatggctctatcgctaactccggtcgctggttacagtggcactggaaaggtcaggacgcgccgggcgaagcgcgtaacgacggcgagattctggccggtatttaccatcgtctgcgtgaaatgtatcgcgcagaaggcggtaaaggcgccgaaccactattgaagatgagctggaactacaagcagccggatgaaccgcattcggaagaagtggcgaaagagaacaacggctatgcgctggaagatctctatgacgccaacggtacactgcttgccaggaaaggccagttgttgagcagttttgcattactgcgcgatgacggtacgacatcctcctcctgctggatttataccggtagctggacggagcagggcaaccagatgtccagacgtgataacgccgacccgtcagggcttggcaatactctgggttgggcgtgggcatggccgctaaaccgtcgcgtattgtataaccgcgcttcggcggatccgcagggtaaaccgtgggatccaaaacggatgctgatccagtggaacggcgcgaagtggacagggaacgatattccggactttaacaacgcggcgccggggagcgggaccaatccatttatcatgcagccggaagggctgggacgtctgtttgctattgataaaatggcggaagggccgttccctgaacactacgagccgatggaaacgccgctgggcactaacccgctgcacccgaatgtggtctcgaacccggcggcgcgtctgtatgaagaagatgcgctgcgcatgggtaagaaggagcagtttccgtacgtgggcacgacttaccgcctcacagagcatttccatacctggaccaaacatgcgctacttaacgctatcgctcagccggaacagtttgtggagatcagtgagacgctggcggcagcgaaaggtatcgctaacggcgactatgtgaaggtgagcagtaaacgcgggtttattcgcgcggtcgcggtggtaactcgtcgtcttcgcaccctgcatgtcaacggtcagcaggttgaaacggtggggatcccgattcactggggctttgagggtgtcgcgcgcaaaggctatatcgccaatactctgacgccaaatgtcggtgatgccaactcgcaaacgccggaatacaaagcgtttttagttaacatcgagaaggcgtaa

SEQ ID NO: 383077 - DNA, 390 bp, Salmonella enterica
atgggatttccttcaccggccagcgattacgttgaaacaaggatttccctcgatcagcagctaatcaatcagcccgctgcgacttatttcatgcgggcatcgcgttcacatttcagggaagggataatccagggggcgctgcttgttgttgacgcgtcactttctccctgtgatggctcgctgctgatatgcgcgatagacggagaattcaggatcaagcgataccgaactcaccctcagccacacctgataaatctggataacggaagaatggaggcgctgccagtagatgatgacggctacagttctgcacccgctatattcggggtgatcacttatatcattaatgacgccaggaacgcggagtttgatgactgcccggtgatgtga

SEQ ID NO: 383078 - DNA, 240 bp, Salmonella enterica
atgccacgtcgttcagatattaacgctgcattttcgtcagcagtacagcaaaaccagaaagggtatcagtgcttacggacagacgacttcatccgagagttagcgaaagtgcactggcatttcagccgtgtcgatgctaactcctggatagagcgataccagttagattttgtcgacaagaccgaggacaacagtgataaccgttactggatcctgcgcaacatgggaagggtattctaa

SEQ ID NO: 383079 - DNA, 1923 bp, Salmonella enterica
ttggaacacttaaaatacagagcggatatagatggattgagagcaatagcagtgttgtcagtagtcatttttcactactttccctctattcttcctggtggttttgttggggttgatatattttttgttatatctggatatcttatcacatctattatattaaaatcagcatcgagtaattcattctcttatgtggaattttacaagagaagaatactaagaatattcccagctctttcaatagttcttatatcatgtcttataaccggatggatttatttttttcaagatgattacaaatcacttgggaagcacgttttttcaggcgctttcttcatatcaaacttaacactatggagtgaatcaggttattttgattctcaatcctatcttaaaccattgttgcacctttggtctttaggtattgaagaacagttctatatattgtggcctatagttattttgttatgcttcaaaagcaagtactctaaacgcaatatacttttatcatgcgcagccatatttatagttagctatacaattagtgtttctaccatggcatacgaaggtggtgctaactactactccccagcatcaagattctgggagttaatggctggtgccataatagcaacattacgtttcatgggtataaaaacatcagtctctaaatctatgtcattgttaggaattataataataaccctgtcaatagcattaattaatgaaaagatggctttccctggttacatcgcgataatgccagtaattggggcgtctcttataatagcatcaaatggaaatgattggattgcatcaaaaatactcagttttaaacctattgtttttattggtcttataagctatccgctatatctatggcactggcccgtttattcattctatcgttctatattttctggttcaccgagtaccaatgagttattgattctaatggcgttggcattagcattgtctattttaacttattttcttttagaaaagcctctgcgccattctgccaaaagatcaattacaactattattctagctgtcgtcgtatttggttctggcgtatttggggttgtcacttactccatgaatggaattaaagaaagaagtgtaaacaaatcagcaggtgagtatgcttctgtcacaaatgtgtacgattactataaatatggtgagctattgcgcggtggcatatgtcactctgtgctgttaaaagatgccatatctaacggttgcattaaaaatagccgaaataatatttttataatcggtgattcatatgcagcagcactctataatggattatcgagttacataaaaaacaacaatgaaaaatatgtgataagtcaaatgacggacggaaacgccccgccattgtttgttagtggtaaggatgatctccaaagaaacgttagttcaattaacgctgacaggattaaagagattggtatagttaaacctgagatagtattactcacgtggtctgttcgtggttcaaatggagttcatgataaaaagttagcaattgaagctctctctttaacaatcaaagaaataaagaaagcatcaccgcaatcaaggttgatagttgttggacctgttcctgaatggaatgctaatttagttaaggtgatatcaaattacacaagtgaattcaaaaaaacgccacctatatacatgtcatatggattaaacgatgaaattaaaggatgggataagtactttgatgaaaatgtgcctaagttgggggctgaatacctatcagcatacagagttctatgcaatgaaagtggatgcttaacaagggttggtgatggtcctgattttgtcactgctgtagattggggacacttgacaaagcctggttctgatttccttttagaaaaaattggcaaatatataatcaactag

SEQ ID NO: 383080 - DNA, 2022 bp, Salmonella enterica
atgacgacttataacactggcaatccattaggttcagcggctgcaaaggatttatatgataacgctgaaaactttgatcatttgtcaaatgaccagagtaatgaaaaatggcctgatagatttggcagagaaaggctgacctggcatggtattgagaaaatgagtcaggaggccatttcttcatttggatatatcacactgaaaagcttccagcttggcgctccattgcctaataacgagcttacacttcctaatcaggcgctgcaggatgaaactgatggcgaatactatcgatgggatggagtattccccaaagcagttccagccggatcaactccagaatcaacaggaggcatcggtgtagggaagtggttaagcgttggagatgcggcatttagggaggaagctaataagaagtacaaatattcggtaaaactttctgattacctaactttacaggaatctgcatcggctgctgtcgatggcttgcttatagatgaggattatcactttactgacggagagtctgttgattttagtggaaaggttttaactatcgactgtaaagctaagtttatcggggatggtaaattaacatttgaaaatttaggctcaggatcacgcattgtgcatccacatatgcagtcacaaacggtaccttacgttatatcaagatgggacagtaacggtgagtggataaatgacccatccactatcatttccactcttactcaaagcagaacgaaagggtacgcacctacaactaatgatgtagacatatatagctctctaccagataatgttaaaaaccaaaatttaatatcacatctcattatatctaattcatcagggatagatatattttatccaaaagcaacttttggatcatatgaatcatttaaaaataacaatgtgaagttttggtatccacgtgatttttatggagacatgacaaactgcatcgcatttactgcatgggatagcaccgattactatcatggtaattatgtgatcggaggttcaactaattatggctcaggaagtggggtgtgtttttatcgaaatgatggaggggttagccgtgatggaggggtcattggtggatttacaccttacagatgcggtgagtcaggtgttaaaacatatcaaaacgaagtgaacggaataagtcaaaggtgttatagtcttcgttttatcgatatctatccgatagaaacatactatgatggtgtagatctgaatgctgactatggcacgccaactgaacgccagcatgattacacattggcgcaatacggctggaacaaccttccaacaaaccacatagttagcaacattcaagcgtataagactcatggggttggtatttggggggacggatctacagggttttatcgagatatctatgcatcatattctcggggcgcaggtatatttatcaaaggaagtgggaagaattttaaaaacctaacttccgttcaaaacaatgcagctaacacgccaggagaaaaccagattacacttgacggggcaaacataattgatggtgtaaatataataaattacacacaaccaccaggacttgctattttcgctccaaattctacagtcaccaatcttagcgccccgggcgtttcgtcatcatccataaacattggcaatattgagggtctggtggttggcaaccagataagcgtacagccaaatcttgcaacgcaaacttcagctgtatacttaaatgtagtcaatactggggtggcctctaaaagagaggataccataaaggttggtccaggagcgtcagaggttaccagatacgtaatttcaggtagtacaccgaggttaaccatgagagaaaaccatggagattttggggcggtaaatattgcattctctgggacggtcctgccagacgaggccgtaccggatgcaaattcctacgctgtatattgggatggaaccaaccttactgctttgataaatcacggtggtgttcttacaagacagaagttaacaacataa

SEQ ID NO: 383081 - DNA, 2718 bp, Salmonella enterica
gtgacaatcagaatttatccctctcgcttacctggtgaaccgcttgaaacgcatgaacatggtgccatcacaattcaccaatggatgattaaaaaagtagaaggctataagcctgatatgatgcaaccgatcacaattgatgttgatggaaaaaatattccacctcaggcgtggttagagttcgcaatcaggccagaaagtgacgtaagaatttaccctgttccttacggtgcagtagccctcgcctggattgccgttgccgtatcagttgcgtctgtagcctacgctttattctttgctccaggagttggtgatcttggtggttattcatctggaactggaaatccacttgatgtaaatcctgctaaagcgaataacgcaaaattaggtgacccgatacgcgagttattcggtcgtagccgtatttatccagactatgcagtgcagccagtaacaaggttctcagttgatgatcccactgtaatgacagttgaaatgtttgttgttatggggagagggcgtttttcatttggggatggcgatattcgtgtagggtcaactccaatcgcctctcttggtgatgggtttaaatacacagtgtatcaacccgggcaaaacgttagtggagatcaacgatcagaaaactggttcaattccacagaggttgggggaaccgcatctggttctggtcttgatatggcgcaaactgcgccggacacggaagatgttgttgctaattcgctaaccgtttccggaccgacaataacatttaatgggctgagcacggatgatggagatgaaacaacaaatgaccttccagatacatggactgttggtgcaattgttgaattaattgttcctgattcctatgtggtaactaatgatggtgcttacagcagaattaccagtgacacgttggaggaaatagctccttatattgggatgcctgtaactctctggtacaacagcattgattaccaactattcatagctgattttatacctcactctgagccagtcggcgaagatgtgattaccgcatcaataaccctcgcttacgatagcgctaccgggactccgttcatcgggattcctgagggttatgtcaggctatctgtttcccattctggaagcgaatataagattcttgatatagatggtagctctgtaactctggagcgggttattgatggcagtgttgatccgtcatggcctggattttcactgcgcacagttcttgattttgaagccaacggtttaaatgagaacgatagttggatggggccttttctggcgtgcccagaaaatgaagttgttgatatgttcgaagtaaacttcttcttcccaaacggaatttgtgggtataacaaaaaagggaacaaacaataccgtgaggttaagtgggagattcagtatcggccatatggttctggcgccgggtggataagcaaaacaggagcgtacaatcttcagaacatcaacggacttggattcaccgaacgaatcacgctggatgcacctgcgctggtagaggtaagagctcgccgaacgaacgagcaggggcaggataatagtcgagataacatgtactggcagtcattgcgagggcgtttgttgtctcggccggcatcgtattctggcgtcaccacaatggcggttacggtggaaacgggtggtaaacttgcagcgcagtcagatcgccgcgtaaacattgtggccacacgaatttatgattctggtgtgtcaaggagcatttcaggagctctctatcatataggcaatgagttagggcttttgatggaccacgaagctattgactcactggaaactacttactggactcctggcagcgaattttttgactttgccactatggattctgtttctgcgctggagatgcttcagaaggtgacaaatgcaggaaaaagttacttccttcttaccgatggtctggcatctgtagcaagggaaggtgtgaaaccgtggacgggaataatcagcccacaggagatgacagatcagcttcagacggctttcgttgctccgtcagcagatgactattatggtgttgatgttacatatatcaacggcactacatggtctgaagagacggtgcagtgcagaacttcagataacccaactcctgtaaagattgaagactatacgcttgatggtgttcttgatcaggaccgcgcttatcagataggtatgcgtagactcatgaagtacagacagcaacgtcttactcatactacgacaacagaaatggatgctctctgctataacgttggcgacagggttatattcactgatgatattcccggaagcaaaacaataagcacactcattgatgacatgagtacaactgatggagttacaactattagtgtatctgaaccgcttgattggaattatagcaatccgcgcgctttgatacgttatcaggatggtacagcttcaggattacttaatgttacaaagaatagtgaatatgaactatctgttccagaacaaacagaatttagtaatattattctcaataacccatctattgaagcacctcgcttgatattctgcgagtcaactcgcgtggggtacagcgccttaatttcagagattgtaccgcaatctgatggaacttgtcaggtaactgcaaaagagtacagagatagtttctacgattacgacaatgctgcataccctggtgatgtagcttaa

SEQ ID NO: 383082 - DNA, 381 bp, Salmonella enterica
atgttcaatcctgacaaatacctttctgttgtgtggcagaagggggggcgtgtttaccctgatcttgactgttttggcatcgtcaatgaagtacggaaagaccttggattacctctctggccagatttttcaggggtaactaaagattacggtggtcttgaccgagaggctgtaaaactaatgcgatcacttgagaagtgcgatccttgtgttggggcaggtgctgcatgttattccgggtcaaccgtcactcacgttggtgtcgtagttgagataaatggtcaacttcacgtagctgaatgtaatccgggaatgaatgtgacctttcttcctgtttcgcgtttcaaacgacgcttcgttaaagtggagttctggaagtga

SEQ ID NO: 383083 - DNA, 483 bp, Salmonella enterica
gtgacaatactgaatcgtctttacgcctcatctggtgaagaggtgattatcgaaacactccagataaacattggtagtgaagtttattatttgtgtaaggggttcgatgatattaccgcaaccactgaaaatggtgatgctgtgacattcctagcagcagcgattgatattgctcttcctgcccggaatagtgatggaactcaggacttgcagtttgcgatcgataacattgatggcattacctctacagcgattcgtaacgcgctggataatctttcagaggcatcattaacttatcgtaactacgtatcaactgacctcagtgcacccgcttcagttccgtatactctggctattaagagtggttcgtggacgtcgacacaggcacaaattacggctggctatatgaacgtactcgatactgcatggcctcgacatcgttatacccttccgtactaccctggactccgttacatgagttaa

SEQ ID NO: 383084 - DNA, 474 bp, Salmonella enterica
atggctaaaactaccagcattaactatccgaatgattacctgccgattccgttacaggaagggttcgggttaaagcctgttagcccattgctgagaacagaacttacatctggcagggcaaggcagcgccgcctgtacacttcaacgccaactcaggcctcagtggcatggttgtttacagatccggaggctcaactgtttgaggcgtggttcagggacaccatcaaagatggggctgactggttcaacatgcctcttcgctcacctcttggcattatcgacatgtacgtttgccggttcgtcgatatttatgaagggccgaccattgagggtggtaattactggcgatatacagccacccttgaattatgggaacgaccagttcttgcactaggttgggctgatttcccggattacattatcaacagcagcattattgatattgcgctcaacagggagtggcccagaccgtga

SEQ ID NO: 383085 - DNA, 2526 bp, Salmonella enterica
atggctggtaaatccctcggaacgctgactattgacctggtagctaaggttggtggatttgtatctggtctaagccaggctgaacgggcatctcaaaaatggcgaaaacaggttcaagctgatgcaaaagcggctgcggtagcatttactggttttgctaccgcggcaagtgcggcagctatcggtgtcggcgtcgccggttacaacctgctaaaaacaacgtcaaagcagattactgaaacagaccgttgggctaagtcgctcaacatgtctacgcagtctttgcttgcctggcagtatgcagctgaaaaagctggcgtatccggcgaccagatggccgatatctttaaggatattggcgataaaattggcgatgcggtactgaataaatcgggtgaagcggttgatgctctaaatgcgctgggattatcggctaaaaaattagccggtgaatcaccagataagcaattgctggctatcagcaatgcgctcggcaagattaaaacaaacgctgaaaagactacaatccttgaaagtcttggtaacgacctttcaaagcttctcccattacttgatcagggaggggaaaaacttcgccagtacatggatgcggcaaaacagtttggtgttgccccagatgatgctgatatcgaaaaactggtgaaagtaaactccatgtttgaggacatggagacacaggtaaacggcgtaaaaattgagattgccactggtcttgcaaatgttgacctgtcaggattacagaatgcgatcaccgacatgggcgatgtttttaaagacccgcaggtgattcaggggctaactgacctggttggcggcgttgttgacctcgctacctggcttgtgaaagttggcgctgaagccggtaagttgattgacctgtacaaaggcggtaaggctgttggtgacaatgcatctgtaactgatatagaacgtcgactcaacaacctcaaagcggatgtagaagaccagggcttccttgccagttttaacagaattggtatggacgttgacgggaaaaaagctgaaatagcgcaattagaacgccgactgtccatcatgaaagccggtaataatcttcctctcagtcaggccactgtaggcgcgacttcttcttccagcaaaaattattccttaggctcaggagaaactaacgggaaaccatctccagatgccggggccaggaaactggagtcagcgtttaagtctctggaaatgagctatcagcgccagatagcgctaattgacacaacaggcaaaaagaatcagcaggtaaccgagcttgagaagctgcgttttgatttcacatctgggaaattaacaggaattaatgcagctcagaaagagcgacttgagcaacttgctactgagatagatcgcctcaactcactcaaaaaagccaacgaagaaaatctgaaacttgtcgaatttaccgctaatttgcgtaagcaaaatcagaatgaccaggcagctaatgattctgattttatcggcgcaggtatgggagacaagactcgccagcgcatgaaggaattgctggatatccagcgtagttttctcgacaggcagcaagatctacagaaacagtaccaaagtggtgatataagcaaatcgctttatgaccaggaaacggcagcgttacagcaggctcttgatgaccgtcttgatattcaggaagactactacaaaaagtctgatgctcagatgggcgactggcaaagcggcattatggatgcgttgaatgattatgctgataaatcagctgattattaccagactgctgcagatgcgatgacttctattcttggtggtgcaacctcagttatttctgacaaccttaatgatcttgtgcacggtgcagaagatttaggtgatttcttcagtaatattttctctggccttggtgaaacaatcattaaaaccctttctgatatggcggcacaatggctggtatatcaggcagtgcaattgctggtaggtaaatccactcaggcaagcgcagcggcatcaatgctggcaaacgcacaggcatcatccttgcaggctcagatcgccgcttatgcatctactgcggcaattcctatcgttggtcccgctcttgcccctgctgctatggcaacggcagcggcagtgactgctccgcttgtcgctgcagttggtacttctgcccttgcaggtatggcgcacgatggtatcgacagcgttcctgaaaccgggacgtggctcctgcagaaaggtgagcgagtcgttacatcacagacctcggccaagcttgatgaaacactcgacagggtgaatcagcagtccacgcagggggctagtttctcacccgttataaacatgaatgtgaacggtgacccttccgacacccagattgccatgatgaaacaagcaacaatagaaggggcaaagcttggatatcaacaggcagccagcgacctggcaagcggcaaaggaagcatttcaaaagcaatgatgcgctggaacactaacaggagaacgggttaa

SEQ ID NO: 383086 - DNA, 378 bp, Salmonella enterica
atgaaactgactctggattcattaaaacaggctggtgcattcactgggagacctgttgagaaggagattacctggaagcagggtgataaggaaattaccgctaccgtttatatccgacctatgggttatcacgacgcagtatctactgttctgtcagccgcgggaaagattgatggtgttgccggacgtatcgcatcatccatttgtgatgagaacgggaatcctgtttttactgttgctgacattactggtgaagcagacactgagcgcggtgcgctcgacggaaaccttaccgtcgctctacttgtcgctattcagcaggttaacgacctgggaaagacgaactcagcgcagaagacgaattctggtgtgaattag

SEQ ID NO: 383087 - DNA, 498 bp, Salmonella enterica
atgtcagtagtgactcaaggcactcagatgtacgttctgaataacggcgtggtcagtgaagttgaatgtattacttcattctcaccaggtagtagcccggcagatcaaattgaagatacctgtctgagcgaaaccaatactcgttcttatataaaaggtctgcgcaccccgggtcaggcaaccgttgctcttaacgctgacccggcaaatgccagtcacgtaatgctgagcaacctggctgaatcaagcgaccagaccaacctgaccttcgctataggctgggccgatggtactgcagatcctactgctgcaacagtcggtgaccctgatgcagttgatggtctgtctcttccagatacccgtacctggtatgtattccagggttatgtatcagatttcccgtttgattttcaggccaataccgtagttcagacttccgcgactattcagcgttccggccagggcgtctgggttcctaaagcacagccaaccagctaa

SEQ ID NO: 383088 - DNA, 366 bp, Salmonella enterica
atgattgctcctatttttcctgtttgcgcgtcgagccatgaagtcactgccttactcggaagcaatccggtaagaatttaccctttcggcattcaggacgataaccttgtttatccatacgccgtctggcagaacatcagcggctctcctgaaaattttctcaatcaacgaccagatgcggacatgtattcgcttcaggttgatatatatgctgatacccctgatgagaccattgctgtagctaaagctatgcgcaacgctattgaggtaaaagccaatatagtcaggtggggaaaccagacgcgagaccctgagacactcaggtatcgctattcattcgatgttgactggatagtcagcagataa

SEQ ID NO: 383089 - DNA, 486 bp, Salmonella enterica
atggctgacagcattgagtttaagcttgaaggtgtagattcactgcttggtaagttagaagccattgccacggaaactaagcgcaaaacagggcgctccgcactgaggaaggcgggaaacgttatcgtaacccagataaagagaaacgcagagcgactcgacgaccctcacaccgcacgtagcattgctgataacgccgcgctgcgctggaatggtcgtatgtttaaacaaaccggtgatcttgccttcaggataggcattcttcagggagctgtattaaaaaagcatccaagcactgcgaaagatgcacccactcctcactggcgccttcttgagtttggcactgaaaagatggcagcaaaaccgctcgttcgtgttgctgcaaattccaggctgatagaggttttcaacaccttctctgttaactacgaagcggggattgaccgagctatcaaacgagcgcagaagaaaggagagacgtcatga

SEQ ID NO: 383090 - DNA, 333 bp, Salmonella enterica
gtggaatttgcaaaactgcgccaccgcgtcaccattcagcggagaaccgctatccagtcacctactactggtgcaatggaatacacctggaatgaccttgcagaagtgtggggtagcgtggttgcctcttcggtcagggatttcattacagcccaggcatcaaacgtaaaagtaacggccagaatcactatccgataccgggaagatatccaggagaaagaccgtattcttttccgtggcaaaatctacagcattgaggggattcttcctgaccctgatagtggacttgaatatctcacgcttccgtgctcagagggggtaaaggatggctga

SEQ ID NO: 383091 - DNA, 195 bp, Salmonella enterica
atgaacgagcagcaggtaaacgaactaacggcggcactgaaagcgctggcaacgtctcaactgaaacaggcagaagcgataaaccgtctggctcaggctgatgaaacactgatatctctgattgcaaaaacgctcgttgatgaaattgacgatgagttgccaccgcaaacctatctagatggcaagccgaggtaa

SEQ ID NO: 383092 - DNA, 327 bp, Salmonella enterica
atgattgaactggttacgctcgaagaggctaagttgcatctccgtattgacgacgattacggagattcagaccttaccttaaaaattcagggcggcagcgcagcaatactttcctacattcagggaagtcgcgcgttagtcgtggataattcagggaaactaattgatggtgagccgcttactcgcgttcagacggccctgcttgttcttcttggctatcttgaccgtaaccgcggcggcgaagaagaagaaaagttgaagcagggggaacttcctttttctgtatcaatgctgatttacgacctccgtaagccgacaattatttaa

SEQ ID NO: 383093 - DNA, 885 bp, Salmonella enterica
atgaatgaacgtgaattatccctgattaaagcgcttggcgaagagtttggagcagccattaaaaaaatggctgatgactttcagcaagcgctggagaaaacagccagtaatctggagaagcaactggaagaggttcgtcagtcaattccagtattccaaccagtagaaataccagatatatctaaaatggttgcagatgctgtaaatgaaattgaattaccgaatgcaccagagctaccagattttaaccagataatctccgacgctaccgaaaatgcggtgaagcaggcttttgaatcaatcccagtacccaaggatggtaaaagcgtcacggttgatgaactgcgtccccttgtcgaagaggtagttaattcgttaattcctgagccggtagacgttgaaaagctcgctcaggatttgttgtcaaagattcctgatcctgaacctggttccgatggtcgtgacgctcttgcaatagagcttgaaccattcattgacgagaaaaaaagctatccacgcggtacctatgcgactcacaaaggcggactttggcgctcccatgaaaagacgcacggtatgcggggctgggaatgtattgttgacggtgtgtcgggcgttgatgtcaaacaagataaccagcgaaccttctctatttctctcgaaagagcaagcggtactgttgaagttaagtcctttgacatcccggtaactatctatcgcgatgtattcaaatctggtaccgaatatcagcctggcgatacggtcacatggggtggttgtatgtggcattgcaacgagaaaacctgcgacaagcctggtgagacaggatcaaaaggatggacgcttgctgttaagaaagggcgagatctgagggataagccatga

SEQ ID NO: 383094 - DNA, 1353 bp, Salmonella enterica
atgtggaatccttttagacggaaagagaaagcactacagcaaccatcatctcgcggctggactcctatattttcctttgtcagagaatctttcgctggtgcatggcaaagaaacatggaaatcaggaatgagaccgtactttcgtattatgcggtgttctcttgcattacgctgatagccagtgacatttcaaagatgtcgccagccattcaggccaaagattctaacggcatctggaaagaagttgctgatgacaatttcgataaactaatcagcaaacctaaccagtttcagaacacaattcagttctttgaaacgtggatgaattctaaactttcacgcggtaacacctacgtgatgaaggtaaaaaataatgacgggaaaattacagaacttcgcattcttgatccggacaaggtcatcccgttggtcgctgatgacgggtctgtcttttaccaaatcagtcctgaccagattagtggtttgccgacacaagtaaccgttcctgcacgagaaataattcacgaccgctttaactgtctatttcatcctctgattggtatttctcccatctacgcatgcggaatagcggcgatgcaggggaaacatatccaggagagttcagcacacttctttaaaaacggtggtaagccaagcggtatcatcactgtgcctggctctcttgatgctgaaaaggctaaagaaattaaagcagcatgggacgcaggttacactggtgaaaacgcaggaaaaacaggtcttctttccggtggcgctgcatatcaggcactgactatgtcagctgttgatgctgatactgttgaacaacagaaactctctgatctcgctatctgttccgcctttcatgttcctgcttataaggctggcgtaggagaaatacccagctctgacaacgttgaagcacttgagcaacaatattactcacagtgcttgcaggtgctgattgagtctatcgagtcactcctgaaagaagctttcgagcttggtgtaaaaaagcgggttgagcttgatatcggcgcactattacgcatggacagcgaacgcaggatgaaagtgttgggtgatggcgtcaaaaacaccattcttacaccaaacgaagcccgcaaaagtgaaaaccttcctcctgttgaaggtggtgattctctcttcctgcagcagcaaaacttcagccttgcagcactggccaaacgcgatgcatcagatgacccgttcggaaaaggacagcaacagatgcagccatcgccagagccaatagacgaaagtggaaaggcgttaagcgaaacagaacttttcgcggcgaaatcaatgctcagaggattattaacaaaatga

SEQ ID NO: 383095 - DNA, 1938 bp, Salmonella enterica
atgaagcttgaccgcgcatgtacgatcatgacggtgaaagcggtggatgaggacaaacggataattaccgggattgcttccacaccatcacctgaccgtgacggcgacattatggaccctgacggtgcgaagttcggcagtgaaaacccttttctatggcagcatgacagaacccaacctattggtaactgttctgcaaagaaagtgaaagaagggcttcagatcacggcgcaacttgttaagccaacacctgacatgccatcgcaactggtggccaggcttgaagaagcgtgggcatcgatcaaatcaggtcttgtgaaaggcctgtctatcggcttcaagccaattaagtacgcatatctcgactctggtggcatccattttcttgaatgggagcttcttgaagtctctgcagtaacgatcccggcgaatgccgaatgttcgattcaaaccgttaaatcttttgaccgccagttactcgccgcgctcggcaatgagaaaccggtagttaaaaccataacttctgctggcgcttcagcaccgaataaatcttctcaaaaaggaaaaccaacgatgaatatcgctgaacagatcaaaagttttgaaaacaagcgtgcagcgctggcctctttactgaacgacatcatgagcaaagccgccgatgaaggccgcacgctggatgcggaagaaacagaaagctacgacaacacctctactgaaatcaaagcggtcgacgagcaccttaaacgcctgcgtgatatggaaaccagcatggcatcaaccgccaagccagtaactaaagcggcatctggtgaagttacagtggtgaataacgcgccgtccatcatccgtgtagagcctaaactggaaaaaggtatcgcctttgcccgtttcgccaagtctctggcggctggtaacggtagccgttctgaagccctgcagattgcgaaaaaccagtatcctgatgacaccaaacttcaccatgttctgaaagcggcggttagtgctggtaccaccacagaccctgcctgggctggtgcactggttgaatatcaggattacgcgcaggatttcgttgagtacctgcgtcctcagacaattatcggacgttttggccagggtaacatcccgtccctgcgtcaggtgccgttcaatgttcgcattcctgcgcagacctctggtggttctgctaactgggttggtcagggtaaagccaagcctctgaccaagtttgacttcgcaaccatcaccttcggtttctccaaagtggcgtctattgcagtactgaccgaagagctgatccgcttctcaaatccatctgctgatgctctggtgcgtaacgccctagctgaagcggtgatcgcgcgacttgataccgacttcatcgacccggcaaaagctgcagtggctgatgtttccccagcatccattaccaacggcatcactgctactccgtctactggcgatccggatgccgatgcagcggctgcttttggtcagttcattaccaacaacctgcaacctaatggcgctgtatggctgatgtccagcaccaccgcactcactctgtctatgcgtaaaaatgcactgggccagaaagagtacccggacatgaccatgctgggaggtacattccagggattacctgtaatcgtatctcagtacgttggcaatcagttggtgttggttaatgcaccggatgtgtacctggctgatgacggcggtgtggcagttgatatgtctcgcgaagcttctctggaaatgcagagcgctccgacccatgacagcaccaccccaacaccagtggaactggtatccatgttccagaccaacagcgtggccatccgtgcagagcgctggattaactggaaacgccgccgtgatgccgcagtagctgttatctccggcgttgattacagcactggcgctaccagctaa

SEQ ID NO: 383096 - DNA, 1659 bp, Salmonella enterica
atggctcaatggaccacggcttgccctgaatgggaatctcttctggttgcaaagcaatcaatcatcccaccaccaattttcccagaccaggcagagcaggcacttggcatcttcaaagagttacgcgtctctgatttaccagggaagccaacatttggtgaatgctccgaggaatgggtatttgacttcgttaatgccatcttcggtggctatgaagcagagaccggtaagcagctaatccgcgaatatgggctacttatctcgaaaaagaacacaaaatcgaccatcgccgcagggattatgcttaccgcgctaatcctgtgctggcgtgaagatgaagagcatctgattcttgcgccgacaaaagaggttgcagataacagttttaaacctgctgccgggatgatacgcgccgatgatgagctgtctgatatgttccagattcaggaccatatccgcaccatcacacaccgggtaacgcgaaatacgctcaaagtagtagcagctgacaccgatacggtttcaggtaaaaagtcagggcgcattcttgtcgatgagctttggttgtttggtaagcgagctaatgccgaagccatgtttatggaagcacttggtggtcaggtatctcgcaacgaaggctgggttatattcctgactacgcaaagtgatgaaccgcctgctggtgtattcaaagaacgccttgattactggcgtgctgtgcgagatggaaagattaatgaccttaaaacactcggcgtcctgtatgaattccctgactctatggtggaaagcagggcttaccttgaaccaaaaaatttctacatcaccaatccaaatattggacgttcggtaagtgaagaatggattgccgatcagcttctgaagaaccagaacaaaacagacggcacattacagcagttccttgcgaaacacctcaatatcgaaattggtctgaacctccgcagtgaccgatgggcaggtgttgatttctgggaaccgcaaattaggcaggtaacattcagcgatattcttcagcgagctgaggttgctacggttgggatagatggtggtggccttgatgaccttcttggtctttatattattggtcgtgacaaagaaacccgtgagtggattggatggggccatgcctgggcgcatgaaatagctgttcgccgccgcaaaagcgaggaatccaggttcaacgatttcgttaaggccggtgacctgactatcgtaaaacgagtaggacaggacacggaggaagtcgctgaatatgtcagccgtatcaatgatgcggaactgctggataaaattggtattgacccttctggtgttggtcagatccttgatgctcttgtagaagctgaaatacctgaagattcagtggttggtgtcagccagggctggagacttggtggcgcgattaagacaacagaacgcaagcttgcagagggggtgcttattcatggtggacagccattaatggcctggtgtgtcggcaacgccagagtagagccaaaaggtaacgctatcctcatcaccaaacaggccagcggaaaggggaaaattgacccccttatggccctttttaatgccgtttcgctaatggctcttaatcctgaagcgaagaagaaagattaccaggttttttttatataa

SEQ ID NO: 383097 - DNA, 462 bp, Salmonella enterica
gtgttaacaggacaaaagcgcaaattcgcacaagcgcggatgtccggttcatcccaggctgaagcagcccgaaaggccggttactccgagaaaaccgcgaggtctcagggttcccggctggcaaaagacccggatatcatcgcgtttatcagtaaaaaacgtggggtcgaagtcattgccgatcaggctgtttctgaaccagatgatctgccaaaagttgttaacagaacggtgaaggaatttgatgatccacttgagttcctgaaagcagtgatgaacgacgtatcagaagagacggatgtcagaaaagacgccgcaaaagcgatgctgccataccttcaccccaaaaaaggagaaggcggtaaaaaggatgcaagacatgccgccgcgaaggtcgcagccacgggtagcaagtttggggcaatggcaccgccgaagcttgttgttaataacaaggggtaa

SEQ ID NO: 383098 - DNA, 369 bp, Salmonella enterica
atgtctaagttaaagacactacaaccgcgcctgaaagctatcgacactcgacgaataaagcctgtctatggtgagcatcgccgcataagcggtagcgcaagggtaatccttaagcgtcgtatctatgttcgcgacggtggtcactgctgcatgtgtcagcgagtgattgacctgcatgacagtgaacttgatcaccgcatagcactacagttcggtggtgacaacgatgagagcaacctctggacgctgtgcattgattgccattcaggtaagtcatcgcgcgaagcatcaatgaaccagcctgacagtgaggctctgaagcactctgtgccgaaagataaatcacaatctggcatcgtaattctctga

SEQ ID NO: 383099 - DNA, 591 bp, Salmonella enterica
gtggaaacacaagtgaagttcgtagtggtcggacaccatgaccgctttgcctctgcagttcttctggcaagcgatttgggagcccatcttcttctggatgaaggtgagcatggggccaactggaatcatcgccgagcgcttgaatgggctgccaaccaatcatgccgtgttgtcgtacttgaagatgatgctatgccagtcgctggattccgcgacaagattgctgtgtggctttctcgatatcctgatgcactgtgttcattttatctcggcactggccgtccaccacagtatcaactggagatagcatcaaagctaatagcagctgataaggccagagctgacttcataacattgccgcgtcttattcatggcgtctgctacagcgtacctcagcaacacatcaagagagtgctggataaatggaaccacagcaaagcagcagactatgcagtcggtgatgcttacggtggccctgttgtctatccatgctactcacttgttgaccacgctgatggacagccagtagaaccagccagagacaatcagccaagaacagaacgccgcagagcatggaggttacatgtctaa

SEQ ID NO: 383100 - DNA, 1458 bp, Salmonella enterica
atgcaagtaactatagacggtattcaatatgcgcctgtcagcatttcacgccccgcaattggcatcgcaataactactcataacaggccggaagttcttaagcgtgctattgagcagcatatgaagcatcttccatctggtgcgctggtggttgtaatagacgatggatcaagtcctgcagttgttgtaccggctaacgtgaagctgtttcgacatgaccaatcatgcggtattgtcgcttcgaagaacgccagcctgaccgcgctgatggatgcagggtgtgagcatctcttcctgtgggatgatgacgcgtggccaatcgctgataactggcatctcccttacatcgaatctccagaaccgcatctggcttatcagtttcttgacctcgctggcccacgaaagattaacgatatgactgtcctgtacagggatgataagcatatcgcttacacagggcagcgcggtgtaatgctgtattaccaccgcagtgccattgataaggttggcggctttgatccggtatacggtcgtggcatgtacgagcatcccgatctggcgcttcgcattcacaacgccgggttatcgacatgggctttcgctgatgtggttggctctgaaaagcttattcactcaatggatgagcacgaagagggctcacgctccatccctcgtccagatcgcgaagctttagtgaagcgtaacgttggtattttcaatgcgcggcgtgatagtggatataccgctttcacttcttaccgaagtaacccacatcttgttttgaccacattactaacaagtcagccagatccacagcgcacaggtagaatgaaacatgatgcgggcattctacagtcgtgggctgattcagtatctggtgcagtactggttgtcctggcggatgaactgaaagtattaccttatggcgtagagttgtgcgaagttcccgagttgatcatgagcccttactttgctcgctggcttcacatctatcaatacctgcgctcacatcctgaatttgatctggtctggtgcactgatggtaccgatgtcgagatgcttagagagccctgggcagaaatgcagccgggtaaaatatatgttgggtctgagcataagacgtattccgatgaatggatgaaggccaatcaccatggaaaagcatatagcgacttcatcgagcagcatcgtaatgaaccgctgttgaatgctggtctgttaggtggaagtagaacagatgtgatggagtttgctcaccgtatcattcgtcagcactacctgattgaaagccaccgattctggaagatggagactgcacccgccacgcaggtggatatgggcgctttcggaatggctgcaaagtcattcggtgatcgaatcgttaccggacctctggtgcataccatctttaaaacagacggtttcggtaaggagttagcttggtggaaacacaagtga

SEQ ID NO: 383101 - DNA, 234 bp, Salmonella enterica
atgagacttacagttctggatgatgatccaggaagaaagattgacctgcgcaaagagcggtacctagtcttagttgatggtaaagagataaagcatgttttcaccgctgacgatgaaaaaggcgaagttattgcagcagaacttggtcctgacggatttatggttgtagataacggagaagtgaaaaggatagcaattcgcggcgccgttgaaatcaaacgcctggaatcctaa

SEQ ID NO: 383102 - DNA, 216 bp, Salmonella enterica
atggatgattttaaagacctgtggatcagtgtagatgaccaccctccagagaatcaggaaggtaaatggtcaaacgatgtcatagcgcttagcgacactggagacgttttcaggctggcctgtatgggcggctcatggcaaaggacgcaagcatttattgattcaggggctaccaaggtaactcactggatgccgctgatttaccccgatgattaa

SEQ ID NO: 383103 - DNA, 348 bp, Salmonella enterica
atgttcacccagtcacaggccgtgtccgttacttcaggttttgcgggtaaagttttcgcgcaactcacggtcaacatcgtcatcaggaagatgattaacagtctgctgtacatccctggctccttttgttgtctctacccggcgttctgcaacggcttcagtagctgctgcgtgttcttcagtgcgctgctgatctgctttggcttccgctttattggtgcctcgcaaatggccaacaccaaaaccaccagcagctgctaccataattgcgccaataacgccgataatgatttctacaatgctcatgcgattacctttggttcaaatgagcggacgttgataggctga

SEQ ID NO: 383104 - DNA, 225 bp, Salmonella enterica
atgattaagtggctggttcttctcattccacattgggaaacggacacggttgttttgcaggagaagggtgacgaattacatatcgtttgcagttatagcgatattaaacctggcgaggtgttcgacgggatgtgtgaacttaaaaccttcacatggcttaactggtctttcccatacggtcagcctatcaacgtccgctcatttgaaccaaaggtaatcgcatga

SEQ ID NO: 383105 - DNA, 618 bp, Salmonella enterica
atgaaccaatcacaatttcaacaggcggctggtgtaagcgccgggttagcttcgcgctggtttccgcacattgacgcggcaatgaaagagttcggcattgttaagcctgaagaccaggcaatgtttatttctcagtcaggacatgagtcagcgggattctctgcgctggtggagagcttcaactacaccccagccgctctgctgaccacctttggacgccgcattacgaactatcaggcatatatgctcgggcgtgacaaagaaaaaggtcaggtagccaatcagccagccattgcaaatctggtgtacaacaatcgcctcggtaacaaagcatcaggcgatgggtggaaatatcgtggccgtgggctgattcagattaccggtcttgataattaccgccgctgcggaacgggattaaaactggatttagtcagtaatcctgaattgctggaaaaggacatcaacgccgcacgatcagctgcatggttttacgccaccagcggatgcctgagctactccggcgatctggttcgcatcactcagatcatcaatggtggacagaacggcattaacgaccgccgtgcacgctacgccaaagcaaaatcggtgctctcatga

SEQ ID NO: 383106 - DNA, 282 bp, Salmonella enterica
atggtaacaagtgatccgtcagcgatggtgaatgcaggtatttgtgcagtcattgtccttgtcctgatgttctaccagcgtgaaggggcaagacatcgccccgctatatcattgctggcgtacttcgttgtgctggtttatgccagcgttccattccgatatctgtttggcctctaccaggagtcacactggatggtggtcatcgtaaaccttcttatttgcgctgccgtcttatgggctcgtgggaacgtggcgcgtctcgttgatacgctgaggcattaa

SEQ ID NO: 383107 - DNA, 396 bp, Salmonella enterica
atgtccgatcctgtttctggcactacggtcgcggctggtggcctgatgggagccagcgtatttggtcttgcaaccggtattgattatggcgtggtatttggcgcattcgctggtgcagtattttatgtagcgacagcggcaaatatcacacgagtacgattgattgcttacttcatgacgtcattcattgttggcgttcttgctgctggactggttggttcaaagttgtcacaggctaccgggtatagtgacagaccattagacgcacttggtgctgttgtagtggcggcgatgacaatcaaagtgctcacatttttcaacagtcaggatttgggaagcctgttcagtattctttcgcgattccgtggaggaggggccagcaatggtaacaagtga

SEQ ID NO: 383108 - DNA, 579 bp, Salmonella enterica
atgattaatccttctgaagttggtaaatctggtgaaatggttcgtcttcgtactctggaaagcatctggatacagggtaagttgcgcatgtggggacgctggtcttatatcggcggtggtagtggtgggaacatgtttaaccagcttctggcatccgggaaaattaccaagacggcaatcaacgaagcgctacgccgcatgaagaaggcgggcatcagcaaacctgaactggaagcattcttcaatgagatcctcgaaggcaaaaacaaaagcggtctggcgttctgtaccgatgaagaagcgctgaccatcaacgctgtactcagcggtgtccttgtgcagtcagggcataagaagttatacgctcttattgaagatcgttatatcaagcgcctgagcaaaaaggcgatggcaagagacctaaatgaaaagcatcctgaatggtgtttgcgaacctgtgaaagccggattgatgtttggctaaatgtagcagaatcgatgctatacaagccaatgtgtgacgcattcggcacaaatagcgacagattctacttgaatagttgcgcggaaagtgcttaa

SEQ ID NO: 383109 - DNA, 990 bp, Salmonella enterica
gtgagggcattactgacacctgaagtggcaccgatgaccggggtagtgatatttcgcccaggcagtgaactgatgcatctgttcagacgtgggcgtgttcttatcgagccacaggcagagtcaatggctgagttaccttctggcatgctgccggagactactcaggagcttcagaacgatccgttaatgcgtgatgtattcgaaaatcagaaggtcatacatcgtgctggtggactcaattcactggattcctggctcgaaagaaaactggaatgtcagtacccacacagcgagtggcacgatcgcaactacaccatcacccggcatgcgcctggctcaatccgcacgtgctggggctgcgacttaaaaattcgtgatcagttcactgaaggtctggcgggtatagcacgtgaaaacctggtatcctggctactgaaggttgtaaacggccaattaggtttcagtgaggaccacattctgacgctgccggagttttgctggtggatggtaaggaacgacctggttgatgagatacctgaagccgtagcgcataaagcccttcgtctgaagaaagagtcacaccagtcggtaacacgtgaaagcgatattgttccgacattacctgctcaacaactggtacaggagaaagcgaaaaagatagtggcgatgaaggtagacccggagacgccggaatccttcatgcttaaacccaagcgtcgccgctgggtgaatgagaaatacacgagatgggttaaggcccagccgtgcgtctgctgtaacaagcaagctgacgacccccaccacctgattggccacgggcagggtggaatgggtacaaaagcacacgacctgtttgtgattcctctgtgcagagagcatcacgacgagttgcatgctgatcctgtggcatttgaagcgaaatacggtgaccaactggtcctggtgtttcgggttatagatcgtgcgctggcaatcggcgtactggcgtaa

SEQ ID NO: 383110 - DNA, 726 bp, Salmonella enterica
atgcaacagatgagcataacagtaacgtgtccgacccatcatgcagcgacagtagggcagcagatcaccatgtccagccgtgagattgcgaagctggttgattcccggcacagcaatgtctgcgtaacgatagagcgccttatgaattccggtgtgattggagggtatgctgcattgcagtacacccatccccagaacgggcagacataccatcactacgaagtgaacaaacgagacagctatgtaatcgttgctcaattatcgccggagtttaccgcccgacttgttgaccgctggcaggaactggagagcaacggtggaatggttgttccccgttcacttcctgaggccctgcgccttgctgctgatctggcagaacagaaacagcgcctgagtgaagaactggcagtagccgcaccgaaggccgagtttgtagatcgttatgttacggctactgggtcaatgacattccgacaggttgccaagctgcttaatgccaaagagccggagtttgcgatgttcctgattgagaacggcatcatgtaccggcttaaccgtgttctcacgccaaagagcaagcatatcgaggctgggcgcttcgaggtgaagacaggaacgacaaaccagacaaattacgcgtttaatcagtcccgcttcaccgccaagggtgttcgctggattggcggcctgtgggcagagcatattgctaaggggcaagtagcgtga

SEQ ID NO: 383111 - DNA, 390 bp, Salmonella enterica
atgaaattaacgttgccattcccaccaacagttaacacctattaccggtcccctgaccgtggagcgttaaagggtaagcatctgataagcgagatggggaggaagttcaagaagaacgtttatgcctctgttgttgagcagtacggcggtataccgaaacccgttaacgtcaacgttgaggtaaacatagttcttttcccgccagataacagacggcgggatctggacaactacaacaaagcgctgttcgacgcactgacgaatgccagagtttgggaagacgacagtcaggttaaacggatggcaattgagtgggggccggtagtaaagcctggaagggtagagataacgatcagtcgatttgaaaccgtggcgggtgcagccgcctga

SEQ ID NO: 383112 - DNA, 321 bp, Salmonella enterica
gtgaacaaacttaccgtgagacaaagtgaagtacttggttcgatcgtgaactatcagcgccggtttggattccctccaacgatatgtgaactggctgggctgattggttgctcatcaccgaacgcagcagcggagcatgttaaggccatagcgaagaagggatatatctcagtagcgcctggagtttccagggggatcactgttatttcaggaaatgatgaggaagatgcgatatcgatcatcaagtcactcattaacggtgatagtgattcaagagaacgcgccttgtcatggctggaagcgaggggtattcagcaatga

SEQ ID NO: 383113 - DNA, 219 bp, Salmonella enterica
atgcaggacgttgaagcacgtaacgcgcttcgtaacatcgccagaagatgcaacgaggaaataaccgctaaacgcaaggctaaccctggtatgaattgtgacgaaatagccagaccaatttttaacagtgccatggggatggttaagcaacttggctttacgccatcacatttgtatctcgaagtcgggattctgaacaagcggattaaggagcgctga

SEQ ID NO: 383114 - DNA, 669 bp, Salmonella enterica
atgaactattcactgatttacgccgatccaccgtgggaatacgggaacactatcagcaatggcgcggcggaaaaccattacggcacgatgaaactcatcgacattaaacgccttcctgtctgggaactggccgccgaagattcagttctggccatgtggttcaccggtacacatacccgtgaggcgatcgaactggctgaagcatggggttttaaggttcggaccatgaagggattcacctgggtgaagttcaactcactggctgagcagcacatcaacaaagcgcttcaggctggtggagtagaggacttttacgacttcctcgatctgttgaatgctcagacccgaatgaacggtggtaactatacccgcgccaacaccgaggatctgttaatcgccacccgtggtaaagggctggaacggttaaacgcgagcgtaaagcaggttatatacagcccactcggcgaacacagccagaagccagcagaagcgcgttaccgcttggagaaattatatggcgatgtgtcacgcattgagctgttcagccgctgcgcggcccccggctggcaccactgggggaatcaggcagaacaccctgatgtaatcatgtttcctggttacgttggtaaacctgttcctctgctggaggtagcttatgcaggacgttga

SEQ ID NO: 383115 - DNA, 444 bp, Salmonella enterica
atgagcattctgaaaatggtccagatgtttattgccatgaaccccggctcaacgaccagggacatcatcgaaggtctgacccaattcagccaggacaggctccaactcgccgtttgccgcctgtatggttctgggcttgccacgcgtaaacgcgacggtcgccaattccgttactacgcggaaccgccagcagattgccactttgaggtgtttgaaccaactgctgaagtcggcgccctgatggaaacggcgaaaggccttgagtcgaaaggtctctttcaccgtgccgcgacgatttacatggaggcattcagcgcatcagccattgaatcagagcgagcagcaatactggcagaacgtcagcgctgtcttggcctggctaaaccagcagttattgccgaagacggatgctatctggctggtcgattttcgggaggccgttaa

SEQ ID NO: 383116 - DNA, 921 bp, Salmonella enterica
atgagcctgttaatgacatcccggccaatagtaataaatcctgaccttgcgtacagcattggcctgaatgaggcgattgctttgcagcagattaactactggctgaaagaaacaaattcaggcatggaaagtgatggcgtccgctggatttacaacacgacagaacagtggctggagcagttcccgttctggtctgagtcgaccctgaagcgtaccttcacccgcctgaagacactcggcgtgctcaaaattgagcagctgaacaagtctcagcgcgacatgacaaacttctacacaatcaactatgaaagcgagcttttagatgaagtcaaagtgaccgaatcgaagaggtcaaaatgcgctgttccatcaggtcaaaatgacacgatggaagaggtcaaagtgacacactccatcaggtcaaaacgaaccgctgtcatcaggtcaaaatgcactgatgatcctacagagaatacaacagagagtactacagagattacaggtaaagactcttgtccggttgcgccgcaacccgaccgtgatgtgttgatcaccgatcaggcgaaaaaggttttggttcacctgaaccaggtcacgaactcacgctaccaggtttcaaccacgtctttgcaaaacatccgtgcacgtatcggcgaagggttcaccgttgcagagttgtcgctggtggtggattactgcaacgcgaagtggggtgatgacctgaagatgtctgattacctgagaccacagacgcttttccagccgtccaagttcccgggatatctcaagtctgcaaataactgggacaaagctggccgacctgaacgagtgaatggggaatgggcccgtgaagatggcatcttcaaacccagcttcaagaacactgattacagcgctattccaccagggttcagggggtaa

SEQ ID NO: 383117 - DNA, 339 bp, Salmonella enterica
atgaacagtgtaacaacacagtaccgcaggtcgcaacttattgctcgacctatgccgggtggaaaaggtccggcgcagtttgtgtatggggtaatggtatccggatgctttgagcctgtctgctaccagtttgccgattgggttgtaggtgatttcaacggccaggcggagaaggtcgaatgcgagcactcaacagacggtttaaagacagctacggcgtcccagtcagggttatccggtgggagccagaaactcaacgggttatatacctgcgcgacggatacgagcatgagtgcttcagtcctctcgaacagtttcagcgtaaattcagggaaatag

SEQ ID NO: 383118 - DNA, 465 bp, Salmonella enterica
atggtagagcaaacactgaaagaagtagtgaaagcaatgtgtaaggcgtaccccggaggccgtcaggctatggctggtgcgttaggcatgtcagaaacccaattcaacaacaacctttacgagaagaacggttgccgtttctttgaagtcaccgagctggaagcgatggaggacatttccaacacgtcattcgttgccgactactttgccaagcgccgcggtgctctgctggtggatgtaccaagcctggaagatctggaccgtgttgatttgttcagccgtgcaatgcgtacagcagctgcaagaggtcaggttgatcagattatccagaaggcgcttgaggatggagtgattgaaaagcatgaagccgaagagattctggaacatcaccgccgtcatctggcagcgcgtgaagaagaaatccgcgcgattgtggccttattcagccgccgtcaaaagaagtga

SEQ ID NO: 383119 - DNA, 198 bp, Salmonella enterica
atgcttaaaactgacgtcatagaacacttcggaggggtatcaaaaaccgcgagtgttttgggaatttcccatcctgcagtgtgccgatggggtgatgtgatccctcagaagcaagcttttgttatcgaacgtatcactaaaggcaagcttaaatacgatgccagcctttaccaaaagtctacagacacagcagcttaa

SEQ ID NO: 383120 - DNA, 660 bp, Salmonella enterica
atgaaaacagagatgaaagaccgaataagatcccggcgagtccagctcgatataactcagcagaccctggctaaacgccttggggtgagtagagtgtccgttaccaaatgggagaacggtacaactaagcctgacggagaaaaccttcaccaacttgcgatggctttacagaccactcctgaatggattctttacggcaagggtgatgagactcaagatgacaccaaagttatcccatacctgaagccacctaccgccgttcctattatctctgctgttcaggcaggggtatggactgatacctatgcatgctcaaggcttactgatgtgatttcatggactcaaaccacagcaaacgtttctgatgaagttttcggattggtagttcgtggtgagtcaatgactaacccacatggacttccatcaattccggagggctcaatcgttattgttgagccacattacggacaacttgatgacctgtatgggaaaattgtcgtagcaatacttgatggttcagcagaagcgactgtgaagaaacttgtttgggatagcccttactcctatctcatgccgcttaatcccgcctttaagccgatccccattgatggcaattgccgcattgtaggcaaagttgttcagataacgcagaacatctaa

SEQ ID NO: 383121 - DNA, 414 bp, Salmonella enterica
gtgcaaccaaaattcagcgccgtgcagggcgcatataacacggagaaactaaccatgacgaccacacagaacgtcactgagttacaaccacgcatgacaagagagcaactgatcgatgcagcccgtaaagcggcccctctccttccagttgcttaccgcgggatcatgacagaactggctaaccgccttgatatcgtcagcgtggcgctatgcgagtcaatggaacagcgtaaaacactggccatcgagaacaccgtattacgcgatgacgttgtctgctgggcaaaagaatgcgatcgcattgttgaaagacacacaaaaacacgtagcaaccttcaccttctggaagctcagcgcgaactgcgtgagttaactccggtaactaatgttgtgatgaatgaaggggctaagtga

SEQ ID NO: 383122 - DNA, 1041 bp, Salmonella enterica
atggccgccaactcattcaaacagatgtcccgtgacgggaccatcaagcgcaccgataccgggatgtttatcagccttgaccatatccacgtgcgtgaaggtttcaacaagcgtgaagacgacgaacgcacccgccaggcagatgacgacctttttaactatctgatgaacggtggcaccgttcctccactggaggttatcgcacgtgatgaaggtggtgtgtgggttgttgaaggccaccgcagacgtcgctgctacgcacgttgcgctgaagctggtaagccagtagaccgcattcatatcatgccgttcaacggtaacgatgtgcagcgcctggctcgcatcatgaccagcaataaccaactcccactttccgatattgaacaggctgctgttattcaggagcttcataacgctttcaaccagaccaccagcgagattgcaaagctggtcaataaatccgtggctactgttgagaagttgctcactctgagtaccgctaattatgacgttcagcaggaagttaaatctggtgccgtgtctgttgatgttgctgttgaccgcgttcgcgagtttggcgaacaggctggtgaagttcttcagcacgataaagccgtagccgccgcccaggggaaagcaaaggttacgcgcagttctatcgctccggaactcaacattaaaagtgctcgccgtttcgtggagttaatggccatggcgacgatcagcgatgaaggcgtattcactttgcaaggcacggcactggctgaagctctggcgataatcgacgaacacaaagccattgctgaagctcgcgaaacctatcgcctatcacagccaattcctacgacagagattatcgggaaagtgctgtatgtgaagctggacggtaaggaaatcggctcggcaataatttatcgcggtaagagcgtcacgctcgacctgggtgacagaaaaatcatcgccagccagtcaaaagcagtggcccacttcgttaaacaacacaaacttcagcaggtacatgccaatgcaaacgatcaataa

SEQ ID NO: 383123 - DNA, 699 bp, Salmonella enterica
atgcaaacgatcaataaccgtatgacagaaactcaaattgctgatctcttcagcctggcggttcagttgcaggttaaagctgaagaatcagatgatcgtgatactgcaatcttggcctactcaattcagaacgcatgctcaaatttaacggaatcccagcgcgagttccgtgcagcagacgcgactattcataatctggagctgaaactcacagacatggcagtacagctcgctaacgccgggagcaagtgcagggagctggcggcggaagtgcaagctgtgcgatgggcttgtggtcaggtatatgttaaagggtacaaccacggtcatctaaacacagttgataggcttccttacgcagatgaaaaagacctcgtaatgcgtggtggtgaggttctttgtgaattcaccgacccggatcattgcggcgtagctgctgacgctattctggctgaagtgcgcgcgcagtcacgtaacgagggcattaattacgctgccagccgcctcgctgctgcattcaatcatggcttcgttgataagccactggctgaagtctgcgacgtggtgcgaatgattcttgacaccaaagaagaactggaaaaatccacgctgccagctgccgatggaatatctggcgagtacgcagagaagtttctcgcagagttcgccgcccaacttcgcaaaggagccgcgctatga

SEQ ID NO: 383124 - DNA, 285 bp, Salmonella enterica
atgagcaatgctatcgatgcacatctcaccgatgaagtgatcaacgccgcatttgaaaataccaacttcgggcgcgacgactttcgcaccatactggctgaaaccgttatgaaacgagccgctggttatcactctggctggacggcgacgaccatttgtactcgtctcaaactgctgggtaagcatgagcgcccaacaaaactcggactgacgtttgcctttcaccactactaccgccagagcgtccgcgatgcgctgatgccaaaacaggaggcatcccaatga

SEQ ID NO: 383125 - DNA, 450 bp, Salmonella enterica
atgacagcactcaacaaacaggcgctgattgcaaaaatcaaaaagcagaccgagagctttgacacagttgtgctgcaagaggatgaagctaacgcgctgctggatgaactgaaatccgcagagaacaacctccttgatagcgaatgtcatgttgctgaactggaagaatctctacgtgataaacaggcgttacttgaggcgctggataattccctctgcgaactcctgcccggaactcagtacatggaccctccagatggtggcagtgttactccactggagcaggtacgcaggatggttgctgactatcgggagaggattgaagaactggaatcgcggacggtaactcttccagaagcattgaacagttacgctggcgtgaaaatctatcgcccgaatgatgttatcgaagctatccgcgccgctggcattggcgtgaagggggattga

SEQ ID NO: 383126 - DNA, 660 bp, Salmonella enterica
atgacaactaaccacccggcgcacggtcctgtatcactcgatcgcttgcaccagatacgcgaaatactcagcaaagcagcagcacaaagcgacggcggtaatctcggctacgcaatggctgatgctgtgaaggtgattgatgaggcgattacagcatttggtgctgatcctgttggttacttctacgcagagaaaccaggcgattggtatcaaatttcagatggagacagagtgccaagtcataggcgtataccgctttactccagacctcattcatcgccagtagtgaaactaccgaatgaattcattagcagtgagggtatcgttgttcagatagaaaagttgatggctgtgctagctgtgcatggaattcagtatgagcgcagaggtaacgcctgccgcgccgccatgcttcaggctggcaactctccggtaactcaggatggttggattccggtaatcgagaggatgccggaacgcgatgttgatgtgcaggtttactgtgctgacaagaaagagcagatggttggctacatggaacgaaatgaaacagagggatggtttaggtttgcatcgcttccgaatggtggtggcgtttattgcaaaccaactcactggatgccactgccagcagaacctcagcaggaggtgaagccgtga

SEQ ID NO: 383127 - DNA, 390 bp, Salmonella enterica
gtgatcaagggaaagctaatcagcagtcaacgctatcttgataaagcaaaggtcgctgaacgcgccatacgatttaagcgcttcattgtctctgtgtatcccgttattttgcgcggtcagcaatacaccatccttatggacggtcatcataactatgctgctgcgatgctcgccggggttgatcctgattatcgtccgattggtaaaaaagtgatgaaaataattagtacccttagcgaacaagaaagggaggcatttttcataaacaacgtgaccgattccgattactactttgtagagaatggtcaggtagttaaagaattattacttccagatacatcatgccgttttcaagcacatgcaaataatcagtggatattcggcggttga

SEQ ID NO: 383128 - DNA, 228 bp, Salmonella enterica
atgagcggacaaatccaacgttttcttactccagatgacctctatcaattaactggttatcgtcgcccttccctccagtgtaaagctctgagggatagtggggtattttttatcccacgtaaggacggcagaccaggaacaacatgggatcatgtatcaaacccggttggccttaagttgatagtgagtaatccagaggaagaagagccaaactttaaggatatgtaa

SEQ ID NO: 383129 - DNA, 1011 bp, Salmonella enterica
atgtctagagctcgcaaaaaccccgatgataactggatgcctccccgcgttcgtcggggaaaatctgcttatgagtttcgtacaacagatggtcgtaccgtcaggttgtgcaatcctgatctaacaaaatcgcaggtatgggcagcttacgaaaacttcataaacgatttaaaggttggtactaacttcaacgcactttgtgaagagttctttaattccggcgatttccacgagttagcaactgaaacacgtaaagactacagaaaatacggttcaaaggtaaatgttgtcttcgggaaaatgaagccggataacatcaagcctgagcacatcagaaaatacatggataaaagaggtgttaagagcagagttcaggcaaatcgcgagaaagcatttatgtccagggtgtttcggtgggcatacgaaagaggaaaggtgaagatgaatccttgccagggcgttaagcaatttaaagagcaggctcgtacccgttatattagcgatagagaatatgatgcactttatagcgttgcttctgctccagtaaaagttgcaatggaattggcatatctgtgttgcgcccgccagggagacattcttgacctcaaaaagagtcaaatattgagcgaaggaattttaattcagcagagtaaaaccgcagttagccagatcaaggcctggacaaaacgtctggaggatgccgttaatcttgctgacagcattcctctcaacagcgggatggtcagtatttttgtcatccaccagccatcaggtctgcgatacacacgcgatgcttttaatgcgcaatggatgaagacaaaaaaacttgctgctgagaaatatccagacctagatttccagttcactttccatgatctaaaagccaaaggaatttctgatcttgaaggtacgctgagtgagaaacaagaaatttcaggtcataaaaacgcctcacaaacagcgagatataatcgaagaatttcagttgttccggtcgttggagggcagtaa

SEQ ID NO: 383130 - DNA, 705 bp, Salmonella enterica
atgtgtgttgtcacagtcaatacatctcgtaataatcggcgcatgaaaacaccgtggaatgagctggcgaaagccagaatgaaacaaataggcctaacccaggataaacttgctgaagctctcggtaagactcagggggcgataggtcattggcttaatggacgccgcgaaccaagtattgaagatattgcagcgatcatgaagcagctaggattgaaggagctagtattaagttctgatgggatggttgattatccagactccaacctgaacaatgtttcaagtcctcgtccacacacagaaataaggagatttcccctgattagctgggtgagcgcaggtaactggtgtgaggctgttgaaccttaccaactccgagaaatagaggtgtggcctgagacaactgcacatgcaagcgaaaggtcattctggctaaccgttcgtggcgactctatgacatctcctacaggattaagcataccggaaggaatgcaaattcttgttgatccggctatcgaaccgactaatggaagactcgtggtggcaaagcttgagtctgaaaacgaggcaaccttcaagaaatatattgttgacgctggacagaaatatcttaaaccgttaaaccccagctatcacatgatccccataaacggaaattgccgcattatcggtgttgtcattgaagcaaaatggcaaggcctctaa

SEQ ID NO: 383131 - DNA, 216 bp, Salmonella enterica
atgagcaatcttcggaaaatccgggaaaccatgaaggtatcccaggccgttttggccgaaaaggttgggtgtactcagggagcaattggtcattacgaatcagggcgacgccatccggatttgagaatgtgccgccagctcgtagaggcgctcaacagttttggcgcgaatgttcagctagacgatgtgttcccacctgaacttaatgctgcctaa

SEQ ID NO: 383132 - DNA, 834 bp, Salmonella enterica
atgagtaatcttgcaacagttacaccgataaaacctcatctggaggttgtggagcatcgcgtggcagaactcgacgatggctacacccggactgcaaatacactgctggaagctgtcatgctttctgggcttactcaacatcagctactgattgttatggctgtgtggcgcaagacatacggttataacaaaaaaatagattggatcggaaatgaacagttcgctgaactcactggcatggcgccaaccaaatgttctaccgccaaaaacgagcttatcagaatgggggttctcactcaggtggggcgtcaggttggtatgaataaaaatatttccgagtggaagacgaaggttaacggattcggtaaaacatttaccagatcggtaaaactaaccttcaccaaatcggtaaaaaccaatttaccgaatcagtcaaacacaaaagacaatatacaaaagacaataaatacaaatacccccttaccccctaacgggggcggcaatgggcaggttaaacctgaacgtcgcaaggcagaacgaatcgactatgaatccttcctgaacgcctacaacaccgaagttggtgacagacttccacatgctgtttcggtcaacgagaaacggaaacgccgcctgaagaaaatcatcccgcaactgaaaacgccaaacgtggacggtttcagggcgtatatcagggcgtttgtgcatcaggccaagccgttttacttcggagacaacgacacaggctggacggctgattttgattacctgctgagggaagattcgttaacgggagttcgggaagggaagtttgcagacagggggattgcatga

SEQ ID NO: 383133 - DNA, 294 bp, Salmonella enterica
atggacgaatcaagaaagcaacgcgaagaattcgaaaaatggtgggatgaagaaggttgggataagaaactctcaaatgttcaaggggtaatgtttaaccgaattaagacagggatgttcactgcatggatagcatctcgcgaagctattaagattgagcttttggatattaatcagtatctagctgaactggagaacaaaacgctaagtctggatttccgtcgcctggctgaaaacgtccgtgccggagatatcacaacaatccgcgccgctggaatcaaagtcaaggagtga

SEQ ID NO: 383134 - DNA, 189 bp, Salmonella enterica
atgagcgcatacgaagaaatcatgttagccctgcgattctttttcgatgtggaagaagatgaaaacgtaaacgagattatcgggcaagaccatgacccgattgggactattgcagccgcacttgacgattacaggagcgtgggagatgaagcaaacatacctgcttcgcaacgaagcaatcagaaataa

SEQ ID NO: 383135 - DNA, 606 bp, Salmonella enterica
gtgctggcgagcctcggtgggctggtttcctgtgcggcaaaggttcatttcaaagaagaacgcaacgccatgaatgaattaattgcgaatcatgacttcgactttcgccagttagttaccgcagcagaaggtcaaccggtaactgacaccttccagattgctaaggcatttggtaagcgtcacgcggacgtattgagggcgctgaaaaattgtcattgctctgaagatttccggagagcgcatttttgcgtttccgaaaaaatcaataacttagggattttcgataagaagcagatttactaccgcatggactttagcggattcgttatgctggtcatgggatttaatggcgcaaaagccgacgccgttaaagaggcctatataaatgcctttaactggatgtcagcagaactccgtaagtacagcgaaagttatgaagcagaacgcaacgccataatgctggagtatatgaaagagaaggatgtcgccagcatgtctggccgcctgctcaatcgctggggaaaaattaagaagcctcagctactggcgagaattgaacgccttgaacagcacgggcaaaccgtaatcccggggctcactaattaa

SEQ ID NO: 383136 - DNA, 261 bp, Salmonella enterica
atgtcagatatagagcaaaaaattgcccaccttgaagatattatcgagaagatgcaattggatgcacacgcatctcgtgttgctattgcggttttatcaacctctttaaatggcttaatgggtaaggatgctaagctaggtgatatgtatctcaacagcattgctcaggcggatagcggcgagattgataataaagtttcagatggttacatagccaaactgaatgagaaggttgcagccctactgggcacgcaacaataa

SEQ ID NO: 383137 - DNA, 2355 bp, Salmonella enterica
ttggccaacgacattattacccagcttcaggcgcgtaatgagacgttgacgcaggcaatagcccgttacggctcactcaacgccagcacgctgcacacgctcagctttgagcaaacaaaagtcacccggcttacgcaacagctcgctaactccgcccttcgccgggaagagaacgataaacagcgcgccgggttgctggaaaaaacacaaacgttcgccggacagctcggcaagctcctgaacgttgagactcccgactggaagctgccttacgaatttcagggcaacatggtcgatatggcggcgaagggcggcatggataacaccgcgcgggacgccctgagcctgaatatccgcgactggagccttgatttcaatcaagatcaaaaagatctgcaaagcaccgccgccacgatgatcgaaggcggcgtcagcgcattgcaggatcttagccgctacatgcccgatatcgccaaagccgcgaccgcctcccgcgacagcgcgcaaagctgggcgcaggcggctctggccactcgcgacaaactgaacatcgcccctgacgacttccgttttgcgcaaaatatgctgtacagcgtggcaaaaagcggcggcggctccgttgcagagcaaacccagtggattaacgcctttgccggaaaaaccggcgctcaggggaaagaaggcattgcggaactgaccgcaacgatgcaaatcgccatgaaaaatgcccctgacgcaggcgcggcggcagcgaatttcgaccatttcctgaaatccgccttctcgaaagagacggacagttggtttgcccgccagggcgtggatcttcagggatcgctgctggagcatcagcaaaatgggatcggcgtgacggaagcgatgacccacatcgtgcagatgcaactggagaaaatgaacccgcagatcctcgacaccttcaggcaaaccatgaagattgaggatctttccgcgcgcggcgacgcgctacaggccatggtggagaaatttaacctcggcgcgatgttcggcgatgcgcaaacgcgggattttctcgccccgatgctggcgaatatggacgaatatcgccagctaaaagcctccgcaatgcaggcggcggggcaacatgttattgatgatgacttcgccgcgaaaatgacatcgcccggagaacagaccaaagcgttacaactttcacttaacgatctgtggctgaccgtcggcctggaactgatgcccgccattggcgaactggcgcaaagcatcacgccgctggtgcggcagttcagcgcctggctgcgggaaaatccggcgctggtgcaaggggtcgctaaagtcgttagcgttatctggctgttcaacggggcgctgaatattctcaggctgggagcaaacctcattgcgtcaccgtttattcgcctgatcgatatcttcctgaaggtcaaagccggtctggcgctgggcggcggcagtcgcgcgctgtcggttctgaaatcgtttggcaacggtgcgaaaagcctgacgatgctgctgggaaacggcctgataaaagggctacggctggtcggccagacgtttatctggctgggtcgggcgctgctgatgaaccctgtcggcctgactatcaccgctatcgcaggcgccgcctatttactttatcgctactgggaaccgatttccggtttctttgccggagtctgggagcgcatcaaaaccgcctttgacggaggcattgccggcgtcacgcgtctgattctcgactggtcgccgctggggttgttttaccgcgccttcgccggcgtactggactggtttggcattgaactccccgccagtttcagcgaatttggcggcaatattctcgatagcctgatcaacggcattctgaatgcgcttcctttcctgagcggggcgattgagaagataaaagcgctgatccccgactgggcgaaaagcgcgctgggcatcagcgctgaaatgccgtctgtcgccgccgccgtccccggtattgccggaacaatggtcgcgcaacaggccagcgcgccgctggcatcgggagcgaaagcggtgacaacctcggccaaaacgatggcctcgccgcagcctgtgaagacgaaaagcgccgccacgccgccgacgccagccgcgcttcccggcaaatccggcgggaaaccttatacgctgccctcccgcgcgcaaagcaacgtgcaggtacacttttccccgcaggttaccgtgcagggaagcggcgcgaatgccgccaaagatatcaacaacgtgctgtcgctgagcaaacgcgagctggagagaatgattaacgatgtcatggcgcagcaacggcgccgggagtacgcataa

SEQ ID NO: 383138 - DNA, 1428 bp, Salmonella enterica
atggcagctaattacctgcacggtgtagagaccattgagatcgaaaccggcccacgtccggttaaggcggttaaatctgcggttattggtctgatcggcaccgcgccatgcggcccggttaaccagccaacgctgtgcctttctgaaagcgacgcggcacagtttggcccaggtctggcaaatttcaccatcccgcaggcgctgaaggcgatctacgatcacggcgcagggacggtcgtggtgattaacgtgctgaatccggcggtacacaaaagtaccattcccagtgaaaccgtgaaggttgatgacaacggtcagattcaactcaagcacggggccgtgcaaacgatgaacattggccgcagcacgaacgccggaaacgcttatatcaaaggcaccgattacaccattgatatgctgaccggtaaaatcacctgcatggggaccaatctgaaacccggcgttcaggcctatgtaaattatacttacgcggaccccaccaaagtgactgccgccgatattgttggcgcggtaaacacggcgggtgaccgtaccggcatgaagctgttacaggacacctggaaccagtttggtttttacgcgaagatcctgattgcgccggtcttttgtacgcaaaactcggtcgccgttaagcttatcgctcaggcagaagcgctgggagccattacctacattgatgcgcccatcggcacgactttccagcaggttctggcagggcgcggtccgcagggggcgattaacttcaataccagttccgatcgcgcgcgtctgtgctatccgcacgttaaagtgtacgacagcgcgacgaacagcgaagtcctggagccgctctcctctcgcgccgctggcctgcgtgccaaagtggatctggaaaaaggcttctggtggagcaactccaatcaggaaattcagggcattaccggcgtagagcgctcgctgtcagcgatgatcgacgatccgcaaaccgaagtgaatcaactgaatgaaaacggcatcaccaccatcttcaacagctatggctccggtttgcgcctgtggggcaaccgtaccgccgcctggccgacggttactcatatgcgtaactttgagaacgtgcgccgtactggtgatgtgattaacgaatcgattcgctattttagccagcaatacatggatatgccgattaatcaggcgctgagcgacgcgctaaccgaatcggtgaacacctggggccgcaagctgattgccgacggcgcgttgttgggctttgaatgctggtacgacccggcgcgtaacgaacagactgaactggcagccgggcatctgttgctgagctacaaattcaccccgccgccgccgctggaacgtctgacgtttgaaaccgaaattacctctgaatatttagtttctctggagagcaatcgctaa

SEQ ID NO: 383139 - DNA, 306 bp, Salmonella enterica; identical to SEQ ID NO: 14020

SEQ ID NO: 383140 - DNA, 360 bp, Salmonella enterica
atgtttatttccctgatgacagggcaaacagaaacaacggagataaaaatgaacatgcgtaatattattactgcacgctctgtaccggataaaagcgtatcagatgattttatgaatgctgttctcagtaactgcaccacaagaatcgtacttcctgcactgaaggaattcggttctgaatcattgccgcacaattttaatatggcagctgtcggtgtgatgaagaagggtatgtcgatgagcttattttcttctccgggaaatacagtagtctccggacaaccctgtgcaggaaaaacaaatctgacagtagagttaatttctgctgttgtggagagtaataaaaaaggagaagggtaa

SEQ ID NO: 383141 - DNA, 567 bp, Salmonella enterica
atggcgggtgatgcactgacattccgtgtggcgtttgtcgttcgctggctgctgtgggtcgtcaggtttgtggttatctggccgctggccacaatggccctgatggctctgtttgttttatggaaggacaacaccacgccggggaaattactggttaaggagattaacttcgtaagacaaacagcacctgccggacagttcccggtcagtgaatgctggttttcttcctctgattcttcaggcagatcagaaatacaggatatctgccattaccgcgcggctgatgctgcagattatgtcagggagactgaccggtcactgatgcaactggtcaccgcattctgggcaacactggcactgatgtatgtctcgctggcagcgatcaccgggaaatatccggtgcgacccggaaaaatgaaatgtgtccgggtgggaaccgcagatgaacatctgaaggaagtttatacggaagatacttctctgtcggaaaaaatcaggaaatgccatgtttatttccctgatgacagggcaaacagaaacaacggagataaaaatgaacatgcgtaa

SEQ ID NO: 383142 - DNA, 240 bp, Salmonella enterica
atgacagcaaaatcattggttgttttttgtttctatgcattagggtataaacatataaatatagctaaagaattaaaaatcacagaagtggcttctaaaaaaaggattaaaaagattaatgcggatatcaataaaagattgggttccttcgatttgttcaggaataaatgtattaagacaggtgtaatgtacgaaatattaaatgttttgagtgaatatatgggtgttaaaaaaatgtaa

SEQ ID NO: 383143 - DNA, 135 bp, Salmonella enterica; identical to SEQ ID NO: 36113

SEQ ID NO: 383144 - DNA, 180 bp, Salmonella enterica; identical to SEQ ID NO: 39702

SEQ ID NO: 383145 - DNA, 384 bp, Salmonella enterica; identical to SEQ ID NO: 15231

SEQ ID NO: 383146 - DNA, 435 bp, Salmonella enterica; identical to SEQ ID NO: 8357

SEQ ID NO: 383147 - DNA, 222 bp, Salmonella enterica; identical to SEQ ID NO: 8358

SEQ ID NO: 383148 - DNA, 513 bp, Salmonella enterica; identical to SEQ ID NO: 7668

SEQ ID NO: 383149 - DNA, 1134 bp, Salmonella enterica
atgcacttttatgtggatgaaacaggccagactggccgaaacctttttgacaaaacccagccagtcctctcctacggagtgctgtcgtctgatgctaatctggataaggttgctgaagcggatctagccgtaatacgcaaaacgcttggcgtgcagcgcctgcacgctgcggaactgggcttgcaccgcctttctgaccttgtagatacgctgctggttctgcagaaaaagcaccggatacggtttgacatctggcaggtagtaaagcgcgatcatgccattatttcgttcttcgaccaggtatttgatcagggaatgaatccagccgtaccctggtctgcatactggacccctctgcgctaccccctgctgctgaatctggccagcctgtttgatgatgaacttgcttcaaacgcatggacggcaaggctggaggcgcatgatgagcgtgcgtcggaacttttttgtaccgtcagtgatgaactgatcagcaggacggcagccagcgcgctggaccaccggtcgaagcagctgatcaccgatgccctgaactgggcgtcagccaattttgaacagttgggctataactgtaaaaccaacaaggaaaggctgcggattatgcccaatatgattggctttcagtccgtattgcacgggatctgttcccgactgggggcaccagaaagaaaggccagtatcattgttgaccagcagtcacagttcaacaccacccagcgtgaacttaacgagttttactaccagatacgggatatgccctgggaactggggcccggattacctgttatgaacatgaaaaatatgccggctgaaccacttgtattccagtccggtaccaagagtgcaggtctggagttggtagatatttatctctggacattcaagcgattcatggaagacaaggcgctgacaaagccactttcccgccttgtttataccaatctgaaaacagccaggaccaacagcgtgtcaatccagtcggttgccagtcgatttaaggaactcctgggtaaactcccggtaccaagcgcagagatcatgaggcaggcgcaggagctgcgggactttgatgaagccagacgcatgccatatgtggtgtcgggatcacccgactga

SEQ ID NO: 383150 - DNA, 774 bp, Salmonella enterica; identical to SEQ ID NO: 7658

SEQ ID NO: 383151 - DNA, 501 bp, Salmonella enterica
atgggaaattattcagattttgagaccgattttgttcagcgaacactggcgcttatcgatcaatataacgaaatgattgaggtgctgggcaaaccattcagggagcagtacaactacacgttgaccctgaattgcctcctgggtcttatcgtgttaccgaaagagagagcgctctctttcctgcttgccgaccgtttaacgcggcaacttaaagctgaaatgggattacatgagtcacagctgcccggaccggaaatgaacctgcgggagttgatccataagatgcggaattcagttgctcatttctgcgtccaggtagagtcagccagcgatgcacaccttgtagactggattgttttcagggaatctcagaaagatggagaagtctacgccagcttcagcgctccggagcttttaccctttctgaaatattatgcgaccctgctgctcgacaatatggcccgccgtcgagcccccgatgttaacatattggatttgtaa

SEQ ID NO: 383152 - DNA, 417 bp, Salmonella enterica; identical to SEQ ID NO: 7661

SEQ ID NO: 383153 - DNA, 249 bp, Salmonella enterica
atgcaatgtcttaaaaatgacggtgggtcacacaagttcatcagacaggtgctcatgacgttcgggcatcaggattatgccgctttcctcacagagaggaattatcgtagcattccccgtagtgatgccatgtggcaactggctgtccagctgggaaatagtggatttatcaggccgccgaaacttactcacgctgatacacgtattcgtatagagcccttttttaacgctgaaaatgaatacgactga

SEQ ID NO: 383154 - DNA, 432 bp, Salmonella enterica
atgctggacgcctcccatgtggtggtcttctgcgccaaaaccgcaatggatgacgcatggcttgagcgcgtcgtcgatcaggaagatgctgatggccgtttcgctacgccggaagctaaagcggcaaatgataaaggtcgccgctttttcgccgatatgcaccgcgtctcgctgaaagatgaccaccagtggatggcgaagcaggtttatctgaacgtcggcaactttctgctgggcgtcgccgcgatgggtctcgacgccgtccccattgaaggtttcgacgccgaggtgctcgacgctgaatttggtctgaaagaaaaaggctataccagtctggtcgtggtgccggtcggccatcatagcgtcgaggatttcaacgccgggctgccgaaatcacgtctgccgcttgaaaccacactgacggaagtttaa

SEQ ID NO: 383155 - DNA, 168 bp, Salmonella enterica; identical to SEQ ID NO: 30089

SEQ ID NO: 383156 - DNA, 585 bp, Salmonella enterica
atgtactttattaattctctcaggcataagaaattaactgaaatactgggaaaaatatcttttcctgaaaaatccgggagcaatttgcttaaaccggaggcggtcagctgtaatttgttgtccctgtgtgtgctggcaccggtactctgtacacccagaaagctggcagaagtctccagggagatcatcgtggcgagtgcgcaggaaattgcatggacgccggggagcagtcgtattgatggtcatcagggcgaaaatattacctggtctctgtcatcgcagtctcctgccgataagtatgatctcatcaataaaacgtcccgtgtttctcctgacagtggccgtttttatgaaccggacacagttctggatcaccgtgaacgggtacgcctttttattcagatccagtttccgcacgggagtgactggtctgaagtattgcgcctgactgacattgttacagagaaggtctcttccggcagggctgcaggcgggtatcaccaccggcatacagggtacacctggtctgtttcccacatcatccttttctgccctgttccagattttcccggagtttcatcatga

SEQ ID NO: 383157 - DNA, 2190 bp, Salmonella enterica; identical to SEQ ID NO: 20873

SEQ ID NO: 383158 - DNA, 255 bp, Salmonella enterica; identical to SEQ ID NO: 8324

SEQ ID NO: 383159 - DNA, 159 bp, Salmonella enterica; identical to SEQ ID NO: 5998

SEQ ID NO: 383160 - DNA, 507 bp, Salmonella enterica; identical to SEQ ID NO: 5997

SEQ ID NO: 383161 - DNA, 762 bp, Salmonella enterica; identical to SEQ ID NO: 5996

SEQ ID NO: 383162 - DNA, 1941 bp, Salmonella enterica
gtgcgtaacttccgtaactctttgttggttactctctttggcttgtttataagcatgagtgtctgggcgtcgacgaattatgcgcctttgattgaagatatcgagcaacgtcttgataaaacagcggaactttatcagcaacagcatgccgacgaggcgcgccgcacggtacaaatggcctattttgaggtgttcgagaacctggaagggccgatccgcatcaacatttccgcgcgcaaaagttacgagatggagagcgcattcggcgagatccgtcgaatgattggcgagaaaaaaccgctcgctgacgtccaggcgcgcattgactggctgaaagccgcactgcgcgaagtggaaccggtgctggatggcggacatcgtctggtggccgaagagcagcacaacgcgctgtccagggacgacattgccgttcactggcaggagagtttcaggacgatcgacgatctgctggcgcaggcggtcactgaatatcaggccgggaattacagcgttgccagtcagcacgttcaacaggcgcactatcagggctttaaaaactctgagatggagatgtccctcagacaaaaccgttctgcaaaagatgccgcctccattaaccaacaattctcatctctgattgcgctgaccgcgcaacctgaccatctcaacgatgtctcctatcaggtcactacgctgctacaggatatcgaggatatcttacccggcttgccaaccacccgtgacgatcagcaggttgccgcagcgcaaagcgcagacaacattccggcggcggacgagggaaataaccgcaccgactgggctgaggtgacgacgggaattaaccagagcattcaggacgcgatagcgcgctatcagggcggcgatgcgaagaatgcgattctggatatccaggatacctacttcgaccgcttcgaagccagcggcatggaaaacaaaatcggctctcgcgattcggcatttaaaaccacgctggaggcgtattttacccgcctggtcagtctgatgaaggccggtcagccggttgagcgcctgaatgcagaggccagcgcgctgacgcaggatctgcaaaaagccgtgacgatgctgggcgaaggcgaagaaacccagtggagtctgctgctctatagtctgatgatcatcgtgcgcgaggggctggaagcgctgctgattgttgcggcaatcgtggcctacatggtgaaaaacaaccatcaggataagctgccgcttattcgtcagtcggtaattgtggcgctgatcgccagcgtcatcaccgccgctatcttccagatgctgtttactaactccggcgccagccgtgaactgctggaaggcataacgatgctgattgccgtcgtgatgctgttctttatgagttactggctgctgtccaaagtggaagcgcgccactggaaagcctggctggaaggcaaactgtctcattccctgtcgcgaggctccctggtcggactatggctgaccagcttcctggcggtgtaccgcgaaggggcggaaacggtgctgttctattacgctctgattggcgatgcaaacacggtatccggccatatggcgattggcgccggttttgtgattggctgcgtggtgctgctgctcgcctggctggtgatgcgttactcagtggtgcgcctgccgctgaaacccttctttatgtttaccggcagtttcatgtatctgatggccttcgtctttgcgggcaaaggcgttctggaactggtggaaggcaaactgttccagcctacgttgattaacggcttccctgaaatcagctggctggggatttatccctacgtggaaacgttgttaccgcaggtcgtattgctgctcgcggcgctggtggcgctgtgggtgatgcggcgcaaaagcgcggttcccggggagacgataaaaaataacccataa

SEQ ID NO: 383163 - DNA, 528 bp, Salmonella enterica; identical to SEQ ID NO: 5994

SEQ ID NO: 383164 - DNA, 1380 bp, Salmonella enterica; identical to SEQ ID NO: 5993

SEQ ID NO: 383165 - DNA, 1284 bp, Salmonella enterica; identical to SEQ ID NO: 5992

SEQ ID NO: 383166 - DNA, 1131 bp, Salmonella enterica
atggccgctaaacgtaccatgctctggctgctggtgtggcgggcgctgcgtctgcgttttcagcgggtcagcgtggtgtttgccgcgctgatggtgggggcgaccatcgtgacggcgctttctgccgtctggttcgacattaacaccaaaatgagcgaagaactgcgcaccttcggcgcgaatttttacatcgggccggggcacggttccagtatgccgcagcaggagttgcagagcattctcgatcaggcgccgcaggggctggtgcatggcgccagtccgtggttgtacggcatggcgcgtaccgagctggaaaaagtggtgatggttggcgtgtggttcgagtcgctgcaaaaaatggtgccgtactggcaggtcaccggtagctggattggcgtcagttttgacgaccgtaatgcgatgatcggcgtcaaactggcggaacgcctcaacgtgcagccgggcgacagcatcacgctggtggatcacaatcagcgtaagaatttgcagattaaaggcattgtggagtctggcgatgcgacggacaacatgctgatcgtcagcctcgacgtggcgcaggcctggctgcatcagccgggcaaaatcagccacggcttgctgagcgtcagtaacgatgtcggccaggtggagaactatgccagccggttgcaggcgcagtatcctgacctggagattcgtccggtgcgtaaggtctctgcttccgaagggcaggtgctggataaaattaaaggtctgatgggactggtctcgatcgtgattctggcgctctcttcgctgtgcgtgaataccacgctgatggcgattgtcggcgagcgggcgcgcgagtttgcgctgcaaaaagcgcttggttccagcaacggcgatatcgtgcggcaaattctgctggaaaccagcatcatcgcgctggcggcggtggcgtgcggctgggtgctgggatatttgctggcgcaactgttgggattaacggtgtttaatgccgccatatcactgcgtctgccggtgttgcccattactctggtgttgtctttactggtcgccattctggcggcgattgttccggtgcgacgcgcggtaagcgtcgagcctgctaaagtgctgaaaggagagtag

SEQ ID NO: 383167 - DNA, 696 bp, Salmonella enterica; identical to SEQ ID NO: 5990

SEQ ID NO: 383168 - DNA, 486 bp, Salmonella enterica
atgcgctggcataatgtgctgttactcgcggcggcgatcctgataagcgggtgtaaagaagaaaagctggcggtcggggcaccggccccggcgctggcggtgtttgatctgcaaggccaggagtcaggccttgaacgctggcaaggaaaggcggtgtacctgaatttttggtctgcgggatgcggggggtgcctggcggaaatggacacgctggaagcgctgagcaaaaaatggggcgataaagtggtggttgtggcggtcaataccgaccctgaaacggtcaggatcaacgatctgctggcaaaacatcagataacctatccggtggtgcgcgatcagctcaacattacccaggaacgttatcaggtgatcggcacgccgacctccgtactgattgactccgaaggacgcgttctggagctacaccagggtatgcgtaagccgcctgagttagaggccacgtttgcgcgcctggcggcgcgatga

SEQ ID NO: 383169 - DNA, 486 bp, Salmonella enterica; identical to SEQ ID NO: 5988

SEQ ID NO: 383170 - DNA, 555 bp, Salmonella enterica
atgaaaaaattgatactcgccgccgctgtggcaggggctgttttattgtcgtccgccgcgcaagcgcagacaacgccggaaggttatcaactgcaacaagtgttgatgatgagccgacacaacttgcgcgcgccgttggccaataatggcagcgtgctggagcagtccacgccgaatcagtggtcggagtgggatgtgcccggcgggcagctcaccacgaaaggcggtgtgctggaaatttatatgggccactacatgcgagaatggctggcggagctggggatggtcacgtcaggcgaatgcccgacgccggacacggtatatacctatgccaacagtctgcaacgcaccgttgcgacggcacaattctttatcaccggcgctttccctgggtgcgacattccggtacatcatcaggaaaaaatgggcacgatggacccaacgtttaatccggtgatcaccgatgactctgcggcgtttagccagaaagcggtgcaggcgatggaaaaagagcgcagccagatgcagcttgacgaggcactgttgcaaagttag

SEQ ID NO: 383171 - DNA, 960 bp, Salmonella enterica
atgggttcatgtgcagctccatcagcaaaaagggatgataagtttatcaccaccgactatttgcaacagtgccccttctggccaggtaccggcaaatactttggttcatttactaatggcatgatcaccggcgtggtccccatcctcgctgtctggctgttctgtatgggcgcctccattaaaatcagtgcaaccgggaccgttctcaaaaagtctggcacactggtagccacaaaaatcgccactgcctgggtctgtgcctttgtttttgcccagctcctaccggaagggggaatggtaaaaacaggtttctttgccggtttatctgttctggcgattgttgcggcgatggatatgaccaatgccgggctttatgcttccctgatgcaggagtacggcacaaaagaagaagccggtgcttctgtacttatctcgcttgagtccggccccctgatgacgatgattattctggggtccgccgggcaggcaacgttcgaacctgaacacctcgccggcgtcctgatcccctttctggtggggtttttgctgggtaatcttgatcccgaacttcgggaattgttttccagggccaccaaaagtctgatcccattctttgcatttgcgttggggaataccattaatcttggcgtcatcatcgacaccggactgctgggtattcttatggctctggcagtcattgttatcacaggcgtaccactgataatcatggatatcatgctgggtaagggccgtggcacggctggaattgccgcatcgagtactgctggcgctgccgtggccactccgttgctggtagccgagatcgcgccggacttcgctgaggccgcaccggcagccaccactctggtggcatcctgtgtggtgatcaccgccattgtcgtgccggtgatcactgcgttgtgggcaaaacacggagcctcccgcgtcagagcaacgtaa

SEQ ID NO: 383172 - DNA, 753 bp, Salmonella enterica; identical to SEQ ID NO: 7624

SEQ ID NO: 383173 - DNA, 279 bp, Salmonella enterica; identical to SEQ ID NO: 7623

SEQ ID NO: 383174 - DNA, 276 bp, Salmonella enterica; identical to SEQ ID NO: 7622

SEQ ID NO: 383175 - DNA, 294 bp, Salmonella enterica; identical to SEQ ID NO: 7621

SEQ ID NO: 383176 - DNA, 183 bp, Salmonella enterica; identical to SEQ ID NO: 7620

SEQ ID NO: 383177 - DNA, 258 bp, Salmonella enterica; identical to SEQ ID NO: 7619

SEQ ID NO: 383178 - DNA, 297 bp, Salmonella enterica; identical to SEQ ID NO: 5209

SEQ ID NO: 383179 - DNA, 234 bp, Salmonella enterica; identical to SEQ ID NO: 19741

SEQ ID NO: 383180 - DNA, 540 bp, Salmonella enterica; identical to SEQ ID NO: 16163

SEQ ID NO: 383181 - DNA, 1515 bp, Salmonella enterica; identical to SEQ ID NO: 52478

SEQ ID NO: 383182 - DNA, 1545 bp, Salmonella enterica; identical to SEQ ID NO: 23311

SEQ ID NO: 383183 - DNA, 441 bp, Salmonella enterica; identical to SEQ ID NO: 191886

SEQ ID NO: 383184 - DNA, 1311 bp, Salmonella enterica; identical to SEQ ID NO: 5783

SEQ ID NO: 383185 - DNA, 333 bp, Salmonella enterica; identical to SEQ ID NO: 5122

SEQ ID NO: 383186 - DNA, 258 bp, Salmonella enterica; identical to SEQ ID NO: 5121

SEQ ID NO: 383187 - DNA, 654 bp, Salmonella enterica; identical to SEQ ID NO: 7676

SEQ ID NO: 383188 - DNA, 342 bp, Salmonella enterica
atgccggcctttgaatgggttcatgtgcagctccatcagcaaaaggggatgataagtttatcaccaccgactatttgcaacagtgcccgtgagcgtttccgcagttaccaaacagagcttaagtcccggggaataaagcgtgcccgtgcgcgtcgtgatgcgaacaggaaacgtcaggatatcgtcaccctggtgaaacgacagctgacgcgtgaaatctcggaagggcgcttcactgccaatcgtgaggcggtaaaacgcgaagtggagcgtcgtgtgaaggagcgcatgattctgtcacgtaaccgcaattacagccgcctggccacagcttccccctga

SEQ ID NO: 383189 - DNA, 570 bp, Salmonella enterica; identical to SEQ ID NO: 34949

SEQ ID NO: 383190 - DNA, 501 bp, Salmonella enterica; identical to SEQ ID NO: 105788

SEQ ID NO: 383191 - DNA, 1542 bp, Salmonella enterica; identical to SEQ ID NO: 30088

SEQ ID NO: 383192 - DNA, 165 bp, Salmonella enterica
atgaataaaatacatgttacatataaaaatctcttacttccgattaccttcatcgcggcaactctaattagcgcctgtgataacgataaagatgccatggcggaagctgaaaaaaatcaagagaaatacatgcaaaaaatccagcaaaaagagcaacagcaataa

SEQ ID NO: 383193 - DNA, 474 bp, Salmonella enterica
atgtcttatgacatttttctgaaaattgacggcattgacggcgagtcaatggatgacaaacacaaaaatgaaattgaagtactgagctggcgctggaatattcatcaggaatccaccatgcacgccggtagcggtctcggttccggtaaggtctccgtcactaatctttcatttgaacattacatcgatcgcgccagcccgaacctgttcaaatactgctcttccggtaagcacattccgcaggccattctggttatgcgtaaggctggcggcaatccgctggagtacctcaagtacactttcacagatctgattattgcaatggtatcgcccagcggaagccagggaggggaaattgcgtctcgcgaatcaattgaactctccttcagcaccgtgaagcagcagaaccagcagggtggcagcggcggcaccatcaccgcaggctacgacttcaaggccaacaaagaaatttaa

SEQ ID NO: 383194 - DNA, 486 bp, Salmonella enterica; identical to SEQ ID NO: 376464

SEQ ID NO: 383195 - DNA, 876 bp, Salmonella enterica; identical to SEQ ID NO: 8102

SEQ ID NO: 383196 - DNA, 696 bp, Salmonella enterica
atgctgatgacgaggcggctgttgcgctggccgctgctgtacttgctgacgttgctgcatttgtctcagatgttttcgctgcggctgccgatgcggctgccgccttttccgacgctgccgccgcagtggctgacgcacctgcatcaccggcactggaagccgcctgcgtttctgacgtcttcgcggcggtttcggatgctccggcgcgctctgctgatgtctgcgccgccgtcgcgctggcggctgcggcagcagctgaatcgccggcggcagtacgggagacatctgcattcgcttcagatgttttcgctgcggctgccgatgcggctgccgccgttctggctgtgtcagccgacgccgcgctggctgatgcctccccggcttttgtggtcgccgtacctgcgctgctctccgcagatgctgcggatgaggctgcctgtgtggctgatgcttctgccgctccggctgcattcactgctgccgtggcgctttccgatgcctgacctgctgatgtctgcgcctgttcagatgcctgccctgcggcggtggcattccgcgatgcctccgatgcctggcgggcaacttcttccaccatcgcctcaaaacgccgcagcgcctccgggcggacgtcgtcttctgtcatggcccccagaaaatcattcagggtgcccggttttgaatcatcgtaaaccgtaa

SEQ ID NO: 383197 - DNA, 633 bp, Salmonella enterica; identical to SEQ ID NO: 16794

SEQ ID NO: 383198 - DNA, 534 bp, Salmonella enterica; identical to SEQ ID NO: 25686

SEQ ID NO: 383199 - DNA, 171 bp, Salmonella enterica; identical to SEQ ID NO: 377295

SEQ ID NO: 383200 - DNA, 813 bp, Salmonella enterica
atggcacgcattattgttgttacttcgggtaaagggggcgttggcaagaccacctccagcgcggccatcgctacaggtttggcccagaagggaaagaaaactgtcgtcattgattttgatatcggactgcgtaacctcgatctgattatggggtgcgaacgtcgtgtcgtttacgattttgtaaacgtcattcagggcgatgcgacactgaatcaggcgctgatcaaagataagcgtactgaaaatctcttcattcttccggcgtcgcagacccgggataaagacgcgctaacgcgcgaaggcgtcgctaaggtactggactcactgaaagcgatggactttgagttcatcgtttgcgactcgccggcgggtatcgaaaccggggcgctgatggcgctctattttgccgatgaagcgatcatcacgaccaacccggaagtctcttctgtccgtgactcggaccgtattctgggtattctggcatcgaaatctcgtcgcgcagaaaatggcgaagaaccgattaaagaacatctcctgttgacgcgctacaatccaggccgcgtcaataaaggcgacatgctcagcatggaagatgtactggagattctgcgtattaaactcgtcggtgtgatcccggaagatcaatccgtactgcgcgcatcgaaccagggcgaaccggtgattcttgacgccactgcggatgcgggtaaagcctatgcagataccgtagatcgtctgttgggagaagaacgtcctttccgcttcattgaagaagagaagaaaggtttcctcaaacgcctgttcggaggataa

SEQ ID NO: 383201 - DNA, 1173 bp, Salmonella enterica
atgccggaggatatttattttggcgcgaaccaaagagaacacgatttgaattaccaaatgattgaaacggacgatgcgctggcgagcctgtgtgaggctgtccgcgcatgtccggctattgctttagatacggaatttgtccgtacccgcacctattacccgcagttaggattgatccagttatttgacggggcaaatgtcgccctgatcgatccgctcggcatcagcgactggtcgccgttaaaagcggtgttgcgcgatacgggaatcaccaaatttctgcacgcgggtagcgaagatctggaagtatttctgaatgcgtttggcgaactgccggaacccctgattgatacgcaaattctggcggcgttttgcgggcgtccgctgtcgtggggttttgcgtcgatggtagaagagtatacgggcgtggcgctggacaaaagcgagtctcgtaccgactggttagcccggcctttaagcgaacgtcagtgtgaatacgcggcggcggatgtctggtatctgttaccgatcgccaaaaagctgatgattgaaactgaagccgcaggatggctgcctgccgcgcttgatgagtgtcggttgatgcagcagcgccgtcaggagattcaggcgccggaagaagcatggcgggatatcaccaatgcctggcaactgcgtactcgccagttagcctgtctgcaacttttagctgactggcggctacgtaaggcgcgtgagcgcgatatggcggtgaactttgttgtgcgtgaagaaaatctgtgggcggtcgcgcgttatatgccgggcagtctcggtgagctggatagcctggggctttccggcagcgagattcgttttcatggcaagacgttgatatcgctggtggcgaaagcacaggcgctaccggaagaggcattgccggaacccctgttgaatctgatggacatgccgggctatcgcaaagcgtttaaagccatcaaagcgctggtggcggaggtgagcgcgtcgcatcacgtcagcggcgagctactggcatcgcgtcggcagattaatcagttgcttaactggcactggaaattaaaaccgcaaaatgggcaaccggaattgatttccggctggcgcgccgaactgatggaggagaagttaactcttctgttgcaggagtatccgctttaa

SEQ ID NO: 383202 - DNA, 504 bp, Salmonella enterica
atgggaatgggctccgccgtggcggtactgttccagtccggtcgcgacaccattgatacggtcctgaaaacaatcctgccgtttatggcgttcgtttcggcgctgatcggcatcattatggcctcaggtcttggcgactggatcgcccacggcctggcgccattagccagccatccactggggctggtgacgctggcattgatctgctcgttcccgctgctgtcgccctttctcggccctggcgcggttatcgctcaggtcattggcgtcctgatcggcgttcagataggcctgggcaatatccccccgcatctggcgcttcccgccctgttcgcgattaacgcgcaggcggcctgcgactttatcccggtcggcctgtcgctggcggaagcgaaacaagacaccgttcgcgtcggcgtaccttctgtgctggtcggacgcttcctgactggcgcgcccacggtacttatcgcctggtttgtttccggctttatctatcaataa

SEQ ID NO: 383203 - DNA, 1230 bp, Salmonella enterica
atggataaactacttgagcgttttttacactacgtatcgctggatacccaatcaaagtcgggtgttcggcaggttcccagcactgaggggcagtggaagttactacgtttgctcaaacagcagctcgaagagatggggctggttaacattacattaagtgaaaaagggacgttgatggcgacgctcccggccaatgttgagggggatattcccgccattggttttatctcccatgtggatacctctccggatttcagcggtaaaaacgttaacccgcagattgtcgagaattatcgcggcggcgatatagcattagggattggcgatgaggtgttgtcacccgtgatgttcccggtactgcatcaattactgggacagacgctgattactaccgatggtaagacattgctgggcgcggacgataaagccggcgttgcggagatcatgaccgcgctggcggtgctgaaaggtaatcctattccccacggcgacattaaagtggcgtttacgcctgacgaagaggtagggaaaggcgcgaagcacttcgatgttgaggcctttggcgcgcagtgggcatatacggtcgacggcggcggcgtgggagaactggagtttgaaaacttcaatgccgcctcggtgaatatcaaaatcgtcggcaataacgtgcatcccggtacggcaaaaggcgtgatggtcaatgcgctgtcgttggcggcgaggattcacgcggaagtgccggcggatgaagcgcctgaaaccaccgaaggttacgaagggttttatcatctggccagcatgaaaggcaccgttgaccgggccgaaatgcactacatcattcgcgatttcgaccgtaagcagtttgaagcgcgtaaacgcaaaatgatggagattgccaaaaaagtcggtaaggggctgcatccggactgctatatcgaactggtgattgaagacagttattacaatatgcgcgaaaaagtagttgaacatccgcatattctcgatatcgcccagcaggccatgcgcgactgtcatattacgccggagatgaaaccgattcgcggcggtacagacggggcgcaactgtcgtttatgggtctgccatgtcctaatctctttaccggcggatataactatcatggtaaacatgagtttgtgacgctggaggggatggaaaaagcggtacaggtgattgtgcgtatcgcggagctgacggctaagcgcgggcagtag

SEQ ID NO: 383204 - DNA, 261 bp, Salmonella enterica
atgatagcatcattacttgctaacgaatacgtaagtgcctttggatatattgttggggtgatctctggatgtatagcaatatatcagactacacaagtaaccaagaagaataatgagataaaacaacttaatgtcacaataaaagatctaaattcccagattataaatattacaactaatagaaacaatattaatcaaggggaacgttctcagtattttcaagataataatggtcctgtgaatattgataatcgggggtag

SEQ ID NO: 383205 - DNA, 549 bp, Salmonella enterica; identical to SEQ ID NO: 250270

SEQ ID NO: 383206 - DNA, 234 bp, Salmonella enterica
atgattacaattgatacggatccaaaagcaaatcctgtatatattggaagtgtggtgcttaggatctttcaaagtaatgattcgatgataattgaaatatctcgactgtatgatttagtaaattctgtcttcgaattatcgtttgatctttttctttactcattagattggcttttcataatcggcgcaattgagttagatggaaatggtggaatagcatatgcggctcaataa

SEQ ID NO: 383207 - DNA, 1626 bp, Salmonella enterica
atgcggctcaataaacttattattttaaaaaataacactcttgttagggaagtgccttttaaagacggtctgaacctaattataaataaaagaacctcaggtaaggatagtggcaatagtgtaggtaaatccacattatcacgtgttttggattatttatttatgtcatcaggtcatgatatttatcatgatgcggaatttggaaaagatatacctgaaattgtatcattaataaatgataatgttttaaagttcacattagattttaatactgatgttgaaatagataaaaaacaatattctgagtttatagctcaagcagtgtttggattgactacagataagccatcgttgagaaatgtttcgcataagtttatcagaaatacgaatgataaaatgcagaaaacgcttaatttcttacatgggaatacaactcctgatgtctacgatttattatacttatttttgtttggattcaatggcctacctcttataaagaaaaaaggggaatttaataaagagataaaaaaacaaaaggcatatcttgccgcatataggaatccaaatagagagacagttttagcaaaaatgattaagcctctgaagaaagaaattgcggaggcggaaagaaatattaagaacttcgattttaaagatagtcatgatgaaagcttaaaaaaactttcagaaatacagaagatgattagtgattactctttgagttatgcctctttaaatatgcgagtaagaaatattgaagagtcgatcttgtccttgaagaacaatatcacgcaacttgtagaaaatgatttaatggaaatctatagttcggcaggggtttattttaatggggagcttaaaagatcttacgaagaaatggtattgttccataatgacgttattaagaataaaattaatttcttagaatctgaattattaaagaaaaaagaagagatagaaagtataaatgaaaaaattaatggttttcatgagcaagagtcatctttatttagaacaatcaaagagcctgaaacattaaagtctataaatcaattattcaataagctaactgagttacgcgaaaatcttgctagcatagagtctaatcttacgcgtattaatgatacaaatgccttaataaaatctcttgaagatagtcgagagcaattacttttagaaatagagttggccgttcaaggtttggaaaagaacattgaggttttcaatgagttctttggtgatcttacaaaggaaatttatggtgaaagatatatttttgatctttcctttgatattgataaaggcaggtgcaattttgatatatcatgcgttacgccaaacagcaatggtggtaagaagaaaggtgaaataactgcatttgatttggcttatattaagtttgttgataaggttaaattaaagagagcaacttttgttattcatgatagtattgaagatgtcgatgtaaatcaaattagagatatattctttgaagcaaataatataaatggtcaatatattgtatcaatattgagtgataagttctcagaagatactgacttgaaaatgatgatgaataactcgatccttgagttatcttcgacaaataagttctttaaagtatag

SEQ ID NO: 383208 - DNA, 1197 bp, Salmonella enterica
gtggcacggacaactcgccccctaaccaacaccgaagttctgcgcgcaaaagcgttagagaaggatctaacgctgcatgatggtgatgggcttttcctgatagtgaaaactagcggcaagaaactctggcgctttcgctatcaacgcccagcaacaaaacagcggactatgatgggacttggtgcttttcctgccctttctcttgctgatgcccgagggttaagagcagattaccttgccctattagccaacggaatcgacccgcaaattcaagctgaagttgcagaggaacagcagcaaatcgctctggacagtattttttcgacggtcgccgctaactggttccagctcaaaagcaaaagcgttacccctgattacgctaaagatatatggcgttcactggaaaaagacgtattcccagctatcggggagacccctgtccagcaaatcaaagcccgaacactggttgaagcccttgaaccgatcaaagcacgtggggcgctggagacagttcgtagactggtacagcgtatcaacgaaataatgatttatgcggttaacactggcttgattgatgccaaccccgcgtcaggtattggtatggcttttgagaaacccaaaaagcaaaacatgccgacgttacgaccagaagaattgcctaagctgatgcgttcgctagtcatgtcaaatctaactgttccgactcgctgtcttattgagtggcaactcctgacgctcgttcgcccttcagaggcttcaggcgcacgatgggcagagatcgatctcgataaaaagctctggaccattccggctgaaaggatgaaggccaagcgtgagcacattgttcctttatcgccacaggcgttaggtatactggatgtgatgaagccaatcagcgctcaccgagaacatgtttttcccagcaggaatgatcccaagcagtccatgaatagccaaactgctaatgccgctttaaaacggattggttacggaggtaggcttgttgcacatgggctgcgctctatcgcaagcacagctttaaatgaatcaggctttaatgctgatgttatcgaagcagccctagcacatagtgataaaaatgaagtacgaagagcttataaccgctcaacgtacctgaataaaagaatagaacttatggcatggtggggaaggtttgtttatcaaacaaacctttaa

SEQ ID NO: 383209 - DNA, 978 bp, Salmonella enterica
atggatataaaatatagcgtctctcttcttgttgtttatgccgctattatgattctttacatttcgtatttatataataaaaaggcgttccatatgaacgcggagccacttactcatcaacaccttttttgggcagctttaatcattccattttcattatttattatattcggtattatatgctggtatgggcatactttaagaattgattcaaccggatttaacaatttcctttcaataagcaaattacctttggctttgttatctttatcgcttccatttggcgtagttgtaaacaatgttcatcgaactatccaaacggacaaacaaataaaagaagcagaaagaaaaaacaaagcagatagtttttactcacatagaaaaaacactatcgaaatgtttgaaaaccttcctttcaaaacaatcacaattactgataagaaatataaattatgttttgaaaataattatgtcacatatagatactgttatccattcatgtcaacatatttagtgacttatgatgccgactctgattttatagatcgcgttaaaaatgtttggctctctctaagggataaaattaacactatcgattttaataatgagcaagaacttttaaaacacatttcttccattgaaaatctgctagaccaaatacataaactccttcaatttaaaccattcgacttaacagaagcttattacacaacttacattaatgaaacagagggagtaaaaatattcagaacaaagttcaagaatgaatggggtatcaaagatgctattaatgcatattggcatgcttatataataattattcaggcaattgagattaaatttgatcataaatttatgaatcaaatggaaagtgtccgacactattctctcagtcaagataaaaaattagctaagtgggaaatgtttaaagtaacaggtaacaccactacaggcatttatgagaaagagcaaaaatga

SEQ ID NO: 383210 - DNA, 354 bp, Salmonella enterica
atgttcgatcacgtctccagtgataccgttagaatcccttcgtataaatttgagggttcgacattggtgaaaacttcatcctttatgtttgataaagtgatgattcctgatcacaaaggaaatcttgaaatcattgtggaagggaatatcaaatatttaattgataaagcagattactccatcagcgatggcaaatatttaattgaatattcggatacccaaagcatcaaagaattaacactattacccggcaataaactgcgaatcgattggggcaagtatccgttagattgtgaagttgatgatgtaaacatcattggtaaagtcatcatgacaatggtagttaatgcttaa

SEQ ID NO: 383211 - DNA, 198 bp, Salmonella enterica
atggaaactatcgcattgcagcggattgcgttgtttaccaggttgatcgccaaaagtaattgcactggctgtgaaaaggacattgcacttgcctggctaagcgagctgacttcagatctggaaagtaaacttgatgaatatgaaagtaaaaacccccgggaagggggcttatcaggcggcgggagtcgctttcagtag

SEQ ID NO: 383212 - DNA, 333 bp, Salmonella enterica
atgaaaaatttcattatgttagctgtaggcgcagcagtttcattcaatgtgttagctgctgaggtttttactgtgccaacggatacgaaggctagctatacggtcttagagaagacgcgtaccggtgatatggctacgataacaaccaagagagagggaccatctggagtgtcatattctaagcgcttgtacgactgtactgcctcgacggtcaagtatcttggaagcggtgacactatcgagcaaatgaatggctcggcaccagatccaaatatggcacctataattgaccgttcaattgcatactatgttggtcagaaagcctgccgataa

SEQ ID NO: 383213 - DNA, 1059 bp, Salmonella enterica
atggcaataagtacaaaacctaataccgcccagcccctaactcttgatgctgacaaactttacgaaaatgcggtgctttctattcaactgggcattgaagattttgagctttcccagaaatctgttgataaaggcggtaaccccgcacgttctctatcttccgttcgcaatctcttcgctggggttatgcttctttttaaatttaaactggccaattcggttaaaagtcctgaagacgcttaccagcttatccatatcccaccaaaagatattttgccgaacccagatggcataggaggcatgacatgggagccagacggacagtttcaaaaaaataaaacaatagatgtccatcacataaaggctcgctttcgtacttttaacattcatgttgattgggaagtcgtcgatgaattacataactgtcgcaatcatttagaacatctgcaccctagaaacaccttaggagaactagccgattttgttgctaatttattccctgttttggcagactttatcgaaaaagagttgaataaatttccacaagatgttctagggtctgcttgggacacgatgctagagcacagaacgttctaccttaagcaattggccgaatgcgagcaaagctggctggatgcaggagttccagagggaatggttgagttcgtcccagattgcacatgtgctcaatgcggttccaagttgttgaaggcttcaacattaagtattgaagatggttttactgttgaaaatgatgaagatcaattcgaatatgtttgtgtcgcgtgtgggttcgtagattgttttgcaccacgattaatcgattccttcgaatctgcttttttttattggccgcctgatggtgaagatccaacttatgaactttgctacagctgcgaccatcacacatttgtaataagcgaacaagcatgccgttggtgcgggggggaacttgactattcacagtgcaaactttgtgacgcccatcttaatcaagatgatcaggataatgatggttattgcggctactgtacgtacaagatgagcaaagatgattaa

SEQ ID NO: 383214 - DNA, 810 bp, Salmonella enterica
atgggacggccaatacctcaacctgtaatatctgttgtagctgacttcgctgctagcactgaaacccatgctagtttggatagtttgtttgcctatgctgatgcgccaggggagccacccgaaggatctaagcacgttaaagctctcgaatggttaaggcgtattaataaagaatctgatgaaccattagttttacttggtcgattaatcgaaaactatatggagtcagagttacccgccaatccatactatgagtgggaaaaaaagaaagttgagtttgtaaaaaaaatgccggaactacttggtcgttatgggctgagctatgtgactggcggttacgttactgatggagcatcactagcatccctttccttgaaagaagctatccagaaacgtaatactccagcagtagaaatggaattcgcaagggctttagaaaacttgcatactgacccaagagaagcagtatcagcagcctgtaatatattagaatcaacttttaaaatttttatcgcagatgaaaacctaccgattcctgcgaagcaggatttgcagggcttgtggaagaccgttcgtgaacatttaggtcttgacactaaagcggtagaagatgaggacttaaaacgcattttgagcggcttatattctctcaccgatggtatcggctcgctaagaactcatgctagttcagctcatggcgcaggacgaaaaatttacaatctcaagccccgacacgcacgattagccatcaatgctgcacatacactaactatgtttattcttgaatcgtgggatgaaaaaaaagaataa

SEQ ID NO: 383215 - DNA, 213 bp, Salmonella enterica
atggacaccgttaacggaatgtgttcagacgcaccgcgtgccaagaaatgtaaatgcggaaaatcaccgacaatattcgacatggagaacgggtgccaaatctactgcgctaaccacgctgctgtggcggccgcgaattatcgcagtgcggtaacggagtggaataacctgaaatctgttagagagggaagtcatgaaaaaactaacctttga

SEQ ID NO: 383216 - DNA, 180 bp, Salmonella enterica
gtggtcgtggtgtcggacctggacggcgggaggaaagtgatgtcgctgcaccggggactctgcggcctgcgaagcgatatcccgcaggcggaggggataacctcagatgaccgggacacgctgtggatagtcagtgaaccgaatctgttttaccgcttcacccgcacggcagcgtcctga

SEQ ID NO: 383217 - DNA, 162 bp, Salmonella enterica; identical to SEQ ID NO: 376063

SEQ ID NO: 383218 - DNA, 318 bp, Salmonella enterica
atggaagcacaacccctgaagcagcgcatcgatggcacgacggcgcagcaaaggcggcatccggtgacgctttcccagcgaacgaacgaacgccacatggacggaaaaatcaaaacgggacgtgaacccttcggctttcgccatcagcttacgacagaacggcagggtctttttcccttctctcggcgtgaattccggattcggatttttgacctgtcggtaatgagtgaacagtgttcgggtgtcagtcacttctgcctgcacttacaatgcacggaaggagtaaatgccacagaaacaagtattgaaattttctga

SEQ ID NO: 383219 - DNA, 303 bp, Salmonella enterica
atgtctgaactaaactacgaagcaattgggcgctgcaaaatactcaacgaaaaaataaaagcgcttcatgctgagcggatgaaagctataggggatttacgatcatccgtttactcccttcatcagaaaggggatattaatcgcgtcccaccagaactcgttgagtttgacccacaatctcttactgaccttgtagagaaggtcagtcactatgatagtgaattgatgagagccgtgcacgaatataacaactggtgtgccgaagcgggtgagaagcctgtaaaactcattaagttagactga

SEQ ID NO: 383220 - DNA, 615 bp, Salmonella enterica
atgaatgaatcccaatttcagcaggcggctggtattagcgccgggctttctgcgcgctggtatccgcatattacggcggcaatgagcgaattcggtattactgcaccactggatcaggccatgttcattgcacaagttgggcatgaatctgctggttttacctcgctggtcgagagcttcaactactcggtagatgggctgatgaaaacctttggtaaacgcctgacgccgtatcagtgtgaaatgctggggcgtgtcgatggtaagcaggtggcccaccagccgcaaatagccaatctagtttacggtggccgcatgggtaacaaagacgccggagatggctggaagtatcgcgggcgtgggcttatccagattaccgggctggagaattacaccagatgcggcgttgccctgaaactggatctggtggcgaatccgggacagcttgaactggatcgtcatgccgcccgttccgcagcgtggttttttgtgactagagggtgtctgaaatactccggcgacctggtgcgcgttacgcagatcattaacggagggcagaacggcatcggtgacaggcgagagcgctttgaaaaagcaaaatcggtgctggtatga

SEQ ID NO: 383221 - DNA, 339 bp, Salmonella enterica
atgcactttgatccccattcgtgggacagttggatcgaactttttcaaagctggtggcggggagacgtacccattggcggcgttgttatggcaatcgttgttgcgtttttccgcatggtctataacggcagcagctggaaagaaacgctgtttgaagggttgctgtgtggttccctgaccctgacggcggtttctgcgctggattattttgatgtgccgaaaagtctgacaatagccattggcggcactatcggatttatcggcgtgaagaaaatcagcaccatcatttcaacgtatttcagtaaccgctttggcggtggtaaccccccacaggtttaa

SEQ ID NO: 383222 - DNA, 258 bp, Salmonella enterica
atgcaagatggtaaacagcagccttatttttttaaccctggcatgacgcccgaacaacttgaagactggttagggcagcaaaaacttcacctgacctactataatcaactggtaaatgaaaaagccgcccttgaggaacggctaaatgagatttcagcagaaattgaacgaatgtctgctggtggttttaaaggaaaactgagttttctctgggatcccagtccgcttccgagaaatcgtcaacagaataatgattga

SEQ ID NO: 383223 - DNA, 624 bp, Salmonella enterica
atgacaccacgtcaacgccgtcaacatcgtaacgcaatagaaaaagccgctgccgcgccgcgcaagagctggctgggaaaattcaggccgcttacgtcagtccagagtgcgtgggttaaatcattactgtctgtctggggggaatgttacggagggagaacgtcagaagaggccatgcttgattgctgtgggttctggagttgcctgcaggatgaagaatggacggataatgaagcaaaacgcatcacggaaacaatcaaggggctgagaaagatcggatataaaggcgaagcgcttttgtctatggcccgccagatattgtggccgaagcagtctatagccgatctgctgaataaagaaatgcgcatcgaagaaagcgactttgttgaaaggtgcatcctttcggcgctgagtaaagacgatccggtatttgtcgtcggtattgatttttatgcgcgtcgtaagcgagtgagtgacatcggacgatatcttcaggagatagcgccgtggttgaccagaaaacaagccgaagaccgtgtgcgatggtgtgtgaatcactttaattgtgctgtatttctcgcattcagggatgcaatgagaaagcaaaatgaaaaaatatcttga

SEQ ID NO: 383224 - DNA, 582 bp, Salmonella enterica
atggcggttcaaaaacggttaataaaaggggcgctggcgtgcgcttttgcgcttatgctgagcggttgcgtgactatcccggatgccattaaaggttcgagtccgacgccgcagcaggatttggtgcgggtgatgaatgcgccgcagctctatatcgggcaagaggcgcgttttggcggcaaagttgtggcggtgcaaaatcagcagggaaaaacccggcttgaaatcgcgaccgtaccgcttgatagcggcgcgcgtcctgttctgggcgaagcctcgcgcggcagaatttttgccgatgtgaacggttttctggacccggtggacttccgtggccagttagttaccgttgtcggcccgataaccggcacggttgacggtaaaatcggcaatacgccgtataaatttatgctgatgcaggctaccggctataaacgctggcatcttgttcagcaggtcgtcatgcctccacagccgatcgatccgtggttttacggcggacgcgcctggccttatggctatggcggttggggatggtataaccctggacccgcggaggttcagacgatagtaacagagtaa

SEQ ID NO: 383225 - DNA, 636 bp, Salmonella enterica
gtggccgtattcgcctttcagaatgccggccgtttctttggcaatggtcttgtagcgttcgcccgtcagcacgttgagcaccgcctgggtgccgacaatctgcgaggtgggggtcaccagcgggataaagccgaggtcctcgcgcacgcgggggatttccgccagcacctggtccagtttgtccgccgcgttctgctgcttcagctggccttccaggttagtgagcattccgcccggcacctgggccaccagaatgcggctgtcgtagcccttcagctggccttcaaaggcgtgatactttttgcgcacctcgcggaagtacgcggcgatattttccagcttcaggatatccagcccggtgtcgtgttccgtgccggcaagcgttgccaccagcgcttcggtggccgggtggccgtaggtggcgctcatggacgaaatcgccgtgtccacgccgtcgacgcccgcctcgatagccttcagcagggccatctccgccatcccggtggtggcgtgacagtgcaggtgcaggcgcacctcaaaacgttttttgatttcgctgaccagctcatacgccgccatcggtgtaagaatgccggacatatccttgatggcaatcgagtcaacgccggtctctaa

SEQ ID NO: 383226 - DNA, 588 bp, Salmonella enterica
gtgacaccgatgcttttaagcgctttctggacttatacattaatcaccgcccttacccccggccctaacaatattctcgcgcttagcgcagcaactgcacatggttttcggcagagtattcgtgtactggcaggtatgagtctgggatttttggtcgtcatgctgctgtgcgccgggatcgcgttttcccttgcggttatcgatccggcaatcattcatttgctcagttgggtgggggctgcgtatatcctgtggctggcgtggaaaattgctaccagtccagcggcggatgagaacgccagaccaaaaccggttggcttttgggtaagctttggtctgcagtttgtgaacgtcaaaattattctgtacggcattaccgctctgtctacatttgttttaccgcaaacgcaggcgctgaattgggtcatcggcgtcagtatattgctggcattgatcggcacgttcggtaatgtgtgttgggcgctggcgggacatctgtttcagcgggcgtttcgccattatggtcgccagttaaatatcattctggcgttactgctggtgtactgcgcggtgcggattttttactga

SEQ ID NO: 383227 - DNA, 510 bp, Salmonella enterica
atggtcttccaccagctccgtggaggtttgccagccattcagcggatcggtgtatctcacttctaccgcgttatggcggtctttcagggcactgaagctgtatttaaagcgcccgcccaccacgttaccgttggtgtaggtccatgctttatcggaggggcggtcctggatgaaggtcattttgcggccattccataccggcatacaacgcatcaccgagcagaaatccgccagaacgtcatacgccttacgctgggtggtaatatacgcattaagcgtcatgcggggttccgtgccgccaaatccgtccggcaccggttgatcacagtactgcgcgatggcgtacagcgcccatttatccacatccgcccccccgatacgcctgcccagcccgtaacgggggtgggtcagtttatccatcgtgcaccacgccgggttattcgtgtacgccggtttaaacgccccgtcccacaggccggtatatgtgcgggtatccgggtcatagtttga

SEQ ID NO: 383228 - DNA, 327 bp, Salmonella enterica; identical to SEQ ID NO: 28012

SEQ ID NO: 383229 - DNA, 825 bp, Salmonella enterica; identical to SEQ ID NO: 376363

SEQ ID NO: 383230 - DNA, 231 bp, Salmonella enterica; identical to SEQ ID NO: 376365

SEQ ID NO: 383231 - DNA, 456 bp, Salmonella enterica
atgtttcagaattcaggcgaagtgattatgtacttcggttgttttttattttccttaccatttattcttgttttaattagaaaagtgcttttttttgttgggctacaatataattttcttcatagccacaaagcaggtgtcgcttttggattgctacttatatatggacttatcatcgcatatatagggcagtcgtataaagacaggatctgcaatgatgtgatgctttcttattatgaacaaggtataaattattctgagctaacgccatcgcagaggatgaatatattatatgcgagtattcatatgcctatagatttcaaaaaaggtaacgacgtctctaagtacttacctgcgttagaaaaatacacataccaatcaaaaatatataaacataaatcaatagaagaggccaaagaagagacaaatcaatttatgaaaacattcacacaataa

SEQ ID NO: 383232 - DNA, 210 bp, Salmonella enterica
atgacggatggctggccgctgtatgaatcccgcctgaagggaaagctgcacattatcagcaagcgttacactcagcgcattgagcgacataacctgaatctgagacaacatctggcaaggctgggacggaagtcactgtcgttctcaaaatcggtggagctgcatgacagggtcatcgggcattatctgaacataaaacactatcagtaa

SEQ ID NO: 383233 - DNA, 357 bp, Salmonella enterica
atgtcggggctaaatcgcgccagcgctggctgttttacgcgtatgacaggctccggaagacggtttgcgcacgtattcggtgaacgcactatggcgacgctggggcgtcttatgagcctgctgtcaccctttgacgtggtgatatggatgacggatggctggccgctgtatgaatcccgcctgaagggaaagctgcacgtaatcagcaagcgatatacgcagcgaattgagcggcataacctgaatctgaggcagcacctggcacggctgggacggaagtcgctgtcgttctcaaaatcggtggagctgcatgacaaagtcatcgggcattatctgaacataaaacactatcaataa

SEQ ID NO: 383234 - DNA, 924 bp, Salmonella enterica
gtggcaaagcaaaagttcaaaatcaccaactggcccacctacaataaagccctcatcaaccgtggctccataactttctggctggatgatgaagctattcaggcctggtatgagtcggcaacgccttcatcacggggaagacctcagcgctattctgatctcgccatcaccaccgttctggtcattaaacgcgtgttcaggttgaccctgcgggctgcacagggttttattgattccatttttacactgatgaatgttccgttgcgctgcccggattacaccagtgtcagcaagcgcgcaaagtcggttaatgtcagtttcaaaacgttcacccgaggtgaaatcgcgcatctggtgattgattccaccgggctgaaggtctttggtgaaggcgaatggaaagtcaaaaaacacggcaaagaacgccgtcgtatatggcgaaagttgcatctggcagttgacagcaacacacatgaaatcatctgtgcagacctgtcgctgaacaatgtgacggactcagaagccttcccgggtcttatccggcagactcacagaaaaatcagggcagcatcggcagacggcgcttacgacacccggctctgtcacgatgaactgcggcgtaagaaaatcagcgcccttatccctccccgaaaaggtgcgggttactggcccggtgaatatgcagaccgtaaccgtgcagtggctaatcagcgaatgaccgggagtaatgcgcggtggaaatggacaacagattacaaccgtcgctcgatagcggaaacggcgatgtaccgggtaaaacagctgttcgggggttcactgacactgcgtgactacgatggtcaggttgcggaggctatggccctggtacgagcgctgaacaaaatgacgaaagcaggtatgcctgaaagcgtgcgtattgcctga

SEQ ID NO: 383235 - DNA, 333 bp, Salmonella enterica
atgcagttcgaacgtgctgacgtaggtgaagtgctgctcctggccgctgtgctgcgcgttgtcccgcacaaacagcgtagtctgaaccagcaggtactcctggttgacctcggcagtggggtggttcgtcagcgtgaacgaatatccggtcatcagggtgcggatattcccggcaccgtgaacccggctgccggggctgcgctgcgcttccatacggatgcgcgtcaacatctcgccctcgcctttgtcaaaataatcgcccggccattcgtagtgctcgtagttcgcgtgaccggtttcgcgcgggtccgccactgtgtttgccagcaatga

SEQ ID NO: 383236 - DNA, 1131 bp, Salmonella enterica
atgaccggacgtaaaaacaaatgtgtcagaaaaaattgtaacaatcaggttttctcagtaaaaatggcagtggagaaaagactgtgcagaaaacattatgagaggttttgtgagctcaaaaaaagaagagagcaaaatcctgttcacagattaaatgaagcattgccaagaaagataaaaggaccaaaaagtaagaaaaaattagtaaaagaaagagaaatcattaacagcagaaaaaaacataaacaggagcaggggccatcgctgactgaacttaataaaaaagttcgtgagatactgaaaactccggcatggagaacgctggaaacgagaattcgaagaaacggaatcacatttaagtcaaaagcagagttagatgcgctttctgaactttatgcaatttattcatgggtttcatattgcaaacggggcgataattattctgtgtggtttttgaattgtccggatgtaaatataaatcttcatgtgtgcgaatgccggtcttctgaaagcgattgttatctgccatctcgttttattattcttccagctccattaaggcaaaaagtaaaaagaaaatactctgctaattcgtctggggcactaggacataatgattcaaaaagtctttataagacagttttgtctgtttgtggtgggaaaagagaaaccgaaatgttcttttattcattgccagtaaagactaatcatcatccttactggattaaaagtggtgtggttaaaagatttcctcctgtttttggtttgttgttttatgaacaggaaagattaacaggaggtgtttttcgttatgtgttgataaggttttataatgcttttaaagagaatttgttttttgttgagattgtatcgtgctgttttcttgttgagttttttcatgatattgattcgttttttataaatcaacgattaagtaagctgggaagttttatagataagtggagggagggtaaagaaatctggataaaagtatatctacaactgatacatactacattgggaataactgaaacagaaaaactcgtcaatctatataattcattttttactgataaagtggttctctgggatgaatcagtaaaaaaagttaagtggatttatgagaaatag

SEQ ID NO: 383237 - DNA, 885 bp, Salmonella enterica
atgtcattcagccattcttccctctctgcacaagtgaaatcatatctgacgtttcttcctgaagaaatacgccagaaaatccttgaacatctccacggtgttattcattacgagcccgtgattggcattatgggtaaatccggcaccggcaaaagcagcctgtgtaatgccatttttcagtcccgtatctgcgccacgcatcccctgaacggctgcacccgccaggctcatcgtcttaccctgcagctcggtgaacgcagaatgacgctggtcgatctgcccggcattggtgaaacaccgcagcatgatcaggaataccgggagctttaccgtcagttactgccggaactggatctgattatctggatcctgcgggctgatgaacgtgcgtatgctgccgatattgccatgcatcagtttttactgaatgaaggtgcagatccctcgcgttttctgtttgttctcagccatgccgatcgcgtatttcctgctgaagaatggaacgacacagaaaaatgcccgtcccgtcagcaggaactctcactggcaacagtaacagcccgggtggcaaccctgttcccttcatcatttccggtactccccgttgccgcacctgtcggctggaaccttccggcatttgtgtcgctgatgatccacgcactgccaccgcaggcaaccagcgcggtttattcacatatccggggggaaaaccgctctgaacaggcccggaaacacgcacaacagacttttggtgacgccatcggaaaaagctttgacgctgccattacccggttcagctttccagcctggatattacagcttctgcgcaaaacccgggaccgcattatccacctgctggtcacactgtgggatcacctgttctga

SEQ ID NO: 383238 - DNA, 678 bp, Salmonella enterica
atgaataccagaattctttttcccctgctgttcactgtggcatcattctccgcctccgccggcaactgggctgtcaaaaacggctggtgtcagaccatgacggaagatggtcaggcgctggtaatgctgaaaaatggcacgattggtattaccggcctgatgcagggatgcccgaatggtgtacagacgctcctgggcagccgtatcagtattaacggtaacctgatccccacatcacaaatgtgtaatcagcagacgggattcagggctgttgaggtggaaatcggacaggcgccggaaatggtcaaaaaagccgttcactccatagcagagcgtgatgtgtccgttttacaggcatttggtgtacgaatggaattcacccgcggtgatatgctgaaggtctgtccgaaatttgtcacatcacttgccggtttttccccgaaacagacgaccactattaataaagactccgtactgcaggctgcccgacaggcatacgcccgtaaatacgacgaggaaacaacagaaaccgctgattttggctcttacgaagtaaaaggcaataaggttgagtttgaagtgttcaatcctgaagaccgtgcgtacgacaaagtgatcgtcacggttggtgctgacggtaatgccaccggagccagcgttgaatttatcggaaaatag

SEQ ID NO: 383239 - DNA, 234 bp, Salmonella enterica
atgtcggactgtcaccctgttttattgcccgaaggccctttctcacgcgaacaggcgatggctgtcacaacagcttaccgcaatgtgcttattgaagatgaccagggaacgcatttccggctggttattcgcaatgctgaagggcagctacgctggcggtgctggaattttgaacctgatgccggaaaacagctaaatccgtatctcgccagtgagggaattctcaggcaataa

SEQ ID NO: 383240 - DNA, 819 bp, Salmonella enterica
atgcaattagccagtcgttttggtcatgtaaatcagatccgtcgggagcgcccactgacacgcgaagaactgatgtaccacgtcccgagtatttttggagaagaccggcacacctcccgcagtgaacagtatgcgtacattcccaccatcaccgtcctggaaaatctgcagcgggaaggctttcagccattcttcgcctgccagacccgtgtgcgcgaccagagccgtcgggggtataccaaacacatgctgcgtctgcgccgtgacggggagataaacggacaacatgtccctgaaatcatcctgctgaactcccatgacggtacctccagctaccagatgctgccgggttacttcaggttcgtctgccagaacggctgcgtctgtggtcagtctctgggggaagtgcgtgttccgcaccggggaaatgtggtggacagagtcattgaaggggcttacgaggtggtgggcgtgtttgaccggattgaggaaaagcgtgatgccatgcagtcgctggtcctgccgccaccggcacgccaggcgctggcacaggcggcactgacttaccgttatggtgacaaacatcagccagtcaccactgccgacattctgacgccacgacgccgggaggattacggtaaggacctgtggagtgcttatcagaccatccaggagaatatgctgaaaggcgggatttccggccgcagtgcaaaaggaaaacgtatccatacccgggccattcacaacatcgacaccgacattaagctcaatcgcgcattgtgggtgatggcggaaacgctgctggagaacctgcgctga

SEQ ID NO: 383241 - DNA, 486 bp, Salmonella enterica
atgacaacctcttcgcataattccaccacaccttctgtttccgtgaccgctgcatcagggaataacccgcctcagctggttgccactcccgtccctgatgaacagcgcatcagcttctggccgcagcattttggtctcattccacaatgggtgaccctggagccccgtgtcttcggctggatggaccgtctgtgtgaagactactgcggtggtatctggaatctgtacaccctgaacaacggtggcgcatttatggcacccgaaccggatgacgatgatgacgaaacatgggtgctgtttaacgtcatgaacggtaaccgcgctgaaatgagcccggaagccgccggcattgccgcctgtctgatggcgtacagtcatcacgcctgtcgtacggagtgttacgccatgacggtccactattaccggctgcgggattacgccctgcagcatccggaatgcagcgccattatgcgcatcatcgactga

SEQ ID NO: 383242 - DNA, 477 bp, Salmonella enterica
atgcaacagctttcctttctgcccggagagatgacgcccggcgagcgcagcctcattctgcgggccctgaaaaccctggaccgccatcttcatgaacccggtgtggccttcacctccacgcatgcggcacgggaatggctgattctgaacatggcgggactggagcgggaagagttccgggtactgtatctgaacaaccagaatcagctgattgccggtgaaaccctcttcaccggcaccatcaaccgcacggaagtccatccccgggaagtgattaaacgtgccctgtaccacaatgccgctgccgtgatactggcacacaaccacccgtccggtgaagtcactcccagtaaggcagatcgccttatcacggaacgcctggtacaggcactggccctggtggatatccgggtaccggaccatctgatagttggtggcaaccaggttttctcctttgcggaacacggtctgctttaa

SEQ ID NO: 383243 - DNA, 222 bp, Salmonella enterica; identical to SEQ ID NO: 28563

SEQ ID NO: 383244 - DNA, 645 bp, Salmonella enterica
atgagcagaattatcaccaccaccgtgtatacactgaatgagctatcctccaccgcacgggaaaaagcccgcgacgagtaccgtcagcatcatgctgacagcaactggtatgaaaacgtgtatgaagacttcagggaggtctgtgacattttcgggattgacctccgccagcgtgttatccggctcagcaacggcaggtttatggaagagccgtgcatctggttcagcggattctgcagccagggggacggagcctgttttgaagggctctggcactggcagccagcggcaccccggaaaatcagggagtatgccccgcaggaccgtgaacttcatcgtatcgcggatgccctgcaggcggtacagaagcgtaacttctggcagttacaggctgaaatcagtcaccggggacgttactgccatccgtacagcatggatatcaccgtcacccggaacagtccgactggtcaggtaatgacaaccgatgcggaagccgcagtcagcgaagtcctgcgcgacctggccttctggttgtaccgtcagctggaaaacgagtacgactggctgacctcagacgccgctgtggatgaggccctgctcatcaacgaatacaccttcaccgaagccggtctgcgcgccggctga

SEQ ID NO: 383245 - DNA, 369 bp, Salmonella enterica
gtgtcagactcactccatgaaacaaattatcccgacgataacaacgaccgcccctggtgggggctaccctgcaccgtgacgccctgttttggggcacgtctggtgcaggagggtaaccggttgcattaccttgccgaccgcgccggtatcagaggccggttcagcgacgcggatgcgtaccatctggaccaggcctttccgctgctgatgaaacaactggaactcatgctcaccagcggtgaactcagcccccgccatcagcataccgtcacgctgtatgccagagggctgacctgcgaagccgacaccctcggcagctgtggttacgtttatctggctgtttatccaacatccgaaacgaaaacgtaa

SEQ ID NO: 383246 - DNA, 378 bp, Salmonella enterica
atgaaaacattacccgacacgcatgtacgggaggcatcgcgctgcccgtctcccgtcaccatctggcagatactgctgtcccgactgctggaccagcattacggcctcacactgaatgacacaccgtttgccgatgaacgtgtgattgagcagcatattgaggcaggcatttcactgtgcgatgcggtgaactttctcgttgaaaaatacgcactggtacgtaccgaccagccgggattcagcgcctgtacccgttctcagttaataaacagtattgatatcctccgggcccgccgggcaaccggcctgatggcccgcgacaattacagaacggtaaataacattaccctgggtaaacatccgggggcgaaacaatga

SEQ ID NO: 383247 - DNA, 489 bp, Salmonella enterica; identical to SEQ ID NO: 33524

SEQ ID NO: 383248 - DNA, 198 bp, Salmonella enterica
atgaaatcattaacgacagaaacggcgctggatattctgattgcgtggctgcaggacaatattgactgtgaatccgggattatcttcgacaacgatgaggatagaacggattcagcagcactgttgccctgcattgaacaggccagggaagatatccgtaccctgcgccaactacagcttctgcaacagaaccggtga

SEQ ID NO: 383249 - DNA, 849 bp, Salmonella enterica
atgatgtcagatatcacagcctcccgtccggaagtggtcaccgggcatacggacgttatttgctcaaccagtatccgccacattctggctgtacgaaagagtacactgctgcaaatcgacacacttatccggcaactggctgaaatatcagcaatgacagaaagtattggcggtaaaaccgcccgggactgggccatgaaacaggattttcgctgcggttgctggctgatggagaaaccggaaaccgcaatgaaagccatcacccggaatctcgatcgcgaactctggcgtgacctgatgcaacgttcagggatgctgtcattaatggatgcacaagcccgtgatacatggtaccggtcactggagtacgataattttccggaaatcagcgaagcaaatatcctgagcacgtttgaacaactgcaccagaacaaagatgaagtgtttgagcgaggggtgctcaacgttttcagaggactgagctggaattacaaaaccaattcaccctgcaaatttggcagtaaaattatcgtcaacaatctggtgaggtgggaccggtgggggtttcatcttatcaccgggcaacaggctgatcgacttgccgatctggaaagaatgctacacctgttcagcggcaaaccgatccccgacaaccgggaaaacatcactattcgtctggatgatcacatccagtctgttcagggtaaagaggactatgaagatgagatgttcagcatcagatactttaagaagggctccgcgcacatcacgttcaggaaaccagagctggttgacagactgaatgacattattgcgaaatactatccaaatgtattgaccgaaaggtaa

SEQ ID NO: 383250 - DNA, 396 bp, Salmonella enterica
atgactacaaaagaccgtattcagtcccgactgaaccgttcaaagcgttatgtgttcacccgggatgacttcagggatatcgctggctatgatcaggttggcagagctcttcgtacgctggtaaacgaaggtaagttgatgaaagtgggctatggtgtttacaccaaagcccgtcgcaacgttattacaggaaaaatcatgcctgcagcacctggtggctctgccgctgtaatcaccgaagccctggatcgtttgaatatcagatacagcttgatcggcgcaacagaatgctacaataaaggtcagtccacacagattccggtatctccggagttcaaaacacctcctcgctttaaaagagtgttagttgtagggaaaagtaaaatcaatgcctga

SEQ ID NO: 383251 - DNA, 948 bp, Salmonella enterica
atgcctgaattaacatcattatttcctgacgttgccaacgcactggatattgaatctgtcgccatcgtcgaaaaagattattttgtggttaatcttttaaagttactaaaagaaataaaaccagaaacacatactctcgtgtttgcaggaggtaccgcattgtcaaaagctggtatctcattgaacagaatgtcagaagatattgatataaagctcgtgccaacagagaactttatgcaaaatggcagaaacaggaaaagaaaaattcgcaaggaaatcgtgcaaataatcacggatgttcttcataattctgacattttcagccttgataatgaaaacgcccgtataacacgtgatgagtatcgttataacgagatccccgtacgttatccccagacatttgcccaggccccctgtcttcgtccatttattaagctggagttgatggaaaccactctgctggaacacccggaaagcagagatatttactcactcgtcacggagttaacgggtaatggcacacctgtaacagcattcccctgtgccaccattttatccactcaggctgaaaagctcatatccatgatgcgaagaacagccatacttcttcgcaatcccgaacaacaggatgatgagtccctggtacgccacatttacgacaattattgcattgtcagggaaaaaggtgtgaatgttccagtactgaaaaattttgttcagatatgtattcaacaggacattgagcgctatggtaaccagcacccacaatttcgtaactcaccagttgatgaacttaagaaagggctggatgcactccgggatgatcctgtacacaaattgcgttttcaacgatttgttaaaccgatggtatttggtaatacacagattgactgggaagaagcctactcctgtttcagacaaacagcgttgagtgttctgaccaactaa

SEQ ID NO: 383252 - DNA, 354 bp, Salmonella enterica
gtgaaaggaatcaaccgcctcaaaatccttcaggatgccatcgaccgcaatttacatcccggtcaggctgctgagatgctcggcattacgccacgccattgcagacggctgctgaaacgttatcgccaactcggaccacttggcatgaacaaccatagtcgtggccgcgttggtaaccatctgttgccaacttcactgatagatcaggcactctgtataatccgggagcactaccgtgattttggccccacgctggcgctggaaaatctggaggaagttcacggtctggttcttggcaaggaaactatccgacgcctcatgataaaagccggaatctggatccctcgcagataa

SEQ ID NO: 383253 - DNA, 483 bp, Salmonella enterica
atgatctgggcattcgtcaaagcttactggaaacagttacttatcgtggtgatgcttgctgccatggttactggctgtcgtatcgcatgggttaaccatggtgaaactcagtacgcagccgggtatgcgaaggcgcaggcggatcgcaaagtcgaagatgataaagcccgtaagcacgacgaacaggagaaagtgaccaatgaacgtgaagcgcagcagaggatcgaccaggcgcgcaatgatgctcttgatgctgccgctcgtgctggtaggttgcagcaacagctcgttgccatccgtgagcagctcaggcagtataacgccactgtcggcgctggggcgtcagccgcagacaccggagttttgcttgccgacgtgctcagcaaatctctcgagcgaaacagacaactggcagagtacgctgatcgtgcatccgaagccggaagagtctgtgaaaagcagtacgattcgctgaccaggtga

SEQ ID NO: 383254 - DNA, 630 bp, Salmonella enterica
atggacattaaccagttccggcgcgcatccggtatcaatgagcaactggccgcgcgctggtttccgcatattactactgccatgaatgagtttggcattaccaaaccagatgaccaggcaatgtttatcgcacaggtcgggcatgagtccggaggatttacccggttacaggaaaactttaactacagcgttaacggactgtccgggtttatccgtgccgggcgcatcactccagaccaggccaacgcacttggccggaaaacatatgagaagtctcttcctctggaacgccagcgcgcgatcgccaatcttgtttacagcaagcgcatgggaaataacggcccgggcgacgggtggaattatcgcggtcgtggacttatccagatcactggtctgaacaactaccgggattgcggtaatggtctgaaggttgatctggtcgctcagcctgaactgctggcgcaggatgaatacgcggccagaagcgcggcatggttcttctccagtaaaggttgcatgaagtacaccggtgacctggtgcgcgtcacgcagattatcaatggtggccagaacggtatcgacgaccggcgtacgcgttacgccgctgcccgtaaggtgctggcgttatga

SEQ ID NO: 383255 - DNA, 309 bp, Salmonella enterica
atgacaactcatgagctgcttttactcattgccaatgcggttatctgttctgcgatagcaatccgcgtcggaaccttccggcgtaatggatcgcaacaccgccggtggggtgggtggatagcctacttccttatcgtggcatcagccagcatccccgtccgcaccgcatatgcaatctggtatcacacaccaatggccgccgatttatcggaggtcatcatcaacgctgtcatgcttgccgccgtcctgaagacgcgcggtaacgtcgtgcagattttcaaaatatcgaggtctcaacatggacattaa

SEQ ID NO: 383256 - DNA, 405 bp, Salmonella enterica
atgtcagcacagctaaccagtgagtctttaaatcagtggcttagcatgggatctcttgctgcggttatcgcaggagttcctcctgaggtggcgcttggtgctctatctggcgcggtaatatttattacctctgccgttgagtatccaatccgccgccgggttcttctgtcgatgctcagctttctatgcgggcttctattctacaaaccaactgcatcaattcttatcggcgtagccagcctgatcccaactatcacgcaggactctttcgagaaagggatcgtcttctctgctggcgcgttcgtgtcggcaatcgtcgcagtacgtattggtatctggctctatcaccgttccgacaatccacgcgatttaatcccggggagaaaagacgatgacaactcatga

SEQ ID NO: 383257 - DNA, 2307 bp, Salmonella enterica
atgacggtctcaaccgaagttgaccataacgactacatcgggaacggggtcacgacttcattcccttataccttccgaatttttaagaagtctgatctggttgtgcaggttgttgacctgaatgagaacatcacagagctgattcttgacactgactacaccgttacaggtgctggtggttacactggcggaaatgttattttgtcgtcacctcttgctaatggttatcagatttcgataaccagagagttgcctgtgacacaggaaacggatctgcgcaaccagggtaagttttttgctgaagtgcatgaagacgcttttgataagttgaccatgctgatacagcaggctattagctggcttcgtctttctctgcgtaaaccgtcttttgtcgcaaattattatgatgcgctgaacaactacatccgtaatttgcgcgatcccagggaccctcaggatgccgccaccaaaaattatgtagatagcgtggctaataccaatctaagccacacattgagaactcctgaagcaatcccttcattgcccgggatagaacaacgtaaaaataaaattgtcgcgatgaatgatagtggcgatccgataatggttcttcctgagtctggttctgctgctgatgtgctgatagaactggcaaagccaacaggtgcagaattaataggaactctttctggtaaatcagttcagcaagagttgatgataaaaacatcttcattcccaacgttacaggatgctgctaactatgctgtaaacggaataattgttgatgaggattatcattttactgacggagaaactgttgattttggaggtaagaatttaacaattgagtgtaaggcgaagttcatcggggatggtatctttaactggaataacctaggtagtggctctgaaattatttctccgcatatgcatactaagaccactccttatactgtataccgtttcgatgataatggagactgggtaacaaatccagccgcagtattggcatctgttgctcagaggcttgataaaggatataaaccaaatgttaatgaccttgacatttggggggctttacctgattacgttaagaatcaggtggctggggctaccctgcgtgttaactctgccaataatattaatgttgtacatccagaagccactatgggtgggtatttattcacgctctgtaatcatattttggtggagtctcctcgcaactttattgcatgggaatccggaattacatttgagaatcaccacaccactgcctggggcactggcaataaggtcgtgggtggagagattaaatatggttctggttctgctgtattgtttatccgaaatgatggcggtaacgaccatgatggtggggttcaggacctgatatcatatcgtgtaggtgaaagtggtgtaaaaacttatcaaaatgaaataggtggacgctctgcaagaaactaccgcttggtgtttgataacataaccacgattcaatgttattacgatggtatagatgttaatgcggatacaggctcaccgactgagcgagtggatgattacagtttagctgagtacccgtggttccagttacccactaagcacatcatccgtaacatcattacgcgtgattgcatgggtattggtgcgtggtgggatgggcagttaaacattattgataatgtcgtaacctacgaagcacacaaggaaggtatattcgacaggggaacaaataatgacattactaacatcacggtggttggtgcaaataaagacctcaccaacctaaaccagattgtttgtgaaggcggaagtcgattaagaggaataatggtacacgcgtataccacgcaaggatatgcggtatatgcgccttcttcagagattagcaatgtttcatgcgcaggagccggaactaagaagctgctttgtacctttgtaggagatgttcaaggtggtaacattagtgttcaacataatgaaaaccaaatgacgcttgctatgagacctgcgatgggcggcacaataaatccatcattattaatgacggctgattgtcaggtggcggctccaggaggagaggcgagcattgttaagctttccgcgatacagggggggtcaagagctgctgaaatgcaattaaatagattgggattcggacatctctctattccagtatcaggagttcaattacccaataccgctcttgagaataattcctctatcggtttttattttgatggcagtggggcactaaaaatattagcaaagaaaccagatgggtcattcacgacatacagtatgtaa

SEQ ID NO: 383258 - DNA, 261 bp, Salmonella enterica
atgcaacagcggtatcaccacccactggaagatggattttatgaaagaatacacacgccggtaggcgttaggtccctggtggaggattcgcatcttatgaagttgctgcgggaactcgataaagatggcttcaacgtcgacgggccgctggccgaacttactgccctggtgaactatgtcaccagctcgcagatttccatgaaggatgtgcaaacgcatctcgattactgcgttgaacaactacgcaggcaaaccacataa

SEQ ID NO: 383259 - DNA, 696 bp, Salmonella enterica
atgacaactcagaaaaaccccacccctgatgcagtgtttaaattcgaatcttctacccctgttcgcatgtttaatatcgatggtaacccttggtttgctgcatcagacatttgcaaggctcttggtctgacaaactcacgcatgtctttaaaggcacttgatgatgatgagaagggagtaagttcaacttacacctctggaggaagccagtcagttagcgtcatcaatgagtccggcctctacactctgatcctgcgctgccgcgatgcggttactccaggcactatcccctaccgcttccgcaaatgggtaactggtgaagttctcccgcagatccgccgcaccggtcgctacgttcgtgaagaattatccccggcagataaagcgcaaaaggttgtggccagcttcatgcccgccattctggaagcaatgaaggcgggagaaaagcaggaatacagcgccccactcaaaccgaactatcttgaacacatccattcacctgaaggtgttcttggccttacggagcggtcaatgctgatggacctgctgcggaagatggacgccgacgggcataatgttgaaggtgctttttcagaggttacggcgatgatgaactacattgtcggtgccagtaaatgcctgcgcgatatccagactcatgcacagtacatcaacagcatggctggtaagttctga

SEQ ID NO: 383260 - DNA, 636 bp, Salmonella enterica
atgccacaacaactgctgaatccggcaaaggtaactgaggttttcgctcatctgaacgaaactccagacaaccgtgctctgtattcagagttagtgaacggcaacgatgtcacatctgatgtcaaaggcgtttctctggctcctggataccgcgttgtccgtgtagacgatcgtaagaaagtcgaaattccacaggcgcactttgaactggcattgataaacgatctcaccgaagaggttgtgtattacaaccgtgtcattatccagcctgacagttatctgaactgccgacctgtcacgcagattctggtatggagaacccagaagcctaagcaccgtgctgtgcttcatgatttcgctggcatcattttcatgaactatcttctggaacgctacgatatcattgtatctgatcgcaaccagactcatgaaggcatgtcgttctggcaggcgcgcatgtatgacgctctcgagcttggattgcacctttatggttacgacatgatgacgtgcgaactgatagagatgcacaacgaagcggaacttgagaagggtgaaacttggttgtggggtagcgctgagcattaccaagacagattggctatcatatccaagaacaaattgccgttagaataa

SEQ ID NO: 383261 - DNA, 297 bp, Salmonella enterica
atgcaatttattggcttcattgtttacatcgttgttggtctttttcagctggctgcaatcatggcaggtcttgaatcgtggtggggtctgcactggatagtagctgcgccaattgctttcatcgttagttatatcccgctggtcgggtccattgttggaatggttggcgctgtcgacgtatggcggtgggagtggtggcaggctggtcttctattctttggggggctaatctttgctatcgcctgcggtggaatgtcatcatttttcgaatggctatcattcagaaaaagagcgtga

SEQ ID NO: 383262 - DNA, 372 bp, Salmonella enterica
atgaaccgctttatcataactatccttctgatcttgttagttggaagggtttttgctgatactgtttcacctacattaattcagcctaaaaacggagaaacactagaggactctaaaaagcatacaatggaatattttggctgcataaagggccaggcaataaagtatgctaaaacaggtgaaagtgttgatgctatctcaaaggcttccgttgtatcttgcgagtcgtttatccctatgattgctgaatcaaatatatattatttaaattcttctcaagacggtaagcgacaatttactgaaaggctaaaatcagatggcgagaggttagcaacaaaatttgccatggatgaaaagctgaaaaataaatag

SEQ ID NO: 383263 - DNA, 2547 bp, Salmonella enterica
atggctaacgaatttcttacgcaatgcgaaatgaccgtcaatacggctgccgggcgcaagctgtctgagcacgaaatggaatcgcttgtgcgtgacatgaacgacaccaccaatcggatcctggctggcaatgaagccctcacactggaagaagctgcgatgcgcgcggctcagcagcttggcgaccgcgagcaactggcaaaagtgattgaggcacgaaacaaggccattaacacgcgcattgctgctcagcgcctgggtgagcttcgccggacgtggaaggaccggcctgacatcgggctggaagcaattctggttggtcgtaatgacgcgcgcactggatcccgccgatcagtatcgtctgaggtggcccagctgcgcgggaagtatcacgccggtatcaactacgatttcgaccaggcggggctggttaaatttattgccagcggcagcaacgaccgggagatcgccgacgctatgtggcgcattgggcgcggacagaaaacggacggcatgacgccgcaatcagtcagcgctgcgaagatcatcatgaagtggcaggaaactgcgcgcgtggatgaaaaccgtgctggtgcatggattggcaagatgccaggctatatcgtccgtcagtctcatgacatcctgaaaatacgagccgccgggtatgaatcctggcgcaatgccattcttccgcgactggatgatgtcacctttgacgggatcactgaccgcgaagggttcctgcgtggtgtatatgacggcctggcctccggagtgcacctgacatctgaaaagcctgactggatgaatggcttcaagggatcggcgaatgctgccaagcgcgccagccaggagcgcgtgctgcacttcaaagatggtgtaaactggcatgaatacaatgagcaattcgggactggcagcctgcgcgaggcagtattcggaggcctgaacagcgcggcgcgcacgacgggcatgatgcgcgtgctgggcaccaacccgcagaacatgttcaagtatctgacagacaccatcgcaaaagacgtgagcaagcagagcaacccggcggcgctggctgattttatgaccaaagtacgcagactgaatcgtacggtgatgcctcaggtcgatggatcgctgaatatccctggtagtgttggctgggccaatgcctccgccaacgtgcgcggctggctgcgtatgagtcagcttggtggagcggtgatctcatctttcaacgatgtgccgatttccgcgacagaaatgcgatatcagggtcagaacttcatgcaggcgctgaccggtgctataaaaggcagattttcccgttataccagtgatgagcaaaaggagatcctgtcatctatcggcgtttactccgacacgatgacgcaggagatcatccgccgtatgtccggtgacgacagtatgaatggcaagatgggtcgtgctcagcagctatttttcaaatacaacctcatgaacttctggacagaatccgggcgtaacagcaacgccatgatgataaccaactggctggcgaagaacgccgatcagaagttttcggcattgccggaggacctgcgacgcgttctggatctgcacggtatcggtgacgcggagtggaatatctatcgcaacatggatatggctgacagcgaaggccgcaaattcatgacagccagcggcatccgtggcgtgcctgatgatgtgatcgcgtcttacgttgagagcaaaggactaaagccgacagaaagggctatcgccgacgcacgcgacacactggagggccaattgcgcggttacgttctcgacaggcttaatatagcgatgtctgaaccaggagaccgcacccaggcatttatgaaaatggggacggttccaggcacagttgccggtgaggctatccgtttcgcaggacagtacaaatcattcactgccagctttatgcagaacgtactgggtcgcgaggtttttggccgtggctatacgcctgccggacttggtgagtcgaaaactggatcgctgactaatgcgctgctacgtaatgggaaaggggctttcctgggcgctgcaaacctctttgtctgggcaacgatgttcggttatatctccatgcagtcgaaactcatgctgaaagggcagacaccacgcccggctgatgcaaaaactttcctggctgctgcatctcagggaggtggtctcggcatcttaggcgacttcatgtttggcgaagtcaaccgaatgggggcgggtccagtgacgtcattgatggggccagccgcgtcgaatgctgatagtattatcacactgttccagcagaccacgcgaggcgatgcagaccttggtgactggtatcgtactgcgctggacaatacgccattcctcaacgttttctggcttcgtacggcgatgaatggtttaatcctgaatagaatacaggatgctcttgatcccggatcactggagcgctaccagcgccgtgttgaacgtgagcagggtaatgacttcctgattccgccatcacagttcatgctagggaaataa

SEQ ID NO: 383264 - DNA, 1707 bp, Salmonella enterica
atgccaatttatacagatgatccggggcagggtataaaccagccgttgtcgaatgcccccgcaggattgggggaatcgctgctttcttccctaaaagagggatttaaagagggtccggtagtatccggctatcggttctcccaggcagaacaactggctaacgatccgaactcgaccattgtcgctaaatctgacgcagattcccgcctgaaagagtacggcgtgaaaagcattaacgtgccggaaagtggcgtcacacagtcatatctcgatcatgtgatcagcgagcgccgagaatcgttggcgaagcaacagatcgccatgtcggccccgtctggatgggttgccactccgcttaactttgccgcaaaccttgccggctcaatggctgatccaggtaacgtggcgttagcactggtcccgttcggtggagaagcaaaggcggcaacaatgctaggtcgcttcggtgaacgtcttgctacaggtgcgcggctgggcgctggtcaggccattgccaccgttccacttacggcaaaggcagcagcggcagaaggcgatgacttcacttatggtaatgcgctggagagtaccttcttcaatacactggctggtggactgatgcacgctggcggagggctgatatcggatgtggtgcgctcccgcagggcggccaccactgaaaatcttgtcgcctcgccagacgttaagccagtcgctgatgcgcagccaactccagtggtgacacctgacaatatcccggaaggcgtcaatattcctgagtctggcactaacgccgatctgtcagcggcaatcgctcgggatgcagaagcgtatgcctacagccgcgcctatgatgatgtagtgccggaatatcttaccaggcagcaggagctacagaccggacgcatcgacaatgttgctgatctgcgcactgagctggagagcaacaaccggcaaagtgaaaaccttgacgcaactctggctcagcgtacgaccgagtatcaggcgcaacgcatgaatttcaaagcggcgcgcgccagggcccagcgtgatattcagggtgagaaagacaccattgccgcgcgtaatcaggaaattaaccagacgcttgaacgcaacgccgccgcagaacaggctcgcgccagagagtcgcagttgtcacgcaaagaggttccggaagacctcgccaggttaatcgacgagcgcgcacagcagatccgtgaaagcatgcagatgtcaccggtagctggtgccgttcgtacagcatcggcagcggtgcgtgaggcagactggagcgtaaaccagcaggcataccgcggcgcactggctcacatgatggaaggccgatcgccggatattgagccattctatgatctacacaaaccagcgttacgcgagcgtgctattcagcgcatccagaaccctgtgcggcaggctgatgaaggttcccgcgccgtcagtgaaagtgccgatcgtgtgtggcaggatacgcagaaggctaaccacgaaatcacagcggccactgcagatctggaaaatgaattcaatatcagtgacgcgctgctgaacgacattgccacagataaccctgatctggctgcgtcgatgcgcgagaacattgctgcgatccgtgcagaggcaagcgacgactatatcggcaaagcatatcgcgctttcgccgcctgtatgattaaccgggggctttaa

SEQ ID NO: 383265 - DNA, 2622 bp, Salmonella enterica
atgccaacagtaccaacagtcaccggtcgtcaggtcgaaagcagagggtttcagtctccgggttttcaggcgttcgatcagccaaacatcggtgatgccatcgttaatgctggcggcaaagctatcagcgtatttggcgaggccaagcagagggcaaacgttgcacttacccaggaagcaacgctgaaactgaatgccgttggcagcgatcttctcaataaccctgattccggtttcatgaatctccagggtaaaaacgcgatcggcaaagggcaggagtatgtgcagcagtttaactctcaggtgcagaacattgcagagaacctgccggatgagcaagcgcgtaatgcgtttctccagcaagcacaacagcagcagatccagttccagatgacagccggacgccatgaggttgctcaggtgcgtcagtacgaggctggcatgcaggaaggaactttgcgcgctttgtctcagcaggctctttctcctggtatgttcgcacccgcactgtttaatgcgcgtgattccattattgcctatggaaaagcccacggacagagcgatgaagaaatagagtcgaattttgtgcagtggcgggagcaggcagccaaccgcgccagcgaagcgtggtacacgccgacctatcagcagatgatggggccagaaggtaagattgaagttacggacacgtcgagtgaatcgcagctcttttcagcgatgatctggcaggagtctggcggcaaccagtacggtaaagatggatcgccgctggtatcgccgaaaggtgcagttggcgtggcacaggtgatggaagataccgggccggaagcggcgcggctggctggcgttgagtgggaccgtgataagtggctgaacgacccgcgctataacgcaaagcttggccaggcctacttcggtgctcagatgaagaagtacgataataaccctgtgctggcggtggcggcgtacaacgccgggcctggcgcagtcgatagctggattgaacggtttggcgacccgcgcactggcgctattagtaacgagcagttcgctgcggcgatcccttacgatgaaactcgaaactatgtggcgaaagtaaccagtagcgcaccggcaatccccggcacggccacgatggaaaatctcatcaaccagcctttctggaatgcgatgagtccgcaaaacaaatccgcgatgatgagcaaggtcgcaggaatgtacgatatgcaggccgctgccggtcgtgtgtcattgcagacccgcatgcaggatgacctggcgaaactggaggccgggaaaccagtcaatccaatctcagaacgagaatggctggctgtgatgccgttgcaggcaagtcctgcggaacgcattcagatgcgtgagtcattccagcaataccagcaggcgatgacactgcaaccagtttatcaaaccattgtgcagggttccgcacaacagggtatcgctgcggtgcagtctatggctccgcaggaagatgatcctgatttcaaatttaagcagaacctgtatgcgactgcgcaggccaaacttaatcaggtaatgaaagcgcgcgagtctgatcctggctcgtggctgcaaacaaattcgccggtggtgaaaaacgcctttgagcagtaccaaaataaccaggcatcaggtgaatatctggtttcacgactggaagctgagaaagaccgcctggggataaatagtaaaaaggttctgcctgatgtgatggtcaataaccttattcagcagattgacaacaataaggaatcaagcgtgaccgctattcaatcggtggctcagtcgtttggcaaatattctgatcaggtcatgcagcaggttcagaaaagcgcttaccctgcgttgcaggtcatcatggcaaccaataaccctcgcgccgctaacgcgctctggcaaaaccgcagcattaaaacctctgaactacgcggcagctttgagaaaaccgacgctgacagcgccgactcatcatggaatgaccaggccaaagactttgccgggacgatggttgttcagcctggcggtaccgctgtgtggaacaacttcaacgagcagggtaaacgcctgacttacacctatatgcagcgtggcatgtcacctggcgatgcagcaaagcaggcttatcaggacattcttggcgagcagtatcagaccaatggcacatggcgcatgcctaacaacgctggacacgatattcgcgatgttaatgacggcgctaacgagtatctgaaaaacctgtcagccgatcagatcatgccgcttatcggtgatgcccgactgccggatgaggttaaccgcgagcagagcatttcgcgcattcgtgataacgctcaatgggtgaccaacagcgacgaaacagggctgactctgatgatgaacggtctgttgatcaacaacgctcaggggcagccgattaccgtgtcgtttgctgatctggctaaacttggcgctggcaaccgcaccacgtggaacagcctcaccaaattcgtgcagacgccggttaagtacacgcctggacagtcgaagaattacacggtggaaagtcagcgtgacaacctgatcaacattatccagaacggccagcagacgggacgataa

SEQ ID NO: 383266 - DNA, 543 bp, Salmonella enterica
atgtgcagcccggctatcgctctcgctggcgccagtgtcgcattaagtggcgtttcagcatacaaccagtaccagcaaggtaagtattcgtctgctgttgccgagcaaaatgcagaagtggccacggcacaggcacaggattctatcaaccgtggtaatgctcaggctgatgaggttcgccgtcgtaaccgtcaggctgctggcacccaggcggcaacaatgggcgcaactggtgcagatctctccactggtggagctcttgatatctttggcgatacagctcagtttggcgcgctggatgctctgactaccgtgaataacgcacagcgtgaagcgtatggctatgaggttcaggctgccaactataaagctcaatccagcgctgcacgtaagcagggaaatatgggcgcgtttactacgctgctgactgcacctcttcaggcatacggtgcataccagatgggcggaggaacatggtcaccgttcacccaaagtaaagcggcaccgatcagcgctgccatcggcacaccaaccggtcgataa

SEQ ID NO: 383267 - DNA, 465 bp, Salmonella enterica
atgattaaagctcagatcgtacccgctacagcagagcatatcgaagccattattccgcttgttcgccaggctgatatcgatgagtttctggcagccaacggatggagtccgcgccgtgtgctggagaccggtctgcgcacgtcaacattttgctgtgccggattgattaacggcgaagtggtgactgtctttggcgtggcaccagcatcgatgatcggcgggagtggtatcccatggctggtgggcactgacgcgctggagaaataccagcgtaccttcctgcgccggtgcggaaaagtggtcaatgcaatgctgactgtttacccgtatcttgaaaattatgttgatgcgcgtaaccacactgcgcgcatctggcttcactggctgggattcaccatcgatgaacctcagccatatggcattaacaacctaccgtttcaccgtttccatatggagagaaaataa

SEQ ID NO: 383268 - DNA, 2478 bp, Salmonella enterica
atggcttttagctggattcaaccgagctttgccggtggtgaaattggtccgtcactgtatggccgcattgatatgtcaaagtatcaggtggcgctgcgcaagtgcgataacttcattgttcgccaatatggtggtgtagagaacagaccaggtacgcgctttgttggtcctgctaaataccctgatcgcaagtgccggttaatcccatttcagttctcgaccgtacagacctatgctctggagttcgggcacaactatatgcgcgttatcaaagacggcgcgtatgttctgacgaccagcaatgtgatttatgagctggcgacgccgtattctgacactgaccttttccgtattaaattcacgcagagcgccgacgttctgacgctggtgcatcccgcatacccgccgaaagaactgcgccgctatgcgcacgacaactggcagatcgtcgatgtcaccaccaaaaacgggccgttcgaagatatcaacgttgacgagactgtgaaggtatacgccagcgccagcaccgggaccattacattgacggccagctctgccatctttggttctgagcaggttgggaaactgttttatctcgagcagcctgcggttgattccgttcctgtctgggagaccagcaagaccacagcaatcaacgacgttcgccgtgcagacagcaactactaccgcgccaatactgctggtaagaccgggacccttcgcccgtctcacactgaaggtatgtcttgggatggatggggcggtaccggatcagatgataccgggatccagtgggagtacctgcacagcggtttcggcattgcaaaaataacagcagtggctggcgatggcctcacagcaactgccgatgtggtttcgttcattccatctcaggttgttggctccgctaacgccagctataagtgggcaaaatacgcgtggaacagcgttaacggctacccgagcaccgttgtttactaccagcagcgcctgtactttgccgcgtcttctgcgtatccgcaaaccatctgggcaagccgaacaggagattataaggacttcggcaagaacaaccctattcaggatgacgatcgcatcatctacacctacgccggacgtcaggtgaatgagatccgtcaccttattgatgttggtaacctggtcgctctgacatctggcggggaatatacgatatccggggaccagaataaggtcctcacgccatcggctttctcgttcagctctcaggggaataacggatcaagtaacgtgccacctatcgctgtggctaacatcgcattgttcatccaggagaaaggcagcgttgtgcgcgatctggcctactctttcgacgttgacggatatcaaggaactgacctgaccatactggcaaaccacctgttccagaaacacagcattgttgactggtcattctgcattgtgccgtacagcagcgctttctgcattcgtgatgacggtaaattactggtgctcacgtatctgcgcgatcagcaggttttcgcctgggcaccgcagtccagcgctggtaaatacgaaagtacctgctcaatcagtgaaggcagcgaggatgctgtttacttcgtggttaaccgtactatcaatgggcagaccgtacgttacatcgaacgcctgtccagtcgcctgtttaccagtgatgaagatgcgttctttgtcgattgtggcctgagctacgatgggcgcaatacatcatcccgcacaatgactatcagcggtggcacaggtgactggagctatcaggttgattacccggttacagtaagcggtggtgcgtatttcgttaatactgatgtaggtgctcagattcagttcccatataccggcacagatccagacaccaacgaaccggtggctaaagaggtgcgcggcgacattatttcagtgaccagcaatactgcggttgtcgtgcgcttcaaccgtaacgttcctccggtgcttcgcaatgtggccacaactaactggcagatggcgcgccagacgttcggtggcttgtcgcacctcgaaggtcagacagtaaacatcctgtcagatgccagcgttgagcctcagaaggttgtcactggtggttcagtcacgctggagtcaccaggtgcagttgtgcatatcggacttcctatcactgctgaattcgaaactctggacatcaatatcaacgggcaggaaacgctgctggataaaaagcaggtcattcctactgtcacgatggtggtcaacgcgagccgtggaatctgggcaacaacgcctggcggaacatggtatgagtatccgcagcgtgaatttgagttctacgacgatcctgttgatgacgctaccggcaaggttgaagtgaaactcgacagcaactgggataaaaacggacgcgttaaggttcgccagcttgacccacttccgctttctgttcttgctgtattgcctcgccttaccgtcggaggattctga

SEQ ID NO: 383269 - DNA, 606 bp, Salmonella enterica
atggcttctgttatcgaaatctgcaaccgcgcgctgagcaatatcggcaacagtcgcagcattaacagcctgaatgaagccagcaaagaggccgggcaatgctcactgcattttgatgcgtgtcgtgatgctgctctggctgacttcgactggaacttcgctaccaagcgcgtggcgcttgctgataccaataatccgcctcctgactggcagtacgcttaccagtacccatctgattgcgtccgtataaccgagatcatgccgaccggaatacgtaatcctaccgctgcgcagcgcattgaatatgttgtcggctccaatgaggacctgacaggtaagctcatttacaccgatcagccgaaagcgtggttgaagtatgtggcgcgggttactgacgtcaatatgtatgatgccatttttatggaggcgctttcttggcgtctggctgctgccatcaatatggcgctgactggtagcgcagaactcggtaacaatgcactgacgatgtacaaccgtgtgatcctgagcgctggctcacatagccagaacgaatcgcaggagccacaaccaccggtagatgagttcacagcagcgaggttgtcataa

SEQ ID NO: 383270 - DNA, 324 bp, Salmonella enterica
atggatctggtaaacctcaaaaccggcaccgacacctatcaggatgaggagggtaaaacccagactcgtgatgattatccgtggggcctttgcattgaattgaacaacgagacgctcaccaaactcaaggcagcacctcaatccgccggcactgaagtgatgatcacagcaaaggcaaccattcgctcaacttctacccgtgaaactgaagatggaatgcagcataacgccagcctgcagatcactgatatggcgctcagtccagtatccggtgagcaaccgaagtcagcagcgcaaactctctacggtggggaggatgattaa

SEQ ID NO: 383271 - DNA, 381 bp, Salmonella enterica
atgtcaggtgaaaaagcaagataccgcgtcctgcgtttatcccacattcataacaacctctggcctgaaggctctgaagttgagtatgacggcgaaccaggtacggcgctggagccactgaacgatgcggcaaaattggcaaaagagatcgccgaaaagcgtaaaggaagatcggcttctgtagttgtcaatgttccatctccagctgcggttcatcaagtagtggaagaagtgaaatctgatggcactggcgcggtaagtgaagaccttactctgcttcgacagcagtatgaggatttactaggcaagaagccgggcaataaaacggctgaaactctggcaaaagagatcgccgaaaagcgtgccgaactgggcgtctaa

SEQ ID NO: 383272 - DNA, 441 bp, Salmonella enterica
atgatcctcgacaaactgttgatgttctccgaagcgcaggcggttacggcttccgcagcttctactgatgtaatcgatctcggtcctatcgacggcacccgacgtgatatcggtgttggttacccgctggagttctgggcaaacgtgaataccactgcaaccgcaggcggtgctgcaaccctgaacgttcagttgcagaccagccaggataactctacctggaccacgttgtacgacagcggaacgttggcgctagcggcgttgactgctggaaagcgcctgttttccgcgaaggtgccggcaggtgtccagcgttatctgcgtgttaactatgtggtcggtactggtccgctgacggccggtgctttcacctcggggattaacctggatgttgataacaacagcccgtactacccgattcgttcaaaagtgactggctaa

SEQ ID NO: 383273 - DNA, 987 bp, Salmonella enterica
atggctgttaaaggcgtaaatgcgctgacgctggctgactgggctaagcgtactgatccaaacgggaaggtcgataagatcgtcgaactcctttcccaaaccaacgaaatcctgacggacatgatgtttgttgagggtaatctgccaaccggccaccgcactaccgtgcgctctggtttgccatctgctacctggcgtttgcttaactacggcgtgcagccaagcaaatcaaccacagtacaggtaactgactcctgcgggatgctggaaacttatgccgaagttgacaagtcactggcagatttgaacggcaacaccgctgaattccgtctttctgaagaccgtgcattcatcgaaggcatgaaccagcagatggctcagacgctgttctatggtgataccagcgttaaccctcagcagttcatgggcctgtcttcgcgttactcaagcaaatctgctggcaacggtcagaacattatcgatgctggcggtaccggaactgataacacatctatctggctggtggtgtggggtgaaaacaccgttcacggcatcttccctaaaggccagaaggcaggattacagactcagaacctgggagaacagactcttaccgattcttctggtggtaaatatcagggatatcgtacccactacaagtgggataatgggctggccctgcgcgactggcgctacgttgttcgcatcgccaacatcgatgttagcgatctgtctgttccttcttctgctgcaaacatcgtcacgatgatggttaaagcgcttcaccgcgttcctaacctgaagatggggcgtgctgttttctacatgaaccgcaccgttgctcaggcactcgacctgcaatctctggataaagcttctctggctctgtccgtcaaagagacagaaggcgaatggtggaccactttccgtggcatcccgatccgtgaaaccgatgcgattctggaaacagaagcgcgcgttgtttaa

SEQ ID NO: 383274 - DNA, 708 bp, Salmonella enterica
atgaatttatttgatcgtttgctgcatcgccgtctttgcaatgagcaacctgctgatggtggcgcagctcctgctgcatctgaacccgcatcatcaactggtgataatccggcacccgctggcgatccggctaaaccagaaggcgataagccgcaacctggtgctgaagccgacaaacctcaggaagaaaaacatgctgatggcgataagccagaagagaaaaagtctggtgaaaacaaagagcagaagcaggaaggcgctccggagaaatacgagttcaaaccatctgaaggccaggaactcgacaccggagcgctggagcagttcgagcctatcgcccgcgaactgaacctgactaatgagcaggcgcagaagatggtcgatctatacggcaccaagattatgccaatggtccagcagcagcaggcagaagcctggcagaaaaccaccgaacagtgggctgctgacgttaaagcagacaaggatatcggcggcgacaagctgaccgcaaacctcagcgctgcgcagcgtgcacttgctcagttcggcacacatgaactgaaagaatatctggaaggcaccggactgggtaatcaccctgagctggttaaaaccttcatcaaaatcggtaaagccatgtcggaagacggcatggtagatggcagtaatcaaggccagcgtagtgcggccgaagtgctttatggctaa

SEQ ID NO: 383275 - DNA, 297 bp, Salmonella enterica
atgatggatatcgacgaagaggaactgcgcattcagaacgagcggaaaaagcacgatctggaacagcgcgagaaggacgacatcaaattcgtcatggatagcgagcagggccgccgcgtcatctggtcactgctggagaaaggtcaggtgttcggcgcctgcttcagcgtagacccgcacatcacagcattcaacgaagggcagcgcaacctagcactggtgttactgcaacgcgttatggcgcactgtcctgatcagtatctgaagatggccgcagaggccagtgaacaggagtaa

SEQ ID NO: 383276 - DNA, 1671 bp, Salmonella enterica
atggcggaaaccgaaaaagagcgcctgctgaagcaacttgcgcagctgaagaatgagcgcacatcgttcgaatcgcactggcgtgatctgagtgacttcatcaatccgcgtggctcccgctttctgacgtctgatgtaaaccgtgatgatcgtcgtaatacaaagattgttgatcccactggctcaatggctcagcgcattctgtccagcggcatgatgtcaggcatcactagtccggcccgtccgtggttcaagttggcaacgcctgaccctgacatgatggactacggcccggtgaaaatatggctggaagtcgtgcagcgccgcatgaacgaagtgttcaacaaatcgaatttgtatcagtcactgcctgttatgtacgcaagcctgggtactttcggcaccggcgctatggctgttctggaagatgaccaggacgtgatccgcacaatgccattcccgattggcagttactaccttgctaacagtccgcgcggtagcgttgacacctgcattcgccagttctccatgaccgttcgccagatggtgcaggaattcggtctggataacgtcagtacatccgtaaaaggcatgtgggaaaacggcacgtatgaaacgtgggtggaggttaaccactgcattacgcctaacgtcaaccgcgacagcgggaagatggacagcaagaataagccttaccgctctgtctatttcgagtctggcggcgactccgacaagctgctgcgtgaatccggtttcgatgaattcccgatcctggctcctcgctgggaagtgaacggtgaggatgtttacgcctcatcttgccctggcatgctggcgctaggtcaggttaaagcccttcaggttgagcagaagcgcaaagctcagttgatcgataaagccactaacccgccgatggttgccccgacatcgctcaagaatcagcgtgtttccctgttgcctggcgatgtgacgtacctcgacgtgttgaccggtcatgatggtttcaaacctgcatacctggtaaacccgaataccgccgacctgctggctgacattcaggacacccgtcagactatcaacagtgcctacttcgtcgacctcttcatgatgctgcaaaacatcaacacccgctctatgccggtggaagcggtgatcgagatgaaggaagagaaactgctgattctcggacctgtactggaacgcctgaacgacgaagcactcaacccgcttatcgatcgcgtgttctcaatcatggcccgcaagaacatgttgcccgaacctcctgacgttcttcagggcatgccgctgcgcatcgagtacatctctgtgatggctcaggctcagaaatctatcggcctcaccagcctgtcgcagacagttggctttatcgggcaactggcacagttcaaacctgaagcgctcgacaagctcgacgtggatcaggctatcgacgcgttctctgaaatgtcaggcgtatcgccaaccgtcatcgttccgcaggagcaggttcagggaattcgtgaagagcgcgcgaaacaggctcaggcagcacaggtaatggctatggggcaggcggcagcgcagggggccaagactctcagcgaaacgcagaccagcgacccgagcgcattaacagctatcgctaatgcagcaggagcaccgcagcaatga

SEQ ID NO: 383277 - DNA, 207 bp, Salmonella enterica
atgtgtatcggcagcaagccatcagtgccagcagcgccagaagtacaggctgcgccacaggagcaggatgcagcagttatcagttctcgtgacgacgaagagcgccgccgccgtgcagcagctggtcgcagttctacgctgcttactggtgcgcagggtgacacctcaaccgcaaacaccagcggtaaaacgctgcttggtcagtaa

SEQ ID NO: 383278 - DNA, 1476 bp, Salmonella enterica
atgacagccgcatccatgtcgccggaagaacagctcgtcgaggatatcgcctcgttcacgtatgacccgcttggctacgtgctgtacgcgttcccgtggggtgaggatggaacagagctggcgcacgccactggtccgcgtaaatggcaggccgacgcattccgcgagatacgtgatcacctccagaatcccgttacacgtcaccagccgctgatgctgtcccgcgcatctggtcacggtatcggtaaatccgctttcatctctatgctgactaactggggcatgtcgacctgcgaggattgcaaggttgtggtgactgccaacaccgacaaccagcttcgcacgaagacctggcctgaaatcatcaaatggtcgaacctggctatcacgaaagagtggttcacctgcaccgccacggcgatgtacagcaacgatccaggtcacgacaaacgctggcgcgctgacgcaatcccatggtctgagcacaatacagaagcattcgcaggactgcacaacgagcgcaagcgcatcatcgtggtattcgacgaagcatccaacattgccgatctggtgtgggaggtggccgagggcgctttgacggacgaagacacagagattatctgggtggcgttcggtaacccgacgcgtaacaccgggcgtttccgtgaatgtttccgcaagtacaaacaccgctggaagtgcgcgcagattgacagccgcaccgtggaaggcaccaacaagcagcagttgcagaaatgggtggacgactacggcgaggacagcgactttgtcaaagttcgtgtgcgggggatattcccggatgcgtctgagctgcagtttatcccgaccggactgaccgatgaggccataaagcgcgtggtgaccgccgggcaggtggcgcacgctccggtgattatcggcgtcgaccccgcttattccggcgtggatgacgcggtgatttacctgcggcaggggctacatagcaaagtgctatggaccggcaacaagaccaccgacgatttgattatggcgaagcgcatcgccgactttgaagaccagtaccaggctgacgcggttttcatcgacttcggttacggtaccgggcttaagtccatcggtgacggatggggcaggacgtggcagttaatcccgttcggcggcggctcgacagaccctcagatgctcaacaagcgcggcgagatgttcaacagctgcaaaacatggctgaagctcggcggcgcgctggatgatcaggagacggctgatgacctgtcggcggcagagtacaaagtcagggttgacggcaagatcgtcattgagccgaaggaggatatcaaagagcgcttaggccgttctcctggtaagggtgacgcgctgctgctgacgtttgctttcccggtatcgaaacggctgcgtattcctggtcatgagaaccagcagggtaaggcagtaactgattatgacccatggaaataa

SEQ ID NO: 383279 - DNA, 597 bp, Salmonella enterica
atgccagcagaaccaaaagcaccaaaacgcaaatcaacgcagtacaagcccctcacagctatgcaggaggcttacgcgcaggaatatacaaaatgccctgagaatcagacgcaggcggcgattaacgcaggattctcgcctaatacggcatccgtcaaagccagtgtcatgatgcgtgatgagcgtatccagaaacggattgccgaactgatggaagagcgcaacaagcgcctgcgcgtcagtgctgattatgtgcttctccgcctggtggaaatcgaccagatggatgtgatcgacattctcaacgacgatatgagcatcaagccggtttcggaatggcctaaggtctggcgccagtaccttaccggcttcgaactggccgacatgtttgaaggtcgtggagacgagaaagagctggtcggcatcctcaaaaaaatcaaatggcctgacaaggtgaagaacctcgagctgattggtaagcacatcgacgtcaacgcgttcaaagagcgtctggaggtttccggtaccgtcacgattgccgaccgtatagcgaaggcccgccgtcgcgtgaaagagcaggctggtggtgaagaatga

SEQ ID NO: 383280 - DNA, 339 bp, Salmonella enterica
atggctaaatccgcagcagagcgcaaagcagcgcagcgtgcgcggcaatacgccgccggtgagcgcaagcttgagctggtcctggatgagcaggaactggaaatgctgtcgcggaactgcgccgcccgtcgctatggtcgtgcgccgtatggcatgagcgagtacatcgcgttgctgatccgccaggatgatgcccgcgttcgtggccgtatcaaatccatcagcgcgaaccgatgcgggaaatgtggcgatgcgttgccggttgagtcgtgtccgtgcgatggtgactcggcatgctgggttacgcgtggctggcatgaaactaaattatcagtgtga

SEQ ID NO: 383281 - DNA, 375 bp, Salmonella enterica
atgacagcactcaacaaacaggcgctgcgccaaacagcagagaaagctcaagagcatggcgtgttcaacatggatattcattcacaaaccgtgctggcgctgctggatgaaaatctccaactacagcgcgacaatgattctcttgaagcagcagcgattgctatgcgtgacgatatgcgggaggcgcgcgaaaagctggaatccgcagagaagcgcatagcagaactggaggcgcgcaaggtgaccgttaaattaccagccgattaccgtaactctgacggcagcatcaacgatgacatgtttaacacctgtgcagttgttggtgcatttcgtgatgcacttgccgccgctggcattggagtgaaggggtggtga

SEQ ID NO: 383282 - DNA, 213 bp, Salmonella enterica
atgagcaaaccaactgatgaagaaatcattgcggtactgaagcgtcgaggcccatgcatgacatacgtagctactaactggcttcgcgatgaccatcgctcacttcaaacagcgtacgtattgcgccgcctgaaaaagcttgaagcaattggcgtagttaagcgcgttaaaactagttatgcggttcaaatctgctgggaggcagcccaatga

SEQ ID NO: 383283 - DNA, 489 bp, Salmonella enterica
atgggaagcaatatcattgagttagcgaagttggggcatgagcgtgcgtctgaactgaaagcatcatgcggtgctgtcaatgtgcgcagtttggcgcaactgattagcgatctggctactcaacttgaagtgcaactggtgcgaggtaacgagcaggcagtacagctcgctaacgccgagagcaagtgcagtgcgctggctgcggagaatgcctgcctgaaacagagcatcgaagaggtggcagaggcatttgaaaccgggactgatggtgttcttgctactgctgttgatgagtctttaaacctgctcactccggaaactgatgcggtactgaaaaggattcaggcgcatggcgtggctatgtttgcttcaaagtgcaaagaagagtcgaagcgtgcccactcttcaggcgccagggattcctggtgggtctcgggtgaaaacgctgacgacttcgccgcccagcttcgcaaaggagccgcgctatga

SEQ ID NO: 383284 - DNA, 345 bp, Salmonella enterica
atgaaaaggcagttacaggcgctcggaaggctcaagacgggccagatgaataaaaccgaatcagcttattgccagcaccttgagttacgcaagcatgccggtgaaatagcctggtaccggtttgaaggcatcaagctgcgcctggctgataacacgttctacacgccggacttcgcagtgatgctcaccagcggtgagatggaactgcacgaggtgaaaggtttctggaccgacgacgccagggtgaaaaccaaagtcgcagcagaccagtacccgtttcgcatcatcggagtaacggttaagccaaagaaagcgggtggcggctggaacatcgaagaattctaa

SEQ ID NO: 383285 - DNA, 816 bp, Salmonella enterica
atggccggtgactggataaaaatgcgtgccgatctgcacacgcatcctaaagttgtccgcatggcgtccgcattgaaagcggacagattgcggatagttggcggactacattccgcatggtgtctttttgatgtccactctgttgacggttttcttgacggatacagcgcggagactctcgacgacctgatcggcttccccgggtttgcgcgtgcaatgatggctgtcggatggcttgaagaagatggtgaaagcctagtaatgccgcgctttgaagcccataacggacagtctgccaagcgtcgtgcacaggacgcagacaggaagagaaatgtccgcaaagcgtccgcatctgaagcggacaaaaagcggaccagagaagagaagagaagagaagatctaaaagataaaaccccacacataggcgacgagaaaaatcagcctgtggataactcaggaggtgaagagccagatccacatgcgacaaattctgttactgatggatatgcaccaccaggcggatccggttctctgggtaaattcaccatgcctgatagctggacgccggatcctgatttcaccaaacgagctgccctgtggggggtaaaccttaaaaccgatgtgacgccatttgaactggctgatttcattacgtactggaaagccgagggaaaagcatttcaccacgaccagtggcagcagaaactggctcgcagtgttcaactctccaggtcaaagccagcgagaactcagcagcgggacgttaacgcagtaccagaaccagacagcgagatacctcctggatttcgcggttaa

SEQ ID NO: 383286 - DNA, 204 bp, Salmonella enterica
atgaagcgaatcacccagcgtgaggctctcgatttgggccttactcgcttctacaccgggaagcaatgtatccacggtcatgactgcgagcgctacaccctgagcggggaatgtgtgaagtgcaataacgaacgagcacggcgacaggcaaagcttcgttccgaaaaaatgaaggcagccaaaacggcaagagaggcagcatga

SEQ ID NO: 383287 - DNA, 234 bp, Salmonella enterica
atgagtgacgaaaaaaaatttgatttcaaaaagcactggctggggctgtctcctgatgagcgtgaagcatttgcagttgaagccggaaccaccagtcattacatccagacgcacctgaccgggcgccgcaagatgccgggtaagcgtctgatggaaggactttttaaagcgtgccgttcccgcgaatggacaaagtctaaacctgaattagtgctcttcttctacgaccgataa

SEQ ID NO: 383288 - DNA, 597 bp, Salmonella enterica
atgaaaagtatttatgacataagacgcaaaaaccttaacgaaatcattctccgggatttcgatgatacccagttacgctttgcagaacgggtgaaacgttcgcagaacctggtcaacaggtggtgtactggtatcaaaaatatcggaccgaatgccgcgcgtatcatcgaagaagcagcccgcaaagaaaagttctggctcgatgttgatcacgaactggacgcagtacaggctgatatctttattccggccactgaagatggcgaatggactgtagagaagcaggccgcagccacgcttaatgcctggatgagaaaggacacggaaatgacatccgaaaagaaagttgctgtagcagctggtattggcccggccaccgttaaccggattatgaaagcggaagtcagtacaaccatcggcgttctttcctccctggcacgcgcgttcgggcatgaagcatacgagatgattattcccgtcggcgcacctggtattatcgactatgaccaccggatgtatgcagctctgccacaggaagagaaaaacaagatcacctcattcataaacttcgtgtttgagcagaacaaaagcaagtaa

SEQ ID NO: 383289 - DNA, 150 bp, Salmonella enterica
atgcagtggaaagtcatcaacggttggtactgcgttacagcttgcgggctgatgagctggaagttccgcacgctgggtgagggcatgaaatgggcatttaccaacaaggttgcgcacgaagttgccaacgataacgggatatgggggtga

SEQ ID NO: 383290 - DNA, 303 bp, Salmonella enterica
gtgaatattcagcaattcaataacctgaaaaaaatagcaactcagtttggcaatgactatcagctgtcatctgaactgtatgaccgccacgttgagcttatcgaagcagtagctggttgcgaaatggaagagtcattcaaacgcgccattctccgtgccggtgttcgttatgaagttctggaagcggcatttgaaagtgatgatttcgaagagctgatgtcttcactcaaacgtgaattgactggcgtcatcgcacgtcttgaccttgctgaccagatcgacagcaaaaggaatgcagcatga

SEQ ID NO: 383291 - DNA, 822 bp, Salmonella enterica
atgaataccggtatttatttcgacatcagcaacgaggactaccacgccggtgacggcgtgagtaagtcacaactggatatggtggccaagaacccttcccttctgaaatgggtgaaggcagccccggaagacgaagagaagaaatccgcactggacatgggtactgctctgcactgcctgctgctggagccgaaggaattcgataagcgtttcatcgtggcgccggaatttaaccgccgaaccaatcaaggcaaagcggatgaagccgcattcatgaaagacgttgctggcatgggcatgacggtgatggattctgagcagggccggaagctgaaacttatgcgcgatagcgcaatggctcacccggcggcgcgctggatgctggaagcaccaggccactgtgaagcgtcgatgtactggaatgacgaagagactggcgaactgtgccgaatccgtccggataaatggctgaatgagcacaacgtgatcgtcgacgtgaaaaaggttgcagaaatggatcgcttttcccatcacatcgaggaattccgctaccacgtgcaggcagaaatgtaccgagaaggtgcgctgaaagtaaccgggcagccacacggattcttcttcatagcagtaagcgaaaccatcgattgtggtcgctatccggtaagggttttccagcttgacgaatatgacgcagatattggctaccagttgttccgccgggatctgaacacctatcacgaatgccgcatcagcgatgaatggggcggtgtggaaatcattaaacgccctgagtgggcacgcaaacaggatatgtacgtatga

SEQ ID NO: 383292 - DNA, 942 bp, Salmonella enterica
atgagcaacgaaatcgcaaccatgaatgcaccagcagataccgctatcgctggaactgctgccaccatttttagccctgaagggttgaaccagttgatgaagtttgccgaagtgatggcgcaaagccgcgtaacggtaccggctcacctcgcagggaagccagctgattgcatggctgtggcaatgcaggctactcagtggggaatgaacccatttgccgtcgcgcagaaaactcatgtcgtcagcggcaccctcggttatgaggcacagttggtaaatgcggttatcaccacgatgtcgccaacaaaagaccgtatcaactatgagtggtttggaccgtgggaaaacgtgatcggcaagtttgtagagaaaacatcccagaagggaaatacctacattgcgcctgcgtggacattgaaagatgaagcgggatgtggcgtacgtgtatgggcaacgatgaagggtgaagatgaaccacgcgttctggaattgctcctgtctcaggctcaagttcgcaactctactctttgggctagcgatcctaaacagcagcttgcatacctggcaaccaagcgctggtcacgcctgcactgccctgacgtaatcatgggcgtctacacccctgacgaattgcaggaggcaacacctcgcgttgagcgcgatatcacgccaccggcggcaacggctcatggcatgaacagcctgatcaactcaaagccagagcagaagcaggaagagcgtcagcagcataaagacgatcgcggtcctgaagagattctgcacgcattttccggcgcggcgatgaactacaacacccaggctgacctggacaaagcatacaaatatgttgcccagaaactggctggtgatgatgacctgctggcaaaagcaaccgacgtttacaccatccgctgcgacgaactgaacgaagtaccgatgtaa

SEQ ID NO: 383293 - DNA, 249 bp, Salmonella enterica
atgaaaagagcatttggcaaaaaggaactgatggcagtggtgccggtatcgatgagcaccattgaccgcatggagcgcaatggcgagttcccgcagcgcttctggatcactgataaacgttgcgcatggaatgctgaagaggttgaaaactggcttgatgagcgtcaggccaccagcccggcagagttcaccggaaaaaagccgccggttgatcagcgtgtttaccgcccagtaagtaacgccgcatga

SEQ ID NO: 383294 - DNA, 300 bp, Salmonella enterica
atgagcaaattaacccgtcttgaaaagtatcacctgaactatgtgtctcagcgtcaggcttcaaaggttgtcgccgttactccggcggcgatagaggtagaaaagcgagctgttgagcgtgaatcgaaaggccagtaccgcattgcagcccgactctggttgctgtgtatggatgtagcggtcggtgaagtggagcgcgccagaatagcgatacgccgtgatcagtgcatatcaaaaggtaacggcctgcgccgaggcgaatatgcagggatcggatgtcgcggggtggtgtatgactaa

SEQ ID NO: 383295 - DNA, 189 bp, Salmonella enterica
atgcagggatcggatgtcgcggggtggtgtatgactaatcctcacgacaatatcagcgtcggcagtatcacgctggtttattcagctctgcgccgcgggtggcttgtacctggcggaagtgtcatacagaacccattaaaggctcagcgcattgctgagcttatgaacagcaagaaggtggcggcatga

SEQ ID NO: 383296 - DNA, 624 bp, Salmonella enterica
atgaaagagcgcggaatgatttttaatggcgagatggtgcgcgccctgctggatggccggaagacgcaaacgcggcggattatgaaaaaccagccgtgtgaatcagcgcgaggtggtccggtatcagtaagaaacattgatggtggatttcaatggtttgctgatgatggtgatagttgtgtttttccgtgtccgttcggtgctgtcggcgatcgcatctgggtgcgtgaagcattccgtgttatgggctgcgctactgatgttgcccgtctaatgtacaaagccagtgaacgaaacagcttcactgaatccacccgtacagtcccggttggtgaatgcaccaagcagccatcgcaaaattggacgccatctatccacatgccgcgctgggcaagccgcatcttgctggaaatcacagatgtgcgagtggagcggttgcaggccattacattgggagatatctgcaaagagattggttgcggcctttacgatttccgccctgctacttatggcttccaagtgtgggaggaattatggcaatccatctacggcgaagaaagctggctggctaatccatgggtatgggtaatcgaatttaagcgcgttgaaggcggtgcggcatga

SEQ ID NO: 383297 - DNA, 594 bp, Salmonella enterica
atgaacggtaaatacactctgatttatgctgatcctccttggtcataccgagacaaagcagccgacggcgagcgcggcgccgggttcaaataccctgtcatgaatgtgctggatatctgccgcctgccagtgtgggatctggctgccgaagattgcctgttggcgatgtggtgggttccgactcagccggttgaggcgttgaaggtggtcgaatcgtggggattcaagctgatgaccatgaagggatttacctggcacaagacgaacaagcacaaaggtaacagcgcgatcggcatgggccacatgacaagggcgaacagcgaagactgcctgtttgcggtgcgtgggaaactaccggcccgcatggatgcgtcaatctgccagcacgtcacggcgccgcgcatggaaaactcgcgcaagcctgacatcatccgcgaaaaactggtgcagttgctaggcgatgttccgcgcattgagctattcgcccgccagtcgtcacatggcttcgacgtatggggtaatcagtgcgacggtccagcggtgcagttactgcctggctgctccgtaccaattgtgaggactgaggccgcatga

SEQ ID NO: 383298 - DNA, 180 bp, Salmonella enterica
atgaccatgttcaatgaggctgagttaatccgccaactggaagagcagcgcgctgtgattgtgcagaaaagtgctcaagttaactggttgcaaactgaaaacagtgtcttgcacaagaaatgcgaagaactgcaaatgacagttgatctacagcgagaatttatacaatccagaaattaa

SEQ ID NO: 383299 - DNA, 1254 bp, Salmonella enterica
gtgcttactgataccaaactgaaaaacctcaagccgcaggacaaactgtataaggtttcggatcgtgacgggctgtatgttgcggtgcttacttccggctctgtctctttccggtacgactaccgtattaacgggcgccgggaaacgctggtcatcggtcagtacggtcgtgacggtatcagcctggcggaagcgcgggaagaactcattgcggctaaaaagttactcaagtcaggccagtcgcctgctgcggcaaaacgtgacggtatcaaaaagatccgtggcgctgagacattcgcggtacataccgacagctatatgaagcacgtcattctggctgacagcacccgcgccatgaagcagtcggttattgagcgtgacataatgccggtgcttggcaacaagatgatggcggagatcaccacatcgatggtgcgcgatctgtgcgacaggattgtcgagcgtggcggccgtgcgacggcagtacaggccagggagattatcagcagtgtataccgtcacgctaatgatcgcgggcacggtctgtttaacccggctgcagacataaagccgtcgtcaattgccatgttcaagccgcgcgaccgcacgcttcaacctgaagagattggcgtattcttccgggcgctggataatgtcggggctatggccacaatgaaactggcattaaaactggtgctgctcactctggttcgcaaaagtgagttcaccaacgccacatggtcagaagtcgatttcaaaaaatggacatggacgataccggcggaaagaatgaagggaagccgggcgcatgttatctacctgccaaagcaggcgcaggatctgatgattggcctgcaaatgtgcgctggtgggagtgaattccttttgcccgggcgatactcagtcagcaagccgttatctaatggcgcactgaacaggctgatcaataccaccgtcgaagcggtgaacgaggctggcgggcatctggatgatttctctgtgcatgatcttcgccgcacagccagcactctgttgcatgaagctggttatccatctgactggattgaaaaggcgctggcgcatgagcagaagggcgtgcgtgcggtgtacaacaaagcggagtacgccaggcagcgtgcctacatgttgcagcagtgggcggatatggttgattcctggattaacggggagcacaccgatctggtgccgttctccccgtcgaagtttgagcgatggatgagtgaaggtgattaa

SEQ ID NO: 383300 - DNA, 672 bp, Salmonella enterica
atgaaaaaaataattaccgcattggcgcttgcatctataggagttgcgtctcttgctcatagcgcctcttttgattgcagcaaggccaggagctttgcagaaaagactatttgctctagcccaaagttatcaaaggatgatgatgatttaaagtatttatatggatatgcaaaagcatcagtaaaagatagaaaagcattttcagaaatagcaagagcactttggaattcaagggaaagatgtagtgattatgcttgtgttgaggagtggtatgacagcgcttttgcaatttatggggcaattaaagcaaaaggtattccagcaaccaatggtgtcaccgattttgcaaaagagccagaaatttctcctgatgagaaaaaaaatgaaagccaaagcaataataccaaaaaagatttttccctctatgactcgaaagagagggctgctccagtagaacatgatgctgttctttacaaagacactccagaagcttttgaatttatagatactctggtgggatttgtcagaaaaagttcttttacttgcgatactgtaagctcattttcaccaatggtgatgtccaatggatttacattatcatgtaatggatttagctataaatatgacataaaaaacaacggcgggaacgttgcagttacagttgataattaa

SEQ ID NO: 383301 - DNA, 426 bp, Salmonella enterica
atgagcgattattattacagctttaaagaaaaaggttttttctggcagccggataccaaatcaggcgattacccggatgatttaatccccctgaccgatgagcattaccgcgagcttatgcagggccaggtggacggaaaatatattgagcacaggaaaggaggcccgatactggttgaacatcgcgaatatacgcctgaagagctggttgcacaggctgaagccagaaaagcggaacttcttgctgaggctgaatcagccattgcaccactggcgcgggcagtaaaactaaaaattgccacagatgaagagattaaacaactggaggcatgggaactctacagcgtaatggtaaaccgggtggatacatcgaccgcgccaaaaatcgactggcctaagaaacctgaacaaccgcgtaccttatag

SEQ ID NO: 383302 - DNA, 612 bp, Salmonella enterica
atgaacgagtctcaatttcagcaggcggctggtatcagcgccgaactggccgcgcgctggtttccgcacattgatgcggcgatgaaggaattcggcattacagcaccagcggatcaggcgatgtttatcgctcaggtaggccatgagtcgatggggtttagcgccgtagttgaaaattttaactacacgccatctgcgctggtggcgacgttcggaaagaggatcacacagcagcaggctgatgcccttggcagaacatccggacatgcagctcgtcaggatgctattgccaatctggtgtatagcaaccggctgggtaacaaagcacccggtgatggctggaaatatcgtggtcgtggcctgcttcaaatcaccggtcgcgagaactacgctaaatgcggtgcggcgctgaagcttgatctgatcagcacaccagagttgctgacacaggagaagcatgcagcctgttctgctgcatggtatttcacattacgtggttgtctgatgtattcaggtgatgttgtccgtgtaacgcagatcatcaacggagggcagaacggcatcggtgatcggcgggagcgctttgagaaagcaaaatcggtgctggtatga

SEQ ID NO: 383303 - DNA, 834 bp, Salmonella enterica
atggctgcccttaattcgaaagtcaaaaaagccgttatcccggtcgcgggattgggaaccaggatgctgccagcgaccaaagctatcccgaaagagatgctgccgctggttgataagccattaattcagtacgtcgtgaacgaatgtatcgctgctggcattactgaaatcgtgcttgttacgcactcgtctaaaaactctattgaaaaccactttgataccagttttgagctggaagcgatgctggaaaaacgcgttaagcgtcagcttctggaggaggttcagtctatttgccctccgcatgtcactattatgcaggtacgtcaagggctggcaaaaggcctgggccatgccgtattgtgcgcgcatcccgttgtcggaaacgaacctgtcgctgttattctgccagacgttattcttgacgaatatgagtccgacctgtctcaggataacctggctgaaatgatccgccgttttgacgaaaccggcaatagccagattatggttgagccggtagaagatgtgactgcatacggcgtggtcgattgtaaaggcgttgagctggcgccgggcgaaagtgtgccgatggttggcgtggttgaaaaaccaaaagcggatgtcgcgccgtctaaccttgcgattgtcgggcgttatgtgttgagcgcggatatctgggcgttgctggcgaaaacccctccgggcgccggggatgaaattcagttgaccgatgctatcgatatgctgatcgaaaaagaaacggttgaagcctaccacatgaagggtaaaagccatgactgtggtaataagttagggaaggtgcgaacaagttcctga

SEQ ID NO: 383304 - DNA, 1395 bp, Salmonella enterica
gtgaaatgcaacgatatcgtgctgctgcgttccaccagtagcgcgcgctattttgccggtttcccgacgggttacaccgcgctgctgggcggattgacggaaagcggacgcagcgcggtaaacgtgctctcttttctctgcctggatgcctaccagagcgtgcagttgccgcagccgaatctcggcgtgcgcactaacgcgctgattgatacgccgttcctgctcaagaccgccgagaccattcgcctcggtaccggcattccacagattttcaatgacgaagtggtggttcccgcgttccttaaccgtggcgtgtcgttggaggatgcgcgcgattatgcggtggtgggatgtgttgagctgtcgattccgggcagaacctacgggctgcatgacatcgccatgtttaatctgctgaaagtgatggaaatcagcttgtatgaaaatgagggcaacgacactcttacttatgaggcgttgctggcgcatattcgcgccaaaatcagtcactacattacactaatggtagaaggcagcaatatttgcgatatcggccatcgtgactgggcgccggtgccgctgctctcttcgtttatcagcgactgcctggagaaagggcgagacatcaccgacggcggcgcgcgctataacttttcgggcgtacagggcatcggtatcgccaacctgagtgattcccttcatgcgctcaatgggctggtattcgatcagcagcgcctgagttttgatgcgctgctgtcgatcctgaaaaacaacttcgccacgccagaaggggaaaagatccgcgccaggcttatcaaccgcttcgaaaaatatggcaacgacattgataatgtcgataacatcagcgccgaactgctgcggtattactgcaaagaggtggaaaaataccagaatccgcgcggcggccagtttacgccgggttcatacacggtttccgcgcatgtgccgctgggagcggtggtcggcgcgacaccggacgggcgttttgccggagaacagctggcggatggcggcctgtcgccgatgctcggacaggatatgcaagggccgacggcggtactaaaatcagtaagtaagttggataacacgctgctgtcgaacggtacgttgctgaacgtgaagtttactcctgcgactctggaaggagaggcgggactgcgcaagctggcggatttcctgcgcgcgtttacccagctcaaactgcagcacatccagtttaatgtggtgaatgccgacacattgcgcgaagcgcagctacggcctcaggatttcgctgggctggtggtgcgcgtggcgggctacagcgccttctttgtcgagctgtcgaaggagattcaggatgacattattcgccgcaccgcgcatcagttgtga

SEQ ID NO: 383305 - DNA, 1080 bp, Salmonella enterica
atggcgttaccttttattattttgggtgtggctgccggcgctgcggcattcggcggaaaaaaagcttacgatggatatcaaaaaaagtcagaagcagaggatatcctcgaaaaagcaaaagagcgttacgaggagcataaagaaaaatttgagcaggctgaagctcagacatcatcaaaattaacaacgctcggaaataaagagcttgagattggtaaagatttcagtgagttcgacaggattgctgctgagctcctggcgcgtctggaaaaagagggcaataaagacctgaaactgagtgtcccgcaacataacatcaataagattcagaacctggccatttcagcgacagaatatctcagtacggtcgttgctgccggagtttccggggctgctgcgggttttgctgtgtatagcggagtgatggcatttgctgcggcttctacaggtacacccattgcagcgctttctggtgccgcggcttataacgcgacgatggcggcaattggagggggctctctcgcggcagggggcatgggaatggccggcggcgcaatggtattaggcaccgcagtggctgcaccgttgattgccattgcgggctgggcttacgacagacatgcgacgaaagctcttgaaaatgcccatcagtgtgcctgcgatgttgcacgggcagttaagaaaatgaatctggcccgggagcattttgcaaaagttaatcaatacgttgatgaaattctcgctgcactgaacagaatgcatgctgtatttattaaacactattttgagccgcttaaatccatgcattctgttattacagaacaacaggatatcagtgtatcagatgaagtcattgtgcttattgaccatggatattcactggccgctattatgacggatattattacaacgccactgtttaaaccgcggaaacaggaaaatggtgaggcagtgataaaagataacgttattgaaatggaaacggatgataatggaatgaacgttattaataaggatgagctggatgatgtactggccagttcggttgtgaaatttgatgatttttcatcccagagttaa

SEQ ID NO: 383306 - DNA, 1572 bp, Salmonella enterica
atgaatgtggaaaaatttgactggacagaagagttacatcagaccatggtgaagagcctggttacatcattcgggctggattttctgttgctaaatgatcgtaagggtggtgatgttgacactatccataatgtgcgtaatggcatttatgccacggaggctgagcgacagcggtatgaaggtcgtggcgaatatgattctcatcattaccacagccatgagaactatatcgcgacgaaccgggaaggaaagcgtgcgcatcaggcagggactcttactgatgcatatacaggcgaggtgtttgcttctgacgacaaaaaaaatctggatcatattatttccgctaaagaaattcatgatgatccggggagaattcttgctgaacgggatggtgcagaactggcaaatgacgcttcaaatctggcattcactcatgagtcgctcaataaatcaaagaaagcagactcaatggatgcgtttatttgcacgctgcagaaaaacagagaagatacgttaaggcagatagcagagcttgaatctcaggcaacgctgacagaaaaggaaaagaaacgtctgataagtctgagaaaaaaagctgatgcagatactgagcgtatggaaagggctgataaatatgcccgggaaaaatatgaggccacgattaatcagagctattacctgagtagtaagtttgctactgctgtcgccagtgcttcgcttaattccggttttcgtatggggacgcgacagatgttggggcttattcttgccgagatctggttcgaactgagggaacgaatcccgcatattatcaggcagcaacggaactcattcagcgccggcaaatgcctgtccgaaataacgtcagcattacgtgcctgccaggaacgagtacaggaaaaattcagttcttttttaattgcctttaaagatggtgtcatcggagggatactgtcaggtattaccacaacgctgttaaatatattcctgacaacggaaagaatgattgtccggcttatcagggaaatgtggaacaatctcgttcaggcctttaaagtcctggtatttaatccggagggattatcgccggggcagttagccaaagcggtcactaaactgatagcagcaggtgtggctgttgccggaggggtgatgataaatgaggcgatggcgcagatccttattttcccatttggttcagagcttgctgccttttgtggtgcgctgacgacaggtattctcgggctggtgatgaattattatctcgaatatagcgaggttatgcagcgggtatgggcatttctggacaaatttaaggacaaattccagcggtcactggaatactttcaggcagtcaatgctgaacttgatcgctatcttgtggaacttactgcactggaattttctgttgatgctgccgagttaaatcatttttcacttcatctggatagcgtaaacagtgagatagagcgcggacttctgctgagagaagaagtccgccgacgagggattgcgttgccgtttgagtcaggaaatgtggcttctgttcgtgactggttaaataagcgatga

SEQ ID NO: 383307 - DNA, 267 bp, Salmonella enterica
atgaaattacaccctccatttccctgtaaccagtgtggggcctgttgtcgtcatgtcaacagggcgggtgaaacgcaatgtctggatcgtggtgacggtatttgccgtcactatcagactgattctcatttgtgtgcaatttatgataaacgcccacagatttgccgggttgaagaccagtatttactgaattatcagtctcagtacagctggcaggagtttattgcattaaaccaggccgcatgccttattctgaataaactgtaa

SEQ ID NO: 383308 - DNA, 198 bp, Salmonella enterica
gtgagattgctgttaaaagggctcgtcggaatggcgctggcctggcttgttattggtttcgggatggagttattttttctcgccgatcgggttcatccggcattaagagtaattgttgtcctggggatgttattcctgctgataatgattgcgggtggtatgtgccgttatcttctgtcacgaaagaaaacatcatga

SEQ ID NO: 383309 - DNA, 1674 bp, Salmonella enterica
atgtattcatctgccacggtatgtttcacggtcagcgccgggcagaaatatcgcttttactcaattattatgaaaattaatcttccgttcatacactggtcacggattagcaatgataagcgcctcgtgttatcagtggttgtctttaccctttctaatatccttgtatcctcaggagcgcatctgatttaccggatattattcttcaccctggcgcttcttattattaaggcgatgaaatcgcttacgctgcgttttattcttgccttttcgttcacattgctgacagcggcagatatcagtatcagtttgtattcatggtgtacattcggtacaacatttaatgatggttttgcaatcagtatccttcagacagatcctgatgaagtaataagaatgttcaggatgtatgttgtttatgttatcgcatttattatcctctttttattgttcttctgttcagcaataaataaaacgtcctcattgccattggaaaaggtcacggtaattacatttttattgttaattacagtaacgttatattcttccttccagtttgcgttgaagaaacagtatcaaataaatgaagttgatccttacatagtcgcttcccggtttgccacatatacccctttctttaatctgaactattttgcactggccgcaaaggagcatcagagattaatgacgattgctgataccatacctcactacgatctggtgattacggataacaacactgacgtatttgttctggtgattggtgaatctgcaagggctgataacatgtccatttacgggtattcgcgcccaaccacaccagagcttcagaaacagaaatcacgactgaaactgttcactcaggcaatcagcggggcgccttataccgcccttgcggtaccgctggcattatctgtaaataccgtgctgcatcatgatgttcgccattatcccgataatattatcaacatggcgaatcaggcgggattcgatacctggtggctcagcgcacaatcggcgttccggcagaacggaacagctgtggccagtattgccatgcgggccagaaacagaatttatgtcagaggctatgatgagttactgctcccacacctggctgaagcactgaacagtaatccgggaggcaggaaactgattgttctgcatctgacgggcagccatgaaccggtttgcagtaactggcccagagataaagccgtgtttaaaccgctggatacagaagaagtctgttacgataattccattcattataccgacagtttgttggggcaggttttcgccatgctggaaacgcgccgggcatccgtcatgtatttttcagatcacggtctggagtatgacccgacaaaagaacatgcctattttcatggtggaataaaacccagccagcaggcttatcatgttccgatgtttatctggtacagcccggcgctgggagagcatgtcgatcgccagacggtgaacagcgttttttccactgcgtataatgattatctgattaatgcatggatgggcgtaaccagaccggctcaaccgaaaacgccggaggaggtgattacccgctggcagggaaaatccgtggtttttgatgccagccataacgtgtttgactacaaagtattacgaaagaactttaatgaacccctggaataa

SEQ ID NO: 383310 - DNA, 1044 bp, Salmonella enterica
atgaacgacagattacgctttgaagtgaacgataaccaggggcgtttcgtatttccggatatctggtttggcccattactgggggagtttgaagaactgctcgatgcatacgacactgatgaaatcagcgagacgagttacatcaacaaactcagacgccttgctcaacaggagcctgactttattgatatacacgctcatctggcatatgcatttctggagcagaatgccccgcgtaaggcactgaacgccgctcttaaaggactggcggcaggtaatcgtctcatcccggaaagtttcagtggtgaaatcatctggatgcatcccgaaaaccggccttatctgcgcgcgctttatgcagcaattctcgcaaatgtgcacttacagcgtcatcaggatgcggttatgcttactgataaaatactggcatacaatcctgaagataatcagggtgcccgctggttgttgggttcagagctgttacgaacaggtgatcatgagcgagccttcagtgtactgaaaaaacatgctgatgaattttcaccttactggtatgaacttggtcttctgcattttcttaatggggaactggtaaaagctgcaactgcatttcgtcgcggatttgcggcaaatacttacatcgcagaaattctgtgcggaaatctgcatccatttcctcttgctgtatggcataactattctgccgggccggatactgccgaagattattatgcaacatactcaccattatggggacaatatccggaagcattgctgtttgtaaactggctctataaccattcctctgtgctgcatgaacgggcagaaatcattaaatgcgccgaaatgctgatgcaggaagatgatttcgaaatatgcgaaagcattttaagacagcagaagctgttgcgggaaagaattgatgagacactttctgaggaaattgtacagaaatgcagaaatattaacggtgaatatgtctggccctggatattgccgttttcagcggcaggaatgaaacacacaagcatccagcatcggtag

SEQ ID NO: 383311 - DNA, 1191 bp, Salmonella enterica
atggcacttacagccagacaggtcgaaacagccagacctaaagaaaaagactataaactctctgacgaacgtggtttatatctgctggtaaaaaccacgggtgcccgctactggcggcttaaataccggatagcaggaaaagagaaaaaactggccctcggcgtctatcccgacgtctcccttgctgaagccagaatcaaacgcgacgatgcccgaaaaattatctccgaaggtggtgacccgggcgaaaagaagcgaaaggaaaaactcactcagaaaatctctgccaccaatacgttccatgccctcgctacggaatggcaccagcataaatctttgtcatggtctgaaagttacgccagaagcgtactggaagcgctggataaagatattttcccgtatctgggcaaacgaagcgttacggatatcctcccgctggaaatgctggaaattctgcgccgcatagaaaaacgtggctcgctggagaaactgcgtaaggtacgccaatactgtaatcagatttttcgttatgccatcgccaccggacgagccactgtcaatccggcatctgaactgaccagtacgctggcggcaccaaaagctgcacatttcccccacctgagagcagatgagctccctgtttttctccggaagctcgctgaatatcatggcagtcctgttacccgcatggcgacaaatctgctgcttctgacaggcctcagaacgattgaactacggtccgctgaatggtcagaaattgattttgataatgccctgtggacaatccctgaaagccgcatgaaaatgcgacgtaaacatgtcgtaccactgtcacgacagaccactgacattctgctgcagctcaaaactttctccggacaataccggctggtttttccgggacgttgtgatatcaacaagccaatgagcgaagccagcatcaacatggtgctcaaacgtatcggttacgatggcagggcaaccggtcatggttttcgtcacaccatgagtaccattctgcacgaacagggctttaattctgcctggattgaaatgcagttagctcatgtggataaaaacgccatcaggggtacctataatcatgcccaatatctcgatggtcgccgtgaaatgatgcaatggtacgcagattacattgattcgctttccaggcaagagagtcagggttaa

SEQ ID NO: 383312 - DNA, 852 bp, Salmonella enterica
atgaacgatacactttctaatacccagcaatcacgtgagacaatagaatgtgatgttcttattgtgggagcaggacccgccggattatctgcagctcttaaacttaaattacaggcaaatgacgcaggaaaagaactgtccattatcgtccttgataaaggagctgagcctggttctcatattctcagtggggcagtcatggatccccgagcgctgaatgaactaattcctgattggcaggaaagaggcgcacccattaaacagcctgttactcaggataaattactgttactgacgaatgaaaaatgtattaatttgccggatgcattgattcctgataattttcgcaaccatggaaactttatcgtaagcctcggtaatctcattaaatggctcgccggtcaggcagaaacgtcaggcgtggatatttatgcaggcttttcggcaactgagatactgtatgatcaggatactaacattatcggtgtagtaactggtgatatgggacgtcatcgggatggcagcaagaaagaggggttcctgagtggaatagaaattctggcaaaatatacaatttttgccgaaggggcccgcggtagtctggctaaagaactgatcaaaaaatttcatcttgatacaggcaaagcaccccagagttttagcataggcataaaagagttgtgggaggttccatcagaccagtcccatccggggcttgtaattcacaccacaggttggcctctggataaagagtcgttcgggggtgggtttctctatcatcttaatgataataaaattgcactagggaaggtgcgaataagcaggtcatttcttcccaagctgactcgctga

SEQ ID NO: 383313 - DNA, 1146 bp, Salmonella enterica; identical to SEQ ID NO: 376084

SEQ ID NO: 383314 - DNA, 237 bp, Salmonella enterica
atggaaatcgtaaaaatcgaaatgaacctgaaagcagttaataagagcattgctttattcaattgcgaaaatctcgacggtggatatgtactcggaaagttcgacagtcctcattgtgctgtaaaagccatttcgctgctcacagtcaaggtaagtgatggagaacaagcagggtttggtaattaccgaagttacaagcttgattactcagaaaaattttatcagaccatccattaa

SEQ ID NO: 383315 - DNA, 2886 bp, Salmonella enterica
atgagtggaactaatcctgtatttttagtccgcaaagcaaagaaatcatcaggccagaaagacgctgtactctggtgcagtgatgattttgaagcggcaaatgcaacactggattatcttctgattaaatccggtgcgaagctgaaagattatttcaaagctgtcgctactaatttccctgtcgttaacgagctgccgccggaaggcgaactgagcctcactttctgcgattactatcaactcgctaaagacaatatgacctggacgcaaatccccggcgtcaccctgccatcatctgaagccgccgccgcggcgcgccagcatatcgtcgatggtgttgataccgaaacaggcgaagtgctggaagaccacaccgaaaattttggtaacgaaagcaacagccctgcccaggcaacagccccagcccccgagctgactgttgtcgcaactatgcctctccgtcaccgcgttcttgctcagtacataggtgaaggtgagtatctttatcacgtcgacgcctcccagaaaaaagaaattctgcgtctcgaaatggacaccgataattcatatgtccagaacctgctgcttgccgccgagaatgttgaagcgttcaagaaagccattgaacatgacattcacaaaatagtgaatgccgttaaaaaagtattccctgtcgatggaaaaactcctgaactggcgactgttatccagttccttaaaacatggttcgagacggagcatatcgatcgcggtttgctcgttaaggagtgggcgaaaggcaaccgtgtatcggctattcaacgcactgaaagcggcgccaacgctggcggtggcaataagactgaccgtaaccctgattacgaacacactctcgatactctggacgtagagattgcaatggccactttgcctatggactttaatatctatgagctacctggcagcgtttaccgtcgcgcaaaagaaatcgtaaagaaaaaggaaagtccgttcaaagaatggtccgcagcacttcgcgcaacgcccggtatcctggattattcccgcgccgctattttcgcgctgatccgaagcgcacaccctgagttttatcactaccccggacgccttcaggggtatatcaacgccaacttaacggagactgatcacgagaaccccaccgaggaagctctcacggctgcccgacacactccggaaaaagacgcggtagaagaagccaaccgacagcttgccgccgcgcgcggtgaatatgtggaaggcatcagcgacccgaacgacccaaaatgggtgaaaaccgggacaagccagccgaccaccgaacctgaactggttaaaaatgttggcaacggtattttcgacgtgtccgctttaatgcagaactcatcaactcatggcacagaaacgaatccggagaccaccagcaatgtgcaggttcaaaaagctgacagtgatgaaaaacaggctggtgatgcggtgcaggcaggcgaagacgatctgggtactggtaaagaagcagttaccgtagagaaccagaatcaggctgaggcgcaacaaaacgtaccggaatcgcaacaagaagagccagaagcagcctggccggaatacttcgagccgggccgctatgaaggtgtaccaaacgaagtttaccacgccgccaatgggatcagctcaactcaggtgaaagatgctcgcgtgtcgctgatgtactttaacgcgcgtcacgtagagaaaactatcgtcaaagagcgctctccagtgcttgatatgggcaacctggtacatgctctggctctacagccggaaaacctcgaagcggagttcagcgtagagccggagatccctgagggtgctttcaccaccaccgccaccctgcgcgagttcatcgacgcgcacaacgccagcctgccagcgctgctgagtgctgacgatatcaaagcgctgctggaagagtacaacgccaccctgccgtcgcagatgccgcttggagcttcggtagatgaaacctatgcatcgtatgagcagcttcccgaagaattccagcgcattgaaaacggcaccaaacatacagccacggcgatgaaagcctgcatcaaagagtacaacgtcaccctgcccgcgccggttaaaaccagcggcagccgtgacgcgctgctggagcaactggcaataatcaaccctgacctggtcgctcaggaagcgcaaaaatcgtcgccgttgaaagtctctggcacgaaggccgatctgattcaggccgtgaaatcagtcaacccggcagtggtattcgccgacgaattgctggatgcgtggcgggagaacaccgaagggaaagtgctggtcacccgccaacagctcagcaccgcgctgaacattcagaaagccctgctggagcacccgaccgccggcaaattgctgactcacccaagccgcgctgtcgaggttagctattttgggattgatgaggaaaccgggttggaagttcgggtacgccctgaccttgagctcgatatgggcggcctgcgcattggcgccgacctgaaaactatcagcatgtggaacatcaagcaggaaggcctgcgtgcgaagttgcaccgggaaatcatcgatcgggactatcacctgagcgcggccatgtactgcgaaactgcggcgctggaccagtttttctggattttcgtcaacaaagacgagaactaccactgggtcgccatcattgaggcgtctaccgagttgctggaacttggcatgctggaataccgcaaaacaatgcgagagatagcaaacggcttcgacactggtgaatggtcagcgcctatcacagaagactacaccgacgaactgaacgattttgatgtgcgccgccttgaagcgttgcgcgtacaggcataa

SEQ ID NO: 383316 - DNA, 1668 bp, Salmonella enterica; identical to SEQ ID NO: 16546

SEQ ID NO: 383317 - DNA, 384 bp, Salmonella enterica; identical to SEQ ID NO: 140630

SEQ ID NO: 383318 - DNA, 474 bp, Salmonella enterica; identical to SEQ ID NO: 52832

SEQ ID NO: 383319 - DNA, 543 bp, Salmonella enterica
atgaacggcaagcgccgcctgctgggctcgtttaaccacgggtcaatggccaacgctatgccgcaggcgctcggcgctcaggctaccgcgccgggtcgtcaggttatcgcgatgtgcggtgatggcggcttcagtatgctgatgggcgattttctctcggtggtacagatgaagctgccgataaaaatcgtcgtctttaataacagcgtgctgggctttgtggcgatggaaatgaaagccggcggctaccttaccgacggtaccgaactgcacgacaccaatttcgcgcgtatcgccgaagcctgcggcattaccggtattcgcgtggaaaaagccgcagacgtggacggtgcgctacagcgcgcgttttccattgacggcccggtactggttgacgtggtcgtggcaaaagaagagctggcgatcccgccgcagatcaaactggaacaagcgaaaggctttagcctgtacatgctacgcgccattattagcggccgcggcgatgaagtgatcgaactggcgaaaacgaactggctaaggtaa

SEQ ID NO: 383320 - DNA, 1071 bp, Salmonella enterica
atgggaagaaggcgaagccatgaacgccgtgatttgcctccaaacttgtatatcaggaacaacggttattattgctatcgagacccaaggacgggtaaggagtttgggttaggtcgcgaccggagaatcgcagtaacagaagcagttcaggcgaacattgaattattttccagcgctgagcgaaaaagtcttacgtcgcggatcaataatgaagatgcaatgactatgcacgcatggctggaaaaatatgacagcatcatatcagtcagaggactcaggcctaaaacacttgctgattacagaagcaaaataagagccataaaggagcggtttcaggacattccattgtcagatataacaaccagggatattgccaccatactcaatgattatgtttcagaaggaaagtcggccacatcaaagttaatcagatcgacgttgagtgacattttcagagaagctatagctgaaggcttcatacactcaaacccagtcacggccacaagggccgctaaatctgaagttaaaagggtcagattaaccaccgatgaattcatgaaaatatatgatgctgccgggaagcagccgccatgggtgaaactgtctatggagatagcattacttaccgggcagcgtgttagtgatatctgtgcaatgaaatgggttgacatttcagaaggatttctacacgtacaacaacaaaagacaggagcaaaactggcgataccggtaacgattaagcttgatgcagctaacctttcgctttcagatacgctgaagagatgtaaatcactttcgcaaggagaaacaataatttcctctacacgaagcgaagcgctttcatcagggacggtatcaaggtattttatgcgcgcacgcaaggaatctggactttctttcagcggagaaccgccaacatttcatgagatacgcagcctgtctgcaaggctctatgagaaacagtatggcgaaagatttgcgcagcaccttctcggacataagtctgatagcatggctgcgcaatacaggaacgatcgcgggagagagtgggagagaatagaaatcagctag

SEQ ID NO: 383321 - DNA, 300 bp, Salmonella enterica
gtgagtgtatgtcttattgataaacgtcgacgtgggcaacaaataccatctgttgaaatgccgaatcacacatggttttgcgtacttgatatcgatggtatggatacgttgatcgacactcgtcattactgcgataccgcaacagctactcctgcaaaagcaaagaaaatggctgctctgatagaaaactggactccacctgatggttggtgcaatgggaatgatcgagattggcacgaaaaaatgaagggctatatctgcgattttttacgtaaatgcaacggattcatggtgatgtga

SEQ ID NO: 383322 - DNA, 294 bp, Salmonella enterica
atgcctgcacctctatatggggcggacgacccgcgccgatgttccggcaattccgtctcggatgtgctggataaattcagaaagaactacgacctgataatgtcaatgccgcaggaaacgaaagcagaaagagattttcgaaattcaatctggctagctgagcgtaacgaaaaagaactcatcaggcagacatcaatacgaccattccgcaaagcaatatatacaaaattcattgaaatcgacccgcgccttaaaaattaccgctcacgttatggcgctatcagtaatgactga

SEQ ID NO: 383323 - DNA, 495 bp, Salmonella enterica
atgaattcagcagatttatcgaagattcttgaagaacacaaagtgtggattacctcaatgcgtgagagcggatcgagagccaacctgtgcgatgccaacctgtgcggtgccgacctgtgcgatgccaacctgtgcggtgccaacctgtgcggtgccaacctgtgcgatgccaacctgtgcgataccaacctgcgcggtgccgacctgtacggtgccaacctgtgcggtgccgacctgtacggtgccgacctgcctgatctcactttcgtaatcctgggtgagaaatacttcataagtataacgaacggtgaatatgtacgagcagggtgccagaaccacacagttgaggaatggagaaaatatagtaagcaggaaattactgagatggatggtcgtaaagctctaaaattttatccacgattgctttcgataattgacttttacctcggggccggagaatggcctgattgggttaaaagcgatggggaggagtga

SEQ ID NO: 383324 - DNA, 549 bp, Salmonella enterica
atgacagataaatcaaacactccaattgagataaaggacttgtggagaactccaccagagatatttcacgctctgaacgctgagttttgcttcgttctcgatgcagcagcaaatgcagaaaatgcactttgtagactctatataacagaacagcaaaacacattatttactccatggaaagaagtgatgcctgatataccaggatatgtatggttaaacccaccatacagtaggccaatgccctttgttaagaaagcagtgaatgagaatgaggataatggtattggatgcgtaatgctttttcccgctgacatatcggtatcgtggttcattgaggcaattaaaacagcccatgaggtaaggttcattactggcggaagactatcattcctgaatgccatcactggaaaaccagtaaacgggaataacaagggatcaatgctggttatctggcatccatatcctcgttcaggtggatgcagaatgaatacagttgatcgtaatgtgttgatgaaatacgggaaacgaagaatgaaggtaacggtatga

SEQ ID NO: 383325 - DNA, 219 bp, Salmonella enterica
atgagattaacagtcaaagatataccacctggagaaaaatttattcttatccgtactggcaaaaaatacacgatgatttgtcagcacgaggagaaaaaatatttgttcagggtaattgaacattcatttacggactcacgcgatcaccatactactaatcgcgaggtgacgcttaatggacaaagttatgtgaagcttataatcaggataaggacatga

SEQ ID NO: 383326 - DNA, 177 bp, Salmonella enterica
atgaggcgacaacgaaaaagtataacgcaaatagcgatagataacctgatttttactcctaccaagcgctccaaatcccgcaagaaacccatcccaaccgaaagccaggtcaagacattcgattatgtctacgggctgttgcagtccaaatggaaccgcatgaggagaacgcgatga

SEQ ID NO: 383327 - DNA, 219 bp, Salmonella enterica
atgagcgatgcatcaaatagtgccgagtatttgtatttcgtgctcgttcctgtggctgaagtgttccgcgcagaacttcctgatggtaagcgctcatttatggctattaaaaactccaagagttgccgtgtgaaatttggcaataagcaaattgagaagaactggcaaagcttctgcaaaagtcatgaactgaaaaacgatactgagctggagtattaa

SEQ ID NO: 383328 - DNA, 519 bp, Salmonella enterica
atgttgagtgaaaacgcaaaagatatcgcaggatatgaaggcaagtacgcaataacgactgatggccgcgtttattcgcattcgcgagttgatacgcgtggaaagctgaggaaaggtagatggcttaagcctcgtgaacatggtggtggttacttgcaggtatccctctgcgataaaggaaaagttaaacaactttacattcacagattagtagcgattacattcattgataacccgcgctcacatccgcaagtaaaccacataaacggaattaagactgacaataatacgtctaaccttgagtgggtaactccgagccagaatatgctgcatgctcacgagtccggattgcaagttgctatcaagggggagggtcactatcgggcaaaactcaccactgaacaagtgtccgagatacgatcgcgcaaatcaatgtctcgatctgatatggcaagaaaatacggcgtagacccatcacaaatatcaaatattattaataataaaagatgggtaatttag

SEQ ID NO: 383329 - DNA, 204 bp, Salmonella enterica
atgatgaatattttactggaagaacttccccatcaggaacaggcgttagcggcgattctggcgagtttcaccggtatcgatcacgcgcaagccgatcataatcactatgctaatccgctgattaaggaacgttacgacgataaggccaatattgacgttaaaatggagaccgggacgggtaaaacctatggaaggtgcgaataa

SEQ ID NO: 383330 - DNA, 672 bp, Salmonella enterica
atgacaacttacaaccaccagtcacacggtcctgtatcactcgatcgcctgcaccagataagcgaaatactcagcaaagcagcagcacaaagcgacggcggtaatctcggctacgcaatggctgatgctgtgaaggtaattgctggggtgtttgcccacgaactggtacgtcgtgagcatgcggtatggtcacaggctactttcggcgatgtcggtccagttggtccgctgaagcacctctcgaaagaagcattagaggccgctgccgacccatccgatccgcttgaatgggctgatatgcagtttttattgtgggatgctcaaaggcgtatgggtatttctgacgaattcattaccagggcgatgatagaaaagctggagataaataagtctcgccagtggcctgagccgaaagacggcgagccacgactgcatattaaagagcagtcagcgccggtaattccggatggttggataagctgtagtgagcggatgccggatgaaatcgggcgctattggtgctatgtcgaagaacaaaatgacctcgggaaaagccattaccagtggaactgctcatggaatggcgataaatggggcggtgaaatgatgtctggaaaagtaacccactggatgccgctaccagaaccgccgcaggagtttaaccgtggctaa

SEQ ID NO: 383331 - DNA, 342 bp, Salmonella enterica
atggataaattactgaacaaacgtgagcgcgattttttaagacccgccattgttcattggtgggaaattgagatatccccaaatcgtaaaacagcgttgcgggacggtgactcacttcttcctgtaaatgtcggcgcgatagctgaaagcctgatagcacgaggctatctagaacgtgtttccatgggatttggtagagacattatcagggctaccgataagtcaaaaaaacttcattgctaccgctgcgcgtacggaaaagtgattaacaaaaagggccagcaaggcgaagactgcccacactgcgacggcagtatacttccggagagaactaacccatga

SEQ ID NO: 383332 - DNA, 474 bp, Salmonella enterica
atgagcaacatcgacaaacaggcgctgcgtgaagcggctgtagcaatagagacagtagcaacgccgcagaaattgcttgcgtttcgtgtgaaggttacaccgcaggttgtgctggcgctgctggatgagcttgatgccgcagaaaaactggcgacacagcagggcaatatcgcggttgcactacttgatgaagtgacaacattacgccgcaacgctgatgacaaagctcctgagcttcgcgctcagttaatcgatgcggataacgagttagatactttgcgacagcgcatagcagaactggagaatgactgctggatatatgagggaacggttaagaaattattggatagagcagaggcggctgagtctgcgtgcaatgaagctgcccgcattctagaaagcggagaacgtatggcgcttactcgttccgttgaaattctccgcgccgctggtattggcgtgaagggggagtga

SEQ ID NO: 383333 - DNA, 420 bp, Salmonella enterica
atgaagaggattattagcgtcgttgctggcgttatcatgttatctgggtgcgcaactattgttggtgatgaaacgcaacttgtgcaagtgaacagcaatccttctggcgcgagctttaaggtaaaagatgaatcaggtgtgattgttgcgcaaggtaagactccacaaggtgtaacactcgccaagtcagatggtagctattttggcaaaaagagctaccagatcactatggagaaggatgggtacgaaccagttaccatgccaatcaaagccaatgctaatggttggtatattggtggaaaccttgtgtttggtgggttaattggttggcttgctgtagatccatttaatggtgggatgtataccttgaagccaaaagaggcaaacgcatctcttataccgtcaacaaagcaagactaa

SEQ ID NO: 383334 - DNA, 330 bp, Salmonella enterica
gtgttagaaataatcgtactcgctcttgggatatcctgttgcgtactatatgcagggttagctgccctcaagaaacaggttaaggaattagatcgctcacatgaaattgatacaaaaattgcgcgattaacagaagagaataaacacttaaaaaattccataaggacactaactgatgacaactacaaactgtccaatgcactggctaagtgggaaatagtaagttatgaaagaatgacggacatgattttttcgtcttatatggctacaaaatctcctgaaacatcaggaaaaggaataattgcagctattgaaaagagaattaaatag

SEQ ID NO: 383335 - DNA, 690 bp, Salmonella enterica
atgaaacacctgattaagattgttaaaggcgagccagttgtaagcactgaagttattgcggctgagtttggtcgccgtcacgacaacgttatgcaaaacatccgttctctcatcgaaagtgatcatttaggaccccttgatttcaaggagtcctcctatgtgaataagcagaacaaggttcagccgtgctatgagttaactgagcgcggatttcttattgccatgccattcatcggtggagaaaaagccagagatgggcaggtccgtctggtagatagctttatcgagtatcgagagaaggtaaaacgagaatcagcaattcaggctgagcgtgatttagcgcgtgtcgaatatcgcccaatgacaaacgccattaagcagagcaaggaagccgagggaaaagaagctgagcattaccacttcagcaatgaagctaacctcataaaccggatcgtgctgggaaccactgcggctaaattccgcaaagagaatgatatcggtaaaacagaagcaatccgggattaccttaccgctgagcagatccgcgcaatcactgaattgcaacgtgctgatacagtcttcatcaacatggggtgggactttgaacgacgcaaagccgagttaaaaagcttattcgatcgtaaccaccgtcagccgcttatcgaagagcagcaccgtctggcagcctaa

SEQ ID NO: 383336 - DNA, 471 bp, Salmonella enterica
atgagtcgtattaaggcaattattgcgtctgtcattatctgcatcatcgtctgtctttcgtgggctgttaatcactaccgcaataacgcaatcgcctacaaagaccagcgcgacaccgctacccacaatctgacgctggcgaacgcgacaattaccgacatgacgaagcgtcagcgtgatgtttccgccctcgatgccagatatacgaaggaattatccgatgcgaaagctgagaatgatgctttgcgcgatgatgtcgccgctggccgtcgtcgcctgctcgtcaacgccacctgtcccgcaatgccgacaggtaaatccacctccgccgcccgcgtggatcatgcagccagcgccacccttacagcaaatgctgaacggaattactggcgtctcagggacggagtagccacagtgacgaagcaactggaaggggcgcaggactatatcagaacgcagtgccagaaataa

SEQ ID NO: 383337 - DNA, 438 bp, Salmonella enterica
atgcaaatcagcagtaacggaatcaccagattaaaacgtgaagaaggcgagagactaaaagcctatccagatagcagggggataccaaccattggggttgggcataccggaaaagtggatggtaatcctgtcgtatcagggatgacaatcacagccgaaaaatcttctgaactgcttaaagaggatttgcagtgggttgaagatgcgataaatagtcttgttcgcgtcccgctaaatcagaaccagtatgatgcgctatgtagcctgatattcaacataggtaaatcagcatttgccagctctaccgttcttcgccagttgaatttaaagaattaccaggcagcagcagatgctttcctgttatggaaaaaagctggtaaagaccctgatattctccttcctcggaggcggcgagaaagagcgctgttcttatcatga

SEQ ID NO: 383338 - DNA, 990 bp, Salmonella enterica
ttgtttgtagaggtggataaatcctccggtgaaatcgtaaatctcactcctaatgccagtaataccgtgcagcctgtagctctgatgcggcttggagtatttgttcctacgcttaagtcactgaaaaaccgtaaaaagaacacgctttcgcgtactgatgcgtcggaagaactgacgcgtctgtctctcgccagggccgaggggtttgataaagtggagatcactggtccccgcctggatatggataatgacttcaagacctgggtaggggtgattcattcctttgcccggcataaagttattggcgataaagttgagctgtcgtttgtcgaattcgccaaactctgtgggatcccctccagtcagtcatcccggaagctccgggaacgtatcagtccttcacttaagcgtatcgcgggtactgtgatctcgttttcccgcacaacggagaagcacaccaaagagtacattacgcatctggtacagtcggcttactatgatacggaaaaagatatcgttcagctgcaagccgatccgcgcctctttgaactctaccagtttgaccggaaagtgctgctgcagctcaaggccatcaatgccctgaagcgccgggagtccgctcaggctctttatacctttatagagagtctgccgcgggatccggcgccgatatcactggcgcgtctacgggcccgtctgaacctgaaatcccctgtgttctcgcagaaccagacggtgaggcgtgccatggagcagctccgggagattggctatctggattacactgagatccagcgtgggcgtacaaaactcttctgtattcactaccgccggcccaagttaaagccacctcatgatgagagtgcggagaacccgcaactgccagccacaccgggtgacgtcagtccggagatggctgaaaaacttgcacttcttgataaactgggcatcacacttgatgacctggagaaactcttcaaatcccgctga

SEQ ID NO: 383339 - DNA, 279 bp, Salmonella enterica; identical to SEQ ID NO: 181689

SEQ ID NO: 383340 - DNA, 426 bp, Salmonella enterica; identical to SEQ ID NO: 120236

SEQ ID NO: 383341 - DNA, 1368 bp, Salmonella enterica; identical to SEQ ID NO: 120237

SEQ ID NO: 383342 - DNA, 321 bp, Salmonella enterica; identical to SEQ ID NO: 181692

SEQ ID NO: 383343 - DNA, 285 bp, Salmonella enterica; identical to SEQ ID NO: 170093

SEQ ID NO: 383344 - DNA, 378 bp, Salmonella enterica
atgaaggcgcagatcgactggataccgttgagtgaaggcgcggttcgtccttcgcagggcaagacacttgcagtgatgcaggtttgcggcggttcgcagtccttcaatgccgtgaaccagatgcgcattctgggccgctggatgcggatgttcacaattcccaaccagtcctcggtggcgaaagcctggcaggaatttgatgagaacggaaggatgaagccgtcctcatggtacgaccgtatcgtagatgtcgcagaggagttgtttaaaattacgttgctgctcaggggacaaaccagctaccttgcagatcgctacagcgaacgaaaagagagtcatcaggaactttcgtaccgcgtcaatcaggaaaaaatataa

SEQ ID NO: 383345 - DNA, 636 bp, Salmonella enterica; identical to SEQ ID NO: 104002

SEQ ID NO: 383346 - DNA, 828 bp, Salmonella enterica; identical to SEQ ID NO: 181411

SEQ ID NO: 383347 - DNA, 864 bp, Salmonella enterica; identical to SEQ ID NO: 181410

SEQ ID NO: 383348 - DNA, 828 bp, Salmonella enterica; identical to SEQ ID NO: 181409

SEQ ID NO: 383349 - DNA, 1011 bp, Salmonella enterica; identical to SEQ ID NO: 181408

SEQ ID NO: 383350 - DNA, 870 bp, Salmonella enterica; identical to SEQ ID NO: 181407

SEQ ID NO: 383351 - DNA, 321 bp, Salmonella enterica; identical to SEQ ID NO: 103996

SEQ ID NO: 383352 - DNA, 234 bp, Salmonella enterica; identical to SEQ ID NO: 181405

SEQ ID NO: 383353 - DNA, 210 bp, Salmonella enterica; identical to SEQ ID NO: 21597

SEQ ID NO: 383354 - DNA, 219 bp, Salmonella enterica; identical to SEQ ID NO: 83624

SEQ ID NO: 383355 - DNA, 207 bp, Salmonella enterica; identical to SEQ ID NO: 181402

SEQ ID NO: 383356 - DNA, 336 bp, Salmonella enterica
atgaaagataaagcgtcatttgactcattttcggctctcgatatgcgtgccggtaccatcatcagggttgaggagagtaaaacatcaaagcccacctggcgcatgactattgacctaggaccagaactgggaacaagggtgtcatgcggtgcgtatattaactatgcagcagaagacctgcaggaaacgcaggtaatctgcatcgtcaatctgggtaccatgaagatgggacctgaaaagtcagaggtgctggtacttggtgtgtctgatggttcaggcgggacgatcccgctgacgacagaaaagcgcgtcgataacggtgaatgcgttttctga

SEQ ID NO: 383357 - DNA, 213 bp, Salmonella enterica; identical to SEQ ID NO: 163083

SEQ ID NO: 383358 - DNA, 609 bp, Salmonella enterica
gtgaacacccatccaaagcatctgccggccgatgaacgtcgtgccgtaactgtcgagtccgtcgtggcgcttgccggttcacaaaacccaagcgagataaccactgcggctatcgctaaacacatgaacttgacccagggtgcgctgtttcggcacttcccgaacaaggaagccatttggcaggcggtcatggagtgggtagcagagcgcctattagccagaatcgatcgatccgcacaaggaatcgagtcgcccttggcagccatggaggcgatgttcatgagtcatatcgaattcgtagctgagcacccaggcgtgccaagaatgatgtttggtgagcttcagcgtgccgaatcgacaccggccaagcgcatggtgcaaaccttgattcagcgctacggcgaacgtttgcatcgtctcatcgagaaaggcaaggccagcggcgagttgtctccctcgcttgacaacgaggcggcggcaacgctgttcattggcacgatccagggcttggtcatgcaatcgctgttggcgggtgatgtgggacgcatgcaccgcgatgcgccgcgcgtctttgcaatttatcggcgtggcataaggagtgcgcaatga

SEQ ID NO: 383359 - DNA, 1152 bp, Salmonella enterica; identical to SEQ ID NO: 188799

SEQ ID NO: 383360 - DNA, 1206 bp, Salmonella enterica
atgatcagcctggccggccgcgacattctccatgcctgggggaaattcgtcttcaccggcatcggtctgggtctgctgatcggcgtcaccctagtcatggctggggtgtaccgaggcatggtggacgacggcaaggcgttgctcgacaacagtggcgctgacctttgggtggtgcaaaaggatactctgggtccttatgcggagtcgtccagcctcaacgatgacgtgtatcgcgccattctcgccatgccgggagtctcacaggcagcgaacgcgacctacctgaccatgcaggtacgcaagggcgagagtgatgtacgcaccatggtggtcggcatcgcgcccggtgcgttgggggctacaccaggatggcctccttatctcgtcgctggacgccagatcacgcgcggtcactacgaggctgtggccgacatcgccaccggcttcaaactgggagatcgtcttgccattcgccgcaatcattacaccgtcgtggggctgacacggcgcatggtgtcgtccagcggcgacccgatggtattcattccgctcaaagatgcccaggaggcccagttcctcaaggacaacgatgccatctggcaaagccggcgtcgcaccgaagccaacccggtcttcaatcgacccggtgatccaggtttgctggatgccgtgattgcttcacagagcagcaacgcgttcgtcaatgccgtgctggtcactctgaaacctggtcatgcgccggacgaggttgccgaatccatccagcgctggaagcgtttgacggtctacacccgggcacagatggaagacatcctcgtcggcaagctgatcgccacctcggccaagcagatcggcatgttccttgtgattctggccatcgttagcgcggccatcgttgccttcatcatctattcgctgacgatggacaaaatccgtgagatcgcggtgttgaagctcatcggcacacgcaaccgaaccatcgccgcgatgatcatgcagcaggcgctcgccctgggcgtgattggcttcgtggtcggcaagatcacagccaccttttcagcaccggcttttccaaaatatgtcctgctcacgccaatggattctgtcgccggtttttttgccgtgctcgtgatctgcgttctagctagcctcgtcgccattcgcatagcactcaaggtcgatccggccgaagccattggaggttga

SEQ ID NO: 383361 - DNA, 711 bp, Salmonella enterica
atgagtggcaaagggatacacatcgaaagtttaagcaagcggtatggcgatggtgacaccgctgtctttgccttgagagacgtgaatatgcatgttgcgcctggtgaagtggtgggactgatcggcccttccgggtccggcaagagcacgctgctcaagtgtctgggtgcggtgatcgaaccgaccgccggtcgcatgacgctgggcgatgaagtgatctacgccgatggctggaaagtccgcgacctgcgcgccttacggcgtgacaagattggtttcgttttccaggcgccgtacctgattccgtttctcgatgtcaccgacaacgtggcgctgctgccgatgcttgcaggcgtcgcgaatggagagtcgcgcgcgaaggcactggaattgctcacagcgcttgatgtgcaacaccgagctcgcgcaatgccctcgcaactctccggtggcgagcagcaacgggtcgccatcgcgcgcggactggtcaatcgtccgccggtgatcctggccgatgaacccactgcgccgctggattccgagcgcgccatggctgtaatccgcatcctcaacgacatggcccggaagttcgagaccgccatcatcgtcgtcacccatgacgaaaagatcatccccacattcaagcgcatctaccacatccgcgacggcgtgacccatgaggaagctggcgaagggcgggagttcgaatga

SEQ ID NO: 383362 - DNA, 474 bp, Salmonella enterica
atgacccaccgcaaacacagccacgcatttggaactatcaccctgaccgttacggcctgcctgcttttatggggttttcagttgccagcttgggctggtgacgctacccaggttgagccactggcgctacgcaagatcatgcaggaactcgggcgcaacatgcaggctattaccggtgcgatttcgcaggaggaatgggttcaggtcgttcagctcgccccaaaagttgctgcacaccccgagccaccgcttactgaaaaaatgcgcatccttgcttacctcggcgctgatgcgaccaagttcagaaactttgacgcgcagactcacgaggcggcgctggccatgaagctggctgctgcgagcagcgacggcaaggcggtgatccaatcattcgcccacgtgcaggaaagctgcttgggctgccaccaagctttccgtaaacctttcgtggagcatttttatggagcacgctaa

SEQ ID NO: 383363 - DNA, 1335 bp, Salmonella enterica
atggagcacgctaaaacatgccagcgccccatcagcctcgaaagacggcttgcggcaacttacctggtagctggtctggtcaccgccggtctggccggctgcgccgccggccctgattttcagcgtcccaccgcacccgatgtggctcgctacactgcaacaccggtagctgatagaaccgtgtccgctcccacgcagttcggcgaaacacaacgtctagtcgaagggcttccgatcgaaacgcaatggtggcaaagcttgggttcatccgcactcgacggactgataaacgaagctttccatgtcagcccgacgctggcgagcatcagcgccaatttgcgacaggcgcaggagcttcttgccgcacaggcgggctcgacgcaatatccacaggtagatgtcgcactgggatctcagcgccagcaaatgagtcccagtagccaagggttgagcggagacgcacgtcaattcagcctctacaacgccagcgttggcgtgcattacaacctcgatctggctggcggcaaccggcgcgcactcgaagccttggctgctcgcgccgactaccgtcgcttcgaactgaatgctgcgcgcctggcccttgccggcaacatagcaaccgctgccattacccgagcacgcctcgccgcgcaactagaagccactactgccattttgcgcgtgcaggatgagcaactgcgcctagcccatgaacgcgtgcgtatcggtcaggcctcacctgatgaagcgttgagcctacaagctcaggcggagcaaacgcgggcagaactgcctgcgctgcgtaaacaactgcaacaaaccgaacatctactggcggtgctagccggtcgtgccccaggcacgggtggcatcccggccttcactctggccgatttcactctacccgtcgagatgccgctcgtcgtgccctcagaactggtgcgccgccgaccggatatccaggcgtcagaggcgctgttgcatgcggccaatgcagactatggtgtggctgtcgccaagctctacccacagatcaacctgagcgccaaccttggttctcaggcgctgaccaccggtgccctgttcggtggtggctcggcagtgtggggcctggttgcgcagctcacccagcctctttttaatccagggctacccgcagaaaaaagagcggcgctcgccgcttttgatgccgccgtagccaattaccagagcgtcgtattggagtctttgcgtaacgtcgccgataccctgcgcgcggtggaaagcgatgcacaaactttgactgccctcgctgccgctgatatggctgcacaggcggcactgttgcaaagttag

SEQ ID NO: 383364 - DNA, 732 bp, Salmonella enterica
atgaatcaaccaatacacaatgcttactggttatcccgttttgaaagtattctcaacagtgccctggtgcaacaccgtgccgtttcgttaatccgggtggatttacgtttccctgagtatatgcctgtcaccatcatggatcccgatccggactctgcggtgatctcccgttttttcgcatccctgaaagcaaaaattcaggcttaccagcgacataaacgacgtgccaacaagcgtgtgcgtgcaaccactctgcgttatttctggtgtcgggagtttggcaaggaaaaaggcaggaaacattatcacgtgatattactgctcaacaaagatacctggtgctcgccaggggatttcaccgttccttcttcgctggcgacgctgatcaagctggcatggtgcagtgctctgcatctcgagccctggcagggtaatggactggttcatttttccaggcggacgcctttccgtaaaccgacatcatctgatgctcgcccttcttccgatgatacgcctttgtcgggtggatgttctgatacccggaaagcttctgacaaaaaatctggtggatccgctgtgctctgggtcaagcgtggtgatgtggaagcgatgcagaaagccatggagagagcctgttatctcgtgaagtatgagacgaagcagcatgacggttctggtcaacgtaattatggttgcagtcgtgggccggggcgtctactggatggcaggtga

SEQ ID NO: 383365 - DNA, 402 bp, Salmonella enterica
atggtcagcagtttgcgcatacaggctaccagcaccgccgtagtcattacgccgatgcctttaatgttgctcaggtgctcagctggttctttaaaatggttccggatgtgggtgttcatcttccagcgctttgatgatattaatgttttttttgctttgcgggtgagccgggtacaacctgttttgctcagtaactggcattgcgatcaactggtgtctgcaaacgactatggcattaagaacctgacgttctgcatccggcaaagtccggataaagcggtctcgttccggatggtaattaataactgcagccatctgggcaaaaaaaacgcgcatcatgcgggtcagtcttcgccagatatcccatcgcacgggcaaagtcacgagcttgcctggggttaa

SEQ ID NO: 383366 - DNA, 1605 bp, Salmonella enterica
atgaatcccgattatgtgcaatccttgcagacatcccaccacttcccagctgatttaacctacagattatttcctagtgagcttgcgtatctcattgacgacttatatgaaagtacccaacttccgttggagctcatttttaatactgtactggcaacgctctcactctcctgtcagtcattggttgacgttgttcatcctcacaccaacatgccggaaccctgctcactttatctgttggcaatcgcagagccaggcgcgggaaaaacaacgataaacagactggtgatgaacccctgttacgaatttgccgatcgactcattcaacaatacgaagagagaaacaaagattataagactgaactacagatctggaatacccggcagaaagcgcttgctgccaatttaagaaaggttgttaaccgggggtatccgggggaacaggaagaagaggcgctgcgtaatcacgaaagaaataaaccgacacgtccggttcgaccgaattttatctatgaagatgtttcgcttaaagcgcttgtggaagggctcaatgaacatcctgaggcaggggttatttctgatgaggcggtcacttttttcagaagctatctgaaaaattatccgggcctgttgaataaagcatggagtgggcaaccgtttgattttggacgggctgacgagaaataccatatcgcgccacgtctgacattttcgttaatgtctcagccggatgtctttacgaattatataaataaaaatgacgtactggcgtggggaagcggatttctttcccggtttctgttcagtcaggttgtaagttcttcctggatacgtgattatacgagaggtgagttcagaacaatatcaaccctggagaactttcataaaaagattaacggattcctgttaaaccacaacattaatttccccggcatgagcaccgaaaggaagacattaaaacttgcgaagaaagcgttgggggagtggcaggaaaaccagattaagattgaaagaaaagcgcttgcaggcggggagtgggaacacatcagagatattgttctgaaagcaggttctaatatactgaggatagctggaatattcacctgctattgctataaagatgctgaggaaattgaatcaattgcgctttttaaagctatgcatctcatggactggtatctggaggaggcgagcacaatattttatcccatgtctgcacgatgccagtttgaacaggatgcctgtgaactgtatgcatggattatgacccgaataaggcagaataattggcgtgctatcaggaaaacagacattgaaagatatggtcccaatcgactgagaagagcagaaaaacttacacctgtactcaatcagttaatctgtcaggggtatttatgtatcatcagaatgcgatcgcatcaggcactttatgtttctgtttattgtaacaatggttacctccttcctttaggcgcaatgtattacgaacagtttgatattgttctacccgagaatattcataaagcgaaagcatatcacgttaatattccaccggaattaattccgtcatttgcgtcacctttttcagagtatagcttattttga

SEQ ID NO: 383367 - DNA, 567 bp, Salmonella enterica
atgcctaaatcttacacaccaaactggttttttaccgctttacttgacaatcacatcaatcagttggtcgcacgctattcccgcctgcgggccttacgcatggatttcttctacaggaaagatacgcctgatttcttacaacctgatcatcgctggcttgaattgcagttgcgtatgctgctggagcaggtggaacaatttgaaaatatcgttggtttcttctgggtgattgaatggacggctgatcatggttttcatgcgcatgcggttttctggctcgatcgtcagagggttaaaaaaatatatccctttgcggagcggattacggaatgctggcggtctattacgcataacagcggttcggcacaccgctgtacatatcagccgcattatacatacaacatcaacattcctgtgcgccacaatgatcctgaaagcatcgataatattcgcggtgccctgcattatctggcgaaagaagagcaaaaagacggactgtgcgcatacggttgcagtgaagttcctgaacgacctgctgcagggcgtcctcgtaagcctcacttctga

SEQ ID NO: 383368 - DNA, 573 bp, Salmonella enterica
atgaatgctatcccttatttcgactatagcctggcccccttctggccatcttatcagaacaaagtcatcggcgtccttgagcgtgcgctgcgtgagcagtccggctcacggatacggcggatcctgcttcgtctgccgtgtgaatatgacaataccttcaacagcagaacgacctggtttggtatggattttatcgaaaccgtcagtgcgctgatgaatgcaacacccggacgtgacctttgctggctcctgacccgtcatcctgaaaagccggaataccacgtggtgttatgcgtcagacaggagtatttcgacggccccgaactggatcggttgattctggatgcctggagtaacgtgctgggtttcgcgtcaccaggtgaagcaaagccgtaccagaagcagatcacccgggatgtggtactggatcgccggtcaccggactgcgaagccctgtttaaggaccttatctgggcgttcagtgatttcgcccgcgatcgccgtggagtgtgcgatccggaagcccgttgccttgccggcaatccctggtatcccgtagcaggccagctctga

SEQ ID NO: 383369 - DNA, 237 bp, Salmonella enterica
atgttgacctcaataacaggccacgacagtgtattgctgcgtgccgaggatcccctgatcgacatgaactacatcaccagtttcaccggcatgaccgataaatggttttacaagctgatcagtgaaggccatttcccgaaacccatcaagctgggccgcagcagccgctggtacaaaagtgaagtggagcagtggatgcagcagcgaattgaggaatcacgaggagcagcagcatga

SEQ ID NO: 383370 - DNA, 549 bp, Salmonella enterica
gtgcaaataaccgaagccttaatttcagagccgggagacatccggcgttttgttcagcaggcggtggaccactggccaaatctgctggcatttcacttcacgctctattcggcagaaggaaacatcaacgggcaacagattcatgcattctgtacttccttttaccgacaggtgcacgaacgtattactgagcgtaatcacactgcctgtccatcctcgccggtggtattacgctggttgcgggaacaacatggaggagcaacaatacgatgcctgttgctgctcagccagacgagcatttgccatccgcgggccagtgccacggttgatgaagaatgttcgcaacgggtggatttattgcaacagacctggaaggtgataagcgctggcggacaatgccaggttgaaaggtgttttcgggttgcccggggtgatacatccggtcagtatgtagcgttaaaaaccgtcgcattgtctctggggttaccggttgtgaccgccattacccatcgtccggtacagcgctgtacattgattacagctcagtga

SEQ ID NO: 383371 - DNA, 345 bp, Salmonella enterica
atgacaaaacgccagcgtaaaaaccgtaagcgtattaatcgtcttgtggaacactggcctgagttattcaaccgggaaaaaccccaaccgcgtaaagttgagatacctgacgacctgatacaggatatcgccatcagagaactggcgtttagcgcaggtgcattacgcgcggcagtagcgtcttatgtgcagtctccgcgctattaccgtgcgttaatggctggcggcgcccgttacgacctgaaggggcagccgtgcggggaagtgactccacaggaacagaaagaggcagagacccggctaatggtgctgaatgaccgacaaaaagccagaaaacctcgttga

SEQ ID NO: 383372 - DNA, 174 bp, Salmonella enterica
atggtaacgctgaccattaaccgtaaaccacagggcattttcagtaaatcaccggcaacgccgctgcaggataaaatgaacactgcacacaacgtgaaggccagggaacggataccacagttgaacgataaacagagccctgctctgctgaaaaaacaccgtggcggcatatga

SEQ ID NO: 383373 - DNA, 435 bp, Salmonella enterica
atgagtaagaagaaaatttctgttgaaaatgaagagttcattacttaccgggcattacttctgagtattgactttgttaaaaaactggtcacagaaatgtctgatgaagatttaaataaggttaaggaaaactttgacatagctattcagcaacgtgatgagcgaaaggaaaatatgaaagctatcaaatcactcatggatgaacatggtatatctctggaagatttttgtcgtgaatttggcaaaaaatcacaggcaggcagaaaaagtgtgtcaggagggcataaatacgagtatgacgataacggtaaaagaatgtactggaatgggcaaggacgtcggcctaaggccatagcagaggctataaaagccggaggttctcttgatgattttcttatatctcaggaagtatcatctggtcctgattatgaataa

SEQ ID NO: 383374 - DNA, 570 bp, Salmonella enterica
atgggcaagaacaattaccctgaaaataaatacaggaaatggttttccacagcaataacatatcttattacaggtggtttgtgctggtatatgttgtgggcatccgctatatctcattatactgttttacaaaatacggtacctgaatggacaacatatttttgcaccggtataatcaccggatctctttcttttatttatgcattttatatccgcacctttaacagaacattaaagtctttattaaatgcattcacggggggattttgtcttggatttatactgagtctgaactgttacgatgtctgtgtttatctttttccggataaggttattagctatgaatctgaatatgatgttgtttttccgggaccatcaagaggaaagtatggacattgtgaagcgggactctggttgaaagatcaaaacacttccagatggatacaactttgtacaaataaagagttcctgcgcagtcaccataagcaggggatgacaggtgtatgggtaacagctcgtgttaataaaattgggtcgtatatcgtgaaatatgaatttatctatatgtag

SEQ ID NO: 383375 - DNA, 135 bp, Salmonella enterica; identical to SEQ ID NO: 146458

SEQ ID NO: 383376 - DNA, 2064 bp, Salmonella enterica; identical to SEQ ID NO: 144618

SEQ ID NO: 383377 - DNA, 1392 bp, Salmonella enterica
ttgagtcaatatttaaagcttggcgatgaccagtctccggttcagttggacccacacagcgaagttggtgcatttaaagtcgttggacactgcgcatgggcaaaaccagaagataaaatcactcctgactttttgcgttcaagagtagaaccttggttaactgcactttttcagtctgaacacttaaatatacttattggcgccggccttagttcggctatccaagagtcagcgaccggcaccaaacctcaaggtatgggatggattgaagatctcaaagtttgtaaggctgaaatagacagttatgtagctaaaacagcagacgcctcaggaaggggaaagggtaatattgaagatcagattcgttcaattaatgagttgattaaaggactagagattttaacggtacaaaacctaccggttccaccatctccaccaggtgctccctcatatcgaaatttaaaaagtgagttagtagagttaaataatgagctaacaaggtgtctgaaattattttcagactcagttagttatggtgaaaaattaattcgtgatgcaaacaacgatttaaaaacagaaacatttaattatttagtaagttttttgatgagtttttcaagtcgaacagcaactagggatcgattacatatttttacgacaaattacgacaggataattgaaacgggcgctgaaatagcaggtcttcgtttaattgacagatttgtcggtactatagcaccaatttttagatcttctcggttagaagtggattatcattacaacccaccagggattcggggtgagccaagatatttggaaggtgtggcgcgatttactaaattacatggttcattggactggtatgctactgaaggggctataaggcgttttggattgccatttggagccagttcggttgaaccctttttacaggtggaaactaccggaactgcaaattatcaacaattaatgatttatccaaattcagttaaagaccgtgaaacatctgaatatccttatgttgagctatttagggatttagcatctgcaacatgtcgtcctaatagcaccttggtaacatatggttatagttttggcgatgagcatataaatcgggttattattgacatgttgacaataccctcaacgcatatagtaataattgcatacggtgatccacttggtagaatcatgcgttttataaacgatagtggaagaaaagctcaaatatctttattgcttggtgatcactttggagatataaagaaattagtagatttttatcttcctaaagccgcgatagacagatcatcaattcgtatggcggagctattgaagtcaagaggtttgtatcgtgcaactacctcaaataatagtggggattccgaatga

SEQ ID NO: 383378 - DNA, 582 bp, Salmonella enterica; identical to SEQ ID NO: 187162

SEQ ID NO: 383379 - DNA, 312 bp, Salmonella enterica; identical to SEQ ID NO: 146615

SEQ ID NO: 383380 - DNA, 420 bp, Salmonella enterica; identical to SEQ ID NO: 26685

SEQ ID NO: 383381 - DNA, 825 bp, Salmonella enterica
gtgccttcatcattgaaacataacgtcgtcacagtcagcgtggaggcttcagatcgctccgaagaccagcatcactgcgtaaaagtgcgctttgaggaatgggattcactgattgatgagctgggggatgagactagcgcggtaaaagtgacgaaaaagctgtgtgccggtcgcgtatccttcgattgtgattgtgggcgtcatcaatactggtatcgctacatcgcgaccgccggtaactttgccctggcaccgccaaaagaatatgccttccccaaaatccgtaaccctaatctcaaagggatcgcctgtaagcacgtgatccacgcaatgacccgactccagtcggcaagctggcaattgcggatcggtcaggccatgctgcaggccgctaaacgtgtagggttcggtgacgacaaacgacgtactactaagcatttcactgaggaagaccggaaaagattcaacaagaaccgtaactcacagactaaccagggggcgatgcgtcaggagtgggataaataccagcgccgccagaaagcgctgggtaatcagattgcgcgagacagtacaaagctacgcaccctcagcgacaaactgttaaaagcccggaaaatgacgcaaaaacaacgggcaaaggcagaagaaagtcagcaaaagcttaaagccgagcaggataaaaacaaggtgctgctgcagcagctcgccgaccgtttcaaggtggaacgccaggcgtttattgatgcgatggtaatgactggtgtatcacgtcaggatgccgagaaacgcttcctggactacgtgaaaaacaaaggcaggggttaa

SEQ ID NO: 383382 - DNA, 480 bp, Salmonella enterica
atgacaacgagtgatgccatcgctttagctgcgcttgtagtatcgatttacactatcatatcatcagaagtgaagtcgagaaaaagtgatagagaacaaaaggttataaaggatgagcaagacaggttacgtaagttgcttctagaaaaagaaacaaagtcagcaattaatgagatgaaggctgagcttggtgcccgcctcgtaaaaatagccaaaaacaactatagactcaagatatttaatagagggaaagttgaggctaaaaatatagaaattcatttccctgataacgatggcaatgaatatctttacatgcatgatgtagaagataaatttccatatgaagtattacacccgcaacatgggattgaagttttagcgggactaagctttggaagtaaaactaaataccgaataaaacttatatgggatgacaattataaaaaaaggaatgaagaggagtttttcatttctatataa

SEQ ID NO: 383383 - DNA, 276 bp, Salmonella enterica; identical to SEQ ID NO: 78702

SEQ ID NO: 383384 - DNA, 423 bp, Salmonella enterica
atgagtagaaacaacgaaacaagcggcgttgaactggttgtcgtcggcgtatttgctttctgtctggcagttgttgcctggctaatgaaaactttcgatgttgaatggcaaacagcactggaaactgcgcctggcctgatagtctggctgcttgttgtcggggcggggatctttttcgggatcaaaatggaaacagatcttgttcgctggggtgctccactggcgattgcccttctgattccggtattcaaaccaatccttaaggaagctgccggagtacgtgaaacgggtggattggttttcgatgatatggtttcgtggtatggaactggctggggaatgtcgttgatgtttttcggaattcttatcatcggatacgggctgctttattggtggcacagaagaaattcatattactggtaa

SEQ ID NO: 383385 - DNA, 447 bp, Salmonella enterica; identical to SEQ ID NO: 16619

SEQ ID NO: 383386 - DNA, 912 bp, Salmonella enterica; identical to SEQ ID NO: 78705

SEQ ID NO: 383387 - DNA, 318 bp, Salmonella enterica; identical to SEQ ID NO: 16617

SEQ ID NO: 383388 - DNA, 252 bp, Salmonella enterica; identical to SEQ ID NO: 16616

SEQ ID NO: 383389 - DNA, 234 bp, Salmonella enterica; identical to SEQ ID NO: 10869

SEQ ID NO: 383390 - DNA, 1713 bp, Salmonella enterica; identical to SEQ ID NO: 78696

SEQ ID NO: 383391 - DNA, 288 bp, Salmonella enterica; identical to SEQ ID NO: 78697

SEQ ID NO: 383392 - DNA, 1026 bp, Salmonella enterica; identical to SEQ ID NO: 78698

SEQ ID NO: 383393 - DNA, 249 bp, Salmonella enterica; identical to SEQ ID NO: 11349

SEQ ID NO: 383394 - DNA, 888 bp, Salmonella enterica
atggtattgccttcaatgaataaatcagttgaggccattagcaataatcaccttcaacagccgaacaaatttccattaataaatggattagctgacgtaagagactattatgtcgcaaactgcttattgtttaaacttaataaaggcagtttgcgaattgaaaacgaatttggggagttcatcgaacgatctgcgccgtgtttatttttattggaaaaagatcaaacaatcacgcttagtatgagcgaaatagaagggcatattgatttttcttcactggaagtttcctatgacttaatgcaaaaattctacaaagttttttacagtacaagaaactataatgatcgagagctatcattaaaaacgaaaccaaagtatttttttcatgcggacttgttgccagggatgagtgatacttttgactctattttgcatggtgtggcatgtccacgggtttgtagtaatgtgagtattgatgatcatgattattcatatttctcattgatgtatcttatatcggcatttgtacgtaagcccggtgggtttgatttccttgagcgagcaataaaaattacgacaaaagagaaagtttataacattattatcagcgatctcacccgcaaatggtcacaggctgaggtggcaggaaagctgtttatgagcgtatcaagtctgaagcgaaaactggccgctgaagaggtgagttttagtaaaatatacctggatgctcgtatgaatcaggctataaaattattacgtatgggggctggaaatatttcacaagtcgcgacgatgtgtggctatgatacgccttcttattttatcgctatttttaaacggcattttaagattacaccgcttagctttatgcgtacaatgaaccattga

SEQ ID NO: 383395 - DNA, 756 bp, Salmonella enterica
atgagaaatgtaattatatacggtattaactggactaattgttatgccctacagtctatttttaagcaaaaatatccggaaaagtgcgttaaaacgtgtaactcattaactgcacttttgcattccctatccgatatgccggacgccgggctgattttagctttgaacccgcatgagcatgtttatctttttcatgcgttgctgacgcggttgcagaaccgtaaagttttggtagtggcagatcgcttgtattatatcgatcgctgtgtgctgcaatattttggcgttatggattatgttttaaaagacgaactatcctgcgctatccgctcggagcgagagaagctccgtcttccggaagcctggctgcgtttctgccacaggccacaaaagaaaaccgtggctgctacgtatgcttttaatgccggcgagacgccggaagaggtattgtttaatatcaatcaatacgcctggtggaatctacctcccggtgtcacgcaggcgaaatatgcgctgctgatattattatcctccggacatccggcaattgaactggcgaaaaaatttggtctgggaacaaaaaccgtcagtatttatcgtaagaaggttatgtatcgtttggggatggactcttcaccgctatcgctgttccggggactgaaactagacgcgcatttacagcgcactgcttttgcacataaccctgctgtacctgacgataattgcgcgttaccgattgcggtaggaatgaattaa

SEQ ID NO: 383396 - DNA, 843 bp, Salmonella enterica
atgctaagtcctacgactcgtaatatgggggcgagtttatcgcctcagcctgacgtcagcggggagctaaacaccgaagcattgacctgtattgttgagcgtctggaaagtgaaattatagatggcagctggattcatatcagttacgaggaaaccgatctcgaaatgatgccttttcttgttgcacaggccaataagaagtatccagagttaaatcttaaatttgttatgtcagtccatgagcttgtttcctctataaaggagaccagaatggaaggcgttgaatctgcccgatttctcgtaaatatgggaagttcaggtatccatatttcagtcgtcgattttagagttatggacggaaagacatcggtgattttgttcgaaccagcagcgtgtagcgcttttggacctgctttactggcgttgaggaccaaagcagctcttgaacgtgaacaactgcctgattgttattttgctatggtcgagctggacattcaacgaagctcttctgaatgcggtatttttagcctggcgctcgccaaaaaacttcagcttgaatttatgaacttagtaaaaattcatgaagataatatttgtgaacgtctgtgtggtgaagaaccttttctcccgtccgataaagcagaccgctatctgccggtgagtttttacaaacatactcaaggcgcacaacgattaaatgaatatgtggaggccaatccggcggcgggaagcagtatagtaaacaaaaagaatgaaacgctttatgagcgattcgataacaatgccgttatgctaaggaaggtgcgaataagcaggtcatttcttcccaagctgactcgctga

SEQ ID NO: 383397 - DNA, 522 bp, Salmonella enterica
atggaagatgtaaaaaacaaactagaaattaaaacgaagtttgaaaaagaaattcttgcgctggataaaataaaaattagaaaccagttgaatgcagatatacgacgcctcgattattcactagaggttgctaactcagcaggaataaaaaaacctgtatacagcaatggtcagattatgaaggatgacccagattttcctgtggctctcggttctgatggtatagcaactaaattgaatatcaaaaagtcaatcaaggatgtttcagaattgagtggtgagttgcgaaatcgtcaatatattgtggagcaattggttggggtaaaggtggggaatgttgattttatgccattccagtatcaattgagcccaacgtcaccagtcaaaaaggatgggccaagcaatgtcataattgtaatcctttcttctatcattggggggatgcttgcatgtggcagtgtgcttttgcgtcatgctatggaagcaagaaagttgagtgggattgaagaaaagttgggctga

SEQ ID NO: 383398 - DNA, 426 bp, Salmonella enterica
atgaatatcaaaaagatatctgacgagcgattttctgattacaacatgctaacgcatagcaataaagaaattgatctatttgacttgatttatgttttatggacagcaaaaacaaaaattgtcggagtggcactgttttttgcttgtattggctttcttatttcttttattttgccacaaaaatggactagttctgctgtggtgactcctgccgagcctgttcaatggagcgagttaaataaggaacttgccagccttcatgttctgggagtggattttgatatcaatcgtgatagcgcatttaatttgtttattaagaaatttcaatctgttaattcattaaatgaatatatgagatcatctccttatgttattgagatggtaaagaaaaaaatattagtgctcttgaactgcatcgcgcaatag

SEQ ID NO: 383399 - DNA, 135 bp, Salmonella enterica; identical to SEQ ID NO: 30527

SEQ ID NO: 383400 - DNA, 738 bp, Salmonella enterica
atgaaaaaggttattgctgtttcaacacttgcaatggcaggcatgttttcggcccagactctggctgatgagaacaaaactggcttttatgtgaccggtaaagccggtgtttctgttatgtcactttcagagcaacgtttcgttgatggtgaaggggcatgggcggataaatacaaaggcagtgacaaaagtgatacggtttttggcgcaggccttgcggtgggatacgatttttatcagcactacaatgtgccggtgcgtactgaagtggagttttatggccgcggtaacgctgaatcaaaatatcgtctgagttattgggaaagtgccggtggtgccgagttcgatgatgcacagaacaagctcagtgtaaacacgctgatgctgaatgcgtattatgatttcagaaacagcagtgcattcacgccatggatatctgctggtctgggttatgcacgggttcatcataaaacttcgtacatatataccgataacagcccggcaggcagtgaagtttattcagcttcagcgtcaaaatacgaaaacaacctggcatggagcctgggtgccggtgttaaatacgatgtgacgcaggatttcagccttgacctcagctaccggtatctggatgcaggggattccactctgacttataaagatgaggatggtgctaaatataaatcctctgttgatgtcagaagtaacgagtttatgttaggcgcaacgtataacttctga

SEQ ID NO: 383401 - DNA, 852 bp, Salmonella enterica
atggttgactcaacgagaaatcgctcagcggagcgtttgattgatatccttgttgaattacaaaattatggcgtggtcagtcgctataatttgatgaaaaaatacaacatcactgagcgaacagcatatcgtgatctgaatatgctttctccctttattgaagcctgtggcgatggaaaataccggcttatttcagcaagagcaggaaaccagagcaaagaatcactgcacaaatctctggccaggttactggatactgatgcgatttttcctgaacgggatgaaggtttctggcagaaattagaaaacagggcaaccgaaaagcatattcgtgttcagtttcataaccctgagcacactatcagggatgatttaagaaaatatcttgatgttcttgaaaaagcgatctgcaacagtaatgtttgccagattgcatatgccggtaagaccagaatcgttcatccctataaattaactaatcagagaagtatatggtatttgctggctactgaagagaacaagttaaagtcgttttcattagctaaaataaaatggctggatataaaaaaagaaaagtttgcaaagagtgatgaaatacagtcactagtaagtgagtcatgtgacccgtgggtgagcgacaaaacatttgatgttgtgttgttcatttacagtaatatcgcccattattttttgcgacgggacttacttccttaccagcaattgctacacaaacatgacaatggcattacgctgtcatgcaaggctgcacataaaaatcaaattgtcccgttgattttatactggctaccgaatgttgaaattattgaaccagtatggggctttgttgaataa

SEQ ID NO: 383402 - DNA, 1686 bp, Salmonella enterica
atgtccaactactgcttttactctcaggatgcattagctctggctcaaagtgctggtgttgatgtaataataaacagctatgctgagcagcataaaaaacaaacatatattctttgcagacctctatctaatgaggatgtaaagtatgattatgaccgagcgattgcagtattttcttctggtataaaacctttttttatagattttggggatgacgatgatctttttgaggagtatcaggaagattttctcgaagatgtttcttatttagcggagaaattcaagtatcgagataagatcggcaggaaaaaatcgtggcaaattttatttgaatcgctttctcgtaatgatatcgatttcaaaaaactggaagtcgaaactaaagaaagtagggtgattgatttaattatctcacttattgttggtagtattaacgacacatcaagaattaaccttgaagcaaataatttattagatacaataaaatccaaaattattttatttgatacggatcaaacaaagtttgtcttccagagtggctttggaaaaaagagtgtaatacaaggattagctggttcaggtaaaactgaattacttttacacaaattaaaagagatttattcaaaaaaccctgattctagaattgcatttacttgctttaataaaattctcgcttccacaatgagaaccagaatccctgagtttttcgattttatgcgagtcgaaaaacagatagaatggggtacaaaacttttttgcttcaactcttggggtttgactaaagaacctttttctggaatgtacagatatatatgccattattacgaaattccatttgggggatttggtaatggcgattttgatgccctatgtaagaaagccattgcagatataaataatagtgggagagctgataaaaaggcacttgattacgtatttatcgacgaaagtcaagacttcccacaaagcttcattgatctctgtgaaatggttacttctaaaaaattatatgtagcaggtgacgttttccaaaatattttcatgccgattagcgataacgtgaatcgagcagatatcgttcttaaaaaatgctaccgcacagatcctaagaatttgatgttttctcatgccttaggaatgggactctacgaggaacctgttctgcgttggttaaaagagcctgaatgggattcttgtgggtataaatataaaaaagtaggagatagagtccatttatcaagagaccctttgaggcgttttgaagatattcccaaaaatcataaaagtactgctgttcatttgttagaaggaacagataatgggccagataaaatagttgatattataatcgatattaaggaacgcaatccatctttagagcaaggagatattgctgttatttttcttgacgccggtggttatatttatgagtacattcattcgctaaaatcaaaagtaaaacaacagcttgggtgggattcaaatatctcacatgaaacaaaatcaaagcaagatggtaaactttttatttctaatataaataatgcaaaaggtcttgaatttccatttgttatttgttttgccatgaaactggtgaagagagctaattttcgaaatgcactctacactatgatggcgaggtcatttttagaaagtcacttagggaaggtgcgaacaagttcctga

SEQ ID NO: 383403 - DNA, 237 bp, Salmonella enterica
atgacgagactgacaaacctgacccccgctgagaaaaagtttatcgacgacgctatagccgctgctgaacgtgcggccgggaagaagctcaatcagcctaaccggcacatcgtcctgaacagagcgcgtgcgcagattgagtcgcagcgttacgccgaccgccagcgtgcattacgtgaggatgagcggcagcagtccgattttgcctggtcacgtccgcgcgcgccgcgccgctga

SEQ ID NO: 383404 - DNA, 405 bp, Salmonella enterica; identical to SEQ ID NO: 9406

SEQ ID NO: 383405 - DNA, 279 bp, Salmonella enterica
atgaatccttcgttaaccgattcccgccgtcaggcgctgcgttcagcttcccactggtatgccgtgctaagcggcgagcgcgtcagcccacaacaggaagcgcgctggcaacagtggtatgaacaggatcaggataaccagtgggcctggcagcaggttgaaaacctgcgcaaccagcttggcggtgtgcctggcgacgttgccagccgggcgctgcacgatacccgcctcacccgccgtcacgtgatgaaaggattactgcggcactgttgcaaatag

SEQ ID NO: 383406 - DNA, 981 bp, Salmonella enterica; identical to SEQ ID NO: 217388

SEQ ID NO: 383407 - DNA, 924 bp, Salmonella enterica; identical to SEQ ID NO: 195115

SEQ ID NO: 383408 - DNA, 786 bp, Salmonella enterica
ttgaaggatcagatcacgcatcttcccgacaacgcaaaccgttccgtggcaaagcaaaagttcaaaatcaccaactggcccacctacaataaagccctcatcaaccgtggctccataactttctggctggatgatgaagctattcaggcctggtatgagtcggcaacgccttcatcacggggaagacctcagcgctattctgatctcgccatcaccaccgttctggtcattaaacgcgtgttcaggttgaccctgcgggctgcacagggttttattgattccatttttacactgatgaatgttccgttgcgctgcccggattacaccagtgtcagcaagcgcgcaaagtcggttaatgtcagtttcaaaacgttcacccggggtgaaatcgcgcatctggtgattgattccaccgggctgaaggtctttggtgaaggcgaatggaaagtcaaaaaacacggcaaagaacgccgtcgtatatggcgaaagttgcatctggcagttgacagcaacacacatgaaatcatctgtgcagacctgtcgctgaataatgtgacggactcagaagccttcccgggtcttatccggcagactcacagaaaaatcagggcagccgcggcagacggcgcttacgacacccggctctgtcacgatgaactgcggcgtaagaaaatcagcgcgcttatccctccccgaaaaggtgcgggttactggcccggtgaatatgcagaccgggcactgttgcaaatagtcggtggtgataaacttatcatccccttttgctga

SEQ ID NO: 383409 - DNA, 1344 bp, Salmonella enterica
atgaaaaaagtcaaaaaattgtctcttaccgatttagtgctttatggtctggtgtttatggtgcctatcgcgccagtctctctttatggcgtcgtttataatctttcgcacggtatggttgcgctggtttatattattggcgcgatcgcgatgttttttaccgcgtacagctactctaccttatcgcagcatatctcctcgtcgggttcggcctatgcgtatgctggcgtatgcattaatcccgccgtagggtttctgaccggatggatattactgctggattatcttttgttccctacgctcgtagcggtgctgggcggtgtcgcggtccacgctattttaccgcaaatcccggtctgggtctggccgttgatttatgtggctattggcaccggagtcaactatctcgggatacagcaaacggcgaaattcgataagttactggtctttattcaactcggtattctggcgattttcgtgctactcattatccgtctgatgatgcaggacagtagtcagataacgctttccttccggccttttttcgattcacagtggttcaccccagggctcatcgcgacggcgatttcggtggctgcgctgaactttctcggctttgacgctatcagtacattaagtgaagaaagcgaaggcgggggacgcgccgtcagtaaagcaacgctgttggcgttagttttggcgacggtattgtttattatcgttgtagcgtttgcggctttcgccaccggtaatgtcgaccgcttcgcggaaggtaatgcgacgaatgaagcatttttcaccattgccggcaacgttggcggtatctggctcaaagtggcgttttccatcattgtggcgtttgtgtgcgccgtcggcaacattattaccgcgcaaacggcggtgtccagagtgctattttcaatggggcgcgaccgaatgttgcccgccttcctcgctcacgtccataccacgcgtaaaacgccggattatgccattctgtttaccggcggcgtcaccctactgctcagctacctgttttccggcaagattgaatctatctccacgctggtgaactttggcgcgcttttcgctttttttgtcgtgaacctgtgtgtgtttatcctgttcaatttccggatgaaagcccagcggcgcattttcgcccatgtcatttcgccgatcatggggatgatcgtcatcggctacgtctgtttaaacatgaacattcacgctctgatactcggaattagctgggcggcgatcgggatagcgatactgtgctaccgaaaagcacacaaccaaaacatcgccatcgacctggaaggcaaaaagttgctcgattga

SEQ ID NO: 383410 - DNA, 441 bp, Salmonella enterica
atggcaaaacactaccatcgcctgaaacccgtaaaagattatcaggagattgatgacgtactgttcaagttttcgctcaacctaccggatgaacaaatcccgttagtgatcgacaaactacacgttacgctcgatggcattatgaagcccgtcacaagtggttttgactttatcgatctgattattcccggcctgcataaagcaaacggtatttcgcggttactgaaacgctgggatctgtcgccacaaaatgtggtagcgattggcgacagcggcaatggcgcagagatgcttaaaatggcgcgttattcctttgcgatggacaatgccgcagaaaacattaaacaaatcgcccgttacgctaccgatgataataagcatgaaggcgcactgaatgtgattcaggcggtgctggaaaataaggtgccgtttacactttaa

SEQ ID NO: 383411 - DNA, 498 bp, Salmonella enterica
ttgcgcccccaggatcagcgcgccagcgccccgtttgatgagcgatttgccgtcccagtaggtggcgctgtcgggattgagcgtggcgtcaacgtccgtcagcgcggtgttcagcgtgaagctgtgaccttgctcgctcagggtgaaggtaccgtgggcgtcggtggcggcgttgtcgctgtcggcataccaggacagcgaggcggttacgtcatagcgggtgtcgtcgtcggcgttcacgcgcccatcgacggtgagaaaatccacctgtttggcgtccataccggctacggtgaattgcgcaaaatcgctattgatggcgctgtccgtgtcaatcagcgtgtaggcgtacgcgtcgcgggtccaggatttcgccacgttgccgatgccggtaatatccagcgtaccgcccaggttggcgcggtcggcggtgacgatggcaccgctgttgctgtcggtcaggtgtacggccagggtgctgttcgcctcctgcgttag

SEQ ID NO: 383412 - DNA, 444 bp, Salmonella enterica
atgccctttgtagagcgtaaaatcaccgtcggactgaccgcccacctcaataacttcaataccgttaaccgtttttgcgcccaggccattgacgttggtgatatgcagcgtggtgctgccggcggtgtcgccggtgacgatcagtttatcggtgggcgagctgtcatcgcccagttgggtattgagatagagatgaccgtcgttgccggtatagtttcccgcgatcgtcagcgtattgttgggctggtcgctgccgcttatcatcgcgctgctgttgacgacatcgccgttgacggtgaacgtatcggcaaagtacaggctgcccaggttgttaacatggccgttcaccgtggcgttgtggccgccaaaggcggcgttcgcggcgatattaatcgcctgcgcgctccccgcagagccgatagtcgccgtttcggccagccatag

SEQ ID NO: 383413 - DNA, 210 bp, Salmonella enterica
gtgcatgccaaaaaacttctggcccataagtttgatcccttccctgctgtgacgctgagcgaattctgtttatttgcacccgctatcctgcacacgattacgccgcgcaggcataaaaaaaccggccattgtgttcggttcgtcattgtcagtgtgtcagtccaggatgatatcgtcgcgcagcgcatcagcgagcgcagctgcagataa

SEQ ID NO: 383414 - DNA, 837 bp, Salmonella enterica
atgtcgaaacataatcttattatctatagcctgcttctggcggctgcgccgataagcgtcttggcggattcgtcgacaacgtccgcggcaaccgtcgggatgttttctcctcctacggcgccgagcgttgggcacagacctaagaaaccgagagttgtcttccagttcgtaaatgagaaggggcaagctctagtgtatgacactgattatgcgcccgtttcgggaactacgctaaacaaatatctactttgggacgccagggaccctgatacagattactttcaggctagtgaaacatctactatgacatgtacatattatctggttaatcgagatggttctcagcataaagttaaacgtgaaaaaccatgtgaatatagatttgacttcaaggaggaacatgttggttcaaaactaaagttggaactttataacgaaacggatatggcttcagcatcaggctacacgccggtgcctacagtctctgctcccttctacgttgagacaaaggtcatagtcaatatgcctccagacttagctatcgtggatatagataaacctgttcttttaccgggagaaagcgctatcgtaaaacttattttcaaggacaaagataacaatcctataaacgatcttgagataatgagatatagggactataaccatggtggggaatgggatatttcctttgtcaaaaagggttctaaccccggcgagtatatacatacggtaacctataaaggtgctaatggtagtagagacccaaaggtattcttagaatacaaacatctgggtgtatttcttttgtctaaaaagattatgattacagggaaataa

SEQ ID NO: 383415 - DNA, 606 bp, Salmonella enterica
ttgagcctttctcccgagcgttttatccaactggagaatggtcatatccagacgcgcccgatcaaaggtacgcttccacggcttaacgatccgcaggcggatcgtcagcaggcgcagaaactggccaactcaatgaaagatcgcgctgaaaatttgatgatcgtcgatttgatgcgtaacgacattggccgggtcgccgtgccgggttcggtgaaagtgccggaactgttcgtcgtcgaaccatttcctgccgttcaccatctggttagcaccattaccgcccgtttaccggactcgcttcatgctaccgacctgctgcgcgcggctttccccggcggctccattaccggcgcgcctaaagtgcgggcaatggaaattatcgacgaactggagccgcagcgacgcaacgcctggtgcggtagcatcggttatctgagtttctgcggcaagatggataccagtattactatccgcaccgtcacggcaacggagggccaactctattgctcagccggcggcggtatcgtggccgatagcaacgaagaagcggaatatcaggaaacttttgataaagttaatcgtatcctgcacccactggagaactaa

SEQ ID NO: 383416 - DNA, 183 bp, Salmonella enterica
gtgggggacaaggatgtcccccatcaatccccggggcttactctggtcagtgactggggggagcgaggacaaattggcaaggccgatgtgaacgccgcttacggcggccctttagggcgaggcccggagaggcgggccatgaacggctaccatttctttcgcgagttaagcgaagaatgctga

SEQ ID NO: 383417 - DNA, 168 bp, Salmonella enterica
atgtcaatcaaaagatcaccggtacttattgcattgtcccaacttaacggagtggatctgaaactcatccaacactacagccgcgtgacggacgataaaggccgctatcttccgtttgacgaattctgccgccgtacgtccagtggagaaaatgcctctatcgcctaa

SEQ ID NO: 383418 - DNA, 2118 bp, Salmonella enterica
atgacgattccaacgccaaaggtggcactttctgatggttttctgggggcttttgcgcggattcctaaagcgcagcaaaaaaaggtccaggaatttatctccaagttccgccaggatccgacgagtaatgggctgaactacgaaaagatccacgatgcacgcagcaataatgtgcattccgtgcgtattgaccaaacctaccgggggatcgtcctgaaacccgaacagggggatctgtatatgctgatgtgggtggataagcacgacgaagcttatgactgggcgcggcgacatgattgtgcaattcacccggttactggtgcgattcaggtaattgatatcagctatattaaacccgcctccgaacctgttgttgttgataaacccaaactctttgctgcttatactgcggagcagatcctcgcgctcggtgttcctcctgtgtttattgagcaggtaatggctcttgtagatacagtggggctgaatcagctagaaagcgtgatgccagcggaagcttgggaacctctacactggctggcagaagggctggattaccaggaagtgctggaagagtttaacgaacatcgtaatgagcctgttgatactaacgactttattgaggcgattgagcgaagtaaacgtcgcttccatgttgttgaaaatgaacaggagctactgcaaatgctcaatgcgccactggaaaaatggcgtgtgttcctgcacccgagccagcgaaaactggtggagtctccggcaaatggtccggtacgtgtattaggtggtgcaggcacgggaaaaacagttgttgcgatgcatcgtgctcgttggttatcccaacgtctggccgataaaccgggtaagaaagtcctgttcacgaccttcacccgcaacctggcggcggatattcgcgccaacctccagcgtttgtgtagtcgtgaggagatggcgcgtattgaagttgttaacattgatgcctggatgagcgagcaactgaaacgccatggatatgatttccgcgtggtgtatgacagcgatgaagggcgacgtaaatgctggaactatgccttgcagcaagtccctgctgaactgggtttaccggaaaacttttattctgaagagtggcaacgtattgttcagccgaatgctgtttacagccgtgaagaatatctgaaggtgagccgtattggtcgtggcacggcgttatcacgtattcagcgtgcgaaaatctggcctgttttcgaagagttccgggcacaaatggcgcgtgccaaactgcgagaaatgggtgatgccatgcatgaggctattattctgtttaaagaaaaacaggtgcaattgccttatagcagtatcgtagttgatgaagctcaggatataggtgcaccggcctttacccttattcgtagcctagtcccggagtctcctaacgatctttttattgtgggtgatggacatcagcgtatttaccgcaataaagtcgtgctcggtcagtgtggtattaatgttcgtgggcgtcgtagtaaaaaactgaaaattaactaccggactacagaagagacgcgacagtttgctgtcgggttattaaccggcgttaaggttgataacctggatggtgaaactgattccagcaacgattatttatcattgcttcatggtgaaaaacccatgatcacttatgcttcagattttaaagaagaggctgcgacgattatcaagcaaattcaggcgttgttagccaatgatgttcgttcccaagatatctgcattaccgctcgtacgaagcatgcttacgagcgttatgcttctgctctgaatgatgctggaatcgagacctataatttaggtcaggatagtggtgatagtgatcaacgccctggtgtgcgtatggcaactatgcaccgcattaaagggctagagttccagtatgtgttccttgcgggtatcaacgatggcgtcgtgccggaagcgaaagccatatcatctgacgatcctgttgaacaacgtgatgctctatttaatgaacgtgcgctactccatgttgcagcaacccgtgcggtaaaagggttatttgtttcttcatatggcgtaccgagtacattactaactgtacactag

SEQ ID NO: 383419 - DNA, 6342 bp, Salmonella enterica
atgctgccttctgttgtcagtcggcaggttgccgacagcgttgcctcctttttacgggcagccttcccgcttaacagcccgctgtttaatggtgaagaaaataataacgtctcgatgctggagcaatttctgtcccagccggaaacgctgctgaaagggccgtatctttccgctcagctgccgtttcgcaaaagtgacttaccgctgaacttcttccctaacctgacgctgccgttcccaccgcacgctcatcaggcgcaggcgttccagcgcctgggtatcgaggtgcctctgccgacgctggtggcgaccgggacgggttccggtaaaacggaatgttttatgttcccgctgcttaaccattgtgctggggtatcagaggccggtgttaaagcgatcatcatttatccaatgaacgctctggcaaccgaccaggccagccgtttcgccaaaaccatcgccagcgatccgcagctgcatggcaaagtgaccgtcggcctgtttgtcggcgacagtgaaatcgagcccagcaaaaagatgtctgcggataaagtcatcacctgcaaacataccctgcgcgagaacccgccggatatcctgctgaccaactataagatgctggattacctgctgatgcgcccaggcgatcagaagctctggcgctataaccagcctgggtcactgcgttatctggtggtggatgaactgcatacgtttgatggtgcgcaggggtcggatctggcctgtctggtgcgccgcttaaagcatcatattggtgtcgatgacaagcgttttgcctgcgtggggacgtcggctaccgtaggtgacgaactggggcaactactcgattacgcgaaaacgatctttgatcagccgtttagcaatgacgcggttattcgcgaagatcgctacacggcggcagagtatctgcaaggttataccatcgagtacagtcagtatccgggacaggatgtcagcgcagcgctggatccgcaaacgtacgccagcccggtagattatctgaacggacaaattccgctgtggttcccggatagttcactgcaattacctgccgagctggacagcgatctcggacgtgaaaagcgtattgagttgggctcattgttacgtcgccacagcatcctgcacgtactccttgaggatttgcaggggggaattttgtcggaacagcagtgcctggaaaatctccaggtgatgctggcggaaagcgccgggcatgcaacccgcgtgctgcaaagcattctggcactaattgcccaggcacgcctggaggttccagaaaaacaggaagatcgggaaaagcgcctacaggcgaataaagcacgtcccgttctgccttttgtgcaactacgttctcagctgtggttgcgcgagatgcgccgcctggtcgccagcgtgtcaaaaacacctgagcttgtttttgctgatgatgtcgcggtggaagatcgcgaacattatcttcccgttattcactgtcgtgactgccatgctaccggttgggcgagcctgcgccatggtcagagtgttcaactcgaaaccgacctggacggtatttatcgtcagttctttgaaaaaggccgttcgattgtgctggcttttccggataacagcgataaaccggtcagcggtgttcaccagaaactgtgcccttcctgtttaaagctcaataagcaggctaacgtacagtgcgggcattgtgggcatactggcctgctacaagtacttatcccggatatgctcaaagagcgtaaggatgagctggaatttgccaacgaatgcccgtactgcaacagcaaacagggtatttcgattcttgggtcacaggcagccagtctgtcggcggtgatgatccatcagctttatggtagccagttcaacgaacataaaaagctgattacgttttctgactcagtgcaggatgccgcacaccgcgccagcttctttaccgcccgaacctggccgttgatggtacgcggacaaatcgccagcgtgttgggtgaaaaagaaacgttaccgttggatgcctttgcggcacgcgtctgccagcagacgcgtgaacgttcaccggatgatgctcattttgccgcgagcttcatcgcgcccaacatgcagtggatgaacgattaccagacgctgaagaacgaaggccagctggcagagagttccgatttaccggagctggtttctcttcgtctcgactgggaggtatacagcgaatttaccctacgcgcacgaattggacgtacgctggaggccaccggttacgcagctgcaggaattgatattgcacgtttcaattcagcgataacggcgcttcaccaacagcttgtcgaagagctgggtgatgaaatggttggggtcagcgttgagcaggtggcacacctggtgattggcgttctctggcatcagcggcaggcgggagctgttctgcatccggcgttcgaaagttatcggcgtgagggtaagacctttatgatgacgcagaaggagcgaacttcacgctatatgccgtctattggtccgaaaacgcgtaaaccggcctatgcctcgtttgaaaaaataaatggcttccatcgactgattggtgcgaaatccaaccccagctggtatcagcattggatcaaccgaacgctcagcaacggcaataatctgtttatcagcagcctggccgagacggttttacgacgtctgtttgcgacactgaaaatggccgggttggtaaaagactttgacacaaaaggcaaagaagcttgggggctagtaccttcagcgctggtagtgagccgagatgttgttcagctaaactgctcttgctgtcgtgaggttgttcgggcaccggccgatcaggggtggcactggcgaaacgcgccatgtctttctctgcgctgtgaaggccgctatcaggaagctgaaaatgcggtgacctggcactgggataatatggacatcgcgcgtgttcagggggcagagcataccggattactgagccgtgaagatcgtgaggctacggaacaatcgttctaccgcggtaatcagccatggaatatcaacctgctctcggcaacaccgacgctggagatgggtatcgatgtgggtgacctttctacggtattactctgttctgttccacccgcgcaggctaattacttacagcgtattggtcgtgccgggcgtaaagacggcaatgcgcttaacattacggtggctgaggggaacccgcacgatcagttcttctttgaacaacctctggagatgatgcaagggcaggtacaggcccctggtgtgttcctgaacgcaacggctatcctggagcgtcagctggccgcattctgcatggacaactgggtgaaaactggcgtcccggcatctgctatcagcaaaaatgtgaagcagatgctggacgagctggagtttggacacaagtctgggttcccatataacttcctgcgttatgttgatcagcatcatgtgtatattgctcagcagttctcgtctatcttccctgaccttacggaagacacacgtctacagctcctgtcatatttgcaaggagcaccaggacaacgttctctggtgcaacgtatagaagaagcattaaaactgctggtggaggatcgcaaatcgttgcgttcccggattgataagctcaagcgcagtatcgacaagctggatagcgacccgcacgatcaaaactttgacagcgatatgcgcgagttgacttcggaacgtcaggcgctgatggcgctggtgaaccagatcaacaacaagcaaacgcttaatttcctcaccgatgaaggattacttcccaactatgccttcccggaggccggtattacgctgcgttctgtgctgtggcggcgcaaggacggtggggaaacacgtgaatatcagaacacgacctacgaatacgaacgtccggcttcaacggcgctggctgagcttgctccattgaataacttctatgcgggcgggcataaagttgaaatcgaacagattgacctgaaagtgtctgagcctgaaaactggcgtatttgcagccactgtaactacagcgagaatattgaccagaccggcgatcagcataaatactgtccaaaatgtggcacaccaggttgggctgatgccgggcaaaaaacgacattactgaagcttcgtcaggtttatgcccgctcaagcgcgcgtgacagccagatcagtgatgagagcgatagtcgcgaaccggcattcttccagcgacagctactggtcagcttcgaaaaagaggatgtatcggccgcttatgctattgatgaaggagaaatcccgtttggctttgagtttttgagcaaagtgactctgcgagatatcaactttggcaaaatggcggatgacgccaatgagctgatgatcgcaggagaggcaaagaaacgcaccgggtttaaagtttgcctcggctgcggcatggtgcagcgccctcgcgaccatgaaccacgccatgacctgagctgtaaatatcgcgctgaacccgaaaaagcaaagtttgaagattatctctacctttatcgccaactggaatctgaggcattgcgtatcctgctgccagtgaccagctacagcaacgatcgcgtggtggaagcctccctgggtgcagccattcagcttgggcttaaacattacttcaaaggtaacgtggatcatctgaaaggcgtggtgtatcgcgagccggaaaatgagggcgaatcctggcgtcagtatctggtgatttacgacaccgtaccaggagggactggctcactcaaagaattgatgcgtacacctgacaaccttctgaaattacttgagctggcctacaaggcgctagtggaatgcagctgcaaccatgatacgcataaagacggctgctatcgctgtgtttacgcttaccgtgaccgcgggcgtatgaagtatgtatcaagagatcaggcgcgtctcttactggcgaaaatcctgaaggccagtgctgctatacgcgttattgattccatcaaaaacatttcgcttgatgccatgatggggagtgaactggaaaaacggttcattcactgcctgcaggataacaaaaattttctcgtgagccggagttatgcccatcagaatgcaggctggattattaatatccgtacagaaccggcgatgagctggcatctcaaagcacaggttgatttaggggttaaagaaggagtaggcatccttagccgaccagattatgtgctctatcctctgatgcagtcagaaaagataaaaccggtagcaattttcctggatggttttgcttttcataaagatagcgtgtcggatgatgtccaaaaacggcaggcgattaaagacagcggtaatttttgggtatggacagtgacctgggcagaccttcaagaacaaggtattaaacatgtacagaatgttatggggcttggtcataacccggatatgaaacagcctaagttttataacccgttccatgatacaaactttgctacgcttgaaggttcattcagggagagaaacagttttgcactgctactcgattatctctctgatcccggtaataaaactctgctatggcagaaaatggccgctgcctttgcttgggtgtggctggatcctaaaaagtcgcaggataccggagccaaacaaaagtatgcctatgaaatgcaggagaacgcttccgcttatcggttgaatgcacttttgcctgatgaaccttttgtatttggcggtttactggatagctgtagttcatcacaacagttcattgagctggcagctgttgtaccgcaacaagccattaaatcaacgacaagcattgaacaaatgcgaaattggttgaggctgcatatttgctttgacgatcgttattcccaggataatggctatgaagccggatttaacggtttctggtggatggtgaatttactgcagttcctgccagatatgacattcaccagccgtaaagcggtccatttaccgcagaagcctgaagcggtaaaaatgcagacttcggtggtagtggatattcagcctgacgagagctgggcagaaatacttgagtttggcttattgggcgcagaagaaatcgctttgcttcagtcgttatcactaccggcaccgacggttggatatgaattgcaggatgacgatggcgaaattattgcagaagccgatctcgcctggccattacaaaagcaagccttgattattgataatcaggagtttactgctttattcgcaagtaagggttggcacgttgcattcgggccaattgacgaaaatacattgcagcatctgtccggaggtgacaaatga

SEQ ID NO: 383420 - DNA, 4923 bp, Salmonella enterica
atggcgctggtcggtattaataacgaaaacgaattttactccaaccactatctgggcgaagtctttaccagcgatattcgcgatgttctggagccctggattgagcaggaaaatgccgctcgcgaagttgaacgcgctgcccgtgaacagggcaaagaggttgaggcgggctaccgcgcgccgtggaaccagcttaacagcctggcgacagagtttttccgcaaactcactgagcatgaaaaacagcgccagatcccgcagcgtcttgccgatcagcgcactcgctggcagccgctgttaaaggcattgggttatgaacccaatccgcatattcagatgctggatgacgatacgcctttgccggtattggctcgttacaacagcaccgacggcagcccgtggctgtggattgttgaagcacatgatcaggatgaaggaacgctggatccgctggcgctgtcgctgctgaccgcgcagttcccggcagataccgataaacataagcgcgacagtctgcgtaaaaaagcgaacggcgaataccgcagctggcaggatctgctctccacggtggtctttacacaaaatgaaccgccgcgttttgtgctgctgctcggtaaccgccagctgttattgctggatcgtactaagtgggcgcaaaaccgtctgctgcgctttgactttgaagaaattttaagccgtcgtgaaacggatacgttgaaagcgacgtcggtgttgctacacaaagattcgctgttgccaggcagcggtgcgccgtacctcgattcgctggatgacaattcgcacaaacatgcgtttggcgtgtcggaagatctgaaatatgccctgcgtgagagcattgagctgttgggcaatgaagcgatgcgttatctcatcaacaacgagctggcttattacaccgggaaacgagctattaacccggatgagttgagccgcgaatgcctgcggtatatgtatcgcctgttgtttctgttctatatcgaagctcgcccggagctaggctatgcgccgatgaccgccaaaacctatctgcagggttacagcctggaaacactgcgcgatctggagatgatcccgctgaccagcgaagaagatcgcaatgggcgctatttccacgatagcctgaatatgctgttcaagctggtgcgtgatggctacagcggcggcgtaaaaatgcaaagcgatctggagagcggcgatcagatcactattcacagccatcagttcagcgtaccgcgccttgaaagccatctgtttgaagcgaataacacccgcattcttaaccgcgtggtatttcgcaacgaaaccctgcaacaaattatgcaggcgatgtcgttaagccgcccgggtaaaggacgtttcaaccgccgggggcgtatctcctatcgtcagttgggtatcaaccagttaggtgcagtgtatgaagcgctgctctcctacagagggttctttgccagtgatgacctctacgaggtgaaaaaagctggagaagagtttaacgagctggaaactggctatttcgttagcaaagacgagatcggtaaataccacgacgatgagaaggtctacgaaaaagacggcagcctgcgtattcaccgtaaaggcagctttatctaccgcatggccgggcgagaccgcgaaaaatccgcctcttactacaccccggaagtactgacccgatcgttagtcaagtatgccctgaaagaactgtttaaagagcagattgattcgattaccgatccgcacgccaaagccgacgcaatattaaacctcaccgtgtgcgaaccggcgatgggcagcgcggcgttccttaacgaagccatcaaccagctagcggaagcttacctgttccacaaacagcaggcggaaggccgtcgcattcctcaggatcgttacacccaagagttgcaacgggtgaagatgtacattgccgacaacaacgtattcggcgtggacttaaacccggtggcggtggagctggcggaagtgtcgctgtggctgaacgctatcagcggcgatgcatttgtaccgtggtttggctaccagctgcactgcggcaactcgctggttggggcgcggcgtcaggtgttcaacaagagcgaactgacttacaaaaaagcgaaagatccgagctggcttaacagcgaaccggccgagctggcgatgaatacgccgcgcgaagagaagcagattttccacttcctgctgccggacagcggcatggccaattacagcgacaaaaccgttaagcagcgctatccggatgatttcaaagcgctggacagctggcgcaaagagtttaccaaaagctttgcaccgcatgagattgccgatgtgcagcgcatcagcggcaaagtggaagcgctctggaacacgtttcgtcagcagctgaaagctgagcgccagaaaaccgccgacaattacccggtatggcctgcggaaaatacgtctcatgtccgctcttctttacgcagcaaagatgaaacctttagaggtcgcctcgaagataacagtacctatcagaaactgcgctgggtgatggactactggtgtgcgctatggttctggccaatcgacaaagcgaatgaactgccggatcgcggtatgtggctaatggagatggagacactgatcgacggtattgtcgtcacggaaagagtcactgaagttgcagagcaggccaccggcaatctgtttgccgacgaggatattgtgcgtgaagaatcttcgctgttttctggtgcaggccgcctgaaaactgaagtactgttccgtcatttgccgcgtctggcgatagtcgatgcgctgaaaaagcagcaccgtttcttccattgggatctggaattcagcgatctgttcgccgagcgcggcggctttgacctgatgctcggaaacccgccgtggctaagggtggaatggcaggaagctggcgtgctgggcgacttcgagccggaatttgtactgcgtaagctgagcgcttctaaactagcgacgttgcgtattgatacctttaatcagattccggcactggaagaggcctggcgcagcgaatatgaaggctgtgaggggatgcagaatttcctgaatgcgcagcagaattacgctgttttggcgggtcaaaaagcgaatctgtataaatgtttccttcctcaggcgtggcgtttgggagcgcgtaaaggtgtggcagggttcctacaccctgaagggatttatgatgacccgaaaggcgggcaattgcgcgcgtcggtgtatccgaggttgagagcgcattttcagtttcagaatgagctaaatttgtttgttgaagttgatcatcatgcgaagtttagcagcaatatttattctgccagtcctagccttgtagggtttgaacacatatctaatttgtatacaccacagaccattgatgcatgttttgatcattctggaggtggagaaatacccgggataaaggacgagattgagtacgagggtaagttaaaggttgtatggaacacatcaggtcaccgttctcgactaataagtatcaccactcatgaactggaattatttgctcgcctttatgacagtgaaggaactcctgcgtgccaagcccgcttgccagctcttcatgcaactcaactagttgctgtgctggataaatttgccgaccagaaaacgaagttaggagatttaggggatagctattattcaacccagcattggaatgaagttaacgcccaaaacgatggaactatgattcgtgaaactcagtttccagagaattcctcaaaatggattttatctggcccgcacttctttgttgggacaccgttctacaagactccgcgcgaaaactgtacgttaaacagcgattatgactgcctcgacctgctaaccctgcccgacgattacttgccgcgtactaactatatgccagcatgtgatgtgcaggagtatgccaaacgtactccacgagtgacttggactgaacctggtgaagacgagccgaggaaggtgacggattattatcgttttgtgaatcggagaatgtttggagcatcatcagaacgttctatgatctctagcatagttccaaagcacgttgctcatatacaccctgtactctcaacgacattcagagagccaaaaagcctgctaagcttttcagcattttgtcattcaatagtggctgatttttatttgaaaacaacagggcgggcggatgtttatgaatctacattgcgttgcttcccttatgttgagctaatgagtgcaaactcaagagcattagctttgaacgtgttaacgaaagattatgctggtctctggcaatcctgctataacccagatttcagcactcaacgctggagccgtaacctcccgcaacttccacaagatttcttcgccaacctgaccccagagtggcagcgtaactgcgctttacgctccgactacagccgtcgtcaggcgttggtggaaatcgacgtgctggtggcgcaggcgctagggttaactctcgaagaactgctcaccatctatcgcgttcagttcccggtcatgcgtcagtacgaagccgatacctggtacgatcaaaacggccgaattatctttaccccaagcaaagggctagtgggcgttggcctgccgcgtaccgcgcgtaaagcggacctgaaaaacggttttgtctttaacgtcgacagcccagactggaccggcggcgactgcaccgatcaagccatcggctgggatgatgtcaagcatctgcaaaccggcactgtcagcgtcacttttgatgattatacacgcagcgatgaaggcgagcgccgaaccgtcatctggcaggcaccttttatcaaacctgaccgtgaagacgactacaaagtggcctgggcattctttgcacaagataaggagagcgtctga

SEQ ID NO: 383421 - DNA, 2826 bp, Salmonella enterica
gtggttattcgtgatgcagagtggcgcattcgccgggcggatgacagcggagatggtggccacctgttgacctgtgatggaatttcggagctggtacgcggtaaagaagggctatttctgacaaagctggagcaaaaagtcgagattctagatccagcaaaaacaaatctggtggaagatgagtcagccaattaccaggcggctcagttgtacatagagggccagctacgccaacgcgtcccgactgacagcaaagtccattttgggcatcaggctgcgatggactccatgccctttcagctcgatcccacgcgcatggcactggcgcaaccgcgccagcggatattaattgctgatgcggtagggctgggtaaaactcttgaagccggtatcctggtttcagagctgattcgccgcggacgtggcaaacgcattctagtgctggcggttaaatccatgctcacgcaattccagaaagagttctggagccgttttgctattccgttgacgcggcttgactccgctggtttacaaaaggtgcgtaaccgcatcccaaccaaccacaacccgttccactatttcgataagaccattatctccatcgatactctgaaacaagacatcgaatatcgccaccacctggaaaacgcctggtgggatattattgttatcgatgaagcacataacgtcgctcaacgtgggaccagttccttacgcagcaaactggcaaaattgctctccgggcgtagcgatacgctgattatgctctcggccacgccgcatgacggtaaggctgaaagttttgctagcctgatgaacatgctcgacccgacggccattgccaatcctaaagagtatgaatatgccgattttgccgacaaaaatctggttgtgcgtcgctttaaaaaagacgtcaaagatcagatggctggcgagtttccggagcgcaatatcgtcaaattgatgcgcccggcaaccggagctgaagaagaagcctaccgccgattggttgagagtcagttccgtgacgatgatgatgaagactcgcggtcaaataaaggccgcctgttcaaaattacgctcgaaaaagcgttgttctccagtccaatggcatgtgccagcgtggtggctaaccgcctgaggcggctggagaaccgcaaagaaataaacagtcagagccagattaacgaattagagtcattgctgctggcgctcaataatattgatgccagtcagttcagcaagtatcagttattgctggagaccatccgtaacgatctccgctggaaagcgaataacacggaagatcgtttggtgatctttaccgagagtatcaaaacgcttgagttccttgagcagcaactgcgttccgatctcaagctgaaagacgatcaaattgccacgttgcgaggcgatcagggcgatacagttctgatggaaaccgtcgaagcgtttggcaaatcccagtctccgctacgcctgctcatctgctcggatgtcgcgtctgaaggtatcaacctgcaccacctcagccataaaatgattcacttcgatattccgtggtcgctgatggtattccagcagcgtaacggacgtattgaccgctacgggcaaaaacaccagccacagatccgttacttgctgactgaagccagtgaaccgcagatcaacggtgatatgcgcgtgctggaagtgctgatcaataaagacgaacaggcgcagaagaatatcggcgacagttccgaatttaccggcaaatttacccaggaagaggaagaagagcaggttgctgaattcatgatgcaggacgatggcgccagcctgttcgacgacctgttgaatagcaatgtcactgaaaattctgaacacgacctgtttggcgaaatctgcagcgcagtgtccagcgatgcttcgaccgtgaccgaaagcgacattagtctgtttgataatgagcaggcatactgcgaaaaagcgctaggctatctgaaggcctgcggccagaccgtgcaatacgataccttgcctgataacaccttatcgctggtcgcaccggaggagttacgccgtcgctttaaccagttaccgccggaaattgcgccggaaaactggcagctttatctaagccaggacaaaacggttatcacggaagccatttcgcgtgcgcgcggtgagcaacatgcctggcccgatgtgcagtatctctggcaaattaacccggtcgtgcagtggttagacgacaaaattcagtctgcctttggtcgccaccaggctccggtgatgcgtttgccgcacttgtttgaacctgatgaggatcatttcatcctttccgggttgttcccgaaccgtaagtcgcacccgatggtgaacccgtggctggtggtgagctttaaccgcgaaacgttaagcggtagcctgccttttgctgagttcctgaaacgacatccgcaactgagtagcaagctgactaacagtggcggtaaagatcgtaaccatcaacgccagcaggatctgctggaagcggcaatcgcccatgcacgggatgtgtttgttcacgatcgaaatgcttttgaagagcgtatcaatcagcagctcaatgagcatctacagaagctggacgttctgcgtgggcgtcagctgaatcaactggagctggattttgccgataataaacagcagctttcagtgaaacagagccgcaaagaacagcgtcagcgcgaaatcgaacacaattttgacagctatatccaatggattgaggacaccatgaccaccgaaaaagagccctacattcaggttattgctgtaatcaccggagcggagggctaa

SEQ ID NO: 383422 - DNA, 780 bp, Salmonella enterica
ttgaatagctcggaagatgatttgcttgaagtggcgtggtatttgtcgaagtacggtaaatctcaaccacccgtgggactgggtgttcagaaatggaaagaggcttatgccttgttttatccccgttttggagcgggcaaaactgccaatgagtttcgcaatagtctgaaaaatagtcgtgaccgttttgattcctggcttagtgatgtgcgtgtcggctggcttgacgagcagggcgctcctgctgcgctttctcattcagcgcagcgtgtgcatcagcgattgagtgtgctttcagagagtgtgattgagcagcgcgttctttcgttaatatcgactgatggagatgaacaggcgcaacgtgactgttttattattcagcaggataaaagtattgaagataccgtgcgcgagcagttgattgctgcacggctggggcagggtacctttcggaaaaattgtctcatgttgtatccggcatgccctgttacggggacgacgtttgcgccgttactgcgtgccagccatataaaaccgtgggctgcctgcgagaatgggaatgagcgtcttgatccttataatggaattatattagctgcgcatattgatattctattcgatcagggatggatttcgtttgagaacgatgggcgtttattaattagtgatgaactggatattaacgttaaagagcagtgtttgttgccggagaaaataaaggcgtttcctgttgaatcgtattgttatctgggatggcatcgggagaatttgcttcgatga

SEQ ID NO: 383423 - DNA, 315 bp, Salmonella enterica
atgctccctcacaaaatcctccaggagtggctgacgctggatgaggccgcagaagtcatccggcagcacaacatcacgttgctgcccgccgacctgatccgccatgcccttcacggcgatctgctactctcggtctacttcccctcgcccgtccttctgaaaccgctcaatcctccttgccgctttgcctgccgattcagcaagccgcaactggatgatgaaatattggagcattgttacaaactgctgaacattttcgaaaccagttcacgttactggcaccccattcgcgcgctacggactcaaacgtattaa

SEQ ID NO: 383424 - DNA, 1107 bp, Salmonella enterica
atggcacgcacatacattaagcaaacagtacagagcaatgaacaactttttgattctttagtgataaatgctatagattttcttgagtcgtcaattgatgatttaaatataagacccaaaaattcgattgttgatttctatacagccattgaacttttcttaaaagcaaggttaatgctcgaacattggactttaatattagatgatcctggcaaagctaataaacaaaaatttagcgttggtgactttaattctgtgtattttagtgacgctgttcaacgtcttaaaactgttattggcattaaacttgatgacagtatccttgatgagttcagaacgttaggtgcgcataggaaccaaattgttcactttgcacacactggatattcaagcgctcaagctaataaagcaggggttgtagctcaacaatggtcttcatggcaccatttatataatttactcactattgaatggaaagatgaatttattaaatttaaggaagagtttgagcgtgtgcataagagaatgctgcaacaaaaagagttcctcagcacccgattcaatgagctttcaaaggaaattgacgtcttaagattaaaaaaaattaaaatagttaagtgccgtcaatgtggccttgaagccggtaaagttaatgatactcataaatggggagatgattatgaatgtcttgtttgcgaatcgcagggcgttgcggtagagcaagtcactgatactttgccttgcccaaactgtaaagtaccattcgaatttttcagtcctgacatcaataaatgtccacaatgtgctcatgagatcaccacaaatatcttaataaaattgtgtcgcgaaatatatgtaacgggtgatgattggtgggaggaaggtggcgaatgtgtcgctggttgtcacgtatgtcagcacgctccaaattcagttttctatattgaaggtcagtggagttgtgtttcatgctttgatagaggatggtcagcagttaactgtccacattgtgatgagtatgtgactggtgatatggaaacaatcaaatatttcgcatgttataaatgcgaagatgagcaacggaagtttattctagctgaagcttga

SEQ ID NO: 383425 - DNA, 1224 bp, Salmonella enterica
atggaatcaaaaaacagtagtttttattttgatagagttgactttttatctaagtctatcagttattcaacattaatgatttcctgcttatcgatcgtcgggatttttttgaattctcattggctctacggtattgcaaccctcacgtttataatacaactcctcacttggtttgcaatgcattttaaaacttcgtatgcagctaaggctatagaaacaaaaagattagaaatgctgagaggtattataggcgaggaaaatttttaccgagagcgactctacattgatggtaatgcggaaaataaaaatggctttcgtgcagagaggttaataacactcatacaagagaatgcatactggaactctatcttatatattaaagctttccagcagaagttattctatttattactaacaatactactactagttagtataattattattatgtataccacgctgactgataatttagattttcagtatagccgcgccatatttgggatgctagtcataaataatttctataatttattctcagaagtgtcaggttttttcaacgcccacaatgagatgaaaaaaatagatggattcatagagattaataatcgcaaagcaccagaatatctatcttacatatattctaaatacgaacatgagatatttacagctccaagcattaataatgcaatttatttaaaacacagtatgcaaataaaacaaacctgggctcaacggctttataataaaaataactttcaaagcaaacaattgatcgacgcaattacagaattaacattattactccaaccgattgaggaggattggagtataactggtggggctaataggtacttacaaggcgttcaaatttatgcaaatgatattgatatcataacaacggagaaaggggctaatgaaatatgcaagttaatcaaccctggtatcaaaggggagttgtttaaaaccacatcagaaaacatcaaatcattttattgtacatttactttaaaaggtatcaaaattgaagtaatgggagaccccgagaacaaaagtgaattagcatggaatgaaaacaaaaaatggaagaaaaatcaagagtctcttttattaaatggtgttgaaatacctattgtcagcttagattatgaaattgaaataaaccaagaaattggcaattataatgcattcaaagacacttgctatctggaaaattatagatag

SEQ ID NO: 383426 - DNA, 471 bp, Salmonella enterica; identical to SEQ ID NO: 194056

SEQ ID NO: 383427 - DNA, 1278 bp, Salmonella enterica
atggaggaaggaaggctccataaaatgatgatagagtgcgggtatcgctatacgctagcccgcaaacttcctgaaaaggcgttcctacacagtcaggaacgcctgaaaggctattatacgaaagaatatgaaaccgaagccggaaatttcaatgtagcactagttattcggccagatccttttacggaactgccattagcttgcatagttgatctgcctgaaaagttcagagatcgccttatgcctcacataagccaagaaggaattctctgttatgtagagcagttggaagctgattgggatccaaacaaccttgagggtacgtacaaagaagtcgatgcccagattcaccgaacactgattaattcagttttagccgctactaatggcctgaatgataagagagaactcgaaggtgaatttgcaacttactggcgacctagtgatagtttatatattttatcaaaagcaagccgcgggatcagacttaagacactgttttcagagtcaacatttcctgatggttctcccaggctagaatatataactgtccaagaatcctctcccgaggactctgaaaccattttaaaaaaatggcttaatcaaagataccttcgtcaagaatctttgaaaaattattctatcaacactcattatatttctgtaaaccctaatcgtcttgctgggatgaaatggccaccgacttcattccgcgaattactggactggctagaaaatgcggaccataatgccagggacagagtggttcactacatcacaacagaggggaagaaaagatatatttttttattcgacattttcaatcaagatatatttgccatctatattgagttaaatactaacgctgttgatttcagaaggcacaagagatcagctaaaaaatcaacgtccaaacttgccacattgttagctggtaaaaatgtatgcgcctcatataaacgattgggtgtggttcgcgctgatatggcaaccctccttagccgaaatgcccaaaggagaagcaaagaatgcttatccgataagcgtatagctttagttggttgcggaaccattggtgggtatattgcagaattgttactccgaaacggtgccggttgtgggaaaggtttactgcatttatttgatgatgatatctacatatctaccgtcctagtaattttggtcgtcacattttaccttcacatgattttgggtggtccaaagcgctctcactcgcaacaaaacttcaagactctgtgcatttacagaccagagtag

SEQ ID NO: 383428 - DNA, 1302 bp, Salmonella enterica
atgcgttgggattttaacaattactacagccatagtgtggatggcttaatcagtaaactaaaattgggtaagactgaatccgacaaactgaaagcacttcgccagaaagtccgtgaaagaacgagggatgtgtttaaagaagctcgtcaaattgctacagacgccagaaagcaaactctgacgcttgaaagcgttagatttaaactggagcaaactaatgttcgctacctctctccctcagaccgtgagactctcgctcgactcatttttgaaatggaagatgtagctcgtgatgacttcatcaaatttcaacctcgcttctggacccaagggagttttcaatacgatacgttaaacagaccttttcacccgggtcaggaaatggatatcgatgacggcacctacatgccaatgacggtctttgaatccgaacccagtattgggcacaccttacttcttctgctcgttgatacgtcactgaaatcgttagaggctgaaaacgatggatgggtatatgaagaaaaaaacacctgcggacgcatcaaaattcctcacgagaaaacacacatcgacgtaccgatgtatgcgatccccaaagagcaatttcagaccaaacaaactgcagccgattcagcacacatcataaaaagtgccgactccatgttcgagtctttatcagcaaacatggatatgcgcgaggcatatctagtagaacctgacaaagttaatttagcgctgcgtcagggtgcaagaaggtggtcgatcagcgaccccaaaattgttgaagattggtttaatgatagttgcaagcgtattggcggtcatctccgttcaatttgccgctttatgaaggcctggagagatgcccaatgggaagtgggaggtccttcatctattagcctgatggctgcagttgtaaacatcctcgacagagaagcacataatggttcagacctcacagggacgatgaaactagttgcaagattactacctaatgaattctgtcgcggtctggaaagtcccgacgatactgatgaaaagttacttttccctgccgaatgcgatcataacgtacatcagagaaccatcgttgaaaccatgagaaatttagaggggattttgcttgatgcagagagttcaagtagcagggaagaagcattacgtaagataaacaatgcgtttggaaaacgagtaactaatgcctcgttaataacttcaattgctgcggctcctgcatttcaaatctccccgtctaaggagcaggcgcctgtaaaaattaacaccacgatggtaagcggctga

SEQ ID NO: 383429 - DNA, 1071 bp, Salmonella enterica
atgtctgacataagtgcaggaaatcactatggcgtgcggatactaagtcttaatggcgggggggccaggggaatgtttacgatcagtgtcctttctgagattgagaggatacttgccagcaaataccctaatcaggatattaaaattggcgattattttgacctcattacagggacatcaataggcggcatattagctctcggccttgctacaggaaaaagtgcccgtgagctggaacgagtgttcttcgatagggcgaatgacatttttcccaaaagatggtccctgaccaacttgcttagatcactttgtgctcctatctaccgcagccatcctcttcgcgaaacaattcaagaaatgattggggctgaaaccacattcaatgacctaacccggcgagtaatgatcccggcagtaaacctttcaacaggaaaaccgcagtttttcaagacaccacacaacccagattttactcgtgatgggcctcttaaattgatagatgccgcactggcaacctcagccgcgccaacgtatttttccccacactattgtgaggatctccgcgcatattttgccgatggtggtctggtcgcaaacaaccccagctacataggacttctggaagttttcagggatatgaattctgacttcagcgtcacccataaagacatacatatacttaatatcggtactgttggtgaagagtattcacttagtccaaagttgttgagcaaaacatggtggaatggctactgtcgtctctggggtatgggaaaacggctggtgcttacaaccatgacagctaaccagcatcttcataaaaatatgctacagcgtgagcttatgctccatgacgcggtggataactacatctacctggatgaaattatccccaatgaagcagccagtgatatcaccctggataatgccacgaagagttcccttgaaaatttaagcgcaaggggaaggcagctcgccaatgttgagttcgctcaagatcagaagcttaagaattttttcactactcccgcaaaaccctttaagcgcatgaatgcgcaggagatccactga

SEQ ID NO: 383430 - DNA, 297 bp, Salmonella enterica; identical to SEQ ID NO: 129411

SEQ ID NO: 383431 - DNA, 372 bp, Salmonella enterica
ttgactgtgtttatcagccgtgaagtcatttccagaatcgtgcttatcatcatggctgttgccgtgctgagcagttcgcttatggtaaaaccacaggctgtctacaatctccaggatacaacatccatcagtgaccatcagcacgacagcgatgaaccgctgaatgagcacgatccgttacagttccactcgcacggtaatgtgcatcacctcaatgccgatcattcccacgatctgaacaaactcttcacgctgactgctttgcaggcctggaacgcaggcatgcgggcgacgttcgcgctaagttcagaacaaatcctgcgggtcccccaggcgacccccgaacgccctccgagatccctgattgcgtaa

SEQ ID NO: 383432 - DNA, 213 bp, Salmonella enterica
atgaataccagcctcgatatacagggccggttgaacggtggcctgctttcagctcaggcgcgttcggcttgtctgtttttcctgttgttactgcttttctacagccagggcgcgtatgcgcacgacgtggcggagggcgacaaagggtacatccaggaaatcaccgggattatcgtcaatgcacaaaggagcgtgggtaacgctggaaggtaa

SEQ ID NO: 383433 - DNA, 222 bp, Salmonella enterica
atgcacaaaggagcgtgggtaacgctggaaggtaatgttatcagccagcaggatgagtggtacaccttccgtgatccaaccggcaccatcaaagtgcgcattcctcagaaggtctggaacgggcagcacttcgatgctcaggatttggtgcgggtgagtgggcaggtaattcatgagaatggtgctacgagccttgatgtaggtgtgattagcaagccctga

SEQ ID NO: 383434 - DNA, 195 bp, Salmonella enterica; identical to SEQ ID NO: 129415

SEQ ID NO: 383435 - DNA, 570 bp, Salmonella enterica
atgaagtctgcagtgaagttgcacccttatatttataatttgttgatagaaagagattttgatgagttcggtgctatccatctcagggacgctttgctgaagattacagattcatatgctgatgtaactgaagccagaaaattcatccgccgacaacttatccggctggaggcattgggcttcatttttaaaattgaaaatagcagtgggcgtccgaagatcctgtacaagaaaacggaaagcttctattcaacgactttcataccaagaaaattgccaagtaactcgcgcctggctgctgtgcccgaaaatgtgaaactacacgttttggatgtcgatctgttcttaatggacctgacaaaagaaaaaactgtccatgaggccaaacttgccgtcattctgagtgaaattgaagagtaccagtctcttatggagcgttttcccagtagacggagctgctttattgaactccatcagcacgcaaaaaatcagtccgccgctttgcttggcagggttactgctttatcgaaagtgctaggtcagcttagcgatggggattgcgcatgctga

SEQ ID NO: 383436 - DNA, 1281 bp, Salmonella enterica
atggctgctgaagttgccaggaaaatgctggagctgaaactagtagatctcatcctatgctttgcaccttcatctgtggtggttgcatccattgaaagtactttctcccatattcttcaaaggaactttaatggtggtcttggtgcagtaggtgctgcgtatacttatcatagcttgatgtatttcgataaaagcttctggaagtctttgcagatgcatcgggtattagttattttcgacgaaatccatcattgttctggcgattcgctggataatgctaatgtgtggggcggggaaatcctttctcaagttcagcaatgtgccagttactctttggcactaacagggactccatggcgaactgatagtactcctatagtgctctcaaattacactgatccggatggggagatctgttgtgactatgtatatggactacatgaggctattgtcgatggtgtttgtcgtaaacctaaaatcgccttgataaacagcaataatttagtttattcatcaaaggataatgttcagttttttggttccatcacagatttcctgagtgaaaccgttgcttcgtatcaatcaataatttggcatccagaagcaatgaagtatgtactagaagctggatgtaaaaaacttaacgaaatacgcaaagttaattctgatgcgggtggtttagttgttgcttcttcagtcgagcatgcatataagctactgaatattttggaaaaagagtttgaccaaacagcgataattgtgacgtaccacgatcgagatgctttggctaagattggatattatcggcaatcaactacagaatggattgttagcgttggtatgattagtgagggcacagatatccccaggctacaggtctgctgccatttgagttctgtcaaaacagaactttacttcagacaagtattgggcaggatattacgggtgaatcagagtgaaaatcaggaagcctggttatttacaatggctacaaatgaactgacattattctcaaacagattggccgaagatttacctgaagattataaagttatgcaacaacaatctgatgattggtcattccctacaattgattctcagtctatgcctccagagtttgtgcggaaaaatggtatatctaaaataaaagagattgatttagaaatggatattggtgaaataactacatcgtcacctacgatttcaagtcaaacaaaacaattaaaaatgggctcaatgcatcaacaagtgatagatgcatttttattttcaattatttaa

SEQ ID NO: 383437 - DNA, 441 bp, Salmonella enterica; identical to SEQ ID NO: 129764

SEQ ID NO: 383438 - DNA, 2121 bp, Salmonella enterica; identical to SEQ ID NO: 129763

SEQ ID NO: 383439 - DNA, 1737 bp, Salmonella enterica; identical to SEQ ID NO: 129762

SEQ ID NO: 383440 - DNA, 1338 bp, Salmonella enterica
ttggcttatttactcaactcagcagatgtatttattggtggtgatatcattactacagatgaatcgattgaattcagggggggacgaaatgtgggtccacttcctacattgtatggttatgatggtaattatatagaacctgtaaatcaatggcttatacatctcaaagctgaaaaaagactggaaaaccttagctcttatgcaagagcgttaaaattttactggtgctttttggagtctgaagaacttgcatgggataactttcctgcagtaaaagcattaaaacctgcctatcgctaccgtaatgatgggctgctaaaaaaggtcaaaactggagaaatcgctttttccacggctaatacctatatatgtcatcttgtacagttctatctctgggcagcgtatgagcactactttccggtaacggaaacaaacaaaccctttgacatagaatttgtcagattcagaaataacgacatactggcacatatgaagccaaaatttttcgtacagacaacggatttacgtatcagggtccctaaagactctaacagtctgaatattcgcagattatcaccactttcgcaaacaatgcttacagaatttgcaatccatcttagccagacctcagttgaaatgcagcttatttgtctgctggcagcacaatgtgggctcagaattgaagaagccacaggatttaccttaactgcgttaaatcaggctgtacaaagaaccgaatcacgtacccactacgaaatcactattggacctagtaacggtgtacccactaaatataataaaacaagaacgattgaaataactaatactcttttagataaattacagcactatgccattagcgaaagaagaatgacccgctttgataaattacagatgcgtattaaagcgatgttaaaaatgggtcagcaagaaataaaaaccgtacccggaacactcttttcagacaaaatcagatctgaatctttagtttctgccattcaaaatgaacccttatttattagtcagcagggctccccctgtaccccacagagcacgggtgcccgatttggtgaattgcgaaaaaaaatgattaattcagggatcgcatttgaccataagtttcatgacctgaggtgcagttatgcaacgtatcgcctgtacagtctacttactgcgggcatagagcctgccgatgcactcagcctgctgatgcaatggatggggcataaaaatgaatcaacaacatggaagtatttacgctatctaaaaactaaagaagccctgaaagaaaaaatctctatgcttgatgaaattatgcacagagcactactggagtga

SEQ ID NO: 383441 - DNA, 195 bp, Salmonella enterica; identical to SEQ ID NO: 160302

SEQ ID NO: 383442 - DNA, 540 bp, Salmonella enterica
atgagcaacactgcccatacccagccgttgaaaaaggatattacgcggggtactaaccaaagcgtttgcaccacctgggcgatgggcttacgccctatcgcgcgaatattaagatcggtgagaaacatcaggatgacccaccccatcagcaccaccagagcgggcataagcaggcagcaatcacgccattctggatttacctctgatgcatttccctttccccatatccggccacaaagaaaaattaaccctgcgcccagaagcgctaccgggataatggtcgcctcctcaatagatcgcgcgacggggatactattttcaagaacgctaatgtacgcccacattccccccacgataatcgtaataatgttcaccagcagcggcacgccgataaacgccattatgattgacaaaaaaagccaattagcatttttcatttttctatccgctaatccctgcgataacggaagtataaacccggtagtcctgagcccacccatgcatttttctgaaatcgcgacgttaaaacattcacgatag

SEQ ID NO: 383443 - DNA, 2376 bp, Salmonella enterica
atgccagtacttatttccggcgtactgaaagatggtacgggaacgccggtacagaactgcaccattcagctgaaggcctgccggaccagtacgacggtggtcgtgaatacggtggcatcggaaaatccggatgacgccgggcgctacagcatggatgtggagcaggggcagtacactgtcacgctcctggtggaagggtatcccccgtcacatgccggagttattacggtttacgatgattcaaagccgggcaccctgaatgattttctgggggccatgacggaagacgacgtccgcccggaggcgctgcggcgttttgaggcgatggtggaagaagttgcccgccaggcatcggaggcatcgcggaatgccaccgccgcagggcaggcatctgaacaggcgcagacatcagcaggtcaggcatcggaaagcgccacggcagcagtgaatgcagccggagcggcagaagcatcagccacacaggcagcctcatccgcagcatctgcggagagcagcgcaggtacggcgaccacaaaagccggggaggcatcagccagcgcggcgtcggctgacacagccagaacggcagcagccgcatcggcagccgcagcgaaaacatctgaagcgaatgcagatgcctcccgtactgccgccggagattcagctgctgccgcagccgccagcgcgacggcggcgcagacatcagcagagcgcgccggagcatccgaaaccgccgcgaagacgtcagaaacgcaggcggcttccagtgccggtgatgcaggtgcgtcagccactgcggcggcagcgtcggaaaaggcggcagccgcatcggcagccgcagcgaaaacatctgagacaaatgcagcaacgtcagcaagtacagcagcggccagcgcaacagccgcctcgtcatcagcatcggaggcatccactcacgccgctgcatctgataccagcgcatcactggcggcgcaaagcagtactgctgccggagcagcagccaccagagcagaagaggccgcaaaacgggcagaagatatcgcggacgtgatttccctggaagatgccagcctgacgaaaaaaggtatcgttaagttaagcagcgccacggacagtgacagcgaagcgctggcagccacgccaaaggcggtcaaagctgtcatgattgaggtacagaccaaagcgccgctggacagtccggtattcactggaacaccgaccacaccgacgccgccagatgacgctaagggacttcagactgcaaacgctgagtttgttcgtaaactgattgctgcactggtcggttccgtacctgagtcgctggatacgctgcaggaactggcggacgcgctgggtaacgatccgagctttgccaccactgtaatgaataaactggcgggcaagcagccgctggacgatacactgacggcgctgtcaggaaaaagcattgaaggtcttatcgaatacgttggtttacggagcacaattgataaggctgctggtgcgttgcctgctggtggtacggctgtcgcagcgaacaggcttgcatcacgcggcgcgcttccggcactgactggcacgacaagaggcagcgatggcggcctgataatgggcgaggtttacaataacggttatccaacgcaatacgggaatattttgcgtctgaccggaaccggtgatggagaggtattaatcggatggagtggggttaatggtgctcctgcgcccgcatatattcgcagccatcgagataccgccgacgctgagtggtcagaatgggcgatgttctacacctcactaaatccgccaccggattcgtatccagtaggggcggcgattgcatggccgtctgatgtgctcccggatggtggttatgcttttatgtatgggcagtccttcgataaatctgcttacccgttactggctatagcgtatccgtccagcgttatccctgacatgagaggctggacaataaagggtaagcccatcagtggacgtgccgtattgtcgcaagaaatggacggcaataaatcgcactcgcacaccgcgcgggcgcaggatactgacttagggacaaaatctacctcatcctttgattacggcacgaaatcgaccaataccacgggcaatcatactcaccagttcggcggttatatcaattcatactggggagattccaatcacacctcatttcagcctggaggtggtgcatggacacaggccgctggcgaccatgcgcatacagtttatatcggaggacacgagcacaccatgtatatcggtccacacggacacgtcgttattgtggacgcagacggtaatgcagaaaccacggttaaaaacattgcatttaactatattgtgaggctggcgtga

SEQ ID NO: 383444 - DNA, 234 bp, Salmonella enterica
atgaaaattgaattaaccattgatcgcacaaagaaacttcccgaaggcgcggaagcggcacttgagaaagaactgcttaagaggctcaataatcagtatgaaggttgcagcttggttattcgtcgcgccgggtctgacggcctaagcgtttatggcgctgaaaaggacgacaaaaagaaagttgaaaaaatcctccaggagacctgggagagcgctgacgactggttttattaa

SEQ ID NO: 383445 - DNA, 1029 bp, Salmonella enterica
atgtccattgaagatgaatccccacaagctaagggtggaaaagctcgtgcagaaaaaatgactgcagatgaacgtaaagaagttgctcagtttgcggccaacaagcgctggcaaaggatcaaaactaaccttccctctacccagctcgaaggtgttctaaaaatcaatgacactgaactggaggtagctgtactcagcaatgggaagcgaataatatcccaatcatccgtttttaaagcattagggcgaccaagtcgaggcgtgagagccacgctggatggtgagatcatactacctgcgtttatggatgccgctaaccttattccttatattaatcaagaacttatgggggtgatcaaacgagagcgatatttagacaattcaggatctgagcttgaggggtatgatgcttcaatacttcctctggtatgcgatgcttatttaaaagccagacaggatggtgcgctaaaagcaaaccagatggatacagctcaaaaagcagaaatcttagtccgttcacttgcaaaagttggtattatcgccctagttgatgaggcgacaggctatcaagaaattcgtcctaaagatgctttacaagcctatttagacaaaataatcagtaaggaactttctgcgtgggctaaaaaatttcctgacgagttttacgaaaatatttacaagctgaaaaattggccttgggctggtatgagtaagaatcggtttagcgtagttgcccattacactagggatcttgtgtatgaacgtctcggcgacgctattcttcaggagcttgagaaaaaaacaccaaaacaaatgaatggacagcgaaaaaataaaatgcatcaatggcttactgatgatgtcggcaaccctatgctatcccagcatttgcattctttaattatggttcagcgattagccatcgccaatgggtacggatggaacaggtttattaaaatggttgatcaagtcatgccacgcaagggtgggacttttgagcttgaacttaacgatacttcacttgattaa

SEQ ID NO: 383446 - DNA, 291 bp, Salmonella enterica
atgaaatttttgtgtacgttacttttgatagtcagttgttctgtttttgcggatagcaactctgatgtaatagattttaaacgaatgactgagtcgacatgtttcaatccggcaaaccatgaagcacaagagctttgtgagaagtctattaagattatgcttcttaatgctacaggtatcggatattcagaagcagcctgcaccgcgaaggcgttaaaagacaaggataaatgcaaaaaaactagcgaagagtatatgaaattaatgaggtacggttttacttataaataa

SEQ ID NO: 383447 - DNA, 204 bp, Salmonella enterica
atgacagccagaaacattgcaaggctacctcaggaagaacgcgacagaactaacgttgaccttgctgcctccggagtggcctacaaagaacgtctgaacatgccggttgtagctgagcaggtagcgagagagcaaccagaacactgcgagagtattttatgtaaagagtcagatactatcgagggaaaagctttgagtgactaa

SEQ ID NO: 383448 - DNA, 492 bp, Salmonella enterica
atgaacatcgacaaacaggcgctgtgcattgaaaacgcatttgatatcgcaaatcaactgtatgaactcgctaacaatgaaattgagtgtgatttgttcgctgtaacctcaaccaacgaaaacggcacagaaatagaatttgaacgaccaataactgatttggcactggaagcccccagcacgattaatgcactactgaatagactggaagccgcagagaagcacatagaggcctggggagttaagtacatcccgctttctggcagctctccggtaattccgggtggctggagaagctgtagtgagcgaatgcctgatattcagaccgatgtgttgatagccactgtgtatgacaatgttctgcaagcgctattaattgctgaccggtttatcgatccatcgggaatggattttcatctggatgaggtgatcggatggatgccactgccagacgcgccgcagcaggatatcctgatgaaatccagcagttaa

SEQ ID NO: 383449 - DNA, 321 bp, Salmonella enterica
atggagaacgcaattgcacgaaagttagacccaccagaaatcaacccggttgagatagagagtgtcctgctcaaccggcttgcatcagtagggcagaaatcatacgccgagcatatgggcatcagcgagtcgacagtcagcaggcgtaaagctgagggatatttctgcaacatggcgaaagagctggcttttcttgggattcaggccgcgccaccggaagcggtactggtatccagaaactatctcacagccgtagagattctcgctgatgccgggctaaaggctgaacgagccaggccggatgcgctggggtgggactga

SEQ ID NO: 383450 - DNA, 264 bp, Salmonella enterica
ttgttcgtgtatcttttggagaccatcatgaacggattagagaaagctatcaaaaaagcaggtaatgccagcaatcttgcaaccttactgggtattaaacccatgtcggtaagccgctggaagacacgttacaacggtgctgtcccaccaggccgcgtattaccgattttcaagataacgggcatcacacctcacgaactgcgccctgatatctacccaaacccaaccgatggcttaccaagccaagaggcatcagccaaataa

SEQ ID NO: 383451 - DNA, 384 bp, Salmonella enterica
atgacagcgaaaaaattacttaacccgattcttgtagagcgcctgacagagttaacgcgccgcgggatgacaaaatctgatatggccagggttgcgggaataacgccgcagtccgttaatggctggttcaagaaaggtgccatgagcaaggagtcagcgctcgctgtagcggatgccgccggtgtatcagtaccatggctattaggtgaagaggttagcgagcagaatggattaaagccagacgagcagcgattgcttgagctatatcgtcagctaccggaggaggagcagcagaacatgatgcggattttctcactgcgcttgaaagagttggacgagttgtatgcgaagtacatgagccgccggattaagacagatcagtaa

SEQ ID NO: 383452 - DNA, 402 bp, Salmonella enterica
atgagaaaaaacaaccaccaaacaaatcacccgcaagttaaaaggctcaatgaaattgttgagcagaaaggccttaccaaagcagagatttcacggatatgcaacgtaagtaaacaagcagtcaatgcttggttcgctcgcggaacaatagggaagccatctgcgattaagctttctgaggctttaggcgtgagcttagcttgggtacttgggcaagatgtagccttagaaagcgatttatccgttacagataaacaaatgttacaccttttccgccagttacctgatgaggatcagcaagacatcatgcaagtaatttcattgcgcttaaaaaggctcgatgagatttatgaaaaatacatgctcagacgcaataaagacgataacccatccaatctgtaa

SEQ ID NO: 383453 - DNA, 159 bp, Salmonella enterica
atgcttaaacaatgcggttactgccacaaatccattgatgaaggcaaagaagtaaaaaacgagctgacgctgattcgcggcgcgcagctgacacatgaagagcgcgattactgctctgtacgttgtgcatcatacgaccagatggcgcacgaaagttaa

SEQ ID NO: 383454 - DNA, 966 bp, Salmonella enterica
atgaaaacgacacctgtaggaaaaaaacatcgccagccccttgagggctggccttctgttgaagatcttttcgtttttgtcaccgttgctcgcaacggtggatttgcccgggcagcgctggagctggggttatctccctcctatatcagcaaacgtatcgctatccttgaaaaatgtctcaacgcccggcttttttttcgaaataacagagtgatgcgtctcacaccggaaggcgaaaatgcgctgtgtggggctatgcaggtcgtcagtgaaatggatggctttgtcagtcgtttggataatcaacgtggtgtgttggctggtaatatcaccatcaactgctcatttggttttgggcataaatatgtcgcagaggcgctgtcgtcatttatgatcgcctatcctgatattacggtaaaactcacgctaacggatcgtgaagtggatctggtggaagaggggatcgatattgaaattcgcgttggggatgatatcaacgaattgtatatcgcacggcagttagccactaatcgacggatcctgtgtgcttcccctgaatacctcgaacgccacggcaagccagagtctgttagtgcgcttgtgcagcacgattgcctaatgattcaggaaaaaaactcggcatttggcaattggatattaacggacggtaagcagcagacacattgccgactaaacggttttcattcttccaacagcggcagtgtggtgcttatttgggccctgaaaggccatggcattacattgcggtcggaatgggatgttgcgcagtatattgaacgaggtgagctggttcgcgtgttgcctcagtggtatcaggaagcgaatatctgggctgtatatacccggcgttcatcaagttctgatcgtatcaaaatctgcatcgatttcctcacggagcatcttgcacaatgcttgccaggcggtaaagcaccgggcgtactgtga

SEQ ID NO: 383455 - DNA, 174 bp, Salmonella enterica
atgaagccggaaaataaaattcccgtactcacccgactgtcagacgaaatgacagccgtcgtaaacttccagcaaccaggccttccccctggcctgccgatggcgatattgagacccagcgtcagtattatcttcttgagcgccgtttctggaatgccgacgcgccgtccatga

SEQ ID NO: 383456 - DNA, 417 bp, Salmonella enterica
atgcgcggtacggcgcagactggcctcaatgccgccaaggatcaccgggacatctttccacgcttctttgcaacgctgggtatagaccagcgtggcgcggtccgggcgtttgcccgcgacgttgtccggggtgtaggcgtcgtcatggcgcagcttacggtcggcggtgtagcggttgatcatcgagtccatgttgccggcggtgacgccgaagaacaagttcggttttcccagacgcataaagtcgtctttgctgttccagtccggctgggcgatgatccccacgcggaagccctgcgcttccagcatacgaccgcaaatcgccatgccgaagctcggatggtcgacgtaagcgtcgccggttaccagaatgatgtcgcagctatcccagccaagttgatccatctcgtcacgtga

SEQ ID NO: 383457 - DNA, 924 bp, Salmonella enterica; identical to SEQ ID NO: 144775

SEQ ID NO: 383458 - DNA, 228 bp, Salmonella enterica
atgagcttattgcctcgggaaaacgcaccccaaaaaagctatagacttctgagaatatcagaagtgattaatttgactggcttacccaagtcgacaatttatctaaagataaagaatgatgaatttccgaaccaagtttctatcggttctcgttctgttgcatgggtggagcatgaagttaatgaatggatagagaagaatattctcaatagaaaattaaactcctaa

SEQ ID NO: 383459 - DNA, 861 bp, Salmonella enterica
atggttgacaatatttttaagaaaaaattggcatcaattaagaacgaacatgtgtcggtgttagacagttacaaagtaagtccatttaaagagtctcatagcgacacggcctgtattgtgcgtattattgaaatatattcactgaataagctgcgcgctaaaggtgaaaagctgtattcacttacggggttaacagtacctgatacggaagctgtggcgaatgagatcaacctgctcctgagccgttatgcccagttgtgtcgtcaggaagaggaagagttatctttcaggcagcgtgaagtgacaaatgcggaagttgcatggaaaagcacattctcaaaaaacggcgtcagtagcattgctgaagccaaaacgaataaaacggggcatgctgaacgagcggatgctgaacgatgttaccatctggctgtttcccggctgaatgagcaacatagccgactgagcacaatcaagcttttaccgggcgtactggccgatgaagttaactacattggtaagggagttgagaagcgtttactgaacatatttcctcaatccggccagatccctgctgattttatttctgtgtttaatgacggtgacgttgtccgtgatattaaatttattacagatgcactcaaatctttgtctgattctgtgagtgaaattattagccgttgtagcgttccaactgatcgttatgtattaaataacggtggaatggcaagagctatggcttacagggagtactatcgagcagacaattatgtattacgttcagtcgtaagtgaccgggattatgttgagcatgtaatgaaatacaatcgggttactgcgtacaaaaataaaatcttttcttaa

SEQ ID NO: 383460 - DNA, 1005 bp, Salmonella enterica
atgtatgccttcaaaactgaaaggccggacgcagcacgtcgttatcataataaattcgtcactggcactaactatcaggaagaatcaaacagacgctttgcattaagcgaacctactgaaaatatactgcgtacctcaattctggaatccgggtggcttattaaaaatatcaccctacgtgatgttaacgccgtgtcaggtaatgccgtcaatattggtgccagtgaactgcataccggacgtgtggatggtggccgtttccacaaaaaaatggcaatcaatggtacggagttctttctgacagagacggatacctgcgcccggatcagctattccgatatgtctcatatttaccataccggtgtgccggatgagtttgagaaaacggttgagagcttttttgcccaggcatatgcgctggacatgctgcgggtcggtttcaatggtgtgtcgattgcaaatactacaaacccggaaatcaataaaaaaggcgaggatgtcaatattggctggcatgcactggcgaaagcctacgggaacgggaagcaaatcatctctgagcctgtcactctgggagagactggcacctggaaaaatattgattctctggccaaccatctgattactgagcttattgctgagcagtttcgtgaagatccccgtctggttgtactggttggggcagagctggcagcacatcaacgcctgaagttatttaatgccgcagaccgcccggctgatgtgaatgctgcacagatggctacaagttctgttgctggccgctttgcgtttattcccccgtttatgccgggtaagcgtctggcagtaacgacgctggataacctgcatatttacacccaggcgataacacgctggtttcgtgctgagtttgatgatgaaaacagtgaatacgtacattcctacctgcgcaatgaaggctatgcactcggtgaaccagaactgtacgcggctgtcgatgagagcgctttgacgtttgcggattga

SEQ ID NO: 383461 - DNA, 591 bp, Salmonella enterica
atgccagcgttaattaatccaggcaatgatcagttttcggttataaatttcttgcctcaccaggaatgcacgggatatagtttaaaggttgccgcaaaatcggcagccgggcgtaggaacccgtgttatctgaaggcgatactacacgcgccaggcgtgtttttttgtgtcgcagctttgactcacctaaaatttatggtgtggtggctgattgtatttttttattttttacgccacatcatcagtattatggtagtccaggcggggcagctttcgggctggccggtatccttcagagccggtattcctacccccgtctgggctaccacccatgagcgtaggaactccggtggtagcgttacccgctatctgaaggaggttgccattatggctacagtccctgctttatctcaccctgaatttacctttgtctttctggctgttcgccgtacagaccgtgatgcccgtccacgtcctgtgcgtgtaatcgcagactgcgagcatgctgcacgccttaaacttgccactgaatttatcctgagctttgctgcccgtatccctgtgaaaagtgccggggaggtggttgcatga

SEQ ID NO: 383462 - DNA, 237 bp, Salmonella enterica
atgaaatccataaattttaagcaaggctgcatattgagcgaactgggtgagagtcgtctgttacgggcggcactggccagtgagtttcttgcggaggtcctgtccgttcccacagtgaatggagcgagaacggtttcagcggaaggcgctgcggctttagtggcctgtattgccgaacaactggatggcgttgttaaggaaaccagcacaattaagggagagatgcgcgatgaataa

SEQ ID NO: 383463 - DNA, 411 bp, Salmonella enterica
atgaataataatcaaaatttaaaggcgcatgccttacgaacagcagtcttacggtactacattgctgatgcattcatttccttaatggcgcgtgttcataatgaacctgtttatattgaagatggcgaaagaatagaactcacccacgaaaaagtggtgagcaatattatttaccatattgaaatgccgtgggtgaatgagtttggggctgatgctggttgcatactggccgcagagaaactggaaaaaatgcttaaaccaggctttatgtcagaaaatattcgcctgtcagtttttggtgtcacagagatgcgtgaggtttaccgggatattattttcggtgcacctgatggcgaactacccgaaggttttgaatttgtgaagccggaaggtcaggaggtgctgctgtga

SEQ ID NO: 383464 - DNA, 2688 bp, Salmonella enterica
gtgaaaacacagtctgtatccacgatttccggggctgcgattgggcgctggccttatatcctttcagcattaggtatcaaagtaccgtccgcaggacatcatggggcttgccctgcctgtggtggcaaagatcgcttccgactggacgataaagcggggcgtgggacgtggttttgtaatcagtgcggtcatggcgatggtcttgatctggttcgtctggtgacaggaagaaagataaaagaagccgccgggatggtatctgaggcgcttgcattaccagaaatacaggagaagcccgctttgccagccaggaaaaaggccgcaggaaaagaagcgggtgcggagcgatataccagactcagacagcagtcctgcaatggtgagccggtctatctgacaaacaagggcttacacgggtattcacttcccttgctgtcacagcctttgaatctggccggaataacattttgctccggttcattactgctgccgttgacggatatctccgggaatattaccggtggtcagcttatcaatcctgacggggataaaagtctgctgccaggtagccagctgtctggcgcatttattgccctgaccgatatacccgctgaaacacctgaacaggtgattatcactgagggttttgccacggcgcttaccgtcagtctgctgactgaaggatggatcgtggcggctgtcgctgccaccaatttactgaaggtgacggagcagatccgaaaacgctggccggaaacccggatcattctggccggagataatgatctggctgacgggaaagaaaacaccgggcgtattcaggcagagaaagccgccaaagcggtggatggctgggtaacgctccctccggtacgccataaggctgactgggatgattatcggcaggaagtggggaaagaacgggcgagagatgcctttcgggaagaaatgacgctgcatggtaaagggcagacccgtttaccagaagggttccggctgacaaaagaatatttgtggtacgacaagctggttaataagtctgatggcgatacggagatacgtaatatcaaaatttccagtccgttgcgggtgacggcaatcaccagtgatgctgatgggagtaattacgggcgtttgctggaatgggaagataccaacggaaacagccgtaaatgggcaatgccgatggagatgctgggtggcagcggggaagagctgcgccgcgttctgctggttaacgggctttcgtacatcaacattaacggcatggccagagcattcctgatggaatatatctcgctgtgtaaaccggacagaaaagtaacctgtgtgaataaaacgggctggcacggcggggtttacgttctccaggatgaagtgatagggcgcgaagcccagtcagtcatcttacaaacgtcgagtgtgcaggggcgtgattttcgtgtcagcggcacatcagaggactggcgtgaaaatataggccgttactgcataaataatgcccgtcttgcctttgcggtgagtctggcatttgctgccccccttctgaaactggttggtatcggcggtggaggttatcacctcaaaggggaatcaacagatggtaaaaccacgacgatgaaagtggctgcatcggtatgtggtggaacagatttctggcatacgtggagggcgacggggaatgcattagaaggaacggcgagccgccgcaatgatgccacgctgatgctggatgaaatccgggaggttgacggcagggaggcggggaatatcgcttatatgctggctaacgggcagggcaaagccagagccagaacagatggttcggtaagggaaaccaaccgctggaatctgttgtttctgtccaccggggaactgtcactggtggaacatgcggcaagcgccggggaacgtacgtatgccggggttgaggtcagaatgatccagatcccaagtgattcaggcaaatatggcgtgtttgaagaacttcatggtttcagtagcgggaaaaccctggctgagcatcttgagcagcacgtagcgcattatcatggtgcaccattccgcgactggctgcattgcctgaccgctgatctgccggaactgaccagtcaggcgaaagccttattgaaagagtacacccgaaggctgacgccggaaaatgccgggaatcaggttggccgggctgttacccgttttgctctggttgcgatggccggggagctggccacaaaagcgggcatcacaggatggccggagggagaggcctttcgtgccgctcaaagttgcctggctgcatggatggctgaccggggccatacagctaatcaggaagataaagcggcacttgaacaggtacgggacttcatgacgcgtaatcagttcagtcggtttgctgactggaatgacgacaggaaccggcctgtttcaatgatgggatttagaaaagtcgataaaggagacaacgtgaccgagccggttgtgacgttctacgtgctcccgtcaggctggaaggagatctgtaagggatttgactcgcgtaaggtggccaggttgtgtgtggacgcgggctggctgaaacccggtgaagatggccggacgcaaaacagcattcgcctgccagaaatagggcttaaacgtgtgtaccagttcaatacacaggtactggggagcgccgaacctgagtaa

SEQ ID NO: 383465 - DNA, 273 bp, Salmonella enterica
atgaagatgatgagaatgtactgccccacatgtcaggcagtagcgcggataggtaaaacaaacaggaaacacccacaactgtacgatgtgtactgctattgctctaatgtggagtgcggtcactcgtttgtgatgaatgttgctttctcccattccgttagtccaagcgcgctgaacgggcagggaagggttaaagagctaattgatgcaattccacccgaggaacgggaaaaggctttaaagttgctgctggctgcgcaaaagaatgggtaa

SEQ ID NO: 383466 - DNA, 1431 bp, Salmonella enterica
atgcaagtaaagaaaaaaagaaattataatagacttaagttggtatatactaaatatgttttttattgcgcttattattgccctatattatttcctcgttggttagtaaatgaagttaatagtcgtcatgaggaaactggcagtttaaataattatattaataatgacaatccaaaatttgtttcttttctcaacggtgagtttaattggtataaaacgacattaagttttatcatcgaaaaaaatgagcttgataaattagctaagtggattatccgttattctagaagcacttttaatgcttcgaggtatgaaggtataaatgatgtttcaaatatatttggatcctcctattttaacttcggaaagattagtgtcaatgggaacgatagaggtattagtgattcattaaagcctttatcgtcaaaaactaaatacattgattttatcatgttgagtttacataagcatggtagcgatttatttattatgacatatgaggtttttatgaagaagggggcgactgatgctataaaaaatattactgtagatgagcttgtatttgattcagaatttgacaaattaaacttctacagtaaaaaaaatagtggttttagatgttgggatagatcgtggttagcatctgaaattatttgtgagaaatttgatattgtatttagtgatgtacataaggtattgaaggagttgaatgacacaataggtatgtcaattcatgaaaacagtgtggttgcgattcctgaaatgtgcattgaagagcatgtcgattacttttctgggacaaataatcaaaatgctgaaagagccgctgagtttggttattattatccttcaccgtatttgataaaagatgaaggcgggtatttattaaacatacataatacctctaaatattcttttgatgccctttatatttataataaggttaataaaaaaaataataatgggtacccggatttctatccgactacaaattctaaaggatttatcagggatatttcttttgggttgctgatttctaatggaataactaccctggctaagcaggttggagaggttgtaactgatgaacatggagatgtactaacacaaaaacataatgattacttcattttttacatgcgatcaaaaaaaataaaaagttggctggaggctttctcacgaaaaaggaatactaaggtaaataatttactaaagtaccaagttgagaagtgcgatgagttagtaagaaaaactgaaagtttgtatcatttatcagaaagtagaattcagtttgatagcatcaagtataataaaaagaactcaaaaattattttttggtttgtaataatacaaataattttagctgtgctagcaatagacatccaaaaatggaagatatggttaaattgggttgtcaatttttttaattag

SEQ ID NO: 383467 - DNA, 1722 bp, Salmonella enterica
atgcacgctatactatcacagtatattgaggacttatcacatgagtttgatattcaaaatgaaagcgagtcaaagctttttgagtatttttgcaactatgtgattacatcaaaatatttcttggggcgctttaatcctatggatatcacaacccaagaggacgatgcatctttagatggtatagcgattataattgacggcgaattaatcataagcgtcgatgatgcaatgactgcttttgatacgtataagacatctttacctgtggatattatcattacacaggcaaaatcaggtgagagtttttctaaagatgatatttctaattttaatttaggattgcaggattttttcagtctggaaccaaaacttcctaatggaatctataatggacaagcaatcgagattataaaggttattgtagctaatgtaaaaaaaattaaaaacaaaatgcctaatcttaaggtgttcttctgcactagtggtgtttataacaacgagagggaaattgcggctagttttaaaatattaaataaaacatgtgagaatgcagatatattcaatgatattgaagtttttccaatggggaggaaggagttaatgaaactctggagttcaatatctgataaaaatgaagcgtcaatacaattaattgactatattggtataaatgaaatgccgggtatccctcaagcatatatttcaatagtcaaagccaaagaatttcttgaaaaaattgccatggatgatgaggggaatattagagaagaggtttttgacgaaaacgttcgtgcctttttagggggtgataatccagtaaataaagatatagctaaaactttacatagcgaaaagtcaaagcagtttgccgttcttaataatggcgtgacaatcattgcacctgaaatagcaatacaatccaatacaaaagtaatgcatttgacaaattatcagataattaatgggtgtcaaacgactaatactttatatgaacattacgcagacttgaatgataatgttgaacttgtagtgaaatttattgaatctcaggatactgatgtcgcaatagagattgtaacggccacgaataatcaatctgctgtggaaaatgaagcattctatgctttacgtgaaaaggccagactaattcagaagttttttgatatccaacgcaatgatgaagctaaagagaaattattcttcgaaagacgagagaatgagtacagaaataaatccattcaaaccactaaaatttacgatatcaaagaacttgcaaggtgctttatttctgtctttaaattacgaccccatgatgcttcaagatatgtaaaaaaagtattaaacactagcgatattgtttttgatgataaggataatgaatgtgcttatcattgtgcagcttatatttgttacaaatttaacacactgattaatggacgaaaaaatgacgcgccaaaatataataggcttcgttggcatattgctatgctatatccttgggtcgttttcggtaaagtagaaacaccagatccatcatctaaaaaaatcacagcgtactgtgacaaagttctaaaaacattacttaatgaagagtatattgaaaacttcaaaacttgtcagcgaataatagatagcattgaaatgccgactgatgatcaaattaaacgtggcaaatatacttctgagttgaaggaagctgcggaaaaatttttgaataaatga

SEQ ID NO: 383468 - DNA, 2973 bp, Salmonella enterica; identical to SEQ ID NO: 56202

SEQ ID NO: 383469 - DNA, 861 bp, Salmonella enterica; identical to SEQ ID NO: 19455

SEQ ID NO: 383470 - DNA, 726 bp, Salmonella enterica; identical to SEQ ID NO: 25060

SEQ ID NO: 383471 - DNA, 4254 bp, Salmonella enterica; identical to SEQ ID NO: 25059

SEQ ID NO: 383472 - DNA, 423 bp, Salmonella enterica; identical to SEQ ID NO: 25058

SEQ ID NO: 383473 - DNA, 453 bp, Salmonella enterica; identical to SEQ ID NO: 199623

SEQ ID NO: 383474 - DNA, 603 bp, Salmonella enterica; identical to SEQ ID NO: 25057

SEQ ID NO: 383475 - DNA, 282 bp, Salmonella enterica; identical to SEQ ID NO: 25056

SEQ ID NO: 383476 - DNA, 288 bp, Salmonella enterica; identical to SEQ ID NO: 199625

SEQ ID NO: 383477 - DNA, 537 bp, Salmonella enterica; identical to SEQ ID NO: 199626

SEQ ID NO: 383478 - DNA, 1011 bp, Salmonella enterica; identical to SEQ ID NO: 25053

SEQ ID NO: 383479 - DNA, 870 bp, Salmonella enterica; identical to SEQ ID NO: 61217

SEQ ID NO: 383480 - DNA, 492 bp, Salmonella enterica; identical to SEQ ID NO: 199232

SEQ ID NO: 383481 - DNA, 876 bp, Salmonella enterica; identical to SEQ ID NO: 25050

SEQ ID NO: 383482 - DNA, 1041 bp, Salmonella enterica; identical to SEQ ID NO: 230514

SEQ ID NO: 383483 - DNA, 279 bp, Salmonella enterica; identical to SEQ ID NO: 25048

SEQ ID NO: 383484 - DNA, 1512 bp, Salmonella enterica; identical to SEQ ID NO: 230516

SEQ ID NO: 383485 - DNA, 1029 bp, Salmonella enterica; identical to SEQ ID NO: 230517

SEQ ID NO: 383486 - DNA, 1434 bp, Salmonella enterica; identical to SEQ ID NO: 25045

SEQ ID NO: 383487 - DNA, 3615 bp, Salmonella enterica
atgggatctttttcaatccactctatcggtgactctgcttttctggagcaaatcctgattgcagtatcaatgatcaccggcaccggggatttcgagaagatggtcagtattggcctgcttcttggggtcttgatgatctgtattcagtccgtctttcagggcgcaaagcaaatcaacctccagcaagtgctggtaggttggattctatatgcctgtttcttcggcccaaccacaactgtgactatcgaggacgcttatacagggcaggttcgagtcgtcgccaatgtccctattggggtaggctttgctggaggtgtcatatccaacgtgggatacaccatcaccaatttgtttgaaactggatatggggtaatcgtacccaatgtcacggaaagccacttttccgaaacactgaaactgttgaatgacgtcagacggcgagcctatgacacaggagtttttactgcgcttaactcagcaaatggaggcggctatgttgacgtgaggcgttcctggaacaattacattcgggaatgcacgttaaccaaagtcgatctcaacctaatgtcccttgatgagttgatgaaccgttcaactgactcagctttgcgattcaactcacagctctacggaactaggttgtatttgtctacagcaaaccctgacggcgctgactacacatgtactgacggatgggtggctattagcactgcaaccgccaacctaagcagcccggttgttgttgatgctcttaacagcctactgggtattgacacgtcaactggagacaacgctctaacgaagctgaccgattcgcttcaagcgatgggtgccacaactacgtcatcaatcgactatctgaaagccgccgttctggagcccctctattatgaagccgcagcaggacgttatcaggacctccaggattatggctctgcattgatggtcaaccaggctattcagcaacggaacacacagtgggccgcagagcagtcgatgttcatgaccgtcgtccgaccaatgctgacgttctttgaaggctttatttatgctataaccccgatcattgcttttattatcgtgatgggcagcttcggcctccagttagccgggaaatatgtacaaaccatcctctggattcagctatggatgccagtcctctcaattataaacctgtttgttcataccgccgcgtcaaatgagatgtctagcctcagtgctggtggtctcaactccatgtacgctctttcctcaactggagatgttctgcaacactggattgcaaccggcggcatgttggctgcggccactccggtgatttccctgtttatcgtcacaggtagcacctacgccttcaccagcttggcatcgagaataagtggttctgaccacgttgacgaaaagatgcaaacgccagatctactcaagcaaggtccggttatgcaaagtcagccagcgtacaatcacaaccagttcagtggtgcgattgcaaacggcgcagaaagcatgatcagtaccttctcgcttggctccaccttagcatcaggcgtgagctccgcacaggcattacaaagtcagaaatcggaggctttccaaagcactcttggtcgaggtttttctgatggagtaagtcaggatcaagcctattcaagactctccaatgtcgggcgcaacgtttcgtcgcaaaacacagctcaaagccaattgatcaaccagcaagccaagaacttcatggataagttccaggtggatgatagccactctgatgctgtcaaaggtgcttttgccatgcaggctatgggcacactcgatgttgacgaagctgcgtccatgcttatgcctatggttggcaaggccagggcagcaatgaaggccgctgctggtgtgaaatcaaacagtacagccctagttcctgctggtggtaatggcgaatcaggcggcggcagtgatgtcctggacatcaaagcgcaagcgaagggagcaacagagtcatcaactcaagactcttcaagctggtcagcgagtgatgtgtcccagttcatgaagggtgtgagctattcgcaaaccgatagccaggcgttgacaaatcaattagcgcagggtttcagccgttctggaagcgagtcattcaagcaaacctggggcgatagcttatcccagaacctatccaagtccgcttcggaactggtgtctgcatcggacaccttcacaacaatgagtcagctccaaaaccaaatgggctccatgactaataccgactttaaaactctcggtggtgcagtagcacaaacccctgcggccatgaaccaactgaatgactatttccgaaatgccgcgccgcaatcggttaaagacgaggcggcttcactacagcaaagataccaagcctacggaatgtctcctcaagtggcccaggcagcagcgcgaatgacagcaatgaccaactccaaaaattacgaacagggtaaggagcttggcgggtatcaagccgcactacaggcgatcaataccgcgtccggtcgcaacggagcatttagtggtgatgcttacggaaataacggcattgaaggcccgaatgttcaaggcctaccaggtcaggttcaaggggctgtaggcagtggacctaacatcccaaccggattccgggagaatgtggctgggatggctggaactaatccggcatcagaagctgggcagttaccaacgaatagcccccttgttcaaaatgaacatgcagccggtacgtcagctcttcataaccaagcacagcaaacagagcgaaatgtatctgctcctgaactgaaaaaagcccaagataaccttatgaactcgcttccggaaatgtcttggagcgcttcggcgtggggagcgtgggacaactccagtgattggatgggccgcagagctgaacaagcaggtggagctctcattgctggtggtcaagctggcgctgatgcgttctcaagagcgatggatcaaatgagaacgatgacacctgaacaacgcgaccaattcatcgcggccactcaacgcggcgaccaggccgtgcaagaggagtttggctgggccggtgatgcgatggtcggtatggctaaacttggccgcaacgtcatgggagctgctgcaagcggctatgatgcagcgaaggagtggttaactggtaaatctgatctatcggaagccgctaaagggatgagcattgaggaacgcggcgcgttctatgcagcagcgctatcctctgccgcagaagctggtggtggagccgcgcagcagtttatgaaccagtacggtgatgagttcaaagaaacgatgcagtctatcgctcaaagccgttatgggctgactgaatcccaagccgctgtttatgccgaatcgtttgacacaaacgaaggtcgcatgaaccaggctgttcagaatctgaaaatggagtatgcagaacgtaacccggatggctcaccgatgatgcaaggaggtcagcctgttctttctcagcaaaacgaagagtttacggacaagctggtaaacgtattgcagaactcgacggaagctggagaccgttcaggtagctatttgactgccgtcagggggtacaacatagcaaatcaaaggttctaa

SEQ ID NO: 383488 - DNA, 363 bp, Salmonella enterica; identical to SEQ ID NO: 25043

SEQ ID NO: 383489 - DNA, 273 bp, Salmonella enterica; identical to SEQ ID NO: 25042

SEQ ID NO: 383490 - DNA, 534 bp, Salmonella enterica; identical to SEQ ID NO: 25041

SEQ ID NO: 383491 - DNA, 609 bp, Salmonella enterica; identical to SEQ ID NO: 25040

SEQ ID NO: 383492 - DNA, 552 bp, Salmonella enterica; identical to SEQ ID NO: 230523

SEQ ID NO: 383493 - DNA, 420 bp, Salmonella enterica; identical to SEQ ID NO: 25038

SEQ ID NO: 383494 - DNA, 294 bp, Salmonella enterica; identical to SEQ ID NO: 25037

SEQ ID NO: 383495 - DNA, 984 bp, Salmonella enterica; identical to SEQ ID NO: 230525

SEQ ID NO: 383496 - DNA, 540 bp, Salmonella enterica; identical to SEQ ID NO: 25035

SEQ ID NO: 383497 - DNA, 288 bp, Salmonella enterica; identical to SEQ ID NO: 25034

SEQ ID NO: 383498 - DNA, 1065 bp, Salmonella enterica
atgagcaagagaaccaaagacaaagacctggagaaactcgacgtaatcaaagactcaccgcaaatgagcctgtttgagatcattgaatctccggccaagaaagacgactactccaacaccatcgagatctacgatgcgctgccgaagtacatttgggaccaaaagcgtgagcatgaagatttatccaacgctgtagtgacacgacaatgcaccatcagaggccagcatttcacggtgaaggtgaagccagccatcatcgataaggatgacggaagaaccgtgctgatctacgcgggacagcgagaggaaatccttgaggatgctctacgcaagctcgcagtgaacgggaaaggccatatcatcgagggcaaggctggagtcatgttcactctgtacgaactccagaaagagctctcgaagatgggtcacggttacaacctgaacgaaatcaaggaagcaatccaggtttgtcgtggcgcaacactcgaatgtatcagtgatgacggcgaagccttcatcagctccagcttcttcccgatggtgggacttaccaccagaggtgagtttcgcaagaaaggcgggaacgccaggtgctatgtgcagttcaacccgctggtaaacgaatcgatcatgaatctgtcgtttcgtcagtacaactacaaaatcggaatgcaaatccgctcccctcttgcacggtacatctacaagcgaatgagccactactggactcaagcatcgccagattcgccgtacacgccatcgcttatcagcttcctgacacagagccctcgtgaattgagcccacggatgccggagaacgtcagagctatgaagctcgctctggaggccctcatcaaacaagaggtcataagcgactacgacgcgaaccagatcaaggatggccgcagagtcatcgacgtgcggtacgtcataaggcctcatgagaacttcgtgaagcaggtgatggcgtccaacaagcgtaagcagcagacagagctacgggccatcaagcaaggcatgatcgaccacgacatcattgatgaaccccagcgtaaggagaggtag

SEQ ID NO: 383499 - DNA, 186 bp, Salmonella enterica
gtgggggacctgcacgttatgagatttgatatgtgggtacgttgcacgaaagcaggttctgaacctctcgatatatgggaactctgcacgattgacgaagcagaacaaagattgacagatcaggacaaacctaaaaaggcagtcaaaatgactccaatagtccataaagtgatcgtgctcacataa

SEQ ID NO: 383500 - DNA, 435 bp, Salmonella enterica; identical to SEQ ID NO: 199234

SEQ ID NO: 383501 - DNA, 1116 bp, Salmonella enterica
atgttgagacgagaaaaccaaggagatttgttcgatgaccaggtggtgttgccatcactggagtcggttcttaccggtatatcttccagtcagcgttgtgacgatagaacaacgtacttctcagcgccggatgtggacttgagtttgtacgaccacatcattgtttgcctgtctggaggcaaggactcgattgctgcgtacttgcggctggtggacatgggtgttgataagtcaaaggtggagttctggcaccatgatgttgatggtcaggaaggtagttcgttgatggattgggccttcatgcgtgattactgtcgtcagctcggggaagaactgggtgtcccaatgtacttctcgtggcttgagggcggctttgagggcgaaatgctcaaagacaatgcctatagccacccccatcgtgtagagacgcctgaggggcttctggtgctgcctagagaccataagcgctctaagcctggtacacgccttcgtttccctcagcaatcgccatcactccaaacaaggtggtgttcatcagccttgaagatcgatgttggccgcagagctcttaataaccaggagcgcttcaaggggaagaagatccttttcatcactggtgagcgccgggaggaaagtgcaaacagatccaagtacaaccagcttgaggctcatgcctgtgacagaagatatgggaagactgcacggttagttgatgcctggaggcccgttcttcattggactgaggaagaggtatgggaagtaatcgagcgtcaccgcattctggccccagtcccttatcgccttggttggagccggtcttcgtgtatgacctgcatctacaactcacagcgtatctggtccactatccgtcactactggcctgaacgagctgggaagattgctcagtatgaacaaacctttggtgtgacggtatcaagaaaaaaaatcgacgtaatagatttaggttctgctgttgcgccgatacagattagtgatgttgaggcattggagcaggtatccagagaggattacacgctcccgatttttgtgccggaggggcagaagtgggttctccctggtggcgcatttggccgagaggcctgtggttctgattga

SEQ ID NO: 383502 - DNA, 609 bp, Salmonella enterica; identical to SEQ ID NO: 230531

SEQ ID NO: 383503 - DNA, 522 bp, Salmonella enterica; identical to SEQ ID NO: 230532

SEQ ID NO: 383504 - DNA, 522 bp, Salmonella enterica; identical to SEQ ID NO: 230533

SEQ ID NO: 383505 - DNA, 474 bp, Salmonella enterica; identical to SEQ ID NO: 199235

SEQ ID NO: 383506 - DNA, 315 bp, Salmonella enterica; identical to SEQ ID NO: 230535

SEQ ID NO: 383507 - DNA, 855 bp, Salmonella enterica; identical to SEQ ID NO: 230536

SEQ ID NO: 383508 - DNA, 960 bp, Salmonella enterica; identical to SEQ ID NO: 230537

SEQ ID NO: 383509 - DNA, 861 bp, Salmonella enterica
atgacagaacaaagtaccaaatcactacgtctcggggtttttgccgccattattttggggctcgtaggaaccgggttcggaatctaccagctcgtgaaagagaaggatctggcgcaagagatcgccaacgtgaagtccacggtcaaccaggtgaaagatgccgaaggcgtcaccttcaaaagcaaggcagagtttgaggctgctgtggccgaaagcatcaataagtttgtcgcgcagaaacaacaagccgacatcgatcagaagtatgcccagttcgaggcggcacctgaaaaggtcgaagacggcaaacacatctatggggaccttggtgcccgattcacgctggtggagttctctgatatggagtgccccttctgtaagcaattccacgacacgcccaagcaaattgtggatgccagtaaaggcaatgtgaattggcagtggaagcacatgcctctcgacttccataacccggcagctcacaaggaagcgttggccgctgaatgtattgctgaacagaagggcaaccgtggcttctgggtcttcgtgaatgagattttccatcacagcaaaggcaacggtgccggtgtttctgacttggcctctgttgtcacgggtgttggtgctgatctggatgctttccgtgagtgtctcagctctggcaagcacgaagataaagttcaagctgacatccagaaagccaagagttacggcgttaatggtactccagcaacctttgttgtagacaaccagacaggcaagagtcagctactcggtggtgctcaaccggcacaagccatcatggcggtgatgcgaaaaatgatgattgagtcgcaacaagacgactcagcgaaccaataa

SEQ ID NO: 383510 - DNA, 429 bp, Salmonella enterica; identical to SEQ ID NO: 199236

SEQ ID NO: 383511 - DNA, 360 bp, Salmonella enterica; identical to SEQ ID NO: 199237

SEQ ID NO: 383512 - DNA, 447 bp, Salmonella enterica; identical to SEQ ID NO: 229184

SEQ ID NO: 383513 - DNA, 519 bp, Salmonella enterica; identical to SEQ ID NO: 199238

SEQ ID NO: 383514 - DNA, 228 bp, Salmonella enterica; identical to SEQ ID NO: 229186

SEQ ID NO: 383515 - DNA, 858 bp, Salmonella enterica; identical to SEQ ID NO: 229187

SEQ ID NO: 383516 - DNA, 192 bp, Salmonella enterica; identical to SEQ ID NO: 199239

SEQ ID NO: 383517 - DNA, 528 bp, Salmonella enterica; identical to SEQ ID NO: 199240

SEQ ID NO: 383518 - DNA, 273 bp, Salmonella enterica; identical to SEQ ID NO: 229190

SEQ ID NO: 383519 - DNA, 294 bp, Salmonella enterica; identical to SEQ ID NO: 199241

SEQ ID NO: 383520 - DNA, 303 bp, Salmonella enterica; identical to SEQ ID NO: 25011

SEQ ID NO: 383521 - DNA, 351 bp, Salmonella enterica; identical to SEQ ID NO: 199243

SEQ ID NO: 383522 - DNA, 549 bp, Salmonella enterica; identical to SEQ ID NO: 199244

SEQ ID NO: 383523 - DNA, 195 bp, Salmonella enterica; identical to SEQ ID NO: 25008

SEQ ID NO: 383524 - DNA, 372 bp, Salmonella enterica; identical to SEQ ID NO: 199246

SEQ ID NO: 383525 - DNA, 471 bp, Salmonella enterica; identical to SEQ ID NO: 199247

SEQ ID NO: 383526 - DNA, 336 bp, Salmonella enterica; identical to SEQ ID NO: 199248

SEQ ID NO: 383527 - DNA, 489 bp, Salmonella enterica; identical to SEQ ID NO: 25004

SEQ ID NO: 383528 - DNA, 498 bp, Salmonella enterica; identical to SEQ ID NO: 25003

SEQ ID NO: 383529 - DNA, 264 bp, Salmonella enterica; identical to SEQ ID NO: 34918

SEQ ID NO: 383530 - DNA, 933 bp, Salmonella enterica; identical to SEQ ID NO: 199251

SEQ ID NO: 383531 - DNA, 1464 bp, Salmonella enterica; identical to SEQ ID NO: 229202

SEQ ID NO: 383532 - DNA, 393 bp, Salmonella enterica; identical to SEQ ID NO: 229203

SEQ ID NO: 383533 - DNA, 195 bp, Salmonella enterica; identical to SEQ ID NO: 229204

SEQ ID NO: 383534 - DNA, 1185 bp, Salmonella enterica; identical to SEQ ID NO: 199252

SEQ ID NO: 383535 - DNA, 348 bp, Salmonella enterica; identical to SEQ ID NO: 229206

SEQ ID NO: 383536 - DNA, 429 bp, Salmonella enterica; identical to SEQ ID NO: 199253

SEQ ID NO: 383537 - DNA, 564 bp, Salmonella enterica; identical to SEQ ID NO: 199254

SEQ ID NO: 383538 - DNA, 570 bp, Salmonella enterica; identical to SEQ ID NO: 199255

SEQ ID NO: 383539 - DNA, 546 bp, Salmonella enterica; identical to SEQ ID NO: 229210

SEQ ID NO: 383540 - DNA, 939 bp, Salmonella enterica; identical to SEQ ID NO: 229211

SEQ ID NO: 383541 - DNA, 198 bp, Salmonella enterica; identical to SEQ ID NO: 199256

SEQ ID NO: 383542 - DNA, 249 bp, Salmonella enterica; identical to SEQ ID NO: 199257

SEQ ID NO: 383543 - DNA, 243 bp, Salmonella enterica; identical to SEQ ID NO: 199258

SEQ ID NO: 383544 - DNA, 363 bp, Salmonella enterica; identical to SEQ ID NO: 199259

SEQ ID NO: 383545 - DNA, 1245 bp, Salmonella enterica; identical to SEQ ID NO: 199260

SEQ ID NO: 383546 - DNA, 450 bp, Salmonella enterica; identical to SEQ ID NO: 199261

SEQ ID NO: 383547 - DNA, 312 bp, Salmonella enterica; identical to SEQ ID NO: 229217

SEQ ID NO: 383548 - DNA, 786 bp, Salmonella enterica; identical to SEQ ID NO: 229218

SEQ ID NO: 383549 - DNA, 1182 bp, Salmonella enterica; identical to SEQ ID NO: 229219

SEQ ID NO: 383550 - DNA, 273 bp, Salmonella enterica; identical to SEQ ID NO: 25136

SEQ ID NO: 383551 - DNA, 636 bp, Salmonella enterica; identical to SEQ ID NO: 25135

SEQ ID NO: 383552 - DNA, 144 bp, Salmonella enterica; identical to SEQ ID NO: 25134

SEQ ID NO: 383553 - DNA, 282 bp, Salmonella enterica; identical to SEQ ID NO: 25132

SEQ ID NO: 383554 - DNA, 675 bp, Salmonella enterica; identical to SEQ ID NO: 25131

SEQ ID NO: 383555 - DNA, 507 bp, Salmonella enterica; identical to SEQ ID NO: 25130

SEQ ID NO: 383556 - DNA, 312 bp, Salmonella enterica; identical to SEQ ID NO: 49818

SEQ ID NO: 383557 - DNA, 501 bp, Salmonella enterica; identical to SEQ ID NO: 25128

SEQ ID NO: 383558 - DNA, 1428 bp, Salmonella enterica; identical to SEQ ID NO: 25127

SEQ ID NO: 383559 - DNA, 657 bp, Salmonella enterica; identical to SEQ ID NO: 25126

SEQ ID NO: 383560 - DNA, 618 bp, Salmonella enterica; identical to SEQ ID NO: 25125

SEQ ID NO: 383561 - DNA, 207 bp, Salmonella enterica
atgggatttggtgtggacaagatagatcggcaaagttggctcgttaaattcaggcgagcgaagtgtcaggacactttagacacgatgcgggatgcggccattcgcaactatgaagggaatattcgtgttatcgcggatattgtattggcccatgaggcgagagagacagaaattgaaaaagggatgttttgtctaatagttagatag

SEQ ID NO: 383562 - DNA, 300 bp, Salmonella enterica; identical to SEQ ID NO: 25124

SEQ ID NO: 383563 - DNA, 489 bp, Salmonella enterica; identical to SEQ ID NO: 25123

SEQ ID NO: 383564 - DNA, 2193 bp, Salmonella enterica; identical to SEQ ID NO: 25122

SEQ ID NO: 383565 - DNA, 618 bp, Salmonella enterica; identical to SEQ ID NO: 25121

SEQ ID NO: 383566 - DNA, 2973 bp, Salmonella enterica; identical to SEQ ID NO: 25120

SEQ ID NO: 383567 - DNA, 1866 bp, Salmonella enterica; identical to SEQ ID NO: 25119

SEQ ID NO: 383568 - DNA, 546 bp, Salmonella enterica; identical to SEQ ID NO: 25118

SEQ ID NO: 383569 - DNA, 630 bp, Salmonella enterica; identical to SEQ ID NO: 25117

SEQ ID NO: 383570 - DNA, 447 bp, Salmonella enterica; identical to SEQ ID NO: 25116

SEQ ID NO: 383571 - DNA, 378 bp, Salmonella enterica; identical to SEQ ID NO: 25115

SEQ ID NO: 383572 - DNA, 663 bp, Salmonella enterica; identical to SEQ ID NO: 25114

SEQ ID NO: 383573 - DNA, 144 bp, Salmonella enterica; identical to SEQ ID NO: 25113

SEQ ID NO: 383574 - DNA, 366 bp, Salmonella enterica; identical to SEQ ID NO: 25112

SEQ ID NO: 383575 - DNA, 282 bp, Salmonella enterica; identical to SEQ ID NO: 25111

SEQ ID NO: 383576 - DNA, 627 bp, Salmonella enterica; identical to SEQ ID NO: 25110

SEQ ID NO: 383577 - DNA, 918 bp, Salmonella enterica; identical to SEQ ID NO: 25109

SEQ ID NO: 383578 - DNA, 1317 bp, Salmonella enterica; identical to SEQ ID NO: 25108

SEQ ID NO: 383579 - DNA, 579 bp, Salmonella enterica; identical to SEQ ID NO: 25107

SEQ ID NO: 383580 - DNA, 384 bp, Salmonella enterica; identical to SEQ ID NO: 25106

SEQ ID NO: 383581 - DNA, 5487 bp, Salmonella enterica; identical to SEQ ID NO: 25143

SEQ ID NO: 383582 - DNA, 708 bp, Salmonella enterica; identical to SEQ ID NO: 25142

SEQ ID NO: 383583 - DNA, 2448 bp, Salmonella enterica; identical to SEQ ID NO: 49841

SEQ ID NO: 383584 - DNA, 318 bp, Salmonella enterica; identical to SEQ ID NO: 25062

SEQ ID NO: 383585 - DNA, 531 bp, Salmonella enterica; identical to SEQ ID NO: 25063

SEQ ID NO: 383586 - DNA, 1266 bp, Salmonella enterica; identical to SEQ ID NO: 25064

SEQ ID NO: 383587 - DNA, 672 bp, Salmonella enterica; identical to SEQ ID NO: 25065

SEQ ID NO: 383588 - DNA, 1008 bp, Salmonella enterica; identical to SEQ ID NO: 25066

SEQ ID NO: 383589 - DNA, 2796 bp, Salmonella enterica
atgcgaagtcataattactttatgaaagctgtggcctcgctgttgacagtaaccatgtctgcgctgccgatacattcctacgctaacggtagccaagaccaggacatcacagcggtgggtaaagaggcccaggctttcggacaaaacctctcaaactcattcaagtcgagctcggggactgtgcaagatggcacaatctctatgccgacgttgaaagacggtcaattccaaatgaacggggggagtcagattaatgtcaatgatctattccccggaacgagcgggaccaacaataaacctgatagttattacttccctgatgccaataaacctgatgtgggcggtctgcaaggcatttacgactctggcgatgacatggacagcgtggggaataatgcaaaagggtcgctgtggagtgatgccaatagtgctaatccatcaatctctggtgcggcatacaaggttcttctcgatgcctctaatcgatcacgccctgatttcagtaatgacccggtactaaatctaagcaaaaagacctatgaggatatggacctcatcgcaggtggctttggggattgttctgccgaaacaaccatcaatcagaatactatcaacgcccacattccagagtatgaacggtgtcagcgtgttgtagatcaaagcgcggactgtgaggttgtccatgactacgacgcctctgtggtgaagcactatgatggtccatataacctcaaatcttgtggagaaggctgtactgagttgtggattggtcgagtgggggacaactactggagtggtaactgcaagatttatgaggagtacacgcgggtccaagtcagcaatccagatgccatagtgtctgcaacgcttgaatacgccaagtgggatgactacatgcaagtgtgggtcggtaagtccggccaagagactaaagtgtggtctggcccagatggcaacttccctccagaaacagccggtagatgtgagctctccacgagttgggagcgaaaccctaatgttgatgtcaccccctattttaagaacgtgaaagatggtgatgttgttacgtttaagatccgcgtttcagtaagtggcgaaggtgagggttttggccgcataaaactccgctatgacccatcgaaagccattaccaaggatgagtgggctccacagagctgcatggattcagccaaaggggtggtagatggttttgcggaaggcgagatcacatgtatagatgacccgactgatgctactggctgcacagtcatcaatgggatcaaagtttgcgaatctcaactcaagccgtcacctttgcctggtattccaaaactatgcaaaaaggttcgagttaaagctgactatgacttctataaggggcaaatggactgctggacagaccctcaaggtgaaacgcactgtccggtaaacacgggcgggaatctcgatagctgtcagaaatatgaagaaaaccctcagtgcggcttcatcagttccaaatgtgttgatggtgctcagggaagttctggtacgtgctacgtccacgaggatacttatgactgtggtacagatgtttctgttccgaccttggaaaaggaaactgagtaccagtgcggtgggcctatacgctgcatgggagatgactgccttgatttgaccaaaacacaaagcactgattttgctcgcgctactgcgttgctcaatgcagcccaattcatgacgcaggatatgagctgcacaggccaagatggggatgacaatcctaccggggatgaaaacgttatttgctctgcttttgcaggggaagctggcgaatgcaagatagctgttgggggagtttctgattgctgtgaaaagccaaccaatatatctcttgccgattatctgaacctaataatggccgttccaaagctcgatggcgcagtgatggggctgactgatggtaatgcgcttaaaggtgcttatcaggtacttagggaacctgcccttcaagggtggacagaagtcacaaaaccgttcacaagttatatagagaacgtttcaggtgctgttgattcgttcttccagcctgtagagcagtttgttgatcaactcattgaccagctcaaagagcaagtcaaagaagtgatgatggatgtcatgaaatcagcaggccaagatgcagcaacagagcaggcggctgccgcagcatctgaacaagctgccgaagcaatgatggagactgcgacaacatggcttagcactgccatgacgatatataccgtctatgtcgttgcgatggtgatgatccagatgatttataagtgcgaggaagaagagttcactatgaacgcaaaaagagcgctcaagaattgcacctatgtaggctcttattgtaaatctaaggtgttgggcgcttgtattgaaaaaagagaagcgtattgctgcttcaattctccgctctctcgtattatacaagaacaggttcgccctcaattggggcagaactttggagaccccaaaaatcctcagtgtgaagggattccactagataaaattgccgaaattgattggagcaaaattaatttggatgagtggcttgggatattacagcagaacggtaaattccctgatccggcctcaataaatctcgactcgctgactggagcagggaatgacttcaatattgacgggacgcggaagaatgctcaggaaagggcgttggagcggttggaagggattgatattgacgcgaagcgaaaagaggcgacaaacagcatagaccctcaaacaggcgcgccaactggtggtggataa

SEQ ID NO: 383590 - DNA, 861 bp, Salmonella enterica; identical to SEQ ID NO: 25068

SEQ ID NO: 383591 - DNA, 642 bp, Salmonella enterica; identical to SEQ ID NO: 25069

SEQ ID NO: 383592 - DNA, 321 bp, Salmonella enterica; identical to SEQ ID NO: 25070

SEQ ID NO: 383593 - DNA, 186 bp, Salmonella enterica; identical to SEQ ID NO: 25071

SEQ ID NO: 383594 - DNA, 969 bp, Salmonella enterica; identical to SEQ ID NO: 25072

SEQ ID NO: 383595 - DNA, 909 bp, Salmonella enterica; identical to SEQ ID NO: 25073

SEQ ID NO: 383596 - DNA, 528 bp, Salmonella enterica; identical to SEQ ID NO: 25074

SEQ ID NO: 383597 - DNA, 1032 bp, Salmonella enterica; identical to SEQ ID NO: 83983

SEQ ID NO: 383598 - DNA, 1011 bp, Salmonella enterica; identical to SEQ ID NO: 25076

SEQ ID NO: 383599 - DNA, 1278 bp, Salmonella enterica; identical to SEQ ID NO: 25077

SEQ ID NO: 383600 - DNA, 1797 bp, Salmonella enterica; identical to SEQ ID NO: 25078

SEQ ID NO: 383601 - DNA, 336 bp, Salmonella enterica; identical to SEQ ID NO: 25079

SEQ ID NO: 383602 - DNA, 540 bp, Salmonella enterica; identical to SEQ ID NO: 25080

SEQ ID NO: 383603 - DNA, 501 bp, Salmonella enterica; identical to SEQ ID NO: 25081

SEQ ID NO: 383604 - DNA, 885 bp, Salmonella enterica; identical to SEQ ID NO: 25082

SEQ ID NO: 383605 - DNA, 225 bp, Salmonella enterica; identical to SEQ ID NO: 25083

SEQ ID NO: 383606 - DNA, 390 bp, Salmonella enterica; identical to SEQ ID NO: 25084

SEQ ID NO: 383607 - DNA, 453 bp, Salmonella enterica; identical to SEQ ID NO: 25085

SEQ ID NO: 383608 - DNA, 276 bp, Salmonella enterica; identical to SEQ ID NO: 25086

SEQ ID NO: 383609 - DNA, 192 bp, Salmonella enterica; identical to SEQ ID NO: 25087

SEQ ID NO: 383610 - DNA, 354 bp, Salmonella enterica; identical to SEQ ID NO: 25088

SEQ ID NO: 383611 - DNA, 345 bp, Salmonella enterica; identical to SEQ ID NO: 25089

SEQ ID NO: 383612 - DNA, 303 bp, Salmonella enterica; identical to SEQ ID NO: 25090

SEQ ID NO: 383613 - DNA, 1626 bp, Salmonella enterica; identical to SEQ ID NO: 25091

SEQ ID NO: 383614 - DNA, 432 bp, Salmonella enterica; identical to SEQ ID NO: 25092

SEQ ID NO: 383615 - DNA, 555 bp, Salmonella enterica; identical to SEQ ID NO: 25093

SEQ ID NO: 383616 - DNA, 387 bp, Salmonella enterica; identical to SEQ ID NO: 25094

SEQ ID NO: 383617 - DNA, 135 bp, Salmonella enterica
atgagcgtggttgcgccaaaacgcatcaccagtgaactacagttattttgcaataagattcccttgctgcgggataatgtgaagcatatcagcaacaacgtgagtggtattctgaaaacgaacgggaatacataa

SEQ ID NO: 383618 - DNA, 2232 bp, Salmonella enterica
atgagttttgtatccacaaataataaatccggtataggagggctgacgacaaccacgccgccgataaccggagaaagtggcggtgtcaccgcagattcagtcgccggaagcgtggcagatgcggcggaagccgccgtggaacaggctgcgggatcgctgtttggcgcattgccggagccatcaggactggtgaaagccgcggtggcagcggcgcaggccgccgccgcaggtatggcgcaggatgcggtatcggccatcgtctccgctgttgcaggcgggccgggggcgcataatgtgacggtcagcggcagcgccgtaccgccgggcgcattactgttcgccagcctggacggcggcgaaacattaagtgaactgttcagctatgtggtacagctaaaaacgcccgacaccctgaatctgggctatgtctccccggcggccaacctgccgctcaaaccgatggtgggcaaagatctgtgcgtcaacatcgaactggatggtggcggtaaacgacatatcagcgggctggtcacggcggcgcgggtggtgggccatgaagggcgttcggttacctatgagctacgtatggagccgtggctgaaactgctgacccataccagcgactacaaagcattccagaataaaagcgtggtggatattctggatgaagtgctggcggaatacccctacccggtggaaaagcggctggtggaaagctacccggtacgcacctggcaggtgcagtacggtgaaactgattttgattttcttcagcgactgatgcaggagtggggcatctattggtggtttgagcacagcgaggacagccacacgctggtgctggcggatgccatcagcgcccacaaagcatgtccggactcgccgctggtcgagtggcaccaggaagggctgaagctggacaaggagtttatccacactatcacggcaaacgagagtctgcggactggacagtgggtgctggatgatttcgattttacgaagccacgttcattgctggcaaacacggtggcaaacccgcgtgaaaccggtcatgccacctacgagcattatgagtggccgggagactacttcgacaagagtgaaggcgagatgctgacgcgcattcgtatggaagcgcagcgcagccccggcagtcgggtgctggggggagggaatatccgcacactcatgaccggttataccttcacgctggaaaactatcccactgccgaagtcaatcaggaatacctgctgatgcagaccttgctgtttgtgcaggacaacgcgcagcacagcgggcaggaccagcactttaccttttccacccgttttgaactgcaccccacccgcgaggtgttccgcccgcagcggacggtgagcaaaccccacaccaaagggccgcagagcgccatcgtcaccggcccggcgggccaggaaatctggacggatcagtacgggcgggtaaaggtacagtttggctgggatcgctacggcaaaatggatgaaaacagctcttgctggatacgcgtcagctacccatgggcgggcaaaggcttcgggatgatccagatcccgcgtatcggccaggaagtgctggtggatttcaaaaacggcgatccggatctgccgatcatcgtggggcgtacctacaaccaggacaccatgccgccgtggggactgccgggcgcggcaacacagagcgggatatacagccacactatcggcggcggaccgaccaatgccaacgccctgcgttttgaagataaacccggtagtgaagaggtctggctacatgctgaaaaagatcagcgtattgaagttaataataatgaaagtcactgggtggggaataatcgggttaaggtcattgatcagtcagaaatagccactattggcgctgtccgcgaccataaagttcagtatgacgatacctctctggccggaggaaataaaaccattcagacggtaaaagagttatatctggcagcgggtgattctattactctgagttgtggtgacaccgttctgtacatgagcagtaagggggaattttacgtaacctgtaaaacgttcaatattactgcaacagatgccgatggtcagattaatactataaaagggcagctggatttaaatatggataaaagagaacccaaagtgggaacatttggtgagtcagaaaaaacagcaatggcagcagtaattaaggaaactttcccacccaaagaatag

SEQ ID NO: 383619 - DNA, 435 bp, Salmonella enterica
atgaaaaatatcattcagttatgggaagataacttattaccgataaaagatgctatttatttttccaacggcagatcttttctttgtaaaataatggattatcctactcttcatattgagagaaatggtgaatttgatttctctgccttttatgaaaaaaataaagatgaagttactgacattgataaatttagagaaattaaattagcgaataattgctattgttgcgttggagaaggtagctatggttctgaaggctttgtcgcctatctcgatgaaaataaaaacttagtttgggttctttattccgaagaatctaacccgtttattaatgtgtctgaatatatacctgatattattatagtagaatcaagttctaatattagattaaaaatcaatataaacaatcccatggatttagaattagtagtttaa

SEQ ID NO: 383620 - DNA, 210 bp, Salmonella enterica
atgatccttcctcacctgattttagaggcggtggaagtaaaacaacgcatttgcctcctgatgcagaagaagtttatcgaagagctgtaccttctgattcttctggtaattcgtggtttggccgaaatagtgagggggaattttatcgttaccaagggagtaacggcgaggttcactggaatggtagagaaaaatctgatagagggttga

SEQ ID NO: 383621 - DNA, 468 bp, Salmonella enterica
gtggctaatctaatttttggagaaccaagccttttttctataaatatatctactgatgatcgttttgccagcgtatctattttttgtgcatcagaggaaattggtgatagcagtgaatatgtattgctgagtacctttatttcacttatcaaaaacaagattgataattatgactattctttatctaacgaattgtttaatctagagaaaaatgatgttttttcatatgttgttgatgggtttgaaaaagcagaaagttggagggaatctcaacgattagaatccatcttgattacattgaatctagctccttgttttgatggtgaaactttcattttattatccactgatgaatatgatagaattatatggaaaacattcaattcggaaattatcagtgaagcattccttcctgctggatatgtattaaaacagtttgatttattgtttaataatttctccaattaa

SEQ ID NO: 383622 - DNA, 174 bp, Salmonella enterica
atggctcgattatgcgggatacttacagcggaagcgggatttaagaccgggcgcggcgtgaccgtgaagatttcacaggggtgtattgtgctgatggcggactgtaacgaggtgcaggagctgcgcgagcagctttatcaggctaaacaggggattaaggatgtgcttgtttag

SEQ ID NO: 383623 - DNA, 330 bp, Salmonella enterica; identical to SEQ ID NO: 119501

SEQ ID NO: 383624 - DNA, 1125 bp, Salmonella enterica; identical to SEQ ID NO: 119502

SEQ ID NO: 383625 - DNA, 795 bp, Salmonella enterica
atgccgttacttatgcgtacaaccaggcgggtggctgtcaccgaagccggtaaacaattattactgacgcttgaacccggtcttgcgcgcattgaagcgggcgtgacagctcttcagagactgcgccatacaccggctgggctggtcagacttacggtatcagatcacatgattcatgaatgtctctggccacgattgtcaccgttactaaaaaaatattcggatatcaaggtggaaatgtcgcagcagaacggttttgtcgacattgttgagggcaattttgatgccggagtccgaattggtgatgacatattaaaggatatggtggccgtccgaatcgcaccggacatacggtttgtcgtcattggatcgtccacctatcttgcagaaagaggtctgccgctacatccctctcagctggaaaaacatgactgcatcaatatacgtctgtcacccacaggcccgctgtatggctgggaatttgtcaggcagggggagattgtgaaaaaagtggacgggcagcttactttttcaagcatttatccaatgcttcatgcagtaaaagatggctacggcctggcctacctgccggagtcttctgccctggcggggattgaggcgggacactattgtcgggtgcttgaggactggtcagaggcttttcccgccgacatgataattccaataatgtccattacaggctccggtaaagataataccgacaccttacatgagaaaggcaaaagcaatataacctgctgtgctccggattttaagaatgagcggtttacgtag

SEQ ID NO: 383626 - DNA, 876 bp, Salmonella enterica; identical to SEQ ID NO: 119504

SEQ ID NO: 383627 - DNA, 852 bp, Salmonella enterica
atggctcattactcttgcgccctggctttttgtattcctctggagtcagggtttgtcgcagccaaatttaccgtgcagtacagcgcgccgtttcatcttttattcctgcgtggcgcattttcctgtctggtccttctgctgcttacactggggttcagggcccgttttccgtccggcagaggaatggttcgcaacctgattgtcggacttttcctgcagagcttctttctgggcggatgcttttatgccatccatcgtggcatgccgtcaggcattgtggcgctcatcaccggcctgcagccggtactgactgcaatactggtttcactcatgcaccgtcagtccctgcatccccggaaatggctgggtattgcgattggctttgcgggcgttttcctggtgctctcgccaggccagcatagttttgcactggatcctgtggcttttgggtcggtcatgctggggttatttggcgtaacgatcggagcgctttatcagcgccgtgctcagggagatggacatatctttgcgaacacgtttttacagtacgtcactttgacaatatcgatgggtgcaattagcctgatgttcgaatctgctccgacgcagtggagcttatcatttgcgctgggtctgggctggctggttattggcgtatcggttctggcgattatgttgctgatttttatgatacgaagcggtgaagcaaccaaagtcgctacttacttttacctggttcccattctcacggcagctgaagcgtggttgctgtttggagaggccattacattgcctatgcttgtgggtatggcagtaactataatcggcctgatttttgtcatccgggaatag

SEQ ID NO: 383628 - DNA, 837 bp, Salmonella enterica; identical to SEQ ID NO: 119506

SEQ ID NO: 383629 - DNA, 660 bp, Salmonella enterica; identical to SEQ ID NO: 119507

SEQ ID NO: 383630 - DNA, 582 bp, Salmonella enterica; identical to SEQ ID NO: 119508

SEQ ID NO: 383631 - DNA, 327 bp, Salmonella enterica; identical to SEQ ID NO: 119509

SEQ ID NO: 383632 - DNA, 1134 bp, Salmonella enterica
atgaaagcagtaatttacaacggtccttatgatgtaaaagtaaaagacgtaccggatgcgaaaattgtccgccccacggatgtactcgtccgcatcaccaccaccaacatttgtgggtcggacttgcacatgtatgagggccggaccagctttgaacagggacggattctgggtcacgaaaacctgggtgaagtggtcgaaattggctcaggcgttgaacgtattaaggtgggcgactatgtttgtctgccgtttaacgtgggatgtggtttttgcgaaaactgtgaaaaaggtctgaccggcttttgtctcactaccaatccgggtacggcaggcgcagcttatggttttgctgaaatgggtccctgggagggaggtcaggcggaactgcttcgggtgccatttgccgactttaactgccttgttcttccccctgatgcggcagaaaaagaagatgattatgtgatgctctctgacatttttcctaccggctggcatgcaacagaacttgccggattgaagcctggtgaaagcgtggccatttatggcgcggggccggtcggtttgatggcagctcattcggcgatcattaaaggtgcttcacaggtgtttgtggttgatacgcacacagaccggttggctctggctgaaaaaatgggggcgacgggcatcaatgctactggcgatgaagctgtacaaaaaattctcgacctgacggatggacgcggtacggattgtggctgcgaatgtgttggctatcagtgctgtaacaaacatggccatgaagataactctgttaccatgaacagtcttgttgcgtcgacgaaagcaaccgggggaattggtgtggttggcgtctttattcctcaggatccgggggctgaatcggagcttgccagagagggtaagatgccatttgattttgggagtttctggtttaaaggacaggcaatccgtaccggccaggcgaacgttaaggcctataaccgtcagctgtctcgcctcatccatcacgataaagccagtccgggcaaaataatttctcatcgtctttcgcttgaagaggctcctgccggatataagcacttcgatgagcgggatgaaggatggacgaaggttatccttaagccttaa

SEQ ID NO: 383633 - DNA, 1542 bp, Salmonella enterica; identical to SEQ ID NO: 120972

SEQ ID NO: 383634 - DNA, 123 bp, Salmonella enterica
atgccacggagacaaatactcagtagtgaagaaaaagaacgcttgttgattgtgccagatgatgacgtatttctgacgcgcatgtgctttctgagtgaacatgacctcgcgctcattaattaa

SEQ ID NO: 383635 - DNA, 579 bp, Salmonella enterica; identical to SEQ ID NO: 120242

SEQ ID NO: 383636 - DNA, 1206 bp, Salmonella enterica; identical to SEQ ID NO: 120241

SEQ ID NO: 383637 - DNA, 306 bp, Salmonella enterica; identical to SEQ ID NO: 102371

SEQ ID NO: 383638 - DNA, 297 bp, Salmonella enterica; identical to SEQ ID NO: 167076

SEQ ID NO: 383639 - DNA, 657 bp, Salmonella enterica; identical to SEQ ID NO: 119515

SEQ ID NO: 383640 - DNA, 984 bp, Salmonella enterica; identical to SEQ ID NO: 167074

SEQ ID NO: 383641 - DNA, 276 bp, Salmonella enterica; identical to SEQ ID NO: 305542

SEQ ID NO: 383642 - DNA, 294 bp, Salmonella enterica; identical to SEQ ID NO: 190812

SEQ ID NO: 383643 - DNA, 276 bp, Salmonella enterica; identical to SEQ ID NO: 16862

SEQ ID NO: 383644 - DNA, 1110 bp, Salmonella enterica; identical to SEQ ID NO: 113667

SEQ ID NO: 383645 - DNA, 399 bp, Salmonella enterica; identical to SEQ ID NO: 16863

SEQ ID NO: 383646 - DNA, 837 bp, Salmonella enterica; identical to SEQ ID NO: 16864

SEQ ID NO: 383647 - DNA, 426 bp, Salmonella enterica; identical to SEQ ID NO: 129404

SEQ ID NO: 383648 - DNA, 2652 bp, Salmonella enterica; identical to SEQ ID NO: 16870

SEQ ID NO: 383649 - DNA, 303 bp, Salmonella enterica; identical to SEQ ID NO: 16869

SEQ ID NO: 383650 - DNA, 249 bp, Salmonella enterica
atggacgaatcaagaaaggctttcgagcaatggttccagagcaaatacaaatgcactatggaaacgatgaaggttatgcaaatcaaagtcgaacttgcttgggaggcatggcaggccagccgtgaagctatcgagataaagctcgatgacaaagtaatggttgaggatgagttcgacaaaggccacaactgcgcaatcgactattgcgctgatgccatccgcgccgccggaatcaaagtgaaggagtga

SEQ ID NO: 383651 - DNA, 186 bp, Salmonella enterica
atgtacaagaaagatgttatcgaccacttcggaacccagcgtgcagtagctaaggctttaggcattagcgatgcagcggtctctcagtggaaggaagttatcccagagaaagacgcataccgattagagattgttacagctggcgccctgaagtatcaagaaaacgcttatcgccaagcggcgtaa

SEQ ID NO: 383652 - DNA, 360 bp, Salmonella enterica
atggaagctgtagaaccttatcacaagcgcgcgatagagaactggcacgacaccactgtagattgttcagaagattcattttggcttgatgtcaaaggtgactctatgaccgcaccggcaggattaagcattccagaaggaatgataattctggttgatcccgaagtcgaaccaagaaacggcaagctggttgttgcaaaattagaaggtgaaaacgaggccacattcaaaaaactagttatggatgcaggccgaaagtttttaaaaccattaaacccacaatatccgatgatagaaatcaacggaaactgcaaaatcattggcgtagttgttgacgcaaaactcgcaaatcttccataa

SEQ ID NO: 383653 - DNA, 336 bp, Salmonella enterica
atgacggttatcacctacgggaagtcaacgtttgcgggcaatgctaaaactcgccgtcatgagcggcgcagaaagctagccatagagcgcgacaccatctgcaatatcatcgattcaatttttggctgcgatgctcctgatgcttctcaggaggttaaatcgcatcgtgttgacagggtaacaaaagcagtttcacgtgccgggaacaaggttaagcaagagaaagtagagcgcaagcagaaccgaatttactaccacgatgctaatccgctcggaaataaaatccacgccgtacagaagcagcgcggaaaatcaattccggcttattacgattga

SEQ ID NO: 383654 - DNA, 1509 bp, Salmonella enterica; identical to SEQ ID NO: 167468

SEQ ID NO: 383655 - DNA, 204 bp, Salmonella enterica; identical to SEQ ID NO: 25096

SEQ ID NO: 383656 - DNA, 606 bp, Salmonella enterica; identical to SEQ ID NO: 25097

SEQ ID NO: 383657 - DNA, 270 bp, Salmonella enterica; identical to SEQ ID NO: 25098

SEQ ID NO: 383658 - DNA, 219 bp, Salmonella enterica; identical to SEQ ID NO: 25099

SEQ ID NO: 383659 - DNA, 558 bp, Salmonella enterica; identical to SEQ ID NO: 25100

SEQ ID NO: 383660 - DNA, 852 bp, Salmonella enterica; identical to SEQ ID NO: 25101

SEQ ID NO: 383661 - DNA, 147 bp, Salmonella enterica; identical to SEQ ID NO: 25102

SEQ ID NO: 383662 - DNA, 387 bp, Salmonella enterica; identical to SEQ ID NO: 25103

SEQ ID NO: 383663 - DNA, 1728 bp, Salmonella enterica; identical to SEQ ID NO: 25104

SEQ ID NO: 383664 - DNA, 279 bp, Salmonella enterica; identical to SEQ ID NO: 25105

SEQ ID NO: 383665 - DNA, 264 bp, Salmonella enterica
atgggatacgacgcttccggtgttgttgaagcaaccggaccagaggtgacgctgttcaggccaggtgaccacgttttctatgccggtgtgctcgatcgccagggagccaacgcagagtttcagctggttgacgaacgcattacggggataaagccggcagcactaagttttgaagctgcagcgtcggttcctctgaccggtctgacagcctgggaaatgttatttgatcgtctgcagttgtcagtgaacggagatgctgattag

SEQ ID NO: 383666 - DNA, 525 bp, Salmonella enterica; identical to SEQ ID NO: 130254

SEQ ID NO: 383667 - DNA, 246 bp, Salmonella enterica; identical to SEQ ID NO: 81405

SEQ ID NO: 383668 - DNA, 915 bp, Salmonella enterica; identical to SEQ ID NO: 81402

SEQ ID NO: 383669 - DNA, 537 bp, Salmonella enterica; identical to SEQ ID NO: 81401

SEQ ID NO: 383670 - DNA, 591 bp, Salmonella enterica; identical to SEQ ID NO: 81400

SEQ ID NO: 383671 - DNA, 408 bp, Salmonella enterica; identical to SEQ ID NO: 81399

SEQ ID NO: 383672 - DNA, 561 bp, Salmonella enterica
gtgaaagagaatcaaatccgggagcttgtaaacgagctgcatgatattgctattgagtatcacggcacacaacagttacgtgaacgaattgcgcgtacagttcgcgccgccctgcatcatgacttagaaaaactaaaccaacctgtaagccaaacttacgagttgccagaattaatcgaaggcatggaggtgtccattgatgtcagcacttgtgatgctgatgccgggaatcgctatttcggtactgtcaccgaggtatcagaactggacacagcaaagaatggctacattcttctggttcaggacgctgaaccaaatttcgatgtgaatggcaactctccggtaattccggatggctggataagctgtagtgagcgaatgccggataatgatgaatctaaacccatcgcaatttttaccggaaaatgtctgggtcaggggatgttcgttgctacatacgacgatgatgggttctttgactattgggagggtatggaaattatcggtgtaacccactggatgccgctaccggagccaccgcaggaggtgaaccgtggctaa

SEQ ID NO: 383673 - DNA, 393 bp, Salmonella enterica
atgaccactattaccagagaacagcaaaaacagattttaattgatacagcgaaccacgtaatcagtcgtgataacacgtcaccgtatagcgaaaacctgcgtgaactggcgcgtatcgcgctggcatcgctcgaagcggagaaaggtgccgaccccgttgtgttcaccgacgaacgaaatcttcatcatattgccaggggtcgagaaacctctttgatttggggtaaacaaaaccaggaggtgggggatatcccgctctatcgtcacgcccagccagtgccggtagtgcctgatgaaatggcgacatctgatgacatgaatctttatcaaaagagctttgcgcaaggctataacgcctgccgcaatgccatgctcaacggaggtaaatcgtga

SEQ ID NO: 383674 - DNA, 330 bp, Salmonella enterica; identical to SEQ ID NO: 119089

SEQ ID NO: 383675 - DNA, 3276 bp, Salmonella enterica
atgactctacgattgcagacggaatcacccgctgaccaggatatgtttagaggcagcagtcatgaaaaagttgcagagaatgtggctcagatcatcaggacacctgatgtcaatattattggtctggaaggtgagctgggttcaggtaagtcaacaatattgaagttcctgcagaaaaagcttaaagatgattttacgttcattaactttgatgcagaacgttaccatcatggctcaactaaaaaagcgcttatcgatgtcatccaccacggggtcagcctacaatgtccgggctcccgggatgtgttggataagtataaaaatctggctctgggtaacatcgttgaatacgacaagagggtcagcagcaggctaagctggttgaccgtcgtttttattttactgtcattgctttccgtgcagatgcttcgttatgtgctaacagaccttaatcaatattttactaacaaggagtcattattagggtggcttttttatgttgaggtggccgcgtttctttctcctgccattatggtcgcaggactggcatgcctgcagaacatggaatggtacagaaagaaagggtattcgagtattggtgatttgttcaaacgcaacagtactgacaggattgaagagacttggctagttaataaggaggtcggagctattgagctggctgaagctctgcagggatttacctccaaagaggtcatttcccatggagatcgcttcatccttatcattgataatctggaccgaatcagtgcagacaaagtgaaagagctctggagtgatatggagcttattgccggagccactcatgaacacttcaggatagtggtgccctattcggcaagacaggtttcagcctcactttctgtggcgggtttcagcgggcgtgagtttattgcaaagcggattcctgtaagttttcaggttcctcctcttatttcggcaggatggcaggaagcgttaaggcagtactggaaagaaacagtaaatgaggatgcagggatagcgtgccgggaagcaacggtgttgcttgagcgctggaaaccctctgagtatcctcgtatcacaccgcgattaatgaagaagtttgttaatgatattcatattctgaaccttaccgttcctgcaacagaagatcatcgccatattcttattgctctctacttactggtggtcagatacggggagcgagatattaaagtattacttcgcgatcccaaagctagtcagaccgaacccggtattgctccggatgattttgacgagatgctctcgctaacttatcaacaaatatcccgaatttttaataacgatacagaaagatggagcgaatttctgatgagcatccactatcagtccacggtggagcttgccaggagcgagttgcttgatacgcctcttaaagacgcgattggtgctataaatatcccacggcttgaagaactgacggccttgtggggtttcgctgaagcatggcagcgagtggcaccacatattcagatgcgagactggctggtttcttatagccggatggatgagaagtgtcaggctctcgccgaaccgcaactcaaagtcgcagtgcaaatgctgaatcagagttatgctgtttcactcagagaaaagaatgatgaaggtttcgtattgagtctgcagaaactgatggctgacgggcggataagcctagagcctttcgtcgaaaggcaaatatcgtttattgtgagtaaacttgatgaaattcaggattcagaaaaattggaggctgaatccacgcagacgttgctgcaggaagctgattcatactctgttctggccggtgaatcactactgaataaaatggagaattttgtagatggcgtattttatgtggaataccttgtcaataatgaagagaccttgtcaaacctgaaaattggcacactagatatcggaaatcacggtcgggaggagatgttacgctatggagctgagcaacctcagatagacctttttaatccgggaattatccggcatatcaatattgcatcgaaggcggtacagaacgtaattggaaagaatgatggtacaggtggggctcaggttagctctgcaataatgacgcttaaaaatcgtcaggttgttgaggacgttatccatttcagaaaaattgttctgagcccggactggaataataatgttttaaatcaatattatcttaataatacggcgacgaggaatctcttccctgcggaatttgctgcacaggctgttgctcacatggtgctccatggtaactatgccggtatcgagtcgtacagtgaacatattggtgaggaacggtttgacctggctttggctgcatatcttcgttatctacgtactgccgagagtatctttatagcacttaaggataaaaatgttctgccgtacatcaaaaatgctgttggcgggattgttgatttaggtcttctggtgaatatacctgtcctgagctttgttaaaggtcagtatgacgtcatcaaagaagctacaaatgcaacctctcttttaatatttgtgcgagagcgtcaaaaagcactgtcagagaaaataattgagtctgatgtgaatgctatgggtccagtatttctccatgacgtatatcagtcaggtgagcagtttgatattttgaagaaaaagctgaacgccctggcatgtggagtatttagttcttctgaaaggcttattgagtgttttacggttcttcctgtgaacatgcgctttatccttgaacaaatgcaacttcaggggcagcatatccggatggaaggtagtgtgggtatctttgcatcatggttccgtgatgcagagccagacgttgtcacaaatgccgagaacattcatttcctgtggtcttgcctcgacgatacccagagagagactgtacttgatgagttgcacgatgtcttacttgaaagacatattcgtattgacagccgtattgcgattattacccgttttcataatgagttgtcgtttattgaacctgagaaggccgttgaacgcagggctattgcggcgctgtttagcgcttctgttgataatgtattattgtctcaatggcttgaccgtcagacgttttcattttcatcatggtctccggaggacgcccgtacggcaacgagttgtataatgaataactcggagatttttcctctcatctgcaggaattcacagtatattaaaaacagaatgttaccagagaaagcggacgttacagaagatagtgatacgtttccggactga

SEQ ID NO: 383676 - DNA, 207 bp, Salmonella enterica; identical to SEQ ID NO: 184276

SEQ ID NO: 383677 - DNA, 444 bp, Salmonella enterica
ttgaagagcacagtcagctacacagccatgcgagtaaaacaatatggtggcgtcccttcagtagaagttcagtgtatagattcacgcaccaaaataaaatctgattgtttaattctgttcaaaacacttgatgaagtaatcttcctgggagcagaaaacctacaccctcttataaaagcagaaatgagacagtgcgcactaaatgcactacaggaaggaaaagggaaattacaaatagaagcaaaacaaactttaacagaacttgaaagcagcagaaaaagacaagccaatagagcaagacagttccatgatgctatagccggatggagtagagaattactttcattaaacgttgatattcaaagaggactggatactccaacaataaggtcgagaataggaactttagcagaaagcatggaaaaacttaaacctaaaaaatag

SEQ ID NO: 383678 - DNA, 204 bp, Salmonella enterica
gtgaaaagtgaggaagagttctttgcggagcttcacccgcaggtggttgaggttctcggtacggcgctgatgcaggtactggtagagcagcgcgaaccttcgcgtgaagccctgattgagatgattcaggtactgtggcaggaagaggatgtggacttggctgtagaactggctattgatgttctgaggctgccgaaagagtag

SEQ ID NO: 383679 - DNA, 711 bp, Salmonella enterica
atggttcagaatgaaaaagtgcgtcaggaatttgctcagcggctagcgcaggcctgtaaagaagctgggttagacgaacatggtaggggaatagccattgctagagcccttgatgtatcgtcaaaaggtgtcagcaaatggtttaatgctgagtctttgccgcgtcaggaaaaaatgaacgctctggcgaattttttaaaagttgatgttgtttggcttcagcatggttctgtaaggcaaagtacaactacagatccacaatctttaacttttgttggtcagttgagaaagggacttgttcgagtggttggagaagctattcttggcgttgatggcgctatagaaatgactgaagaacgtgatggatggttaaaaatatatagtgatgacccagaagcctttggtttgcgtgtaaaaggcgacagcatgtggccacgcatcaaatctggtgaatacgttcttatagagccaaacacgaaagtatgtcctggtgatgaggttttcgtaagaactatcgaaggtcataacatgattaaggtgcttggttacgaccgagacggagagtatcagtttacaagcatcaatcaagatcaccgtccaattacattgccatattatgaagtatccaaggtggaatatgtggctggaattttaaagcaatcacgacaccttgatgacatagaagcaagggaatggttgcgtaataattaa

SEQ ID NO: 383680 - DNA, 228 bp, Salmonella enterica
atgcaaaatcttgatgagccgattaaaggtatcggcatcccagaagttgctagggcttgcggagttagcgagagagcagtttataaatggctcaaaaatggctttctccctaagactgaattttttgggaaaacaagatacgcctcaaaaattgaagaaatttctggggggaagtttcaagcagttgatttacttgaaataagtaaaaaaaatcttttatcagcataa

SEQ ID NO: 383681 - DNA, 1005 bp, Salmonella enterica; identical to SEQ ID NO: 31749

SEQ ID NO: 383682 - DNA, 1005 bp, Salmonella enterica; identical to SEQ ID NO: 31749

SEQ ID NO: 383683 - DNA, 189 bp, Salmonella enterica
atgaaccgccaggaatccgccgttctcaacatggctaaatttatccgcgcccagacactcctcctgctggaaagaattgacctgctcgacttcgatgacgaagcgacagactgcgaacagctgcatgagcaggccgaagcgctttaccggaagctcagcgcccgactggaatcagacataacggcttag

SEQ ID NO: 383684 - DNA, 438 bp, Salmonella enterica
atgagcaccggctactgctggaacgctgcgggggtacacagctttctgcatgggtgcgcccgtctgctatgtctgttcctcctagttttggtgggtgcttatatctctactaaatggcataacatgtcactactaaccgcgatgctaaagcgggctgtttttcacagtattaccggcccccgtgccggtttttttcttaccggaaggggcttcgtgtttattgatgttctgattttcggagggtgtactgatcgccttgccagggacgcgaggaaggacatatttacgacgaggtactttctgtatttcagggaaggtgtggcagatgagctgacccagatatatttctggcgtgtcgttagtgcattatatcccggggcatttaaccgtattgattacctccctgattctcgtaaataccgtctctggttatcctga

SEQ ID NO: 383685 - DNA, 543 bp, Salmonella enterica
atgattgatgtttggaggaacaattataatttcccaataatatatcggcgtaatagcgttaaccttgggccagataggaattttcttgcttcagtatcccttgcgaatggggattattgttggatatttggcagtgatgatgctcttgcgaaagactcgttagcgatattacaaacttatctcgattctcaagcagatatatatttatgtgacagaaaagagaccgggtgtgatttagttgagattagaaaccctcatcgttcttggctcagaacagatgatgaactttatgtgtttaataataatttagatagggaaatctatctcagtagatgcttatctattggtggtgtatttagctatctaagttctttaatagtaaaaaaagaacgatgggatgccattgattttgatgcgtcctatattggcacttcctatcctcatgtatttatcatgatgagcgtatttaatacgccagggtgccttttgcattatatatcaaaaccactcgtaatatgcgagcatttgaaaatgttttgctaa

SEQ ID NO: 383686 - DNA, 279 bp, Salmonella enterica
atggaactcacaagcactcgcaagaaagccaacgcaattaccagcagcatccttaaccggatagctattcgtggtcagcggaaagtcgctgatgcgttaggcattaacgaatctcaaatttcacgatggaaaggcgatttcattccaaagatggggctgttattggcggttctggagtggggtgttgaggatgaagaattggcagaattggcaaagaaagttgcgcatctgctgacaaaagaaaagcctcaagactgcgggaacagttttgaggcctga

SEQ ID NO: 383687 - DNA, 156 bp, Salmonella enterica
atgagagtccaactaatgagggcaatgtatcgatctgagtatgagattgctttgtggactaaggcagaaatgagccttctaaggctgatccttcttcaagattttgatgagttcgatttgctgttgttcagacatgttagcgatcaggcgagctaa

SEQ ID NO: 383688 - DNA, 387 bp, Salmonella enterica; identical to SEQ ID NO: 377287

SEQ ID NO: 383689 - DNA, 1080 bp, Salmonella enterica
atgattgataaaaatttttggcaaggtaaacgtgtattcgttaccggccatactggctttaaaggaagctggctttcgctatggctgactgaaatgggtgcaattgtaaaaggctatgcacttgatgcgccaactgttccaagtttatttgagatagtgcgtcttaatgatcttatggaatctcatattggcgacattcgtgattttgaaaagctgcgcaattctattgcagaatttaagccagaaattgttttccatatggcagcccagcctttagtgcgcctatcttatgaacagccaatcgaaacatactcaacaaatgttatgggtactgtccatttgcttgaaacagttaagcaagtaggtaacataaaggcagtcgtaaatatcaccagtgataagtgctacgacaatcgtgagtgggtgtggggctatcgtgagaacgaacccatgggagggtacgatccatactctaatagtaaaggttgtgcagaattagtcgcgtctgcattccggaactcattcttcaatcctgcaaattatgagcaacatggcgttggtttggcgtctgtgagggctggtaatgtcataggcggaggcgattgggctaaagaccgtttaattcccgatattctgcgctcatttgaaaataaccagcaggttattattcgaaacccatattctatccgtccctggcagcatgtactggagcctctttctggttacattgtggtggcgcaacgcttatatacagaaggtgctaagttttctgaaggatggaatttcggcccgcgtgatgaagatgcgaagacggtcgaatttattgttgacaagatggtcacgctttggggtgatgatgcaagctggttactggatggtgagaatcatcctcatgaggcacattacctgaaactggattgctctaaagcaaatatgcaattaggatggcatccgcgttggggattgactgaaacacttggtcgcatcgtaaaatggcataaagcatggattcgcggcgaagatatgttgatttgttcaaagcgtgaaatcagcgactatatgtctgcaactactcgttaa

SEQ ID NO: 383690 - DNA, 225 bp, Salmonella enterica
atgatcaatggtggtttctttgtgttgaatccatcggttatcgatctcatcgataacgatgcaacaacctgggaacaagagccattaatgacattggcacaacagggggagttaatggcttttgaacacccaggtttctggcagccgatggataccctacgtgataaagtttacctcgaagggctgtgggaaaaaggtaaagctccgtggaaaacctgggagtaa

SEQ ID NO: 383691 - DNA, 264 bp, Salmonella enterica; identical to SEQ ID NO: 383665

SEQ ID NO: 383692 - DNA, 204 bp, Salmonella enterica; identical to SEQ ID NO: 383678

SEQ ID NO: 383693 - DNA, 522 bp, Salmonella enterica; identical to SEQ ID NO: 380423

SEQ ID NO: 383694 - DNA, 342 bp, Salmonella enterica
atggattattcacagttaagtgattttgaaattaaccgaatggtaggagacataatttttaaaggcctttgggcatgtaagccggaaacgtcagggaataacaccaacaaatggtattacggaaacgctgatacaacttttgagccattaaaccatttacctgactactgcaatgatccgagtgcctcatggccgattattgagaaacacaggatttctatcttagaccagttaactgaatggtgtgtggatgcaaaaggcgtaagcccaatatttgataccagacctctccgcgccgccatgattgtctttctcatgatgcaggacgccaataatgcttag

SEQ ID NO: 383695 - DNA, 291 bp, Salmonella enterica
atgggcggagtggataaatttttttcctaccgcgcagcaccaggtaatatcaaagatggcctggatggcttccgcaatctctctaagctcaccacctattacaattccgcacaagagctggtctttaatttcagggcaatcagcattaaagccattgaatacaaatttggcggtaaaacctctatcaaaattaccggataccccgccctgcgcaggatactgaccggaacccgctacggcgcagggcatcctcagatgctggaaatggcatggggtaaacgtgggctttaa

SEQ ID NO: 383696 - DNA, 237 bp, Salmonella enterica
atgtcgggggtagtgattggggtgctggttactggagtattggcaatatctagtgtgccagtagtattcaccactcttggcattattattgtaggattatttttcaactatgcattaaattacctggacgataaaatagagctatcagcctcattaaaaaacaaacttcgcgactatcttcaccatagtaaacatgaaaattatgtttttaatagccattatttttattctttttaa

SEQ ID NO: 383697 - DNA, 1020 bp, Salmonella enterica
atggaaaggatgattgcgctggacggtgcgcagggagaaggcggcgggcagattttgcgctcggcgctgagtttatcgatgataaccggccagccgtttgagattagcggcattcgcgccggtcgcgccaggccggggctgctgcgccagcatttaacggcggtgctggcggcgaaggaaatctgtggtgccgaggtcagcggtgatgaactgggttcgcagtggctgcgttttgcacctgggaaggttcgcggcggagagtacaaatttgccatcggcagcgcgggtagctgcatgctggtgctgcaaacggttttacctgcgctgtggtttgcagatagcccagcgcgcgtagaagtgagcggggggacgcacaatcagtcagctcccagcgcggattttatttgccgcgtctgggagccgcagctggcgaagatgggcataaaccagcacaccaccctgataaaacatggtttttatccggcaggcggcggatctgtgaccactgacgtcgagccggtcaaggcgttgggcggactacagctgatatcgcgcggcgaaacggtgaggatgaccgctgaagcgctgctggctgctgttccttaccacgttggcgaacgtgaagtgatgtcgctggaagcttatcttccgctggcggataaaaaggttcgggtgctggaaggcggcgccgggccgggaaatacgctgtcgctgaccgttgagtgcgggtatctcacggagctgtttattgcctttggcaccaaaggcgtgagcgccgaaaaggtcgcgcaccagctggcatcggaggcaaagcgctatctcgcaagcccggcggcggtgggggaatatctggctgaccagctgattttaccgctggcgctggcgggagatggttcgtttaccgtggcgaaaacgtcagcgcatttgctgacgaatatcgcggtggtcgagcagtttcttccggttcgattttcctgcgagccgctcgacggcggctatcttattcaggtacggggttaa

SEQ ID NO: 383698 - DNA, 546 bp, Salmonella enterica
atggaagaggttaaattatatgtggaacgggtaggcgtagacccggccagcggcgctgatattcgtattgcacgccgtgaatcccctttgtggcataaagatattgttgctgagctgattaatcaggtcctccggtgtggtgcagcattaatcatcgtcgttgtgctgaccgcctgcgatgatcgcctggtaagctatttttctgattatgccgccatacccgagcaatcaggtatctggacctggctgcctgtgttctttccatcgtccgccagtgaaataaaaatgacgtttaacctggacagcaatcttttttatgctgactttagcgtggccgacggtgataaacgcgcgcattttgaaagcgtgctgggggaggagagcgtggttcattatgccaacttttctcataaaagctggtgtaaaacggggaaaactctctggaatagcgaagcgcgggcaaaacccttctttattaccaaaataagtgtcgatcgctaccgtatcactgatcatatgcctaactgtacaaaacccggcgaatga

SEQ ID NO: 383699 - DNA, 1161 bp, Salmonella enterica
atgagtgatatcgtctacctgacggttatcggtgagcaacagggcgcgatttctgccggatgtgggactgagtcctcggtaggcaaccgctggcaaatcacacacgaggatgaaattttcgttttttcgctctcgaacagcatgaccaatactggcaagggttctcaacttcatgggctgcgcttctgcaagctaatcgataaaagtacgccattatttacgaatgctattaacaacaacgagcagttgtatatggagttttatttctaccgcatcaataggttcggcaaatgggagaaatattattatatacagcttcggggcgcatttttatcagatattcagtgtctcttcagtgaaaatcgtttacatacggaaaccattaacgtcagctatgaatatatcctatgcaaacatctcattgctaacaccgaattcagttatctggcgttgcccgaaaattacaaccgcttgtttatcccccagccaaaaaaatccactgatagcggcctcaagacgttaaacagcaaagcggttggcaggctgctcgctgctggaggcatttacaacgggaatatagaaggattcagggacacggcggagaagctgggcggcgatgcacctgcgggttacaagcaggtgcttaatgaaaaaacaattggactgggtattgctgctgcatctatccttttttcaagaaacgcatctaagattcaagatattaataaatttagagataaaataagcaaatttaacggtaaatcagcaggaacaatccgaaatgttaatcccggttatcccaaaatcggatatacccataattgcgttaactgctctatcgctacagatgctaccctggcaggacatccagcatcagcattacccatcaactcaacaaaaggtgttcctctctcagtattagagaaattttataatggaaaattcaaacccatgtcatctgttgatgaaataattcacgcgatggataatgctaattcgggcgccagaggaattgtttatggttcgtatggttcgggacagccagggcatgtctttaatgttgtaaatcaaaataatacaatcagatttttggacggacaaacggggaacgccgccgatcttaatcagttcaaatcgtttcagctattgaggacaaactag

SEQ ID NO: 383700 - DNA, 279 bp, Salmonella enterica
gtgatcacttacgaagaagctataaacaaagccaataagtatctttacgatgcggatactcctgtcgtcatcacactccacggaagatttacagaaggttggtttttttgtttcgaatccagggagtatctcgaaacaggagacaacgcctcccgcctggttggaaacgctcctttcatcatagataaagacagcggtgaaatcgttgagttaggtactgcctggccgctggaaaaatatttaaaagactacgaagagagcaaaacaacaagaagctaa

SEQ ID NO: 383701 - DNA, 174 bp, Salmonella enterica
atggttctgaatcgcacgctgtccatgaaaaaaatcccggggttcagcaatgtcgttaatactgtgaataaattcgctagcgaaggtctggtaactatcgaaataatgggcataaattcatgcctggctaccatgtctttgcacagggatacagataaaaaaagagaattttga

SEQ ID NO: 383702 - DNA, 216 bp, Salmonella enterica
atgtgcataaacggtattgtcattgagccgccgtcgcagttttcagggcagattggctattttttaacgaaatgtgctactttattttttgtaacatatcaggtgaaaaacagatatttcctttgtgacgcgccaggcgtactcttctttgaattaatattcaaattagtattgtcttctcgccttaataagatattccttaaattaaagcgttaa

SEQ ID NO: 383703 - DNA, 438 bp, Salmonella enterica
atggatagtaaaacatcgacctattcaccggcttttaatattgtctcgtggatagcgcttattggcggtattgcggcttatttggttggtttgtggaacgccgatatgcagttgaatgaaaagggatactactttgctattttggtgcttgggcttttttcagccgcctcataccaaaagacggtacgagatagatatgaaggtatcccgacgacatcaatttattatatgacctgccttatcgcatttattatcgcagtggcattactggttgtgggcttgtggaacgccacgttactgttaagcgaaaaaggtttttacggtctggctttctttttgagtctgttcggtgcggtggccgtacagaaaaatatccgtgatggtggttttgaacaactgaaagaacctgtcgtggcggcagaagatcttactgagtga

SEQ ID NO: 383704 - DNA, 372 bp, Salmonella enterica
atgaaaattccggcgtttatttcacggctattgctcattgttggcgcagctatctacattattggtctgtggtattcctgcccactacttagtgggaaaggctattttcttggcgtgctgatgacagggatgtttgtcacatacgcttatttacgcgaggaaatgcgcggacgattggacgatagatttacgtccgtgtgccagatggtgatgttgatcaccgttgggctattagtggttggcgtatggaatgcaccattattgccagttgaaagagtggtataccttgtggcgtttttcatctgtttactggggcagttcttgctaatacgctcatcggaaaacaacaaaaccgaacttattgaaaaatga

SEQ ID NO: 383705 - DNA, 684 bp, Salmonella enterica
atgaaccaaaagaaaaccctattaagtgtgttaatgatactgccactctgggcgttgacagggtgtgactattttgaaaaagcgaacctggtcgacgctctcgccaaacagcaagagttgcaaaaaagtaaaatcgagcaacttgaaaagcaacaagaacaagataaacgtaaaatagaagtttttgaaaaacaacagactacgatcataaacagtaccagaacgcttgctggcgtggtgaaagcggttaaagacaagcaggacgaatttgtcttcacggaatttaacccgacacaaacgaagtacttcattttgaataatggctcagtcggtttagcaggccgggtgctggctattgatgcggttgaaaatggcagtgttattcgtatttcactggtgaacctattaagtattcccgtatcaaatatcggctttcatgctacatggggcaatgaaaaacccaccgatgccaaagcactggcgaaatggcaacaattactgttcaacaccaccatgaattccactctgcaattaatgcctggtcaatggcaagacattaatctgacattaaaaggcgtttcgcctaataacctgaagtatctgaagttgtccatcaatatggccaatctccagttcgacactgttcaacctgctgaaactcggcagcgaaaaaacaaaaaataa

SEQ ID NO: 383706 - DNA, 4293 bp, Salmonella enterica
atgaacaaaatatttaaagttatctggaatccggcgacgggcagttacagcgttgccagcgaaacagcgaagagccgagggaaaaagagcgggcgcagtaagctgttaatttctgcactggttgcaggtgggttgttgtcgtcgtttggggcacttgcgaatgccgggaatgacaacggccgagccactggatcaataccaggaagtggctgggttgctattggtgagggtgcacaggcaaaggcctatacaaacgtagatggagccagtactgcagtaggttataaatcaaatgccgaaggaagctggacctctgctattggcgcacttacgcatgcaattggtgatgcttcaatggcattcggggttaatgccgtctcaaccggtcaacgaagtatcgctatgggcgcatcctcaagttcagtaggggagtattcgatagcgctcggacgatatgcgagttcgggaggtaatttttccatcgctcaaggggatagatccagtgcggctggtgcgaatgccactgcagtggggagcaacagtagtgcggctggtgcgaatgccactgcagtgggtaatgccgctaaagctaccgatataatgagcatcgccttcggtaactcagccaatgcgtcaaaagcgtattcaatggcgctgggagcaagtagcgtcgcatctgaagaaaatgcgattgccctgggccgtagcagtgtagctagcggtaccgacagcctcgcattaggcagacaatcacttgccagtgcagcgaacgctattgctatgggggcagaaagcaaagccgctgaaaatgcgacggctattggcaataaagcagaagcaaatggagcgaatagcatagcgatgggctccgggagccttgccaacaatgacaattctattgtattgggtaacggtagccaggccctggcagatagggcaatcgccataggtcagggcaacaaggctaatggcgctgatgctatcgtcctgggtaatggtagccagtcgagcggcttaaactctgttgccttaggcaaggccagtgttgtaactggcgataatagtcttgcgcttggtagtaataccaatgccaatggtattaactctgtcgcgctgggcgcaggttccattgcggatctagacgataccgtttctgtcggcaatgactcattaaaacgcaaactcgttaatgtgaaaaatggcacgatcaaggctgacagctacgacgccattaatggctcacagctttatgccatcagcgactcgatagctaaaaggcttggtggaggggcatcggtaaacgttgacgacggtactgtcaaagcgcctgcctacaatttaaaaaatggtaataaaaataacgttggcgatgcgctcactgtacttgatgaaaacaccctgcaatgggatcaaaccaaaaacaaatacagcgccgctcatggtaactcaagtgtcagtgtaatcactgatgtagcggatggcacgatttcagactccagtaaagacgcagttaacggttcacagcttaataccgtcaagaacgatgttgctgacctggctgaagatgccctgcagtgggacgctaacgttggtgcattcagcgcctctcacggtactacagctaccaacaagatcaccaaccttgctgccggtaccgtttctggcaccagcaccgatgcgatcaacggctcgcaactctatggcgccagcagttccgtagtaaatgccctgggcggcggttctgtggtaaatgctgacggtagcatcagcgcaccaacttactctgttgctggtggtgattacaataatgttagcgacgcactgacagcgatagatgatgacatgaatgtcatgggcgatacggtaaccgaccttgcccaggatgccctgcaatgggacgataatctcaaggcctacagcgccaaacacggcgctgtaaccaccaacaagatcaccaacgtggccgacggtgatattaacgctaaaagcaccgatgcgatcaatggtacccagctatacgacttaagcggtgaaatcgcctcttatttcggtggtggtgccgcagtcagtgataccggtgaatttactggcccaacctatacaattggtagccaggattacaccagcgtgggtgacgcgctgaatgccattaacgcatcgtttaatacgtcactcgatgatgccctgctctgggacagtaacgccggtgcgttcagcgcatctcacggcacttccaccgccaacaaaatcatcaacgtcgcgaatggtggcgttaatgccaccagcaccgacgcggtgaatggcggtcagttgtatggcgtaagcaattcagtcgccgatgctcttggcggcgatgccaccgtgaatgcagacggtactatcagtgccccgaattacacgattgccggtaacagctataacaacgttggcgatgctttggaagcgatcgatgatgaagcactgctctgggacgaagacaaaggggcatttaacgccgcccacggtactgagaccgcaagccgaatcactaacgttgctgatggtgatatttctgctaccagtaaagacgcggttaacggatctcagttaaacaccactaacatgatgatcaaccagaacaccgcgcttattaaccagctcgccggtgataccagtacaacctacattgaagagaatggtgccggtgtgaactatattcgcaccaacgacaccaatctggcctttaacgatgccagcgcttccggtgaaggcgctaccgccgtcggttacaacgcatcggcttctggcaacagcagcatcgccattggtcgggacagcagcagcaccgttgataccggtatcgccttgggtagcagctccgtttccagtcgtgtgattgtaaaaggctcacgtgacactagcgcaaccgaagatggcgtagtcatcggttacgacaccacggatggtgagttacttggtgcgctatcgattggtgatgatggcaaataccgtcaaatcatcaacgtagccgatggatccgaagcacatgacgccgttactgttcgccagttgcagaatgcgattggtgctgtagcgacgacgccgaccaggtattaccacgccaactcaacggcagaagattcactggcagttggggaagactcgctggcgatgggtgcgaaaactgtcgttaatggtaacgcaggtattggtatcggcctgaatacactggttctgacagatgcaatcaacggtattgctatcggtagcaacgcaagtgcaaatcatgccaatagtattgcgatgggtaatggttcgcagactacccgtggtgcgcagactggctacaccgcctacaacatggatgcgccgcagaactctgtaggtgagttctctgtcggtagtgaagacggtcaacgtcagatcacaaacgtcgctgcgggttcggcggatactgatgctgtcaacgtgggccagttgaagataaccgatgagcgcgttgcgcagaacacccagaacatcagcaatctgaataatcaaattggtagtctcgatactcgtgtcaccaatatcgagaacagtatgggtgatatcatcactacgggtagcaccaagtactttaagaccaactcgacaggtcctgatgcgaatgcgcagggcacagatagcgtcgcaattggcgcaggttccattgccgcagcggataacagcgtggcactgggtgcaggctccgtggccaatgaagaaaacaccatctctgtgggttcatccgacaatcaacggcgtatcaccaatgttgcggcgggtaaaaatgcgaccgatgctgttaacgtagcgcagttgaaagcgtctgaagcaggcagcgtgcgttataacaccaacgaagatggctctgttgattacagcaatattagcctcggtgacggtaaaggcggcaccacacgcatcagcaacgtttccgcggcggttaacgacaacgacgccgttaactatgcgcagttgaaacaaagcgttcaggaaacgacgcagtacaccgatcaacgtatggctgagatggatcacaagctgtcgaaaactgaaagcaagctgagcgggggtatcgcgtccgccatggcaatgaccggcttaccgcaggcctacacacctggcgccagcatggcgtctatcggtgggggtacctataacggtgaatccgctattgcactgggtgtgtcgatggtgagcgccaatggtcgttgggtctataaattacaaggtagtaccaacagccagggtgaatactccgctgccgtcggagctggtattcagtggtaa

SEQ ID NO: 383707 - DNA, 417 bp, Salmonella enterica
atgcaactacagattaccgatacgattaccgaagacgatcaaaacgcgctgctgagcggattgcgtgcgtacaatcgccagtttctcagaaccaccaattttggcgacctggcagtgtactggcgcgatgagcacaatgaaattctgggcgggttgatcggcaaaattaaaggcgaatggttgtgcattgagtttttatggatgcatgattcgctgcgtaaaggcggctacggcacaaaattgatgcaggcggcggaacaaaccgcgcgtgagagagggtgtctgtatgcgctggtggatacgatgagtttccaggcgctgccgttttatcagaaaaacggctatcaactgcaaatgaccctcgataacttcccggaaaccggtgccgcgcgccattatttgtcgaaaacgttttga

SEQ ID NO: 383708 - DNA, 294 bp, Salmonella enterica
atgaaacgagccatttttccgattattgccgtccttttaacgctacccgctctggcgcaagccgactcagcgtatggcggtctgcaggctgtacacgaaaaaaataccgtgctgaatgacttacgtaagatttgcaccccgcaagggtcgccgtcggatgaggtgtgggaaaaaacaattatggctgatacgcgcaatcaacagcacattcgcgaagccattctggcaatacaaagaaacaatcagaacaactactgggaagcgcttggcaaagtggaatgcccggatttatag

SEQ ID NO: 383709 - DNA, 513 bp, Salmonella enterica
ttgctggggattaactattatcagccgcgccgcgtgaaatgccgtgatacggcggtgaatccgcaagcgccgtttatgccggagtggttatttgactattacgacatgccggggcgcaagatgaacccttaccgcggctgggaaatttacgcgccgggaatttacgacatcattaccaacctgcgggataattacggcaatccgcgctgttttatctccgaaaacgggatgggcgtcgagaacgagcagcgttttgtgcaagcgggacagattcacgatgattaccgaattgactttatctctgagcatcttaaatggctgcataaaggcattagcgagggctgtcactgtcttggctaccacatgtggacctttatcgataactggtcatggctgaacggctataaaaatcgctatgggtttgtacaactggatttagccacccaaacgcgcacggtgaaaaaaagcggagaatggtttgcccataccgccgaaaataatggttttgattga

SEQ ID NO: 383710 - DNA, 297 bp, Salmonella enterica
atgcccgtttttgctgacatggcgcatctctaccagctctttgttattaatgagtgccgttatctgatcttcggtcaggcaagcatagtgttttgcgaactcacggaaacccgcgagttcgcgatagcgaatgttggccacctcctgtttggcatacaggaaggtgtaaaaccaatgttcgcctccctttgccagcacgattgcgcgatcgcggttttgattgagacgttttttataaaccccgccgccgcgattatctgcttttccctgcagtacggcgttgacggcctcgcttaa

SEQ ID NO: 383711 - DNA, 747 bp, Salmonella enterica
gtgactggcgcaagccaggggatcggacacgccatcgcccaggtatttttaaaaaacggcgatattgtggtgggctgcgctttcagtgcaccagaaaaagcgatacaggcgaaccaacttagagagagttatccggaacattttttttattatcaagtggatgtatcagatactgcgcaaattaaggcgtttgttacagaagtcgagcagcagtttggccgcattgatgtggtcgtatccaacgccggcaaaaatgtctttaaaggtatcgattgtgaggaaagtgactgggagcataacttcaatcttaacctgcgctctcactggtatctggcaaaatgtgcccgccagatgttgcaaaaaagtcatggtgtgctgcttctgatgacatccaaccacgccttctccaccatgccgggttgcgcgccttataacatcagtaagcgagccttgctctcgctggtgcagagtctgaccattgagtgggggccagaagtccggaccgtcggtatcgcaccaggattcattgatacaaacggcaaccaggcatggtttgattctcatccggacgcgcgtatcgccagggaaaaaaccataaaaaaacatccggttggacgcattggtcgaccggaggaggtcggcgagctctgcttgtttttagccagcgacaaggccggttttattgccggtaccaccatacttattgacggtgggcgcagcgcaattatgcaggatgaagaagcgtaa

SEQ ID NO: 383712 - DNA, 906 bp, Salmonella enterica
atgaccaacgttttccaggcgcaggatattcatggcgttaacccaattgtcgctatgccattcaccgagcatggcgaagtggacgaaagtagttttgtgcggctgctggaacagcttgccgctactggcgcacagggtacgacgctctttggcattgccagcgagtttcctaagcttaatgacgatgagcgggatcgtctggcgcaaatttacgtcactacactggcgggagggaaacagtatcgcgcgatgtctgtcaccgatcacagtaccgaacaggcagtatggcgggcgcgccgttatgctgcgttgggggctgacgctctgatgctgctgccgccgtttttcctgcaaccttcgccacaggcgatacaggaacatatatacgcggtgcttgatgcggttgatattccggtgatggttcagtacgcccccggtgaaacggggcttcccatcacgcctgagcaactggcgaatgtcgcacgccgctatccgcatgcagtctttaagatcgaatgccaccctccggtggactatacccgtgcgtttctcaacgcggctcccgtcgcctgtgttctgaatggctatgccgggctgtatatgctggagatgctggcggcgggaggcaaaggcgtaatgcctggatgttcatttactgaggtctacgtaaatatttatcgccactggcaggctggcgatattccgcaggcgcagacattacaccagtcgctgttgccctggattcagcgctggatgggtcactgcgaatacatcattcaggtggaaaaaaccatactgcaacggcgcggcatcattaagagtgatttttgtcgtcgtccgggttggccgcttagtcagcgcgaccataaagacattgagcaatttatccatcagtttcagctataa

SEQ ID NO: 383713 - DNA, 1707 bp, Salmonella enterica
atgagtggatgtagtggatgtgcccagtgcggcacgcattttaacccgatcctcgaaggtgatgacggcgcgctgaaacgggcgctgtataaatcaatggggcatactgatgagcaactacaccgcccggttatcgccgtggtcaacagttacaccaacgccacggcaggtcacgttaacctgaatgaactgactgccgaggtattgaaagggatcgatgaggctggcggtacgggtatggttttcgggacgatcgcgccttgcgacggtattgccgaaggccatctcggtatgcgctacattctcgccgcacgcgaggttatcgttgcctccattgaaacgatgatgcgcgcgcaccgctttgatggcatggtgctccttggttcctgcgataagatcgttccggcaatgttaatggcggcggcccgactggatatcccggctattctggttaacggggggccgatgtacccggctgaatacaagggaaaacactgggacgggaatatcgtcacggaagctatcggctggaaaatgcgcggcgaaatcgatgagcaggagtttgcacggatcgaaaatatcgccgaacccggaccaggctcctgcaccatgtatggcaccgccaataccatgtgttgtatcgctgaagttttgggtatgagtcttcccggcagcagtacattaccggctatctctccagaacgacgtgaatgcgcatggagtacgggcaaacggattgtttcactggtgcgtgaaggcgttaacgcccggcaaatcctgacgcctgcggcaattcataacgccatggtgtatctgctggcgacgggcggctcgactaacgctattttgcatttgcaggccattcactatgaagctgaactgggccatctcccgctctcgatttttgatgaactcagccaccgggtccccctggtcgcctcactctatcctgcttctgaatacgatatgatcgatttttatgaagctggcggtgtgatggccgttgagcacgcgattgcctctttacttaacggtacggcgctaaccgttgcgggtaaaacaaaagcggaattgattgctggtgggaatgccagcccacgaccggaagtcattcacacgttgtcatctcctgtacgccaggatgcgggcgttgcggtgttacacggtaatctgtcgccgcttggctgtgttgtcaaacctgcagccgttcctcaggacatgatggttttcagaggcccggccgttgtcttcaatagcgagcaggaatcgatcgacgccatcatgtcggggaatatccagcccggttccgtgctggtgctgcgctatgaaggtcccaaaggcggtccggggatgccggaaatgtataagccgatgaaaagtctcgaaggcatggggttgtcgtccagttgtgcgctgattaccgatggtcgcttctctggttcaaacagaggtttattcgttgggcatatctcacccgaagcatttgatggcggcatcctgggactggtgatggatggcgatgagatttcgatcgatattccccgccgtgatgtgacattgcatgttgacgatgaaacgctggccaggcgtaaaacgacctggcaaccggtcaataaagcggtgcctcgaggctttttgcgactctatcgtcgctgggctttgcctgctgcgcagggagccgtactggcagatcaggaggatgattaa

SEQ ID NO: 383714 - DNA, 861 bp, Salmonella enterica
atgaacgctgtaaacaataacattcaaattattggtcaatatcgctgtgagcttggggaaacgccggtgtggtgtccggacagtcagtcgttgctgtgggtggatattctgcagcaacgcctgctacggtactggcctaagcaaaatgaccacgttgaagttcattccatgccggacgcgaccagtgcggtattgctgacaaatcagccggaagtatttcttgttgtcagccggtgtggtattcagatttacgattatcagcatcttcacttcacgttgttgcatgcctggccggaagagcgaacccggccaaacgaagcggcgattgcgcctgatggcgcgctctggttcagcactatggagcccaacgcccagtacgcgatagggagctggtatcgactcagccccgaaacgaagacgttacaatgtcttttgactgaacagtgggtgcctaacacgcttgtctggacagacgatggtctctggttcgccgactcacttcgacatgtcatataccatggaattttcaatggggatgcgttaacgattaaccgtcgctatccggtttgcggaattcccgatggttccaccctcaccagcgaaaatcagttaatcaatgcccgctggggcgaaagttgcctcattcgttatcagctcaccggacacgaattacatcaacgggagcaaatatcactcccggtacgtcaacccagcagctgcgcgtttggcggagccatgctctccgatctctatattacttccgcacgtaacggattggcggcgcccaatgctgctgatggcgcacttttgaaaataccaaccaggctgaccggtaatccggcaaataagtttcgactgtaa

SEQ ID NO: 383715 - DNA, 1188 bp, Salmonella enterica
atggtaaactttgataaaattattcctcgcgatacacggtgcaggaaaataggtcaactcaacgaaatgtttggtactaccgatcttttacctttatggatagctgatatggatttcgctacaccgtcagctattacagaaaccatgataaaagtcgcgtcagaaccggttcaaggctattttctggactaccctggttggaaaaatgcaatccagcattggtatgactaccgttaccaggtgcgtattgatgaagactggctgcattttgttcctggcgttataaaaaccatcgtatttagtatactggcgctgactaagccgaatgataacgtgttgacctgttctccggtttacgatccttatccaaatctggttaatacgagtggaagaacgctgatacagaccagactcattgagcataatggcatatttgaatttgactggaccgatttggagaaaaaattaaaaatatgtaaattatttcttttatgttctccccataaccctggcgggattgtctgggattccgcaacactgtcccgaattgccgatttgtgtgcggcaagcggcaccatcatcatttctgatgaaattcatggcgatttaaccctaccgcctgcaaaacatcagccttttttctctatttctgaaaatgcgcgtaaccaggtgattgttctgacatcagccagtaagacgtttaatattcctggtgtgcaaggtggcgtggcaattattcctgataaaaaactcagagatcgtttttacggttttctggatggctgctatcttgctgaagcaaatattatgcaacaggccgcgctttatgccgcatattcatcttgccagcaatggcatacggaactcctgtcatatctggcaggcaatattcagtacgttaaaaatgagatagcttcacgttgtccggatatcaccgtgatccacggcggcgcctcttatttgctatttcttaatgccgaaaaaatggaacttgatgatgagagtctgaaatcattctttattaatgaggctaagctggggctttcacctggactgcaatatggccccggcggagagcgtcatatgcgattaaacgttgcatcgccgcgcgctgtgctgatggaagcgatggaccgattagcccatgcttaccgacgttttcgtcactcgtcagccatcaccgagtga

SEQ ID NO: 383716 - DNA, 1449 bp, Salmonella enterica
atgaatcaggtaataaagaaaaaggaagtcacttttttttgggcgataaccccaattattatcatgatggtatgtatatgtacaggatatttcctgtatggaatacgcgcagaaccgttaattctcataggcacagcttctgcggccattattgcgaaatttcatggctgcacatggaatgacacctttaaatctatttgtgacaaaatatcggaagctctgcctgttattttaattgtccccagtattggttttctaatcggcgcatggatgatctccgggactatccccatgatgatctattatggcctcaagtggattaacccagaatacttctacatctctgcttttttcctgggagcgatagtatctgtctgtaccggcacgtcatgggggtcaatggggacagtaggcatagcaatggtgggcgttgctattggtcagcatttatctctgccggtaacggccggagccattatttcgggaagctggtttggcgataaattatcgccagtctcggactcgacgaacatcgccgcgctttctgttggtgctaatttatactcacatatcgcgcatctgttgtggaccacgattccaggttttatcgtttgctgtgttgtttatacatttgttggaaaaagcctgaatgtatcttcagtcatagagcctgagtctgtcatcgcactgatctcttcactggataaaagttatcattttaatatattactgcttctgcctcctgtggttgttctgtatggttcaatcagcaaaaaaccccctattcctacgcttttcctctcggcgctgatttcaattattcttgcattaacctttcagagtttttccctggcttcgattggtgattcagtggtaagtggattcaaattaaatatgctaccaaaatctgtcgatataaactctctgtcgccggatctgtatcggttattagagcgtggtggcgcagtatcgatgtttagcactttcgttacgatattcagcgcatttagttttgcaggcgcaatgagcgccacaggatcgttacgcattgttattacagcattgacaaaaggtattacctccacgctgatgttagtcgcaacgaccattataaccggtattaccatttgtggttgcacggctaatggtacattaccgctgcttcttgcgggtgacgcctttaaggatgaatataaaaaacgtggtctggcgagcgtaaatttgtcccgaactctcgaagacgcaggaactgtcgtagaaccgataattccctggaccgcctcaggtgtatattgtgcggcaattacaggtgtgcttactattgattatcttccgtgggccattctctgttatacgggaatgtgttttgccttattgtgggccgccaccgggattggtatcgccagaatatcacaagatactcctcagaaaacaagcgagatagcgtaa

SEQ ID NO: 383717 - DNA, 654 bp, Salmonella enterica
atgaacatggaagaatttatgcagcaatggagtaaagagccattgccatatatcgccattctacgtggcattcacccggaacaggctgcggaggctgcaaaaatattacttgagtgtggctttcgttatctggaagtccccctgaacagtccttctccattcctttctattcagcgtatgcgggacgtgattggcgatcgcggatatgttggcgcgggaacggttctgacgactcaacaagtggatcaggtagtggatagtggtggtcaattaattatttctcctaactgtgatcccgcggtaattcgctacacgcgtcagtcaggactcattagtttgccaggggtagccacgccaagcgaagccttcagcgcaatcgccaatggagccagtgcgctgaaattatttccagcggaaatggtcaatatatcagtaattaaagcatttcgcgcagtcctgccatcagaaatacagtgcctacctgtcggtggtattcaaccggacgcaatgcaactgaaacgctacatgcaggcaggcgccaatggatttggtcttggcagcggactgtttcgggcaggtatgactcttacccaattaaaagaacatgcaatagcttatcagctcgccttttccgagattaggggtgaaaaatga

SEQ ID NO: 383718 - DNA, 903 bp, Salmonella enterica
atgaacagatactggatcgcaatagattggggcaccacaaatttccgcgcatttctgatgcacggtaagacgcagatagccctgataagtaattcgaatggattactttctatagggaaaatgggcttctccggcacattgcaggcttcattggccccgtggcttcagcaatacggcaagctcccgattatcatggcggggatggtgggttcccgacagggctgggaagaggttccttatgttgcgatgccttgtggtatatctgcgttggtcaccggaatccgtgagctgaccacgccctgggggagtccggcatggattgttccgggggttaatggcatgagcgcctggcagcaacccgatgtgatgcgcggtgaagaggtccagttgctgggattaaatgcccttcatccggcgtctgaacaccgggtgttactccccggaactcactgcaagcatgttcatatgcgggacggtgaaattacggctttctccactttcatgacgggtgaattattttctttgctgagtatgcactccattcttggtcgtgatttgcctgctcagcgtgaaaataaagaggtatttttgcagggcgtgaaggctgcgcggcataatgcgcctttcagccatgcgctattttccgtgcgcacacttcgtctggctgaaaaaattcctgagatttacatacatagttatctttccggcttacttatcgaccacgaacttaccaccctttctgaattcaaccgcgtctggattgttggttcatcagcgctaatcacccgttatcagttggctgctgagcaattgttactttcactctatccggccaatggtgatgactgcttcgtcagcggccttgagcttctttttactctcattacgggggcatcaatatga

SEQ ID NO: 383719 - DNA, 732 bp, Salmonella enterica
atggcaaaaagcgaaaacacgatatccgagtccgtcacacagcatctcgcccgccgcattatgcatggcgatctttgcccaggaacgaccctgccgggcgaaaatgaactggctgccgattacgatgtttcccgtacctctgtgcgcaacgcgttacatactcttgccgctaaggggcttatcgctattcagcccaaaaaacgtagtacggtaaatcagcgtgaccagtggagtatgcttgatattgatgtacttggctggttagcccaggggaaggtcgctcctgaactggttgagcagctaatggtaacgcgactgataatcgaacctaatgtcgccacgctggccgcactcaatgctggaggacgtgatttggctgcgttggaggatgcgttacacctgatgcacgaagggcaagttaatgcccagcgtgagttattcgaaaaaggcgatctggcgtttcaccaggcgcttctgcgcgccacgcataacccttttttagtgtcgctgggtaatgcgctctctgccacaatgaccctctcttttcgccagactttagaagaagatgtcagtcagactaaagccgccgtggaagaacatacgcagttgttggaggccatccgcctgaagcaggctgacaatgcgcaccagctcatgcgcacgattttgcttaatgcggcccgtaaggctatttggcaagacaagccggagttgttagatctgatcatttaa

SEQ ID NO: 383720 - DNA, 453 bp, Salmonella enterica
atgatttggttaattctggccacatttgtggtggtgtttattgtgggtttccgggtgctgacatcggattcccgtcgtgcgattcgccgtctgagcgaacgcctgaatattgatgtagtaccgatagaatcgatgattgatcagatgggtaaaacggcgggcggtgagtttttacagtatctgcatcgccctgatgagtcgcatctgcaaaatgccgctcaggtgttattgatctggcaaatggtgattgtcgatggtggcgatcaccatttaccgcggtggcatcgacggctgcaaaaagcgcgtttagccgcgccgatcaccgatacgcaggtacggctggcactgggctttttgcgcgaaatggaacccgatatgcaggagatcaacgcgtttcaactgcgctataatgccttttttcagccggaagagggcgttcactggctgcattaa

SEQ ID NO: 383721 - DNA, 210 bp, Salmonella enterica
atgaaatctgatatcaggacgctcgacctgaacttgcgcagggcgctggatgccctcatcgacgaacgcaacgttacccgcgtcgcacagcgcctgtcgctcactcaacctgccgtcagcagaatgctaacccgcctgcgtgattattttgacaatccgctgtttgttcgcgttccgcatgggatagtgccgacattacgcgctcagtag

SEQ ID NO: 383722 - DNA, 444 bp, Salmonella enterica
atggaatcttattggattaatccctatgtggtttatattgatggggagcattataaaggcaatgaaaatagttttcccttcttaggaggacgtttaatccgtacacattcggcaacagttatgagtgcatttaactcagatgtaataaaacatgatttaatcccggaagttgacaaagaaataattgaaaaatacgaactggtcaatatgtggggacctgatgatttaggtgacagattgagacgttactttgatatacccgtcatacttcaagttgtatgtgcgttggcttcctcgttcaccccagtcactgaccagagtaagcgcctggggattgatgagggatatccttgtccctcaccgcaggcagcctccggctgttcaaattcgttccagacgaatttgtcacggcgtcgccgccttcctgcaactcgaattatttag

SEQ ID NO: 383723 - DNA, 147 bp, Salmonella enterica
atgatgcgtattgtatggaaaccgggctatctgatcaatctcaaattacggagtgatctatatgccattgcacaactggaggggaatttcgttgtgcggttttttgatatatttaatacacatggcatgtggaaaacattaatctaa

SEQ ID NO: 383724 - DNA, 357 bp, Salmonella enterica
atgaaatataaattaaaatttatactatttatcttatatggatggtttcctttggcgggacaccctcaggattatcattattgtaatgatgattactccatcgtagttgcagataaatcgatgataattgatttaataacgaattctgaaatggcaatgaaactggcagagatatacattgagcgaatctatggtttcaaaaccgcaatagaacaaaagccttacaaagtctggaataaaggcaatgaatgggtcattgagggggcatcgataaatcataagaaacatgggggtgttttttctatcgttatatctaaaaaaaatggtcgtgttatatctgtttctcatggtgaatag

SEQ ID NO: 383725 - DNA, 4185 bp, Salmonella enterica
gtgagcggaaaaccggcagcgcgtcagggcgacatgacgcagtacggaggcccggtagtccagggctcggcgggggtcatgattggcgcgccaacgggcgtggcctgctcggtgtgccccggcggcagaacctccggcaacccggtcaacccgctgctgggcgccaaggtacagcccggcgaaacggattttgccctgcccggtccgctgccgtttgtgctctccagaacctacagcagctaccggacgaaaacccctgcgccggcaggccttttcggccccggctggaaagcccccttcgatatccgcttacagcttcgcgatgaggaacttatcctcaacgataacggcgggcgcagtattcacttcgagccgctgctgcccggtgaaaccgccttcagccgcagcgaatccctgtggctggcccgtggcggcgtggctgaactgcatgaaagcaatgtgctgcatgtgctgtggcagaccctgccggaggacctgcgcttaagtccgcatctttatctggcaaccagcagcgcacaggggccgtggtgggtactcggctggccagagcgggtaccgggggcggatgaggcgctgcccgccccgctgccgccgtaccgggtgctgaccggactggccgaccgcttcgggcgcacgcaaacctttcaccgggatgcggacggggaatttgccgggaatatcaccgcagtgaccgacggcgcaggccgccgcttccggctggcgctgaccacgcaggcacagcgggcggaggcggcgcgtaaacaggcaaccgcttcgggtatcagcgcgccggactggccgcagacgatgctggtttccggctacggcgcagacagcggcatccgccctgaggcggtgtggctgacacatgacccggaatacccggataaccttcccgtactgccgctggtccgctatatgtacaccccgcgcggcgagcttgccgccgtgtatgatcgcagcggtacacaggtgcgcagtttcacgtatgacgatgaacatccggggcgcatgacggcgcaccggtacgccggacgcccgcagaccacctaccgctatgatgccagcgggcgggtgacggagcagcacaacccggcggggttaagttatacctacggctatgagaaaaatgccgtcatcattactgacagtctgaaccgccgtgaggtgctgcataccgaaggcgaaggcggactgaaacgggtggtacgggaagaaaaagccgacggcagcgcgattacgcgggagtttgataacgcgggtcgcatggtggcgatgacggatgccgcagggcgcaaaaccgaattccggctgaatatcggctccgggaatgtgacggaaattatcacgcctgacggccggtcagtacggttcagttacaacgaccagcgacagcttatcgccaccaccggcacggacggcctgcgcagccagcagacatttgatgagcgggggcgcctgacgcaggaaaagtcccgccgcggcgatatcacccgttatttttatgatgacccgcacagcgaactgccctctgccactgaagacgccaccggcagccggaaacagatgacatggaaccgctacgggcagttgttaaccttcaccgactgctccggctacctgacccgctatgaatacaaccgcttcgggcaggtgaccgccatccatcaggaagaaggcctcagtcagtaccgcgcttatgatgaacggggcagacttgtcagccagcaggatgccgcaggccatgaaacccgctatgagtacagtgtggcgggcgacctgactgccgtggttcacccggacggcagcaggcagaccacagagtatgatgcgacaggacatccggtgagcaccaccggaggcggcctgacgcggcagatggaatacgacgccgccgggcgcgtcacccggcttgtcaatgagaacggggctggcaccacttttacttacgacctgctggaccgcctggcgcaggaaacgggcttcgacgggcggacgcagcgttatcactacagcatcaccggacagcttatccgcagcgaggatgaaaacctcgtcaccctgtggcactacgatgcgtcagaccggctgacgcaccgcaccgtgaacgacgaactggcagaacagtggcagtacaacgagcgcggctggctgaccggaaccagccatctcagcgacggccaccgcgtcagcgtactgtatcagtacgataaacaggggcgcatgtgccttgaacgccagacggtgcataacccggaaacagacgaactgctgtggcagcatgccaccagacacgattatccggaggggctggcgacccggaccacccccgataatctgccgccggtggaatggctcacctacggctccggttatctggcgggaatgaagctgggcgacacaccgcttatcgatttcacccgcgaccgcctgcaccgggagacacagcgaaccgccggcgcttatgagcagaacacgctctacagcgccaccgggcaactgctgagccacacgttcagtgacccggtgctgaaccgggaatacggttataacggcaacggtcagcttgtgcgcatccgtggcgcgcatcaggaggaagactaccgctatgacggcgcggggcggctcgtcagcgcccggcacaacgacctgctgcggcgccacgccaccgacccggcgggcaaccggattacagaccgggagcagtacccggcgcttcccgcgatatggcgggataaccgcatcggcgaagacgtggcgtatttttaccaccacgacgtgcacggacggctgacggaaaaggatgagcgccagatacgcgacggcggcggctacgtacaccattaccactacgataaccggcaccgtctggtgcactaccgtcgtgagcaacagggcataaccctgctggaaagccgttacctctatgacccgccgggccgccgcatcgggaaacgggtgtggaaaagccggcggacatacggagaaatcaccggtaacgaatatattcagctgtcccacaccccggaagtgacatggtacggctgggacggcgacaggctgaccaccaccgaaacagccacacagcgcgtgcagacgatttacctgccgggcagcttcacgccgctggtgcgcgtggagacagacatggaggaactggcaaaagcagtccgccgcacgctggcggagaaattccagcaggaggcaaacgtgaccttcccgccggaactggtggcgatggtggacagtctggaagtggagctacagcgcggggaactcagcgaagccagccgggcatggctggcacagtgcgggctgacgccggagcagatacaaaaccagctggagccggaatatacgccagagagaaaaatccacctgtaccactgcgaccaccggggcctgccgctggcgctggtcaacacggaggggaaagcggactggtcagcggaatatgatgcatggggtaatgtgcagcgtgagaataatccacataatctgaaacagctcatccgcctgccgggtcagcagtatgatgaggagacagggctgtactataaccgccatcgttactatgatccgttacagggacggtatatcactcaggatccgattggtggtgccggaggctggaatttataccagtatccgttgaatcctgtgtctaaaatagatccattaggattatctgcgtggagtgatgcaaagtcgggagcatgtacagaaggaatatgtaagttgttttcaccttttatcgggccagagaaattttcagaccctgatacagcagcattagatgcgttgaaaaaaatcaatggtcaatcaatttgtgaagataaagagtttgctggtctgatatgtatggataataagaataattattttgctacagaacccaatagaggcgaagaacatgaatcatcaccttttgatagtccatgtcccggaagtgctgttattgcgacttatcacactcacggtgcttatagtttcggttatgcggatgattttttctcaaaaagagatgtggaagtatatgaatataataacgtcttaggttatttaggcactcccggcggggagtttaaaaagacagacaaaagtggtaaagaatttttttcaaagaaagaattaacaacagtttgtcgtatacatgcaaactaa

SEQ ID NO: 383726 - DNA, 1662 bp, Salmonella enterica
atgagtgatatcgcattgacggtcagcgttctggcgctggtggcggttgtcgggttatggatcggcaacatcaaagtgcgcggtgtcggctttggtattggcggcgttctgttcggcggtattatcgtcggtcactttgtcgatcaggcagggatgacgctgagtggcgatatgctgcactttatccaggaattcggcctgatcctttttgtttataccatcggaatacaggtggggccggggtttttcgcctcgctgcgtgtttccgggctgcgcctcaatctgtttgctgttctgattgtgataatgggcgggttggttaccgcaattctacataaaattttcgctattccgttgccggtgatactggggattttctccggcgcagtcaccaatacgcctgcgttaggggcgggtcagcaaatcctgcgcgatctgggaacgccaatagatctggtggatcagatggggatgagctatgcgatggcgtatccgtttggcatctgtggtattttgctcaccatgtggctgatgcggctgttttttcgcgttaacgtcgaggcggaggcgcagaagcacgaatcctctctcgctaacggtcattcattaattcaaacaatgaatatccgtgtcgagaacccgaatctcaataatatggctatccaggatgtgccgatcctgaacagcgataaaatcatttgctcacgcctgaaacgcgacgacacgttgatggtgccgtcgccggggacgattatccaggcaggcgacctgctgcaccttgtcggccaatctaccgacctgcataacgcgcaactggtgatcggcaaggaagtggacacctcattgtcgacgcgcggcacggatttacgcgttgagcgtgtggtcgtcaccaacgaaaaagtgctcggcaaacgtatccgcgatttgcattttaaagagcgttatgacgtggttatctcccgccttaaccgcgcgggcgttgagctggtcgccagtagcgacgccagcctgcagtttggcgacattctcaatctggtggggcgtcctgcctcgattgatgcggtagccaatgtggtcggcaacgcgcagcaaaaactccagcaggtgcagatgctgccagtatttatcggcattgggttaggagttctgcttggatcaatcccgttgtttgtgccgggattcccggtcgcgttaaaactggggctggccggcgggccgctgatcatggcgctaattttggggcgtatcggcagtatcggtaagctgtactggtttatgccgccgagcgccaaccttgcgctacgtgagttaggcatcgttttgtttctggcggtcgttgggctgaaatccggcggcgattttgtcgatacgctgacgcagggcgaaggattaagctggattggctacggtatttttatcaccgctattccgctgattaccgtcggtttgctggcgcgaatttttgccaaaatgaactatctgacgctatgcgggatgctggccggttcgatgaccgatccgcccgctctggcatttgccaacaatcttcatgccaccagcggcgcggcggcgctctcttacgcgaccgtctatccgttagtgatgttcctgcgtattatcacgccgcaactgctggcggtgattttctggggaatgggataa

SEQ ID NO: 383727 - DNA, 1071 bp, Salmonella enterica
atggaacactttgacgtagcgattatcggcttaggcccggcaggttccgcgctggcgcggcagttaagcggaaagatgcgcatactggcgctggataaaaaacgtcagtcgggcgccgagggcttcacaaaaccctgcggcggtttgctggcgccggatgctcagcgttcctttattcgcgacgggctcacgctgccggtagacgttatcgctaatccccaaatctttagcgttaaaacggtggatgtggaagcggcgctgacgcgtcactaccaacgcagctatatcaacattaaccgccacgcttttgatttgtggatgaagtcgcttatccctgatgccgtgcaggtctaccacgatagcctgtgtcgaaaaatctggcgtgaggatgataaatggcacgttatttttcgtgccgacggctgggaacagcagattaccgcccgttatctggtcggtgccgatggcgcaaattcactggtgcgccgtcacctgtatccgaaacatcaaattcgtaaatatgtcgctattcagcaatggtttacggagcaacatccggtcccgttttattcctgtatctttgataacaatgctaccgactgttactcctggagtatcagtaaagacggttattttatcttcggcggggcctatccgatgaaagacggacaacagcgttttgaagctctaaaacaaaagatggcggactttcattttcgcttcggcgcaccggtaaaaagtgaaaaatgtacagtcctgtttccgtcacgctgggcggattttgtctgcggtaaagaaaacgcatttttgatcggcgaagcggcgggatttatcagcgccagctcgctggaaggcattagctatgcgctggatagcgcgggaatgcttaataacgtactgaaacagaatgcagccgacctcaacgccgcctggtggcgcgcaacccgaaaactgcgcctcaaactgtatagcaaaatcatcaagagccgctgtttaaccgcaccgggggtacgaaagctgattatgcacagcaatatcgcgcatattccgttaaataattcgctgggataa

SEQ ID NO: 383728 - DNA, 174 bp, Salmonella enterica
atgagtaaaattgcacttatcactggcgccaatcgtggtcttggccataacactgccctctccatcgcgcgtcaaaatggcgatattatcgtcgcttacagaagaaataccacccaagctgaagcggttgtcgcggaaatccgcacatctaccgtcatttcagagaagttatga

SEQ ID NO: 383729 - DNA, 210 bp, Salmonella enterica
atgaaaaccctcataccgcttttattggtttattttctccagccattttccgtctatgctcaaaccgtcaccgcaaccggcgatacgcttgataatgcggaaagcaaaattcgccaattggtacagaaggaaggcggtcaatcctataaaataattgaagcgcggatgggaaataaagttcatattacggcagtgatcatgccggaataa

SEQ ID NO: 383730 - DNA, 930 bp, Salmonella enterica
atgaaagaacgtgatgttaaaacgggtgaaaaagtattagtgcttggtgcaggacaactgggggctgctgtgctggactatctgattccagcggtcatccaacacaatggcgccgtttcggttatcgtgtcgcccggctcccgggataaacaaggcaacctacagtctgatattcatcaaaaactggctgatgcaggggccaaatttatctctgtcgatgtcgctgccagcacgattgatgcgttaaaaaaacacttcgcagattttgataccattatcaactgcatgggctttgtcgctggcgcgggaacacagataaaaattacccgcgcggtactggagtctggcgttagccgctattttccctggcagtttggcgtgaattacgatgtggtgggcaaaggtagtggtcagcccgtctgggacgagcagtatgatgtcagaacgctactgcgggaacagagcacgacggaatgggtaattgtttcaaccggcatgtttaccagttttctcttcgaacccgcatttgatgtggtgaatttatccgaaaaaaccattaatgcgctcggaggatgggggacacaggtcaccgtgacatcacctgcggatattggtcgactcaccaccgaaatttatttgcatcagccgcgtatagctaacgaggtggtctttgtcgcgggcgaaacaacctcttatggaaaactggccgaaacagttgaacgcataacaaaacaaacctttgccagaaacgtattgacgctcccagacctgctggatgcactgcatttaaatccggatgaccagatgcttcgctatcgcgcggcctttgcccgaggagacggcatgtggtggccgatgaataacacctggaatgcacagaataatgtgccgactcaaaatattgaatcctggcttaaaaccgttatttaa

SEQ ID NO: 383731 - DNA, 900 bp, Salmonella enterica
atggataagctggagtcaatgcaggtctatgtttgcgtggtcgatacccatagtttcgccagggctgcagaagtccttgggctaccgcgttcaacggtatcgcgagtcattaaggagctggagtcctggcttgggattcagcttttacagcgcaccacccgcaaactcagcgtaaccgcagatggtcgacgttattacgacgagagcaaaaggattctggcggatatcgcaacgatggaatcttcattctctggccgatccgcacagcccaaaggccgttttaaagtggggatgccgcagtcacttgcccggcattgtattatccccaggcttccggcgtttttgcatcagtatcccgaactggagttgcgactctgctcaagcgataacgtcgaagacattattcaggaagggtacgactgcgtgattcgcaccggaaggatcgaggattcaacgacgctggtcgcacgtcctctagcgaactttaggtgggtgattctggcctcgccagactatattgccgcccatggtaagccggataacgtagacagcctggaaagacatcgcgccgttggctacctgaaccaccgcaccgggcgtaccatcgactggttttttacgcttgatgatggcgattgcgcgatccgtatgaaagagacgctgatcgttgatgatactgacgcttatatccaggccggaatacaaggggtcgggttgattcgtgtcgccagctatctggttgcgccttatctgcaaagcggagcgctcgttctctgtatggagaacctcttttttgatttaccgctttcgctggtctatccgcaaaaccgctatcttcctccttcggtacgcgccttttatgactggagcagaacggtgctacaccaacacggcaactga

SEQ ID NO: 383732 - DNA, 168 bp, Salmonella enterica
atgatcacttttgaaattcgtatggaaattaaggtcctgtacaagcggggaatgagtatccgggccatcgccagagaactagcttttttgcgtcacaagcgccgggcgcaggatcccgcacctaactggctaatggcgcaattaaaaacagccatgctgcggttttaa

SEQ ID NO: 383733 - DNA, 759 bp, Salmonella enterica
atggcctcttctgctacactcgcttctgttggccatcgtcctgtggcaaccaccaatgcaaagaaaatagacgtatctggggagctgacgaccggttcaaccctcaagataacggatgtttttattgaggatcaggatggcgatgttctgtcgctggataaaatgaataatgccgacgatattaaatggtatctggtggataatgaggccaccgatccttctggagcaccagcggcaaccgggacgacctttaccattcctgctgatgcaggtggtaaaaaaattaaaatcgtttaccgaattaagacggcaacggggacgccggatagtgcattcttgcctgccactgtcttattaacttctgcatcttctggggtgagtggcgacttcgctgcagacggtacgatttctaataagctacgttctgtcactatcaaagtcgtgaacgaaaataataagccaactccggaactcaacggtaccaatgaccccaacacccctgtagtgggcggcacccttgaagcggtactggagtgtgctaccacagcggcggctgagtgtgaggtcagtaattataactttatctggcaggtggcggatgcagcgacaccagatacgttcagcgagctaaataatactaacgcggaaaaacataaatatatcatcaaagggatcgagcagaataaactgttccgtgtccacgtcacgcctaaaacgacgaaagccatgccggagaataaacgcgctacccgtcgttga

SEQ ID NO: 383734 - DNA, 402 bp, Salmonella enterica
atgcctatttcgattagtaaacatggtgctccttttgttgttcaacatgaaaatcagtacagttccggcgcaagtcagtcatcatcactttcaaaatcaatccgccatattagcaactctcccgatgcaataaactttataagttgctatagtgcaaatggaggctgtttttccaatgcacagatgctggcaaatgcctcaggaagtccggttattggttactttgggaaaataaataaattaacagccagtctgagtaatagcggtcatgtatttcgcccacagtctaagtttgttgccaatatttgttttgtaggtaatcgactactgagcggtccaattcaacttaggatcggtttaaaacatctgctaacctgccactcaaatgggaatgtcagataa

SEQ ID NO: 383735 - DNA, 951 bp, Salmonella enterica
atgccaattactatcgggaaaggttttttaaagagtgagatgtttcctcaaagaaccatctctcaacgctccttcttttcgttactacgggaaaagattaaagattttttctgtgacacgcgaagatccgctgccgatcaatacttgaaggaattatgtgatcttacctctccgcctggcgcgcaacgtttatttgatttattttgcgcattatatgaattatcatcaccggcatgcaaagaaaaattccattttcagcactatcaagatgctgagtgtcaatatacaaatctctatatcaaagatggcgcagagattccgttatgcattgtgatacgccgggatcactattattataatgtgaagggcaaaacggtgatctgtattgatacttatcctgtacccctgaaaacatatcctgatgttaatataaaagccagcacttatgtttgtgaaccgctatgttgtttgttccctgagcggttgctactcttgctaccgggagatttaacattttccattgacctaagcgagataaaagagacgctcatcggcatggtagaaaatggtgagttatatcactggaaggaacaggaaagaaaggccgctatctcctccagaattaatgcgggtatagtacaagctggtgtaacagctattgatgaagccaccaaaaacacaatagcctcaaggattattgaggctactaacttaaagaatgcatcatttgatgcaaattatacacaaagctcaattacgcaaatggtttattcatgcctgtttaagagtaatatattaatgaatatgcttgatgaacaatcctgtcatgacctgctatgtttaaacgaccttactgaatatgtagcgctacaaattcataattgcctcttttctgaagacttatcttcacttgttgaaatagcgcaaaatgagactcatcaccaacgttga

SEQ ID NO: 383736 - DNA, 630 bp, Salmonella enterica
atgccacgtacatcagtttctacctatgccagggctttatcaggaaatacgctacctcatgttgctgcaggagattatgaaaataaattatcaacaaaaatcctgaaaggcatcttgtatgtgcttacagcaggattagcctacggatttacgagagtaattgaacattattgcaatattacgcctaaagttgcggagttctgtgccaatgcagggactatccataatcaccttgctgatgctgtgtgtgatggactgtatactatagatgtcgagctttctgatggtcggatgttaacattcgaacaactctcgctgatggctggacgtgagccaatcgtcaggatatcggatggcgaacataccgttgaggttaaggggtcctttgaagatatctgtatgaggctggaagagggctttcttgaagcgccagcgtactatgactatgatattgagaagcaaaataaaaccgttagagaacgaatagcagcatataatgccttaccacaaacattaggcgccattcctcccctacagaattatatcgatcaggccagcgacatggcgcaggcgaaagcgcaacgggcggccgacataaaagctcgctaccataaatattgggactattaa

SEQ ID NO: 383737 - DNA, 3741 bp, Salmonella enterica
atgagtaaactgttggatcgctttcgttactttaaactaaaaggcgatacctttgccgacagccatggtcaggtgatgcataccaaccgcgactgggaagacagttatcgccagcgctggcagtttgataagatcgtgcgctcaacccacggcgtcaactgcacgggctcctgtagttggaaaatttatgtcaaaaacggtctggtgacgtgggaaacccagcaaaccgactacccgcgcacgcgtcccgatttgccgaaccatgaaccgcgcggctgcccgcgcggcgccagctactcctggtatctctatagcgccaatcgtctgaaataccctctggtgcgtaagcggctgatagaactgtggcgtgaggcactttcccgatacagcgatccggtgctggcatgggaatctataatgagcgatccgcaaaaatgccaaagttacaaacaggtgcgcggacatggcggctttattcgctcgaactggaaagagctgaatcagctcattgccgccgctaacgtctggacaatcaaaacctatggtccggatcgtgtggcgggattttcgcctattccggcgatgtcgatggtttcttacgccgccggaacacgttatctgtcattgcttggcggtacttgcctgagcttctatgactggtattgcgatcttccgcccgcgtctccaatgacctggggcgagcaaactgacgtgccggagtccgccgactggtataactcagcctacattattgcctggggctctaacgtgccgcagacgcgtaccccggacgcccacttctttaccgaagtgcgctataaaggcaccaagacgatcgccatcaccccggattattccgaagtcgctaaactgtgcgatcagtggctggcgccaaagcaaggtaccgacagcgctctggcgatggcaatgggccacgtcattttaaaagagtttcacctcgataatcccagcgactatttccttaactattgccggcgttataccgacatgccgatgctggtattgttggatgggcgcgcagacggcagttatgtaccggggcgtatgatgcgcgcgtcagatctggtggatggactgggagaggccaataatccggaatggaaaactgtcgcgctcaacagtacgggcgacctggtcgcgcccaacggttctatcggttttcgctggggtgaaaagggaaaatggaacctggaatcgttggcggcaggcgtcgaaactgaactgtcgctctctttactcggtcagcatgatgacgtggctggtatcgccttcccctattttggcggtaacgaaaacccccatttccgcagcgtgcggcaggaaccggtgctgatacgtcagttaccggtgaaacgcctggctctggcggacggtagcgagcggatggtcgtcagcgtttacgatctggtgctggctaattatggactggatcgtggtctggatgacagccatagcgccaatgattataacgacgtaaaagcctacacgccggcctggggcgaacagattaccggagtgccgcgtcgacatatcgaaactattgcgcgtgaatttgccgagaccgcccataaaactcacggtcgctcgatgatcatcctcggcgcgggagtgaatcactggtatcacatggacatgaattatcgcgggatgattaacatgctggtgttctgcggctgtgttggtcaaaccggcggcggctgggcgcactatgtcggtcaggagaagctgcggccgcaaactggctggttgccgctggctttcgcgctggactggaatcgcccgccgcgtcagatgaacagtacctcgtttttttacaaccatgccagccagtggcgctatgaaaaacttaccgcgcaagagttgctgtcgccgttggccgatccggctaaatttaccggacacctgatcgatttcaacgtgcgtgctgaacgtatgggctggctaccctcggcgccgcagcttaatcttaacccgctcagggtgaaagcgagcgccgataaagccgggctgtctgcggcggattataccgtacaggcgttgaaatcaggcgctatccgttttgcctgcgaacagcctgacagtggtcacaatcacccgcgaaatttatttgtctggcgttctaacctgctcggctcctccgggaaaggccatgagtatatgctcaaatatctgctgggaacagacagcggtattcagggcgacgcgctgggctccagcgaaggaattaagcctgaagaggtggaatggcagtccgctgcgattgagggcaagctcgatctgttagtaacgcttgatttccgtatgtccagtacctgtctgttttccgatatcgtcttgccgaccgccacctggtatgaaaaagacgatatgaatacctcggatatgcatccctttatccaccctctttccgccgcggtcgatcccgcctgggaatccaaaagcgactgggaaatctacaaaggcatcgccagcgtcttttctgtggtgtgcgtcggacatcttgggcaggaaaccgatgtggtgttacacccgctccagcatgattccccggcggaactggcgcagccatttgatatcctcgactggcgtaaaggcgagtgcgaacttatgccgggtaaaaccgcgcccaatatcgtcgaggttgaacgcgattatccggccacctatgaacgttttacctcgctgggccctctgctggataaattaggcaacggcggtaagggtattgcctggaatacgcaagatgaagtcgatttcctcggtaagctcaattacaccaaacacgatggcccggcgaaaggacgtccgcggatcgacaccgcgctggatgcgtcggaagtgattcttgccttagcgccggaaaccaacggccaggtggcggtaaaatcctggcaggcgttgggtgagatgaccgggcgggagcacacccatctggccctcaataaagaagatgagaaaattcgctttcgcgatatccaggcgcaaccgcgcaaaattatctccagcccgacctggtcaggactggaaagcgaacatgtctcgtataacgccgggtataccaacgtacatgaactgatcccatggcgcacgttgtcggggcggcaacaactctatcaggatcatgcgtggatgcgtgcctttggcgaaagcctggtggcgtatcgcccgccgattgacacccgcagcatcagcgaaatgcgggacattccgcccaacggcttcccggagaaagcgcttaactttctgacaccgcaccagaaatggggaattcactccacctacagcgaaaatctgctgatgctgaccttgtcgcgcggcgggccgattgtctggatcagcgaaaccgatgctcgtgaattgggtattgaagataacgactggattgaagccttcaacgctaatggcgcccttaccgctcgtgcggtggtcagccagcgcgtcccgccgggtatgaccatgatgtaccacgcccaggagcgaattatgaatattccaggctcggaagtgaccgggatgcgcggcgggatccataactccgtaacccgggtctgtccaaaaccgacgcacatgatcggcggctatgcgcagttggcttacggcttcaactattacgggaccgtggggtcgaatcgcgatgaattcatcatgatcaggaagatgaaaaacattaactggctggatgatgaggaccgggatcaggtacaggaggcgaaaaaatga

SEQ ID NO: 383738 - DNA, 129 bp, Salmonella enterica
atgagttggtacatgagtagttatgtccagatctcatttaacataatatacattatgcgtaccaatatagaatcagacagaatccggcgttttatgggtatcgttgacctggttgctgatggtccctga

SEQ ID NO: 383739 - DNA, 1080 bp, Salmonella enterica
atgcttaccgaaaaatatgattttcctattaccgatcagatgactatcccactcagacctcattggatatccaatgacgcctacagagaaaagtgtaagatgcttgtcctcaaccggagcaaaggggagtttcataaggtagactttagtaaactaacagattatatcaaagaaggtgatgtaatctgttttaacgacagtactataataaaccaaatgttcatatgtaaaacaagacgaaacagattaattaaaattattttagaaggtttcttaccaaataatagagtaattatttccgggcttttaaaagaaagatttaacgagaatgatattttgtatttagttgataatcatgatatttatattgagatagagcaggaatttagcaaggagggccagtaccagtccgttgtaaaaaatcatgatgccttaatttgctatttagtcagtcatggcgagcgtcttgatgagtacgtagacgccagtttgttttataaatatccagatgcttatcgctccgttttttctaaaaaatatggttctttggagataccttctgctggcattcattttacatgggacctgatccaaaaaatcaaagataaagggggattgatagcctttatcactttacatgttgcatcaacagaaatgttgaccaacagaaaaatacaaacaaaatgtgtagaagatgtcactatcaacgaagaatactacgatgttccacgagcaacagcggatactattaatactgcgaagcaaaatggcagacgtatttttgctgtaggaactaccgttacacgatgcctggaatccgcgtattcgagggagtacaattgtctcgaagctcattctggctggactgcgctttatatacatccaggttatcaactaaaagtggttgactgcctgctaacgaacttacatcagccaaaaacgacgcatatggtgttaaccggccagtttgctggggttgatctactcatgaaggtctatgcctcagaagatattcagtcatgccagttcgatatgtttggtgattgcatgttaatcatgccggatgaagggcagggatga

SEQ ID NO: 383740 - DNA, 267 bp, Salmonella enterica
ttgaatatttctgatatgagcagagtagtgcctgtaaacactcaatcttatgtaaagtcctctacagaaccaggcctggagcaaattaatctttttaaacaattgctgacagatggcgcatccaccagtgacgccagtgctttactacctcaggttatgttggccagtcaaatggattatatgaagttgacggtaggcgtagattttcttgccaggatatcaggttctgcatctcaagcgcttaataagctggttagtatgacatga

SEQ ID NO: 383741 - DNA, 783 bp, Salmonella enterica
atggagattcatatctcgccagcggcaagcaatatagtcgatgggaatagtcctccttctgatatacaagcgaaggaggcatcgtttcctccccctgaaattccagcccctggcacccccacaccccctgtgctgctgacgcctgaacagataaagcagcagagggattatgccctacattttatgcaatacactattcgtgcgctgggtgcgacagtcgtgtttggattatcggttgctgcagcggtaatttctggcggggcagcgttacccattgttattcttgcgggggctgcgcttgtgattgccattggggatgcttgctgtgcgtatcataattatcaattgatatgtcagcaaaaggagccgttaaaaacgtccagtgatagcgttgctcttgtggtcagtgcgctggctttaaaatgtggagcaagccttaactgcgctaacactcttgctaactctctttctttattgatacgttcaggaatcgctatttcttttttggttatatccttacagcttccactgcccgccgctgaaagtatagtggtctctttggacatgggatctgtaagcacctccgttagcctgacggcgataggtgcggtactggattattgtcttgcacgcccccccagtgacgctcaggaaaatgcttttgataaacctcaggccgatcccagtgtgttattggcggaaaaaattacagagatctgtaaatctgctacttcatctccattaatggacaattctgatcctgaatatcggggagaaccatga

SEQ ID NO: 383742 - DNA, 210 bp, Salmonella enterica
atgcccgtttttaataaaagtacgttggtaaatgctacggttatatcattatatatgatgacaacagatgtcataagttcaaccgacgatatgttaaaaatagactataaaatttatatcgtctgcgaggttaaattcgccgtgcctgccagaagttttttcgccagtacacattatccagcgatgaacgcatcacgccacgactggtag

SEQ ID NO: 383743 - DNA, 207 bp, Salmonella enterica
atgaaaaagttgaaagaaatggctgctatctcgctttttacattattagcggtggggttttccgcatcggctatggcagccgcccaaacgcctgatagtgtaccagcagctaatgttaagcagcgcgtgcactggtgtactctctttgataaagatggcctggagttgccgccgcttcccggcggggaatggccgtggtgtttttaa

SEQ ID NO: 383744 - DNA, 177 bp, Salmonella enterica
atgaagcgtattgtgaagtgctttctactaatgttgctaagcatcattgtgaatatggctgcagcgccagcgatggcttataactgtattccgtctggcgcgtcaagtggggactgtgaagcacaatgcgatatgttctggttatatggcgagtttgcttactggacatgtttttag

SEQ ID NO: 383745 - DNA, 192 bp, Salmonella enterica
atggaccgtaattggtattatttattcaacaaagagttaaccattcttaataacaatacgttttataaagaaatagactgttttatcaagtattcaatatttgcctccgttattatttttctggaatgtaaactctctctcaacacaggtgatatttaccttggaattgtggtgttgattctattcttatga

SEQ ID NO: 383746 - DNA, 264 bp, Salmonella enterica
atgaaacatcatgctattatgctttggtcattatttattttttcatcccctgttttggccaactcagaccatttgcctggtttactacaggcatcatgggaaatttttatctacgattttggtagtaaagccccgcaaccacctacaaataccgataaaaagccagcccggcagatcagttcaccgtcctgtcctacgacaccccccatgatgcccgcaccaaccaacggcgctaaaaaaggggatactttctccagaacataa

SEQ ID NO: 383747 - DNA, 1974 bp, Salmonella enterica
atgcggggtatcggagctgttatccattttcgctcgccaacaggcagcagcgaacccttacccgatttcagcgggatgtggaatagcatcagggactggttcaccctgcccgcccaggatgaggccgcacagtgctttcgcgttttttatcagccggatgaagcaacatcatcgccggacaggctgaagtgttttttaaaactaaaggcgctggcgtctccgggacgccaggataatttcaccgcagagcgaatactcggtaccggtgaaaccatctgcatgattgcctccggtaaaaacagcgactttccccccgtcacacttcatctgaacgaccaggaatggcattcaatacgacatcaggaagaagccgttgatagcccactgtcgtcagaaagtgacaacaaccaggcagctaccgcaacagggacagaagagcgcgacgcagcccccctggaaagttttcccatcacccgtgctcagattaaggcatggcatgatctgtcgccggaagcaaaatgcgaggccggcggctggaaagtatgggcgcagacacaagggatagccatcagcagtgccgggaactatctgtcaaacaccggactgagactacgcggcagggtgcggttgcagccgccaggggaaaggggggccccgattacaaatactcagattcaggcgtggcaggcgttatcgcaggaggagaaacgtctggctggcggctggatgacatgggtgcaggcgcagggaatatctatcagtagtgccaagaactatctgtcaaacaccggactgacccttttcggtatagagcgtctgcagccgccaagggaaagggggaccccgattacaaatactcagattcaggcgtggcaggcgttgtcgcaggaggcgaaacgcgaatcgggtggctggataaaatgggctcaggcacagggaatatccatcggcagtgccagcgcttgtctgagaaacacagggctgactcctggtggtgcagaacggctacagcccctcggaaagaaaggtgatcccattacactggcgcaacttctggcatggtttaacatgtcatcggaggaacgccgcgaggcaggcggatgggccacatgggcgcagacgcagggcatatcttatagaagcgccaaaaaatatctggcactaacagacagtgaaactcctccggagagcagtggggaaaaacggtcgccgccctcgaccaaagaggatatcgctgccccgccagaaaaacagatcaaggaagaagaagatgacgttacctggcgaacacaccagataaacaataacctgcccattctgcagcactggcgtgacccgacgatatcggtgatggcccgggcggaaggcaggattgaaatcttacaggtcacccggtggggacctctttttaacaggttaccccggcagactaaagccaggattaatcaggatatccgctggtttctgcacaatgaaggaagccatgatgcgcgaatgaatgcaatgatatccgtgtctatccctcttgatgacagcgacggatacagggggcgtactgtctacgcaaaaaccgatctgacggcgtttaccgtactgggcccctactctggtcgcctgctggacagtgaaaaggcacggcgcgagtatgaaaaagaatatggaaaggaagccagtaattattattttgccacgcgaagccaggagcgtctgatatccgcctggccgcagggaaatctcctcagtctgcttaacagcccggtatttacccaccgtacagcggaggcagaagccagacagaacgtcagcgtggtgcttgtcgggaagaatatcaactttttcctcaccacacgcgacatcagcgccggggaagagctgtggtttgattacgggcaggactaccagcattttgagccaggggaagcgttacgctcagcgcaggtaaaggaggaaccgccttcttcggaaggagaataa

SEQ ID NO: 383748 - DNA, 357 bp, Salmonella enterica
atgggtgttagggggctttttacagttaaaagcaagctaattccaattttattagatgattataatatttttagcagtgtaatgctgcgccacatgcagtggttcgaagcggcggatctgattgttaaaggtgtggaatacgcgattaccgccaggaccgtgacctatgactttgaacgtcgggtgacagacgctaatctgctgaaatttcagagtttggtgaggcgattatcaaaaacatgtaatccagaatctggggtaaacagaaatgggagtcggtgggctcccgttttttatggtcttcttacctggctgagaatgcgctatgcccattgtggtttcaaaagatgttcctga

SEQ ID NO: 383749 - DNA, 549 bp, Salmonella enterica
atgtcttcagcttttcaatatcgtttcattcttacaggtggcccggggtcaggcaaaagcacgataattgatgcgattataaaacgaggattctggtgttctaaagaagctggaagaggtgttatacaagaccaggtaaacatcggcggtgatgcattgccgtgggccaatcagacagcattcgcagagcacatgctaacctgggaaatgcgttcgtggcacgaagcggaaggacaaacacagccatgcttcttcgaccgtggagttcctgatattgcaggttatttacgtcttacaggacttgccataccggggcatctggaaaacgccatcgagaaatttcgctataaccgaaccgtatttattgcaccaccatggcgtgacatatatgtacaggataaagagcgcaagcaatctttcgatgtcgccgtcgcgacatatcacgaaatggtgaaaacataccgtatgtatgactatcagttgattgaattaccatgcgtttctgtagaggaacgtgtggattttatcctttcaaggataatacattga

SEQ ID NO: 383750 - DNA, 672 bp, Salmonella enterica
atgtgtggacgctttgcacaatccctggcccgtgaagaataccttgcttatttggctgacgaagccgatcgcgatattgcgtatgacccggagcctatcggaaggtacaacgtcgcgcccgggactaaagtcctgctattgagcgaacgcgacgagcaattacatctcgatccggtgttttggggttacgctcccggatggtggagtaaaacgccactgattaacgctcgcgtcgagacagcggccaccagcagaatgtttaagcctctatggcagcatggccgggctatctgttttgccgatggatggttcgagtggaagaaggaaggcgacaaaaaacagccgtatttcattcaccgaaaggacgggaagccgatattcatggctgctattggcagtacgccgtttgagcgtggtgatgaagcagagggattcctgattgttacctctgcagccgataaaagtctggtagacattcacgatcgccgccctctcgtgctgtcaccggacgccgcgcgagaatggatgcgccagggcataagcaggaaggatgtagaggagataattgctgacggtgccgtgccggcagataaatttacctggcacgccgtgacgcacgccgttggcaatgtgaagaatcaaggggcagagctgatcaaacccgttacctaa

SEQ ID NO: 383751 - DNA, 141 bp, Salmonella enterica
atggttattgagctgggtgacgaccaggggtggcatttataccgccagcgtaatactgatgacagtattcagtttgttgttaatagacaaattattccggataattatggtgatttcgtcgcccgttatttaacatcatga

SEQ ID NO: 383752 - DNA, 1014 bp, Salmonella enterica
atgccgatcactatagggaatggttatttaaaaagtgaaatatttatcaaccccccaggaaacacaagagaagcatggtggaaagttttatgggaaaaaattaaagacttctttttttcaactggcaaagcaaaagcggacagttgtctacatgagatgttgtttgccgattcccccccctcacgagagcggcttacagagatttttttcgagttgaaagcgttagcctgcgcatcacacaaagatcgatttcaggtttataatcctcgtgaaaatgatgccaccattatttttcgcatcatggatgaaaacgaagaggtcgaactgttacgtatcactcaaagtaccgatacctttagctataaaattatggggcgtagctattttttaatagaagattacccaggcattttaaaatctcatccacaaatgaggttagttattaataaaagatatagtgaagtcgtagattatcccctcccctcgacattatgtctcaagcttgctggcgcgccaatgttatcggttcccttagacaacatagatgggtatttatattctgaatggagaaaagggaatttagatgagtggaaagcgcaagaaaaggcaacctacctggaagcgaaaattcagtccgggattaaaaagacaatacaaactttacgccatgcgaatatatccgaaagtactcagcaaagcgcacttttaaaaacaatgacaatgtgtggattaaaaccagttgaaacaccaccaccgcacacccacatacctattgaaaaaatggtagaagaggttctactggcggataagaagtttcaggcgtgcctcgtatcggatgccagcgtcagtcaaaacatgctagctgatataatcgaaaccatcgctgataaggtttttcacgccctttttagaatagatcctcaggttatacaaaaaatggcggaagaacagttaaccacgttacacgttcgctcagaccaacaacgcggcgatggattatgttgttttttataa

SEQ ID NO: 383753 - DNA, 462 bp, Salmonella enterica
atgagtcaggacagtagcgttttctttcgtatattcctcggtatcggtctggtactgatcctcatttctattgttatattttataaccagttcacctatagcaaagacgcgattcataccaaaggcgtcattgttgataccgtctggcactctagtcattctcatcgcatgggtaaaaatggttcgtggtatcccgtcgttgctttccgcccgacgccagattacacactaatttttaattcgaatatcggtagcgatttttatgaagccagcgaaggcgataaagttaatgtttattattccccaggacatcctgaaaaagctgaaataaataacccgtgggttaatttttttaaatgggggtttatcggcattatgggcgttatttttatcgccgtcggtttattaatcagtatgccctcctctaaaaagacacgcaggaaacggaagtcccgcctatga

SEQ ID NO: 383754 - DNA, 786 bp, Salmonella enterica
atgaaaaaaatcataatactgctcagtttattgatacttctgcctctgacggtaaccagtaagcccttaattccaataatgacgacactttttacggatgttacaggtactgtaccggatgatgaggagattgcgcggaaagcggagctttttcgtcaacaaaccgggattgcgccgtttatcgtcgttgtagatagcattaatgaagccagtgtcaggcagaatggcaaagcgatgctggcgcatgcgtcatcttcattgactgatgtaaaagggagtgtcctgttactctttaccacccgggagccacggttaatggtgataaccaacggccaggttgcaagcagcatagacgataaacatctgggacttctggtagaaaatcacacactggcgtatttacatgcggacctctggtatcagggaatcaataatgcattggctgtattacaagcacagatattaaaacaaccggcgccgccactgacatattatccgcatcccggacaaaagcacgagaatgatcctcccggcagcaccacgacattaggcctttttgcctgggcggttgcattcatcgtctttgctgcattttttaactacacgatgcgccttaattatacattaaagtttgcagtggcgatgactgttgccaatataggttatcaggctttatgtttgtatatcgataatagctttgcgattgttaaaatatcgccactctgggcagggctgattggtgtctgtacgtttattgccgcgttgctatggacgagtaaacggtaa

SEQ ID NO: 383755 - DNA, 810 bp, Salmonella enterica
atgtatctgatcaatggtagttatcacagttttgtgctcgctagtgaccgaagcgttcaatttggtgatggttgtttcacaaccgcgagaattacggcaggacgggttcagtttcttacccgacatctacagcggttaagagacaatacccaacgtctgggtatcatttttccccattgggattcgttagctgatgagatgcatcgaatggcaacggcccagcaagacggtgttctgaaagtcgccattacacgcggtaccggttcccgtggttatagtccgacaagctgtgagaatcccactcggatcctgagcgtttcggcttacccaagccattattaccgctggaaaacggagggggtagccctcacgctcagtcctgttccacttggccgtaacccttaccttgccgggcttaagcacctgaatcgcctggaacaggtgctgattcgttctcatcttgagcagacagatgccgatgaagcgctggtgcttgacagcgagggatgggttacggaatgctgtgcggctaatttgttctggcgtacaggcaatattgtttctacgccgcggctggatcaggctggagtgaacggtattatgcggcaattctttttgcgcagactggcgcaatcgccttttcaggttgttgaagtacaggcgagagaggaggcggtcaggcaggcggatgaggtggttatttgtaacgcgctaatgccgattattccggttcgcgcctatgatgacgtgttgtattcttcgcgaacactgtttcaatttttagccccattttgtgagcatccaaattaa

SEQ ID NO: 383756 - DNA, 543 bp, Salmonella enterica
atgcgaaataaattaattactctggccctgttaacgtcagtaggaatgagtgcctcagcaatggcagatgacggtaaagttaactttgtcggtaatatcatcgaatctggttgcgaagttaatagttcaatatcctctccgatggatgtcaaactaggcgacgtagcaaaaacagcatttgttactgccggcaatactgctgctaatactgaatttacgctggttctgactaactgcccaacagagttgcagggtaaacccgtggtcgtgaagtatgacggtacgcctgatcaaacgaataacgattatctgcagttaaccgactatggttcaaccggtgtagcgagtggtgtcgcgatccaactgctcaacgcttccggtagtgaactgccgctgggcaaggcatcagaatccacagtgatcgccgcaagtggaagtactaacctgaacttcttcgcccgctatatcgccaccgccgacgttgcagatataaaggcaggtaccgcaaacggcagcgttaatttcacgctggcatataactaa

SEQ ID NO: 383757 - DNA, 669 bp, Salmonella enterica
atgagaatgtttttctggcctatggcccttgcatttactctatcaataagtagcgtaaacgctggcgtcatcatcggcggcacacgcgttgtctatcctggggataagaaagaaacgtcaatcagcgttaaaaacccggataaatattcttatttgattcaggcatgggttgataataacgcaaatgagaaagcgccttttatcattacgccaccgcttttccgcttaggcgcaacggaagataatgccttgcgaattattcgcaccggtgggcaactaccggaagatcgcgaatctatgtactggatgaacatcaaaacaattcctgcaacggaaaagcaagatagtgtcaacacgctacaaatcgccatcaaaacgcgattgaaactcatttatcgcccacagagcctgacggcaacaccggaaacacaggccaataaacttagctggcagcgaagcggccaacgtctgatggtcaataatccaaccccttactatatgaatttcagcgtggtcaatgttggtaacaccatggtgaaagacgccacctatgtcgcgccaatgagtacggcaactttcacactgcctgccaatgcaacaggcgacgtgagctggaaaatcatcagcgattttggcgcggcaggtaatgaacaccatgctcatttataa

SEQ ID NO: 383758 - DNA, 2571 bp, Salmonella enterica
atgattgcgagaacatcagaacaacaactaaaactcagccaaatagcctgtttcatcgcgctgcaatgtgcaattttagcatgcagttccgccgccgcgcgcgaatactttaaccccgcgctacttggtatcgatgggccaggcaaagaacttaccgatctctctgcatttgaagatggcgttggtcaactgccgggcacttaccatgttgacatcatcatcaatcaaaaatcggcgggccgacaggatgtcgcgtttagtctgcagcccgacgccagtgggcagagcacgctacaaccctgcttaagcgtggacacgttaaaatctttgggtgtcaaaactgatctttttccacagcttgcaggcaagggagagtgtgcaaacctggcggcgattccgcaagccagtagccattttcagtttaaccgccagcagttgctgctttccattccacaggcggccatggatcagcatgcccgcggctatgttccgccagaacggcttgatgacggtatcaatgcgttactcctgaattacagctttaacggcagcaacagcaaagcgcgaagtaatgaatataccgattcggacagttattacctcaatttgcggcctggtatgaatctcggcccgtggcggctaagaaactacagtacctggagccgcaatacgactggcgataatacgcaggacagttgggactcggtttacacctatttacagcgtgatattctgccgctgaagggacaactcacccttggagatagcacttcgccatcagacatgttcgacagcgtcccgtttcgcggcgcgcaaatcgcctccgatgacgatatgctgccagatagcctacgcggctatgccccggtggtacgcggtatagccagaaccaatgctcaggttatcgtcaagcagaatggctataccatctaccaaacgtatgtttcagccggcgcatttgctattacagatatgtaccctaccggtagtagcggtgatttggatgtgacgattaaagaagctgatggcagtgaacagcatcagattgtccccttcgcctccctgcccgttttacaacgtgaaggcagactgaaatacagtctgaccagcggtcagtatcgcgcttatgatgacagcgttgataaggagtatttcactcaggcaaccgcgatctatggtctgcctgccggactgacgtggtatggcggcggccagttttcgcagcattatcaatcattattaaccggtataggtaaaaacctcggcgaaatgggcgcactctccgtcgatgtggcgcaggcatggtcaaaaccggaagatcaggagaaagccagcggtcagtcggcgcgcatacgctatagtaaaaatgtcctggcgacaggaaccaatatctctatttcaggataccgctactcaacgtccggctactacacgctacaggaaacgctcgatacctggcgtgacaatcatgatcaaaatccaatcgatcgccgtcgtaaccgcgcagagctcctgctaacccaaaatatctcgcaggatatgggctcaatcacactcaacgcggttagtgaagactactggaacagcgacaggcaaatgcgctcgctgggcgttggctacagcaacagctggaatgggatcacctacagtctgaattatagctataaccgcaatacaacggacaacagcagcaattccgacgacgatagcagccatacaaaaacgtatgatagcgaccagatattctcgctgagcctcagtatacccctcgaccgttggcttagccatagctgggccaactacagcctgaataccagtaagcggggcgataccagccatactgtgggcctgaacggatcggcgcttgccgatcaaaaccttaactggagcgtacaggaaagcgaaaccaatcatggcgttggcagcggcggctatgccagcctgagctatcagggaacctatgccaaagtgaatgcggcctataattacgaccacaatcagcagcaggttaactatggaattgaaggcggcatggttgcgcatgcccacggtattactctcagccaggcattaggagaaacatcagcgttgattgaggccccgggagccagcggcgttaacatcactaaccagaccggcgttaatactgattttcgcggctataccatcgtgccttatgtcagcccttaccgtgaaaaccagatcgcactggacaccagcgcccttcccgacgatgcagatgtttccctgtcttcattaacggtaacgccaactcgcggggcgatcgtgcgtgcccattttaatacccagataggcaaacgcgtattaatgacgctgactcgcagcaatggcgaggctgtccctttcggggcgatagtaaatgctgaaaacaacaacagtggttttattgttggtgataatggtctggtttatctcacggggatgtctgcaaaagggaatttacaggtaaaatggggaaacaagtcaaacgagcactgccagatagcatttaatctgccggacactttcaatagtgtaaacattattgaaatgaatgaaatctgtcactaa

SEQ ID NO: 383759 - DNA, 999 bp, Salmonella enterica
atgaacgccaaaaatattcttaccttcgctattcttgctagtatagaactatgctcagttgcagcaaacgcggcaataattaacactcaatctgccgggacaaatactttcaaaattaatttatccggtttttcaattcctgctgcggtgggaggcgaaacctggtatgatgactggaatgtttataataaattagatgttatttctagcagtcagcagggctatgctgtcattacagttaatggaactgttgttggcacagcatcgacgggtggcaatatctatgctaccagtaatccaggtattggcatcacctatgaaatcaactattcaacactaggagcaaccacaccacagaatgcttatgcgccaggtgagaaactcgtatttactaccgggtctgggtataacggatatatgcatgtaaaatatgccatagttcgtctatcccagcacgttcccgcaggcactatcaccagcgttccggatgtaaccatctcttatatcaaccctgccggtagcggttacgccgacaaatctgtcctggtatactctggaatagccagtcaaccaaaaataaccgcatgtaaaattaacgcgccatcggaaatagagctcccagccatttatggtaatagccttgttaatggagcgcaaggcgtaactaacgcaccgacgataacattagaaaattgtccaggcgcaataacgggcatcagctataactttgccgcaacgtattataatacctgcggcgcggccaatggtatattttgcactcaacatggagctgggtatgcaaatggcgtggatatacaaatacaaaatgccgatggatctcctcatcaaattaatagctctataccgcttaataattacaacggctccggtgattataacatccccgattttaaagtcgcttattacatcagtgataaaaatgtcgttaccgcaggcaaagttgccagcgctatcgatttaaccgttagctataattaa

SEQ ID NO: 383760 - DNA, 522 bp, Salmonella enterica
atgaatttaaggataaacaaggcattaatgccgattctcctctgtagtattttattttccggcgcctgcgcggcggtaagaattgacatcaatggtacggtgattgcctccccctgcgtggtcaacggtggccaggattcattgagcgtcccccttggcgatagcattcaggccgatagtttgtccaccgccggcagtacgaccgactgggcgaatttcaagctggcactaaccgcctgtccagcgtcgacatccagcttcagcgtggcattctctggaacgcctgatgctaacgacaacgctaaatattccaataccggaaccgccactaacctgaacctggagctcaccacccaggatggcgcaaccgtcttaagcaacgggacgtctatcgacaatgtcgccatacccgccaccagccatgcctacgatctcctgctgcgcacccgcgccgtctccaaaggcagcgtgatgccaggtaccatcctcgggcaagtgcaagcaacctttacctaccagtaa

SEQ ID NO: 383761 - DNA, 525 bp, Salmonella enterica
atggcgcagctaaaaagcagaattattgtaattttcaccgctctatggggcaccttcggcatgacctattcatctgcgactaatatcactatcaatggtaccgtcgtagcttctgcttgcgtagtcgatgccggaacacgggaacaaacggtaaaatttgaacaggctcgcgcggttaactatacccagcctggcgacaccagcgagtggcaagattttgccttaacgctctcatcatgccctgcatcaaccacgctggtcacggcaagtttgagtggtaacgcggatattgatgatcccaacaaattcgccaactcgcagggggatgccactggaatggcgctgcaaatcatgacccgagatcatctgacggagattgcaccaatgggagaaatttccgccaacgtcgatcccattaatcgcagtgccgtcttcccgctttccgccagaatgtatacccctaccgggagcgtaacagcaggcgacttcaaaacgacagtacagctgtcattcacctatcagtaa

SEQ ID NO: 383762 - DNA, 153 bp, Salmonella enterica
atgtcagttaacgtcaatgaaaagaaatcagaagaaaaagagataaacgatatccatcaccgccagcagcgaccaaagaataacgtaaagcatgaaatgttcgcgaatattattcatcagaaaatgaaagagacgacgcatagtttaccttaa

SEQ ID NO: 383763 - DNA, 1728 bp, Salmonella enterica
gtgaataaaaatataattatcaatacattaatactattaacagggtgtggtatcgcttccgcttatgccacagcgcagacttacctcacagaagaaacccacattgatttcagcgttgacacgcagcagcccagcacaaaaacgcaacagagtattacttcggcctttgaggaaaataaaaattgggtttggtttaacctgacaccagaggcgctgacggccaatcgctggaatagcacttcacgctatgagattaaaaatcaacaaatagaaatcgaagggataacctactctctcaaaacagaaaacaacggtaaaacactcagtctggtgagcgaaccaaagatggcctgcggcttttttgactgtgttattacgttgaagcttcagcaggtcgatgacaacactccgggacttcagaaaatcaaatcacgtttcgcagagcagcaacaaaaatggcagacccgcctcactcaggagcgtgaacagctaaccgccctcgttcagaaagatgattttcccggcgtcgttttttccgtcacccccaatctggcgatcaaactcccgttgtcattttataactcccttgattcatggaactccggcgcctatttccgccgcatgggaaataaagggctttatattaatatcaaagacgaaggtacccacgtttatagctttacagaacacgaaaaaacagcgccagaccataaacaatcagaaatgattaacggtgagatttttgtggttaaaacagcaaaagaccccgcctatctggacagatggctcgccagccaaaaaggcattcttttccgcaccgacaacggcgctgtctactacaacgaggactacacccctgaagccgtgtattttcagtatgacgatgccaccgggacctggcttgttgcccgagccaatgctgtagacggcgagcttacaaccgttgcgcgtgcctgggctattgtgcgcaccatggagccacaatatcgcggtaaggatgtattgtcgctggccgacctgtcattgccggaaaaagagctcgaatcgcgttatcagaccagcatgaatcagctattcgatgttgttgaaacccagcgtagctttgaagaaacattaacgccgctactggaaaaaccacagcgttttattaagcctctttcaccgcgaatgtcagtaaaatacaacagtagtttttctaattatatttatgtcgatatcaaggttcatcataccagccttggcaaggtgatggcgaaaaaccaacagaaatatcccaacggcaagcggctggaaaatctctttatttttacaatgaacggagataatgctaattattcctggtactatcgcctggccgacaatctgacgctggagtttccggcccggcaggcggcatcgctggagagccagctatttctggctcaggtctttaagcatcttgatttcagcaagttgccgaaaattcccgccagcgaaaagaaaaacctctttaaatataaccccttcgcaaaagccgttgccgatattggctttgaggtcgacgatggtttcatcgataacgacggtaatttgctgattccgatgcccaaaaacggcaaatactcatttgagtggcagtctccctatattgtcgccacctttgttaaatctgaaggggaaggtgtataccgcagaaccgaccaaaaattcacctttgaccgccacggtaaagccgttaagaaaccctaa

SEQ ID NO: 383764 - DNA, 1008 bp, Salmonella enterica
atgaaaacaatgaagggaattgtgggaaggtacttggtgtttatcggtttatcgttatggtttatacccctccccagtaaggccgggtgcgagtttactgacggcagtgttgtgtcaacgacgacgtttaatattcccgcgctaacaatcaatgaggatacagagccaggtacggttctgtatgagcaagcgttagttggtaacaaaactaatgtgcgctgccatggggtgggagcgatttaccaggggtatacgcaactgaccagtagcgacaagcgggccgataatccgctgcctgaagtttatcagacgaatgtgcccggtattggcatccagaccgcatggaataatacgggtgggtctgcaacgcttaacgcaaataacttgattatcccctggcatatagggtcggcaaataccgagaataaaagctacgcccttacgatcaaagccggcctgcgcattgttgttaccgggccggttagttccggcgttattgatacctcgcagcttcaggctgactggaaatacgatgatttagtggttgaacaattacgtttttcacctgtcaccgttaacgtgaaagccaatacctgtaatcttgtggaaagtaatattacggtgccgctgcgtgatatcatgatcggtgagatccacaatggtttctctgatgtggtgtctgatagccgctttaagatccaactggagcaatgcgatgcgggattgaaagtcgattataaattcaccagcgcaggctcaaccggcgtcagcggaaatagcgatattttgaccattgctgataacaacggggcagctcagggcgttgggctacaaatcctcgacagtaacaataatgtgctgcagtttgatcgggaatacaatgtggccgtaaacaccagtgacggccagtcgctcattattcccttacaggcccgctatattcagaccggtccggttaaagccggaaaagtggattccgttgccacctttgaagtgttctatcgttag

SEQ ID NO: 383765 - DNA, 2493 bp, Salmonella enterica
atgtcttctttcctgactgctcggcaatttgccttaagcagtatcccattaatgttgctggcagttatttacccggtttgtgcagaagatgagtttaacctgcgaattctggagctgggaacgccgctggaaaatacgtcagcactgcaaacgtttttgcaaaataacggattacagcctggaaaatatctcactgtcgttaagtgggaccgggaaatcgttgataacagaatggttctctatgtactgtctgaagacaagacggcgctaatcccacagtttagtaaagcggatttacgcagcctcggagtgaacgttgacagtattgcggcgatgaaaacactggcggaagatgtgccggttggggatatttcccattatatcgccgaggcgagctatgattttcagcccgacactcagacactctatttgcgtattccacaaatttatcgtgatgctcaggccagcggcgccatcccggttaaatattgggatgacggcgttccggcgatgtggacgagctattatgtcagcggaacgcagcagagtggcgattatggttctgacatcagcaactggctgagcttaaattcgggtgtcaacttaggcgcctggcggttacgcaatgatagtacctggagcgattcggaggactgggatgctattagcaccgtgcttcaacgcgatatcaaatttttaaaaagccagttggaagtggggcaaacttataccagtggtgagctattcgacagtgtacagatgacaggcgtcaagcttgagacagacaccagcatgctgcctaatagcctacaagggtttgcgcctgttgtacgcgggattgcgaacagtgatgcaaaggtgactatccgtcaaaacggctacaccatctatcaatctaatgtttcaaccggcccgtttgagatccgcgatttaagtcaggtcactgcaggctccgatctggaagtgaccgttgaagaagctgacggcagcaaacacagctttattcaggccagctcctctgtaccgattttacagcgagaaggggcattaaaatacagcctggctggcgggaaataccgcgatagcgacggtggcgaagaacctggctttggtcagatgacgctggcttacggcctaccctatggtatcactgcatacggcggcgcgcttggcgcatcgatgtatcagtccgcgctgctcggtattggggctgacttacagcgtttcggttccctgtctgtggatgtcactgtcgcccgaaccgcctttaacgacggacgcgataattctgacggtctctcctggcgtgcgcagtatgcgaaggattttcccgtaaccgataccactgttaccctggccagttaccgttattctacttccggcttttacacctttcaggaagcgctcgatcagcgcaatgacgatgacgctgacgatgacgatgacagtttctataactatcgtcagaccaataaccgacgcagccgtttacaactgaatgtctcgcaatcactcggtggtatcggctctttttatgtgaacggttatcagcaggactattgggatttgagtgaccacgaacgtagtctcagcgtgggttttagctccagttggcaggatatcacctggtcagtggactacagcatgacgaaaacacctaatagcgatgaagatcagcagattgcctttatggtcaatattcccctgtcacgttggttggcgaactcttgggccacttacaatgttaacagttcgaagaatggcaatacggtgcagcagatcgggatgggcggtacggcgctggaggataacaacctgagttataacttacagcagagttataccgaccacgatcgcgactacggcgctagcatgtccgcgcgctatcgtggaacgtggggagaagtcggcacgggatatagttatgccaaagataacaaacagtggaactatagcgctcagggtacggtggttgctcactcgcacggcgtaacgctcggtcagacggtgcaggacgcttttgcgattgtgcatattgatgacggcgcgaaggtgaaagtggaaaacgggcagggcatatacaccgattactggggcaatgcgctggtgccaaacctgaccaattatcgccgtaatacgattatggtgaatagcgaagcgcgcgatgatttagagattgatgcacccggaatcgaggttgtgccaacgaaaggcgcggttgtcatggcgaattacttggctcgtcaggggcagcgtgtgctattaaccctgcgttatggcgacggcgtggtgccgttcggcgcgatcctgtcaatgaaagaggcatccgcgatagttggtgatagtggcgaagtttatgttacgggtctgcaagggagtcagcctttcattgtgcagtggggaaatagcgcagcgcagcgctgtgaaggtagtatcaatcttcctgatgaggcgctaccggctatttatcagacaaccatccagtgccactaa

SEQ ID NO: 383766 - DNA, 714 bp, Salmonella enterica
atgaaaatgacgctgcgcctatgcggtttttttctggcattactggcattgaccgcccaagctagcattgtggttgggggaacacggattatctacccagcaaataaaaaggaagtacaggttacgcttaaaaatggcgatgcaggcgttaaatatctggtgcagagctgggtgagcaatattgatgactcaaaagcaccgtttattatcactccgcctatttataaaatagaaggtgggcgtcaggttttgctacatgtagtttttaccggtgataaaaaccaactgcctgtggataaagaatcgttattcgtcgccaatattaaatccgtcgctgcaatgcctgaagagctaaaagataagaatacactgcagttcgccatgaaaacgcggcttaaattgttctggcggcccacgaaattatccgatactgatgccttaaccgcatgggaaaaagtggtcttcagacgtcagggcgaccaattaatcgcaaaaaacccgacacctttttatatctcgctattagatcttactgttggggggaaagcggttcaaccactcagcgcgaaacaagttcctgaggcgttggcgatgacgctggccccctttagcgagcaacagtttcgcattccagcgggtgcatcgggaaaggcagcctggtcggcagttaatgattttggcgcggctacggccacccgtcagcagaatttatag

SEQ ID NO: 383767 - DNA, 585 bp, Salmonella enterica
atgaataaaaaactgctgtctatcatcgtttttgggacgatgatttctgccggaaatatgtctgcaatggctgccagtaccggtacagtgaatttctctgggcgtattgtcgcggatacctgcgaaattaatgtggatggttccggctcggagtcagtgacggtgacttttccggatacttatccagcgaattatgcggtcgatggctcagtgggcaccagcaaagattttagtatcgcattgagtaagtgcgatccggcggtagccaaattaaacctgatgtttaccggcgacgtatctgatgctgcaagcctccgtctgaaaaatagcattgagggcaacactggggctgccagtaatgtcggtattaccgtaaccagtaataatggtgctggcggtgatgttgtgtttgatggctccgtaccgaatgaaaacactgacgtggctaatggtaataccggtgatgaaggtacggcaacgccgagcgtcttcaattatacggcaaaagttattcaggttggcagcgaattgccaaccgcgggtttgtataaatcttctgccaatttcaccgtgttctatcgttaa

SEQ ID NO: 383768 - DNA, 579 bp, Salmonella enterica
atgaaaaaaacactcctggcaactgtgctggttatggtttctggttcagcactggcaattgatggtcaaattgatttctatggtcgtgttgcgccaggtacctgtgaaactcacattgtcaataaaaatggcaccagcatcattggtgatggcgaagtccggttgcaaactgcacaaatcgctgacattaccagtgcggtgcaagcgaatactgtaggtgctaaagcagaagattttgcgattactgctaactgccagggggcatccaagtcgctggaattaacaatgtcatcccctgcttacgccgcaaatgacggcaccctgaaaaacaataccaacgtcactgtcggagggagtgcggcagctacaaacgtcaatattgcggtgcatgacgtgaccagcggtacgccagcactggtaaaaatgaacgatgcttctgatgctcatatactggatctgtctggcgcatctgagggcacctattactttaaggcctcttacgtccgtgctgatggcagtaaggatgtcacggatggtcatgtcaccaccaatgcgttgtataccattacttacaagtaa

SEQ ID NO: 383769 - DNA, 741 bp, Salmonella enterica
atgctgaagaatgtaaaaaaaatcgccggagctttatccctgggatgcctgttaataagtatgaacgctctggcggatattgttatttcgggcacgcgcattgtctatgatgcgaataaaaaagacgtcagcatacgactcgaaaataaaggctcacgcccattactggtgcaaagttggctcgacaccggtaatgacaacgtcgaccccagtcagataaaggttcctttcactgccacgcctccggtgtccagagtcgaacctaagcgtgggcaaactgtaaaaatcacctataccagcgccacaccgttaccgacggatcgggagagcgtttactggtttaatgtgctggaagtaccgccgaaagtttcgaacaatgcggaagaaaataaaaacctgctccagttggctttccgtacccggatcaaactcttttaccgcccaaccggcctgcccggagaaccctacgaagctgtcaaaaaaatgaaatggcaggttaaaccacaatcaggcggcgtggtaatacaggccagtaacccgacgccttatcacgtgtcatttaacggggcgacgcttgaggctaatggcaaaaaatactctattgcagtctccatggttgcgccatttagtcaggccgattttgctgtgaaaaatctgaacggcagtgtctcaactggaaaagtaaattaccagattataaatgatttcggcggcaccattgacggttccgcttctctgtaa

SEQ ID NO: 383770 - DNA, 2595 bp, Salmonella enterica
ttgcgcacctataaacctaccgttcgtactcacaaaacactgctggccatgtgctgcgcgctgttttatagcagcccaggtatggccgaagaggtcgtggaatatgacagttccttccttatgggggacggtgcggccagcattgatgtctcccgttatgcaaaaggtaaccccacacctccgggaacgtatgatgtcagcgtttttgtaaacgataaaccagtgagcaatctgaacgttccttttattgacataggaacggaaagcgcggcggcttgtctgacggcgaaaaatctgtcgcagttgcatattcagcgaccagagaatagcgttgtgctggtcaaacgtgatactgaggaaggcgattgtctcaatattcaacagtcttttgaattggctgatgttcgctatgatagcggtgaacagcgtctggatcttaccattccacaagcctatgtccttaaaggctatgaagggtatgttgatccttccctgtgggaatcgggaatcaacgcggcaatgctctcttatacacttaatggttaccatagcgactcatcaagcggcaataatgatagcctctatgcctcttttaactccggcataaaccttggcgcatggcatttacgtgccagagggaactactcctggagtaacgacggcgacagtgatctcgatttccagaatcgttatttgcagcgggacattgctgcgatccgttcacagattgtgatcggcgaagcatacacctctggcgaaacttttgactccgtcaatatccggggggcaaggctctatagtgacagccgtatgttaccctcctctcaggcaagttacgcgccaaccattcgcggcgtagcgaacagtaacgcaaaagtgaccatcacccagggcggttacaaaatctatgaggcaaccgttccgccaggcgcgtttgtgatcgatgatctcagcccttctggctatggttccgaactggttatcaccatcgaggaagccgatggcagtaagcggacctttacccagcctttctcatcagtcgtacagatgcagcgaccaggcgttgcgcgttgggatgtgacagcgggtcaggtaatggatgattcgcttcatcacgaaccgaatatggctcaagcctctttttattacggtattaataactacttcacaggttatacgggtatccaggccactgacaacaattacaccgcaggtctgctggggcttggcatcaacaccaccgtgggcgcatttgctattgacgtaacacactcgcgcactgagatccctgatgataaaacctatcagggacagagctaccgtgtcacctggaataaactgctcgaagcgacaaatacatcggtgaatctggccgcttatcgctattcaacacaagattatcttggactgcacgatgctctgacgcttattgacagtaccacgcacgccggcaacggtgaacacgtcaatacaatgaataccttttcgcgcatgaaagaccagtattccatcagtcttaaccaaccgttgaattcaggtgataccgattggggatcgctttatttatccgccacccgaacagattactgggcaggcagcgacagtattaccgaatacagcatggggtacagtaagagcgtttcctggggcagtttcagtgtcaatatgcaacgtacctggaatgaagatggcgaaaaagatgactccgtgtatgtcagcgtcagcgtgccgatcgaaaatctactcggcggcaagcgtcggtcttccgggttccgtaacttcaactctcaggtgaacagcgatctcaacggcaatcaccagatgaatgccaacatttctggcgggagtgaagataaccgcatgtcatacagtgtaaatactggttatgccatagcgaaagaggcaacagatgttacctcgctgggcggttacttaagttatgactcgccatggggggggctgtctgcatccgcatcagcaaacactgaccacaatcgccagtattcgctaagtgccgaaggtggctttgttttacacagtcgtgggcttactttcaccaatgaaaacttctccgacggcgatacgctggtgctggtgaacgcgcctggggcaaaaggtgcgatgatcaacaacggcagcagtagcgtggaccgttggggttacggcgtcggtacatcattaagtccctatcgtgagaatcagatcgatttggatatcaacaccctggaaaacgatgtcgaactcaaaagtacgcgtgctgtagcagtgcctcgcagtgggtcaatcgtactggccaattttgaaactgaccaggggcgttccgccgtactgaatatcgttaacagcaacggaaagccactgcctttcgccgcagaagtatttgaaaatcaagtgatgattggcaacattggccagggcggtcaggcctttgttcgcggcattcaggagcagggtgtgctgactgttcgttggtttgaaaacaatcaactaaagaattgcaacatcacttatcaattcccttcatcacctgagacgttgggcaaaaactcaatgctaattttaaataacttaacttgccatatggcaaacctctga

SEQ ID NO: 383771 - DNA, 570 bp, Salmonella enterica
atgaaaaggatcttagctacagttccgttaatcagtctctgcctgccgctcgtgagtaaggccgacccaacgccaaataatgtcgacgtcgacttcattgccaccgtcacggcgacaacctgtactatcactattgtaaaagatggtggcgttgatatcagcaatgatggtaactcgcagtatagtttgtccatccctgacgttggactggataaaattatcgccgcagacgagacagcgcaggcaaactttaaactggttgccagcgattgcagtagcgggttaggcacaatcaacatgaaaatacaaggtgatactgtttcaggggcgctaatcaaaaaccagtcatccactgcgccagttgcggcaaatattggcatgggtttaaagctcagaaatgcggctgactcagcgttcatcacgccgaataatactgcaacgtattcatggacgagcgataacatcagtaacggcttaccgatgacagtcgcattacgtgaaaccgcgacaaatcagggtagcaccggtaacttcaccgccaaagccacctttaacttcacttatcaataa

SEQ ID NO: 383772 - DNA, 606 bp, Salmonella enterica
atgaaaataaacattatctccagcatgtttttagcggctgtcgccactggcgcttgtgttgtttctcctgtttatgcggatggtacgccttcagtgggtctgactgttaattcgatcgtcacatccggaacctgtgcagcaacgatggatactggcgcatccagtggcacaacgaaagtggtcgattttggcagcgttcctgtctctcagattgccgcgatgacaaaagtagcacaatttaaaattcagtttagcggttgtactggcgtgcagtcggcacaggtggtattaacaccccggaatgccggctgctctggcgataattccaatcttgccgcctttgctaacgcctccactgcaacaccaaaagcagcaagaacggcggtcgaagtctggacgagcgacacgcccgcgggttccggtgctgtacaactccattgcttcaataaaaacacacagactgttgatttatctagcgtaaccagtactactacgtacgattatccactcagtgcgcggctcagagtggttgagggaaggcaacaatctgaagtgaccccaggtgatttttattcacccaccacattcacgatctcttaccagtaa

SEQ ID NO: 383773 - DNA, 600 bp, Salmonella enterica
gtgcttccctggcatcataatttctcgctgtatacagggttattgtcagccctgattattatgccgggatattcggcagagcaggatgtcgatattatcgccaccgtcgtcagcacgacttgtcagacagaatttagcgataacggcattataaatctgggcaccgttgggatgaattatttccccgataatgtcacggcggaaacggatttggcaggaggaaaaacgtttacgattactgtgctggattgtaaagacaatgggactggcgtcagtccctcacggttaaaaatagatttcaagccgaaaagcggtcaactggccacaggtaatctacaagtctttgccaatgaagatgagcagcaacctactggcgcaaagaatgtaggcatcgttatattttcccggcaaccaggcgaaacaccatttaatgtcctgcagacggatggttcatcacgttccgtatttcctgttacgccgtccagcctggtgaattcttcgtggcagttttacgcccgcatgcagcgcgtcgtgaataccacgccaccggaagcgggtgaagtaaaaagtagcgtactggttgatgttcattatgaataa

SEQ ID NO: 383774 - DNA, 1224 bp, Salmonella enterica
atgagaaatataaaacagatgatgcgatacattgcgttcttgctgctggtggggtgcgccacttctgcgacgggagctgggctcgtcgtgggtaacaaagtggaggggcccaaaggtaatatctggaaatctgccggtccctcggaagactttacctttcagtatacgaatagttttagccaggtcattgccgttcataaggagaccagtctgcgtaaagttgcggtatttaactggtctggcgaacaatcggccggtgctgtttactgcgataaaaacgataaaaatcctcttggtatcaggctattccacaactatatctcttccggtaagaatgccgatgggcaccgattgtggaaaacaaacgttaccgggctttattttgctatggaactcacgacattacggactgccggagcatcaaacaaaccccaatggctggataatgatccgggtaccgctggagcaaagagtacgggactggtttatgacagtggtgctaccgcctgtacgcatgactattattacctgttaggtggactgcaggtcggcctgaaaatacatctttatgccgacagttcctttatcccaagcaccagcgcagatggggacaagttccagttatcaaaaaccggagggcatggcgcggtagacttttatttatctaacgatcaggccacttatgcacaaagtcgctataaagccaacattattattcccgccactggattaaaactgcaatggccaacttgtaaggaggcgacagtctctggcattggcggtactcaagtcaaggatactaaccaggtgcaactgggaagttatcagccaaaacagattaaagccgggctggcccccgctaagttttcaattgatatggacaattgtatttatatccacaatattgaagtaaaacttgcgacaacgaaagttggcaagaataataccgaactgctgggtaatcaggaaacatcagacgctgcttctggcgttggcgtattaattgaagggctaaaatccaatgccagtgcgcaaatgaaattactacccaataactcatcctcaatttataaggatattattaacgatccttacacagagagtaccgaaggggtcaaggattataagctctattttcaggctaccctacaacaggatggcaacgatgatattacccccgggaagtttcgcgcacgaggcaccttccagataacctatccgtaa

SEQ ID NO: 383775 - DNA, 912 bp, Salmonella enterica
atgagcgacgtcatcacgactgatcaacctgccagtgcgacatcgttactacaggccaaaggtattgcaagccttgtagaaagagcactgctcaccgaagtacgtttaacgccaaaaccaggtcttgtggatattcgtaactccggtgcccataaagatatggatttagctctatttgaaaagagtacagtagcggttgcaccgtggatggaaaatttttaccagttggggtacgacagctccgcactggaagcagaactcgtattgccgatgcttcgccccattggtatggcttgtgaagccgacatgctacaagcgacagggggagttaacactcaccgtggcgcaattttctcctttggtttaataagtgcagtcattggccgcatggttgcgctggaggaagcgctcgaacagaaccgtatttgttactgggtagcaagaatgtgtcgggatctggtcgtaaaagagctatccagtgaagcgacaaacgcagcaaccagtaaaagtgtcgaacactttttacattacggcctttctggggcgcgaggcgaagctgaaagcggattccagacagtgagaaccgtagccttgccaatttttgaacgtatccgcgcacaaaacgaagatatgaatctggcattgctgcaaacattgttgcatttgatggcgtggaataacgacaccaaccttgtctctcgcggcgccttaaaagggttgtattacgtacagcagcaggcgcagaaaatgttatgggaaggaggtgtattaatgcgcggcggcctggaggcattacaggctttcgacgatgaactgatcgcccgcaacctcagccccggtggtagtgccgacctgttagccgttacctggtttttaagccacttcccaaaaggcgaaactttcgctgattaa

SEQ ID NO: 383776 - DNA, 552 bp, Salmonella enterica
atgaacggcgcagacctgctatcaggcggtcagcctgtcacgctcgaagaaatgttgctggctcgcgaaaagcgagctgcaagacaacggcacgcagtggcttgctaccgggtgtcgttaatctccctgacgctggtcgcgccgggacaggtaaaaaattcacctgtctggcaacgtgtggcgggctatgcgcgtgaggctgttctcacgtgttgccagcaacacgagtgggtaagcgtctgggaaaagagcattgatgaacgcagtgggcctgaatggatggcagcggtctgcgccccggcaaaaaacttaaaacaggcgatgctacaacttgaggacgaacattctcttggtcgactctgggatattgatgtcctggacagtgaagggacagggatttcccgtcgtacactgggtctgccaccacgtcaatgcttgatctgtcaggatgctgcgcacctttgcgcgcgtgccagacggcatacgcctgaactgctgttggaagaaatagctaaaaggattgtaagttatgagcgacgtcatcacgactga

SEQ ID NO: 383777 - DNA, 294 bp, Salmonella enterica
atggacattattaaagacgccctggccggcacgctggaatccagcgatgtcatggtcagaattggtccttgcgatgaaccagaaatacacctggaactggagagcctggtgaagcaacaatttggcaacgccattgaacgcgttacccgcgaaaccctggcgaagctgggcgtggagcgtgcacatgtagtgattgatgacaaaggcgcgctggagtgtgtgttacgcgctcgcgtacagacagcggtaatgcgtgccgcagaacaaacggaaattcagtggggggcaatatga

SEQ ID NO: 383778 - DNA, 1011 bp, Salmonella enterica
gtgaatatcatctttaagcggtgtattccacaacgggatgccaggaacagagcacggctggttgagtttcttagcgagtcagggctgacgttggaagccgattgcgaagtcatggtactggcagagcaatgtgggcgcctggtcggctgcggcgctattgcaggtaatgtcattaaagatatcgccatcgaccctactgcacgtggtgacggcctgagtctgaaattgctcaccgaactgctgatactggcttgtgagatggggcgtaacgatctttttctgtttacaaaaccgaaaaatgtcgtgcttttttctggcgcaggttttttccctattgcgcagacagagcatgttgtcctgatggaaaatagccgtgaacggctggcacgttattgccgacaactggcgttatatcgtcagccaggagataaaattggcgcaattgtaatgaatgccaatccatttaccctggggcatcgttaccttgtagagcaggcattaaaacagtgtgactggttgcatatatttgtagttcaggaagatgcctcttttttcagttatctcgaacgctggaaattaatcgaacagggtattctgggaatggatcgtgtgacactgcatccaggatcgtcatatatcatttctcgcgccactttccctggttatttcctcaaggataagggcgtggtagatgaaagtcacagccaaatcgatttacaactctttcgcgatcacctcgctcctgccttaggtattactcaccgatttgtgggaacagagccgaattgccagctaacgcgcgcctataaccagaaaatgaaaacgctgctggcaccgaccattgacgtggtggagttacccagaacagaaaaagaaggcgctgcaatttcagcttctcgcgtgcgcaagctttacaacgaacgaaactggcaggcgctggcgccgctggttccttcttcaacgctcgcttttttgacgcgtctggcggccggtaatacggaaacggcatga

SEQ ID NO: 383779 - DNA, 249 bp, Salmonella enterica
atgaacgctgcacaacttttaggcgaaggcttcacgctgatgtttctggggatggggtttgttctgggctttctctgcctgctaatcctcgccattcagggaatgtctgtcgccgttaaccgtttttttcctgaaccggttgccgtaccaaaacccgctgctgctaccgctgcgcctgctgatgatttcagccgactgaagccggtaatcgctgccgctattcatcatcaccgccgtcttaattcgtaa

SEQ ID NO: 383780 - DNA, 1782 bp, Salmonella enterica
atggctatttccattactgatgtggttctgcgcgatgcgcatcaatctcttttcgctacgcgtctgcgcctggacgatatgctacccatcgccgcagaactcgatagcatcggctatggttcactggagtgctggggcggcgcaacctatgacgcctgcattcgttttctgggtgaagatccgtgggaccgcctgcgtgagctgaaaaaagcgatgccgaacacgccattgcagatgttactgcgtgggcaaaatcttttaggctatcgccactatgctgatgacgttgttgaacgttttgttgaacgtgcggtgaaaaacggcatggatatattccgcgttttcgatgcgatgaatgatccacgcaatatgcaggcagctttgcgcgccgtgcgtagctatggcgctcatgctcagggaacactttcctacaccacaagcccggtgcatacgctgcaaacctggctggatctgaccgagcaactgctggaaataggcgtggactctatcgccattaaagatatgtcgggcatcctgacgcctggcgcatcctgggaactggttcacgcaattaaacaacgttatgacgtgaaattgcatctgcattgccacgccactaccgggatggccgagatggcactgttgaaagctatcgaagcaggtgtagatggtgttgatacggcaatatcttcaatgagtgccacctatgcccatccggcaactgaagctctggtcgccacacttgccggaacggaattcgataccgggctggatattcaacgtctggaaaaaatcgcggcttatttccgcgatgtacgcaagaaataccatgcgtttgaaggccagttgaaaggttacgacagccgaattctggtggcgcaggtgccaggcggcatgttgaccaaccttgaaagccaactgaaacagcaaaatgcttccgacaaactggatgctgtactgagcgagattccgcgcgtgcgtgaagatttgggctttatcccgctggttacaccaacctcgcagattgttggtactcaggcagtacttaatgtgctgacgggtgagcgttataaaactatcgctaaagaaactgctggcattctgaaaggtgagtatggcctgacacctgctccggtaaacgcgactctgcaggctgaagtgttaaaaggcgatgccgctatcacttgtcgccccgcagatttgctgaaacctgaactggcacaactggaagaggaagtgaaacgccaggcggcagaaaaaggcatcaagcttgcggctaacgccattgacgacgtgctgacagttgccctgttcccacaaattgggctgaaattcctggaaaatcgcggaaatccggcagcatttgaacctgtaccgcagattgaaagcgctcgtccggcagaacctgcgaaaactgaagcgaaagcgccatcttcttctggagtttacaccgttgaagttgaaggcaaagcttttgtggtgaaagtaagcgaaggtggcgacattcagcaagttgccaccacgaccgccgctcaaccttccgcaccagctaccgcgcctgccgggaatggtactccggtaaccgcaccgctggccgggaatatctggaaaatcattgctaccgaaggacaaagcgtcgctgaaggtgacgtgctgctgatccttgaagcgatgaagatggaaaccgagatccgcgcagcacaggcggggactgttcgtggtattgcggtcaaggccggagacgccgtcgcggttggcgataccctgatgacgctggcgtaa

SEQ ID NO: 383781 - DNA, 1668 bp, Salmonella enterica
atgaaaaggcgaaaatcaaactcgcaaattatttctcaggtgataattcaaatcgtgattcaatggttctcccgacgctcatttcaaaatcgcatcttcttgctgattcttttcacttctactgtcgtgatgctggcgatttcctggtatttaaccaatatcactaaagagcgtctgcactatcaggtaggtcaacgggccttgatccaggcgatgcaaatctccgctatgccagaactggttgaagccgtcgaaaaaaatgacctggccagaattaaagccctaatagatccaatgcattcattttccgatgccacctacattaccgtgggcgatgcaaaaggtattcgcctttatcacgtggtgccaaatgaaattggtcagcaaatggaaggtggcgataacaacgaagcgctaatcaatgccaaaagttatgtttctgtacggcaaggttcgctgggctcttcgttacggggaaaatcgccgattcaggacgcgacaggtaaagtgataggtattgtatcggtggggtataccctgcaacaactggaaagctggttgaatctgcaacatagttcgttaatgttacccatgcttgccctacttttgttgttgttattttctgcgcggctgttttcattacatattaaacggcagatgtttaatatggagccacaacaaatatcgaaactggtattacaacaaaatgttttatttgagtcagtatttgaaggtttaattgccattgattcacaacatcagatcactgcaattaatcagacggctcggcagatgcttaatcagccatatcctgagcaatatttaattggcaaaaaaatatctgatgtcgtttcgccagatgcttttttttacgataagccacagaataataaaaaagatgagatagttacctttaatcaaattaaagttattgccagccgtatggccgtcattctcgataaaaaaccgcaaggttgggtcattagctttcgtagtaaagatgatattaatactctcagcctgcaactgagtcagattcaacaatataccgataatttacgtgcagttcagcatgagcaccgtaacgtgatttctactattgctggtctgctttatttaaaacgctacgaccatgctcttaacctgattcaacaacagtctgacagccaccaaaaagtcattgattttattgcacaaaaattcaaaaacagtcaccttgccggcctgttaatcggtaaatattatcgtgccaaagagttgggtcttgaattggtgttcgatcccgcctgttatgtagattcactacccacatcgcttacccataatgagtggatttccattgtgggcaatctgctggataacgcctttaacgccacgctgaaacagccggatggtagccgtaaaattgagtgtctgattaacagcgagaccgatgaaatactgattgaagtagccgatcagggctgcggtatcgacaatagcattcgcgatcatatttttgaacgaggtattaccagcagtaataacgctgaacacggtattggtttgtggctggttaaaagctataccgaacaggcgggcgggcatatcgttattgatgacaacatcccttatggcaccatatttagtttatatattcccctgaccagagaacaacatcatggataa

SEQ ID NO: 383782 - DNA, 684 bp, Salmonella enterica
atggataagataaccacactgatagttgaggatgagccattactggcagagattttggttgatacccttaagcaactgccggcttttgatgtgattggtgttgcggataaacaagaaagcgctaaaaaaatgatccgcctttatcaaccacaattaattttactcgataattttttgcctgatggtaaaggtatcgatttaattcgccatacggtgaataccagctatagcggtcgaataatttttatcaccgcagataaccatatggatacgattagtgaagcgctacgcttaggcgtgtttgattatttaataaaacctgttcattaccaacgattacaacatacactacaacgcttttctcgctaccgcagctcacttcgttcaagtgaacaagccagccagacgcatgtcgatgcgctatttaatattcaggcaaaagaagaaaatattgcacctgaggcaacaatgcggggcattgatgaaacaacattacagcgcgtgcggcaatgcttcaacgagccagaggtggtacatactgccgactcactatctcgcctgctcggtagcagtaaaaccacagctcgtcgttacctggaacagggggtaaaagataattttctcgaagctgagatcatttatggcaaagtcggcagacctgaacgaatttatcgcgggaaataa

SEQ ID NO: 383783 - DNA, 306 bp, Salmonella enterica
atgaacaacagcaagggaaggcaaaatggctggcgaaatgccatagattttaatggtgttgccagccgctatgcgttttggttatttttatcagtaagtgtggggatctgcctgttaccactgttttgctggtggctggcgttaatggctaatcctgactacggtgtttttattttctttgctctgccactgagcgtgttactcagcttactctttcttatacctgttcttgccatcggtgtgcggcggatgcatgacattggctactcaggatggtggtttattgtcgcagttttcacgatatag

SEQ ID NO: 383784 - DNA, 264 bp, Salmonella enterica
atgagtgacttagtaaaacaagagcaggctattgcgctaaccatggttcagcaaagagtttcctggcttgctgcggtgcgcatctataaacacttatctcgtgctgatgcagcaaaaatgttgaatatcaccccggaattacttgctcgtatggaaaaaaaagaacaaataagcactccgttaaggagtcgcatggctgaaatttacggatacccagccgccctgcttgtatgtccgtcatggatgcaaagccgtactgcatga

SEQ ID NO: 383785 - DNA, 153 bp, Salmonella enterica
atggctgttcttacccgtccgctttccgcctcagaagcccagaaggcaaaacccgccgctaaagattacgaccgacagcctgtttatcaacgtggcgacacggtggtttgcggtgaagaaatccagcggaatttcagatatccacgcggatga

SEQ ID NO: 383786 - DNA, 321 bp, Salmonella enterica
gtgaagaaatccagcggaatttcagatatccacgcggatgatatctggaaatcgctggaaaaggacgtattcccggccatcgggcagacgccggtgacggaactgaaagcacataccctgattgcggcgcttgaaccggtacgcgcgcgcggcgcgctggaaaccctgcgccgcctgacgcagcggattaataaaataatgaagttcgccgttaactccggtctgctggataccaatcctgcctccaccatcgccagcgcctctttttcactgaacccctgcgccagataccggcggatatcgtcctgcgctcaggcgtaa

SEQ ID NO: 383787 - DNA, 2115 bp, Salmonella enterica
gtgtcattaaaaggactgcgtttcacgctggaggtggagggtctggagccggaaacgttcgccgtggtgaactttctgcttaagcagcgttactcattcccgttcatcctggatgtggatgttgccagcgatttttttggactgacagcagacaggctgctggagaaaaacgccaccctgaccatctggcagggcaataccccgcagcgttacgtcagcggtatcgtcacccgtttcgggatgaaagagtacaacggctggcagatgtgctaccacctcaccttcgcgccaccactctggcgcagcgccctgaggcagaatttccgtatcttccagcaacagaatattaaaactatttctgccacgctgctggatgaaaatggcatcacagactggacaccgctgttttatgaagaccacccggcacgggaattctgtgttcagtacggcgaaaccgacctagcgtttctgacccgcctgtggtcggaggaagggattttcttttttgaacggcccgcgacagatggcccggcgcagacactggtgctgtgcgatgacgtggccgggttatccgctgccggtgaattcccgttcaatccgaacagcgccacagaaaccaccattccctgtatcagtacgttcagctaccaggcacaaatccgcccctcctcggtggagacccaggactacacctttaaagttccgcagtggcctggctattacgggcacccgggtgacagtctgaacgggcaatatacgcagtatgaaatctttgattaccccgggcgttttaaggatgagcagcacggtcaggattttgcccgctatcagatagagggctggcgcaacaatgcggaaaccgcctcctgcatcagccattcaccgggactgtggccgggcgcgaccttcagcctgaccggccatccggttcgggagcttaaccgccactggcaggtggtaagcagcgtactgacaggcaaacagccacaggcgatgaaaggtggccggggattaggcaccacgatggataaccagtttgaggttattcctgccgacagaacctggcggccacagcccctgctgaaaccccgggtggatggacctcagcctgccgttgttaccgggcctccgggcgaagagattttctgtgatgaacatggccgggtgcgggtgcatttccactgggaccgctactgtcctgggaatgagaacagttcgtgctgggtacgggtgtcgcaggcatgggcgggtgccgggttcggcaatctggcgataccgcgtgtgggtcaggaggtgattgtcgattttctcaacggcgacccggaccagcccatcatcatggggcgcacctaccaccaggataaccgctcgccggggagtctgccgggcacgaagacgcagatgaccatccgctcaaaaacctataaaggcagcggttttaatgaactgcgctttgaggacgcgaccggacaggagcaggtctatatccacgcccagaaggatatggataccgatgtgctgaataaccgtaccaccgatgtcaccgccaaccaccgggaaactatcggcggtaatcaggtgattaccgtgcagcagaatcaggtgcagacggtggtgcagaaccagaaagagaccgtggggcaaaaccagagcatcaccgttggcctgaaccaggcagaaacggtgggcgtggcccgtgcgctgacggtgggggtagcgtaccagactacggtgggcggagtaatgaatacctcggtggcgctgacacagtcctcgcaggtggggatacagaagtcgctgctggtcggtaagggttatgacgtcagcgtcggggaaaatgtcactttcacggtgggtaaaagcaaaaccgagagcacaggaaaggtggcggtctattctgccggggagcatctggaactgcgctgcggtcaggcgcggctggtgctgacgcaggatggcaaaatttttctgaacggcacggcgattaatctccaggggatgcagaccgtcagtggcgatgcgctgatgattaactggaactgtggcgtgacagaagacccgccgaaagcgccggaggaaaacggcaacccgccgccggatatgcgggaatactga

SEQ ID NO: 383788 - DNA, 873 bp, Salmonella enterica
atgagcggaaaaccggcggcacgtcagggcgacggcaccatgaagggcggtccgataatccaggggtcagcaggggtaatgattggcgcaccgaccggcgtggcctgttcagtctgtccgggcggcatgacttccggcaacccggtcaacccgttgctgggggcgaaggtgttgcccggtgaagctgattttgccctgcccggcccgttaccgtttgtgctttcccgcacctacagcagctaccggacaaaaacgcctgcgccggtgggcatttttggccccggctggaaagctcccttcgatatccgcttacagctacgtgatgaggaactgatactcaacgacaacggtggcagaagcattcactttgacccgctgtttgcaggtgaaacggcgttcagccgcagtgaatcgttctggctggcgcggggcggtgtgtcgaaactgcatgagagcaacccgctgcacaggctctggcagcaacttccgcagaatatccgcaccagcccacatgtttatctcgccaccaacagcctccaggggccgtggtgggtacttggctggtctgaacgtgttcctgccccggatgacgtgctgcctgccccgttgccgccgtaccgggtgctgaccggactggtggataatttcggccacgcaatgattttccatcgtgccgcatccggtgaatttgccggagaaatcaccgccgtgacagatggcgcaggccgccgtttccggctggtgctgaccacacaggcacaacgcgctgcgcagtaccgcaaactggccaccgccacaaaacagtccgtcccggagacgttatctgccacggattacggcacagacagcggcattcgcctggccgaagtgtga

SEQ ID NO: 383789 - DNA, 3186 bp, Salmonella enterica
atggtgtatgaccgcagcggcacggcggttcatggtttcacctgtgatgcgaaacatccggggcggatggtggcgcatcgctatgcgggcaggccggagatacagtatcgctacgatgcgtcgggccgcgtgacggaacagcgaaacccggaggggttaagctacgcctacgtctatgacaaaaacaccgtcaccattaccgacagcctgaaccgccgggaggtgctgcacaccgaaggcgaaggcggcatgaaacgggtggtgaaaaaggagcaggccgacggcagcgccacccacagcgactatgacagcgcgggcagactgctggcgcagacggatgcggcgggacgtaaaacggaataccgcctcagccccggctccggtcagctaaaagaaattatcacgccggacggcagacgcacggaactgtattataacagccagcgccagctgaccagcaccgtctatcctgacgggctgcaaagccagcaggaatatgacgaccacggcaggctgacaactgaaaccgggcgcaacggcagtacaacccgttatttttatgataccccccgcagtgaatacccctgcgccaccgaagacgccaccggtagccgtaaagagatggtctggagccgctacgggcagttgctcacctttaccgactgttccggctatgagacccgctatgaatatgaccgcttcgggcaactgacggcggtgcatcaggaggaaggcatcagcctgtaccggacgtatgataaccggggacgtttaaccgccataaaagatgcgcagggcctggaaacccgctatgaatacaatgcggcaggcgacctcaccaccgtcattgccccggacggcagccgcagcgacaccacttatgacgcatggggccatatcctcagcgccacacaggacgggctgacgcggcaaatggcctacgacgccgcagggcgcgtgacgcaactgaccaatgagaacggtagccacacggtatttacttacgatgcgctggaccgtctgacgcaggaaaccggttttgacggcagaacgcagcgttactgctacagcgctgccgggcagcttatccgcagcgaggacgaaagcctcgtcacccgctggtattacgatgaggctgaccgtctgacgcaccgcacggttaacgatgaaccggccgagcagtggcgttacagcgagcgcggatggctgactgaaatcagccatctcagcgacggacaccgcgttactgtccattacgggcatgacaaacagggccgtcttatcagcgagcaccagacggtgcatcacccggaaaccggcgaactgttgtggcagcatgacacccggtacgattacagcgataaggggctgcaaaaccgcgttacatcagatgcacttcctccggtggaatggctgacatatggcagcggttatctggcggggatgaagctcggtgacgcgccgctgatggatttcacccgcgaccgcctgcaccgtgaaacgcagcgcagctctggtgattatgaactgaccacggcatacacccccggcggtcagctacagagccaccatcttaccagcccacagcttaaccgcgactacacctggaataatgccgggcagcttgtgcgcatcagcgggctgcatgagcagcgtgattatcagtatggggccgcggggcggctggtcagcacgcagataaaatcggcatcccgcacactggagcagtggacgccctctgacccggcgggcaaccggatagcagagcgggataaattcccgatgttgccggatagcttccgtgataaccgtatcggccaggatgtggataatttttatcaccacgacgaacacggcaggcttgtggagaaagccgaacgccggctgcaccctcacggcagcctgtcgcatcattatggctatgataatcagcaccggctggcacactaccgcctggtgcagcatggcggcgacctgctgacggaaagtcgctatatttatgacccgctgggccgccgcaccggtaaacgggtgtggaaaagccaggaggggcgcgactctaacggagacagatgtctctggctgaacccggtgccagaggtgacatggtacggctgggacggagacaggctgaccaccacgcagaccgacaccacccgtattcagacggtgtacctgccgggaagttttacaccgctgctgcgtgttgaaaccgggaccggagagctgacgaaagccattcgccgcacgctggcagagaaacttcagcaggatgcggggatggcgtttgtgccggaactggttgccatgctggataatctggagcgggaactgaagacgggccaggtcagtgaacagagtcagcagtggctggcgcagtgcggtctgacgccggagcagatgaaaaaccagatggagccggagtacacgccgcaacggaaaatccacctgtaccactgtgaccaccgggggctgccgctggcgttgattgatgttcgcgggaggatagcatggagcgcagagtttgatgaatgggggaatgtgctgcgggaggataaccccgataatctgcaacagcttttacggttgccgggacaacagtgggataaagagacagggctgtactataatcggcacagatattttgatcctgtgcagggacggtatattactcaggatccgattgggctgcggggcgggtggaatccgtatcaatatccactaaatccggtcgcagaggtagatccgctggggcaaaaagggatgcgttctgatggtcatccttgggggtatggatgtggagatgaaagtacagacagacttgtccctgattctttgggcgctgctaactttttaccagcctgtagaaaccatgatatatgctatggaacattagatagtgacaaggctacttgtgataagggccttggggctgatatgaaattagcatgtaaaaatgatttaaaaggattgcatacattatatagtcccctttgtaatggcatggcaggaggatatgaattcgcagtaagcgaatttggtcagtcggcctatgacgccgcacaggaaaaagcattaaataactatatggaatttgaaatgttaaatttattacaaagcatgggagagaatgtcaatccagatgaatataagcaggcacatgatagagttgttaacccaaattga

SEQ ID NO: 383790 - DNA, 531 bp, Salmonella enterica
atgttattaaagttgataatgttatttccaatgttttttatcccatttttggcgggttgcagtatatttgatgatgtttttgagaaaaactactcattgagttctgtcgccagttttccagatgatgttgatgagttaaaaaggatatggtttttttgtgagaagtgtttgagtaatgagcagtgtgaaaatcatgacattaagcaatgtagggatgtaactattccgagtagagatgaagcattaagtaaagctataggcagagccaatgtcgaagctgtttactttcttattgatgtggcaaaaactgatgtcaatagtattacgggaaaatataaggaaacgccattaattattgctgcatattatggaactcaagcacatcaggatatagctgaatttttgctattgcatggggcagatattaataaaacttacccagccattgggcgaaatcctctgggtgtcgccagatggaagcataatgtcgattttgttaattttctactgaagcatggtgccgaaccctaa

SEQ ID NO: 383791 - DNA, 645 bp, Salmonella enterica
atgtgcacgagtatattgagagaaccataccctgataatcatgaaagtattctgagaaataaccagaaaatgtcggttgagttacctttacagacaggctcagagctattcagaaccctgacacccggagagataaaacttgcgaaaacgatatttcaaaatataattaactatgatcggataaaaatatactgcggtaacaaccagtccagaacacaatctaaagttattacaaatactcaaaatggaaaagttctgttaagtattaaagagtacagatctgatttctctgctgactataccagctatcacgaatctgtaaaatatccacatatttttatatttgcaatgtcttttgtctggcaatatttccgacatgacacatcttttcatgataatacatatgcgtcatcattctggcagtcatatgattttcatgaaccacgatttagtttttattctatggagcaacaggcagcaattatttctgattattggttacttaataatttcgacattaccgaatatgaagaattgagcagcaatcaggaatatgaacgttttaaaattaatgtgagtatgaaaatggatttattggataaatatgaatccatgttacggatgcacattcagtatatggggtag

SEQ ID NO: 383792 - DNA, 426 bp, Salmonella enterica
atgcagcatattgtgccattatccgatcaggccatcgcgatcctgatacagatcgaagtgctttccggtcatctggcctttatttttcccggtgagtacgaccaggacaagtgcatgagcgacaacactatgaacaaggcgctgcgcgtgatgggctatgacaccaaaaaagatgtctgcggacatggctttcgcgcgatggcgtgcagtgcgctcagtgagtcgggattgtggagcaaagaagccattgaaaagcagatgagccaccaggaaagaaatagcatccgcgccgcatatattcacaaggcggaatatctggaggagcggatcgagatgatgcagtggtgggcggattatcttgatgcaaacagtgacgggtatgtgtcggcttaccagtatgcccggcgtctgaaaaaagcatcgtga

SEQ ID NO: 383793 - DNA, 270 bp, Salmonella enterica
atgcacctgccgctagtggagttgacggctctgtttccgggccggacgccggtatcggtacgaaaggcgcgtgtccgtctgaaaaaagggcaatctattgcagaaagtagcccgtcacaggcgtcgggggtttccacctttatatacccgttgagcggtccggcgaaaatgcccgccagtcgccctccgaccctgaacagaacacggcagatcataacctgcctcgctgaaaatatttttggtggctggtgtcattctgtcagttcatag

SEQ ID NO: 383794 - DNA, 153 bp, Salmonella enterica
atgctcaagacgggcatcggaaagagaaagctcaggatctacaccgaggctgacgaatgtcatcttaccattggctggccgtttataccgacagtgccagtatttgcggccttttggtgtgatttacaggcacagtccacaaccatcaaataa

SEQ ID NO: 383795 - DNA, 189 bp, Salmonella enterica
atgaatatgttgatgcttcctcctgaacgtctgccggaacttgttcagcgcattgaaacgacaaatttgaatttaatgactcgctacctgattaaatggcaacttctgacgctgattcggtccggcgaagcggcggggacgtggtggagtgaaatcgacacggagaaaaatctggactattccccctga

SEQ ID NO: 383796 - DNA, 171 bp, Salmonella enterica
atgaatagtatttatcacagtaatcattccgcaataccctattgggtgacaatcactgaggccaccaaaactatcaatcagcagcaaggaatgaacataactgacagtgatatctggcgatatgtactttatggacatttaaccctttctgtttatttcagtccccggtaa

SEQ ID NO: 383797 - DNA, 810 bp, Salmonella enterica
atgaatttcagaacaacaggttttgtatgcgcaacgaccttatttttactcgcggggtgttcgtctcattcctccattgatgccaggaaaaccggtgcatcgcatacggcgggcagcggcatcagtaacaatccctcagcactgaccgacaaagacatttttggcaatgaaaccacgctggccgtttctgaggaagatatccaggctgcactggaaggggagccatttcgtgtacccatgaactcaccggttattctggttcagtccggtagccgcgcgccggaagcgattattcagcaggaaatgaataagtattacacagtttcaacattctccggaattccggacaggcagaaggttgttacctgtaataaaaataaagatgctaaaaatagcaatgatgaagcaccacctgtcgaaaatatgaattatatgcaggcactacgttatatcgcagcaaaagggcatcagaaagcgattattgtctatcagggaacgttacagtcagggaaatatgactcggcactaaaatccacggtatggtcagattataaaaacgagaaactgaaagataacgtgtcaatgcgttatctggtccgttttacgctggtggatgtggcaacgggcgaatgggcaacatggtcgccggtcaattatgaatacaaagtgctcccgccggtgacagggaccgggacaggtaaaaaagaaaccagcaccacgaccacagatgtcacagagcaacaaattacccggcttaagcaaaaaacatatgccgcggtggtcaaagacctggtgaaccgttatcaataa

SEQ ID NO: 383798 - DNA, 288 bp, Salmonella enterica
gtggataaatcctcgccactgctgggcaaggccatttcggaaaatgagggcctgacctgtgattttgtattttatcgcaccaaccacttcggtattaatgaaccgtactacaaactgaaactgactaacgcccggatctccgacatcagccttactgttccccacaccattaccgacagcccagggcagccggaagagtcggtatcatttacctatgagagcatcaaccgggagcacagcatcgccggaaccagtgcatacagcctgtggagtgcgcggattttttaa

SEQ ID NO: 383799 - DNA, 132 bp, Salmonella enterica
atggcaaatcccgtctacctgacactgaacggagaattccaggggctgatttcagccgggtgttcgtcaatgccgtccatcagcaacaaagcccagcttacgcatcaggaccagatcatggtgacatcctaa

SEQ ID NO: 383800 - DNA, 456 bp, Salmonella enterica
atgaacagtacctgcaacaccttctggatgccccgccgctacagccgctggccggagagtctgcaacaacaggaagccagccggatgtggaacgacacgctgagaaaccgggcggcagccagcccgcagatgaaaggctggcaacaagcgcggcagaatttacgggactttgcggatctgatgatgaaaaaagagacggagaaacagggcttcaccctctcgtatatcaaaacggtgacctggcaggcagaacggttgcttaaccaggagacgccgctggagtacttgctgacgcagtatcaggatgcccgtgcgcagaaacagaatacggaagcgttggaaaaagagatcaatcaacggctggacgggctgttaagccgctggcagctgctgaacgcgaccggagaggctgtggctacggataacagtaccgggttagtccctccggctaactga

SEQ ID NO: 383801 - DNA, 576 bp, Salmonella enterica
atgaaaacgcatcatcatccaacaacatttgttcatctgattaatatcatagggctccttgggatatgcgtcattttagttatagccttttattatcaagtcgtcaggcatgagttaccttgtccgctttgcttattacaacgggttgggttcattatcatcggctttggatttttatttaacctttactttggtctacgaggattacattatgggatggtgattatcggcagtatcctgactggagttatggcatccaggcaaatgtttttacatatcatgcccggtgacgctggatatggttctacatttcttgggttacacttttatacctggagcttgattatatcagttttgattatggctgccgttgcggtggctctggcaatcaatagcatgaatattacgtttcgttcattaaatattaatccggcgctattcagtattgcaggttgggtatttctgtttctgatcacctctaatcttatctcaacggtactggaatgtggtggaggagaatgcgctgccacccggtcttgtataatttactgtcaaaataagatgttgccttcctga

SEQ ID NO: 383802 - DNA, 159 bp, Salmonella enterica
atgttcatgtttctgccttttttgattgcactgagcgtggctatgggggccatgaacggaaaagataaagtcagctacattctatggggcgtcctactgatcatcactgttttatcattcgttcatcatgttacccgtttactgactttatcattttaa

SEQ ID NO: 383803 - DNA, 591 bp, Salmonella enterica
atgcgcaaggtgtcgatatctatcttatgcctgccagtttcactgaccagggggactccatggctagctacgcgaattgctgctaaaactatccctccggtgtttgcaaccaaaatgaggtttatgtttgcagccctctttttaatcatcattgcatggttaaggaaaaaaccgcgtttgtttccttccggacaacgtttataccagtttataatttgtattttctacttttctattcctttctcactaatgatttatggtgagacttatgtcagctctgggcttgccgctattatatttacgagtatgactgtagccgttttgatagcgtcggtattgtttctgaatgaaaaaacgaaactaatgcaggtaacgggtcttgctatcgcaatcgctgcactgacggaaatttttcttgaagaaacaaatataaatacagagagccactggaaaagcatcacagcgattatttccgcggtattaatccatgccataatatatacacaatacaagaaaagtagcggtactgtttctgttataacatttaatgcgcccccgtatattcccggtacctggctgagagccgactaa

SEQ ID NO: 383804 - DNA, 1524 bp, Salmonella enterica
atgactaaatcacccgtcattcgccttgacgaaaaagacaacgttgtggtcgcccgcgtcgccatcgccgccggtaccgctatcgtcgatgaaaatattgtcacgctgcaggatgtaccgctgggccacaaggtagcgacaagactcattaaaaaagacgaaccgatcctcaagtacaacacggtcatcggcttcgcacctgaagaccttccgccaggtacctggctgcacagccacaacatcgtgtttgaagattttcagcgcgactacgcctttagtcgcgactatcgcccggtacaaaccgtgccgccggaacagcgccgcacctttaatggctacgtgcgtgaagatggccgggtcggaacgcgcaatattctcggcgtgttcgtcgtcggaaactgtggcgcaacggtggcgcgtaaaatcgccgctcactttaccgaagaacgcctgcaagcatggccaaacgttgacaacgtcgtgccctatgtccatgaactgggctgcggtatggagatgagcggtgaaccgatggatctgctgcgccgcaccttagcaggctatatcaataatcccaacactgcgggcgcgctggttgtggcgctgggctgcgagcgtaacaacatccacggtttctttgaacaaatgggtctggaagagactccgatgctgcgcaaactggtgattcaggataccggcggaacgcggaaaaccatcgatgaaggcatcgcgattatcgaatccatgctgccgcgggctaatgccgtcaagcgccagccggtctccgttgagcatctgaccgtcgggctacaatgcggtggttccgacggtttctccgggctttccgccaacccggcgctgggcgtcgcgatggatctgctggtcgaacaaggcggaaccgcaattctctcggaaaccaccgaaatcttcggcgtcgagcacaccctcaccgcgcgcgctgtcacccccgaagtggggcaaaagctcgtcgactgtatcaactggtggctggagtataataaaggacgcgattgtcagattaatggtcgggttagccctggcaacaacgcgggcgggctggcaaacgtactggagaaatcactgggcggggccaagaaaggcggtaactctccgctaatggaggtttaccgctatgcatacccggttacgcaaaaagggttggtctttatggacaccccagggtatgacccggtttcagcaaccggtcaggtcgctggcggcgccaatatgatcgccttcaccaccgggcgcggctcctgctttggctcaatgcccgcgccgacggtgaagcttgccagcaacacgccgatgtatcagcgcatgacggaagatatggatctcaactgtggcgttgtcattgacggagacgcaacattgcgccagatgggagaagccatttttgagaaaattattgcagtagcttccggggagcagagtaaaagcgaagctctgggattaggggaaaatgaatttgtaccctggccaataggcgttttggcttaa

SEQ ID NO: 383805 - DNA, 1353 bp, Salmonella enterica
atgagcattgcaggcaagaaaacgcacgcccgatattacatcttatttatgataaccctcgtcttaaccctggcgaccggagatcgcgccacgctctccgttgccgggccggagatgcaaaaagaactgggtatcagcgccgttgaaattggctatctcttttccgcgttcagttgggcgtacgtcatcagtatgacgcctgcgggctgggtggccgataaagttggctccaaacgggccatgtttctcgggatcctgctgtggtcagtgatgacggtatttatggggctggtcagctacgtcaccttcgtcgtccccgccctgctaatcctgcgtttcctgctcggcgtgtgcgaatcaccggttggcccctcagccggtcgcatcatcgccgcctggtttccctcgcaagaacgcggcgtagcaggcgccatcttcaacagcgcacagtacgcatcgctggcgatattcactccgctgatggcctggctatgccacgccttcggctgggaccacgtatttatcgtcatgggcgtcatcggcattatcatcgccttctgctggtcgaaattcttttacgtcccgactaagcatccgggaatcaatcacgaagagatggagtatctgaaggaaggcggcgcgctggtggagctggacaccgcaacccacgtaaaaggcgaacgcaaacgcgctggctggcaggagatcggccagttgttcaaaagccgaatgctgatcggcatcttcattggccagtactgtatctcggcgattacctggttctttatgacctggttcccgatttatctggtcaaagagcgcggcatgtcaattctgcaggccggttttatggcctccgtcccggcgatttgcggcctggtgggcggcattatgagcggatttttctccgactggctgctgcgtaaaaccaacaacctaagcctggcgcgtaaagtgcccattaccatcggtctgaccatgagcgccagcatgatcctctgcaactacgtcggctcagaagcgctggtcatgttcctgatgagcgccgcgttcttcggtaaaggcttcggctcgctgggctgggcggtggttgcagataccgcgccgaaagagatcatcggtaccactggcggcctgttcaactcgctgggcaatatcgccgggatcgtcactcccgtggtgatcggctacatcctgcaagaaacaggctctttcgccaacgcgctggtcttcgttgggacccacggcatcatcgccgtctgcagctactggtttattgtcggcaaaattgagcgcctgaaaattgctccgcgcgatgacgacgcagtccctatgcaaaaacgtgaagcctga

SEQ ID NO: 383806 - DNA, 762 bp, Salmonella enterica
atgcgttttcccgatttcaaacaacggctccgcgaggggccattacacggctgctttgtcaccttcccttccgcggcaataaccgaatttaccgccgccatcggatttgattttgtgcttatcgataacgagcacggcaatatgaatccagaaacggtagaagatatggtacgcgcctcgcacagccagcaggtgccctgcctggtgcgggttccttacaaccgcgccgaatatatgcgcaaagcgctggatttcggcgccgatggcgtgcaggtcccgctggtcaataccgtagaggacgcccgcgccgccgccctgcctacactatttccaccgcagggcgaacgcggagtcgccttcctgccgcgcgcagccaactacggtatgtgcgccgataaagcgcgctatctggccgacgccaacgcctcgcgggtgctatcggtacatattgaaacaacagaagcagtagcgaatctggatgagatcctcgccgcagggctggccgatgtttattttatcgggccgggagatttggccgtttcgatgggctacggtcacgatctcaaccatcccgatgtgctggcaaccatagagcgctgtattcgcaaaatcgccgccagcggcaatattgccgggacctacgtgggaaccccggagcgcgccgcagaagcgataagctggggcgcgcactacctggtgacggccatcaccccgcatatggtgagcggcgcaaaacactacttacaaataaaaaaccaataa

SEQ ID NO: 383807 - DNA, 897 bp, Salmonella enterica
atgaaaccagttttaggctttattggtctgggcattatgggcaaaccgatggtgcgcaacctgttgaaagcgggctacaccgtccatgcctacagcattgtagcgcaggatgtggaagagattgcccgtgatggcgctatcggtcaggtatccgctcgtgcggtcgccgaagccgcggaaattaccatcaccatggtgccgaatacgccgcaggtggaagatgtcctgtttggcgaaaacggcctggcaccagcgctgcgtgaaggtaaagtcattattgatatgagcaccatctcttcgctggcgacaaagcaatttgctgacaccatcaagtcgctgggcgcgcgaatgctcgatgccccggtaagcggtggggataaaggcgcgaaaggcggtacgttgtcaattatggtgggcggcgaagccgaggtctttgaacgctgtaaaccgatcctcgaagtgcttggctgccgcgtcactcatgtcggcgacaacggcgcaggccaggtcgtgaaatcctgcaaccaggttctggccgccgctaccatggccgcgttgggggaatcgctggtgatgggggcaaaagccggcgtcgatccggccaaaatcgtcgaagtgctctcagcaggatatgcccgctgcggcgcgctggatattcgcggcagcctgctgctggagcgcaattttgatcctggctttatgacccgcctgcagtacaaagatctcaacctggcaatggaactcagccagggtattgactcacccatgccgatcgccagcctggtgcgcgaactgtacaaaacctgcatggcccagggtgttggcaacgaagatcactccaacattattaaagtgtttgagcagctttccggcatcgaagtgaaggcaaggagctga

SEQ ID NO: 383808 - DNA, 1305 bp, Salmonella enterica
atgcaaatctggcacgaagccgccaacgagatccccgtcacctacgacgttgacgttctggtagtgggtggtggaccaaccggtgttgcagctgcgacagctgccgcacgcgccggggaaaacacactactgatagaacgctatggcttttgcggcggtatggctacggcgggcatgtccggggcaatttgcgggctatttacctcaggtaaaggtccacatgaacagttggtacatggctttgccggtgagttttatcagcatctgaaacatcgcggcgctgtcagtgatcccttcccgtttggtgaaacctgtctggtcgttcatgaaccacacacctggaaagagattgccgacgatcttctgactgacagcggcgctcaggtgttgttccacacgcttgcgacagatgtggtaatggaaggcaatcaactgctcggagtaattattgagaacaaaagcggacgccagttgattaccgcccgccgctttatcgatgccaccggcgatggcgatctctgcgtcaaagcaggcgtcccgtacacctgcgggcgcaacggtatggtccagtatccgaccatggtgtttcgtatgggcaatgtcgatatcgaacgcggcattggccacccggtcgcccaactggaagcctgggttgaagccgcgcaggcgcaaggatatcacctgccccgcaagcatatctatctgctgccctcgcctcgccccggcgaagtgatgtgcaacgtcaccagcattttgcgcgacgatggcagaccgattgacgccactcgcgctgaggatctgacgtttgccgaactcaagggacgtaagcaggtacgcgaatacgaacgtttcctgcgggcatgggtcccgggatttgagaaggcgcaactcaacgatgtcgctacacaaattggcatccgtcagagtcgcacaattgaaggtcagcgttgcctgtctaatgacgatgtctttcaggccaaaaaaagccagagagctgttgccagcagcgcctggtgcattgaagcgcacggtcaggatggcattttcatgttctatcttgacaacgactggtacgacattccctatgacacgctacttccagaagacgttcctaacctgataactgccggcaggacactctgtgcagagcatgaggctctggcttcggcaagagtaaccgcacagtgctttttaaccggatatgccgcaggcacagcagcatacctgagccatcgggattgctgtgctttcgatgaaatagatgtagcggagctacgcagcattattgaataccaaacttattaa

SEQ ID NO: 383809 - DNA, 1713 bp, Salmonella enterica
atgtacagaagcaactttaagccgggctcgacccgctgggcagtacgtcgtgcgcaatggcgcagcatggggatccgcgaagaagatatgcataaaccgaagatcgcgatcatcaatacctctaacaaactctcctgctgctatgtccatctggatgagctgtgccggatcgtcgagcaggcaattcgcgacgcgggcgggctaccgtttgaagtacgcaccgtggcccccagcgacttcgtcaccagcgccgggaaaaaagcgcgttatctgatgccgactcgtgacctgatggtcaatgaagtggaatgcatgatggaaggcgcggtgctggacggcatgatctgcctctcttcttgcgataaaactacgccagcgcacctgatgtcagcggcgcggctgaatgtcccttccctgctgctgacctgcggttatcaggtgggcggcaagtgttcaaacgaaaaattcgacgatcagttcttcgatattgatgacgtttacgagcaggttggcgcgctggcaacgggcaccatcagtgaaaaagatctgaccgacatgactgatgtcgcaattcagtcgccgggggtctgcgccggtttgggtaccgctaactccatgcatatcgtcgccgaagcattaggtatgacgctgccgggcaactcacccatctgggccaacggccgcaaggtgaaagagtacgctcaggccgccgggaagcggatcgtcgagcttacccagcagcaggttttgccgcgcgacatccttaccgaaaaagcgattcagaacgcagtgatgaccgtgctggcggtcggcggttcggtcaataccgttcgccacctctcagcggttgccaccgaggccgagctccccattgatgtggtcagcttgtatgaaaaatacggaaaaaacatcaagttgctgacctctgttcgccctaacggcccgttccgcacggaagatctggaagccgcgggcggcaccacggcggtgatgaatcagctgcgcgatttcctcaacctggatgcgctgacggttacgcaaaaaaccgtcggcgagaacatcaaagatgcggtagtaaaaaatcacgaagtgatccgcacgctggataatcccgtcagccagcgccctggcgtcgctatcctgcgcggtaatctcgcgcctgatggcgcgatagtcaaactttctgccgttccgggcgaactggaacaatttactggcccggccaacatctacgaaggcgaagatgaagcgatcgaggcgctgggcaaagggaagatccagaaaggcgatgtgattgttctgcgcaacatggggccagcgggcggtcctggtacggtattcgcctgtagcttcgtcgcggccctcaacggcgcggggatcgcggcgcacgtggcggtgatcaccgatggtgaactctcgggcctgaatcgcggcatcatcgtcggccaactgatgccggaagccgccgctggcgggccattggcggtgctcgaacagggcgagacagtacatatcaactttgtcgatctcagcatcaacatggacgtacagcaggaagtaatcgacgctcgtctggcgcaatggcaacccaaacctctgcctctcggtggaggaagcggcacctatctgtcgcaatacgcacaactggtacagccgattgctcagggcgcggtgctgggaaaacgccgcatccacgcaaaaaacgtcgattaa

SEQ ID NO: 383810 - DNA, 714 bp, Salmonella enterica
atgccggataaaaacaaattcacgatgatcccaattaagcgcacggacgtttttcagaccatcattcagcacattactaatctgctcgatagcaagcagatcaagcccggcgagcggctgccttcggagcgcgagcttgccgagatgctcaacgtcagccgcacgtcggtgcgccaggcgctgaaggtgcttgaatcctccgggcgtattgagacccgtgtgggaagtggaaccttcctgaccgaaccgccagcggtgtcgctcagcgatacccatagcctttcaagattgatcgaaggtggcgtgacgaaggattttttgcgtaatctaattgtggcgcggacgtcgattgaacgtgccatttttgaggactatgcctggcgtgccaataaatcggggatcaatgaactgcgggaactcatcgaactcaatcgggaaaaattttcacgccaggattgtgatgacgatgacagtgcgctggatctgagttttgagaaaaaggtggcccggttggggggaaatccaattctgatcaatatgcaggaacaactccataatttatgggttctggcatggaagcagtatgggtttacgccggagcagacacaggtactgcatgaagagcacttaggcattctggatgcgctggcggcgaaaaattcgtccagggttgctgatctgatcgtgcagcatgtggataaagagatcgactga

SEQ ID NO: 383811 - DNA, 507 bp, Salmonella enterica
atgccaaccgactattgcgctttaaaccgaaagcgtaagaactttatatcaggcaacatcagttgcctgatatattatacggttacctggaaagaggttaactacaatatccagctagcagacaacaacaaagatattgttgtcacctctgtgcaaaaaatcgataaattggcgtggtctatttatgtaatggcaagaatgacggtatctggtgataacctcataaagaaaaaaaataactcactgattgaaatcgcagcaaagaaatttaagagtagagatcgcgagcttaatcaggtctggaattcgctacccgcctctgcccgaacggcattaaaacaagaacagcgagcctgggtgacaaaaaaagagcagcagtgcggcaaacttagcgatgcagaatccgaggccttacctgctgaaaagcgcatcagtatttataaatgccagcttgaaatgaccatcgccagaactgcctatctcgacggcagcgaactacccgactga

SEQ ID NO: 383812 - DNA, 939 bp, Salmonella enterica
atgaataaatataaaattactttacttttaattcctgttttttactcatcattttgtagttctggcgatacaaatacgataacatatggatatgataagcttagctctgaaatttatgcaaccaatggcgatataaaaaaaacgctcaaattcaagttcgattacacagggaatccatcttattcttttgactttttttctaactcaccgtccattgttgccgatgggcggtcgttacacgattttacagcatatactacattaaaactcaatcattctgatttttactttgattgtctttattatgatatcaaaagtaaacaaaatgggatgctggttaaagaaggagtatgtggtttaaatacagttatacctgtaaattatgctgagtatattgaagggaaaatcaacgatatagaaaaagatattgactctctagatacatcattattagttagtggcaaaataaaatatcttcctgtagtaattaatcataacgccaatggattagtatataaaatttatgaaagcagggatgcttttttaaatgataatttttcgattttagttgctaaaaataatcgggattgtgaaatatttcctgataatccatgggtaataactgagaatggaaaaccttttcaggaaattgaagttaaatctgaggtgatgagaaatgggaagcttttattaataaatgcctcccccaaatattttggaataaataaatgtcttttatttccggcgtttagtgttaatgtaaataaagcttttttttatgattcatcttttaatgctaaaaaatcttacctcataagggatgataaaataaacttaactgcaataagtaatgatgggaaatggtgctctgtaaattatcttaatgacaagaataaaacagttaaggggaccatgttatgttctcaattgaatctatga

SEQ ID NO: 383813 - DNA, 219 bp, Salmonella enterica
atggacggtgatcgtgatggaaaagtgacggaagagaaaatcaggcaggcgctggtggtgcgtgatccgctggtaaggaatgtagtgaaccgcctggtggtaaggcaccacagtgagtggtgcagaggtcgctcgacaggaaggtgggaagggttctacaaagatctggacacagatgaggtggcctactgtgagaagtggcagttatatctggagtga

SEQ ID NO: 383814 - DNA, 414 bp, Salmonella enterica
atgacttcccgcccggaaaaggccgacgctgcctttttcagtaccacgctgatggcggacggcctgcgctacgagaatatcccggaaggtgtgcaacagagcgtgttgccgtcgctgctgactttctggatggcgaacctgccggaacacccacagtggaaaaccgcaccacagccggaactgaccggcgcggtgcgcaaaatcctgctgcgccagattggtgtacgcaacgctgaaaacaccccctaccagaacgtgttgaaacaggtatcccgcaattacgctgacatgacgctggcggacatgaccggcgacacgctggccgattcgctttttggtactgaacagaccgtgccggggatgttcacccgtcaggcgtgggaaggacaggtaaaagaggccatttacctttag

SEQ ID NO: 383815 - DNA, 1236 bp, Salmonella enterica
atgatttctatccggggatggtggttcatatccaaaatttatggtatccgtcgggaacaaagacgttcagagtctcagggattagtaccgaaaaaagaaaatcgccttcaaactgaaataataacgggattttatttagaactatcctcacatttatacaaccactacggtccgttctggcggcgtaaagttcgcctgttgctggtaacaggcgaacctgaacagtcagacgccatcgcgccggggctgaccgaacagcgctggcaggaaggcgaccacacagtgctgatatacggcggcaggccatcagcggagccggatgtcacgctgctgacagccttaaaaaaactgcgccgttaccgtccgctggacggcattatctggacgctgacagaagaacagagctgccagacggcgcaactcgacaaaggctggcgcgaattgataaacggcagtaagcgactgtgttttcaggccccgctttatttgtggcaggtctgtgacgacggcggttatcaggctggacgcacacggcaaagcgtcggctgcctgttgccggaacgctgtactcctgaacaactggccgggatgctggaagcgcaaaccccgccactgacagaacggggcatgtcgcagttgctcgccgataatcgccacgacttcctgctgcgccttgcgcacacgctggcggaaggcggtatcactcactggcaaaccgtcctgaaaccgctgctggcaggcggcgcgttttcctccctgcgtctgcgcggcctgatgttcagcccgccgctggccgccgtaccggaggcagccctccatgcctggctgccgtcaccggtctggatgggcgtgactggcgataacgcgcgggggcgcacggtgggctttccgtggctacgcaccgcgctgataactggtatctgtgtgctggcgatatggggggcaggaatggcgacctctttcatcgccaaccgcgctcttgttcaggataccgctgtccagacggcgcgtgcgctcaatacccgcctgccgctgtcagaacaactggtggcgctgcataccctgcagggcgaactggagcgcctgcaataccgtatcagtgagggtgcgccgtggtatcagcgtttcggccttgaacgtaatgagcaactgctctccgccgcctttcccggctatgcgcagcagcaaacaaactggtacgcgacgtggccgttaaccatctgcaacagcaactga

SEQ ID NO: 383816 - DNA, 264 bp, Salmonella enterica
atgaaaggttttgtattattaggggataaaacaactcatggcggaacagtcatttccgcatcatcaacgataactgtcaatggcaaaccggttgcgctcatcggtgataaagtcagttgtcctgtaaaagggcatggtgtcaatgcgatcattgaaggtacagcccactggatgtcggacggtaagttagttgtgattgatggttgtagctgtgaatgtggttgtaaagttatagcaggaacgcccgacatatccacgaattag

SEQ ID NO: 383817 - DNA, 1197 bp, Salmonella enterica
atggcatttatcccgctacaggaggtttgtaatggggtggaaatacaaggaaataatcattccgacaaagcctcagaaaccatcttttatactttatggtatttttctgattacttctattggttctggcgtggcgctatttatattccatgcagccaatctatccccgttttttcaaacgtggaatatctggcttttgtcatgtctgccggtaatgtttttttactcgctttcagtttacggtgttatatttacgggataaaactaagacaatgggatatattgaaccaggagactattcgtataaaaaacgaatgggaacgatgggccgtgcgctatatcgccgtaataggagggtgcgttttatttcctaataaaataacagcttcttttctttttgaacattcagatagcgtgaaatctcagtggggtctggcaaagcgtatagattatatgccaaaatgtttccctcttaccgaacaggctcttcattctctgctatatggcataaaaaatgcaatagtcggacttccctccgacgcagaactgcatatcaccttgttaacggatgtctctgatgggcaatcggagctgattacgtctttattgtctgatagatggaaaaatatttttccagatagacaccttcctgacgtagttctggttactgaaaatcatgtttgcgatatgttcgaacgccgtatgacattggctgaagaatatttcgaactgctgtttgtgatgcagttgaatggtgacggacaatattcagatggtttggcggctcttttattggggtcggatgatatggtatgtaaatataaaacacattcagtttcccgattgttgcgtccgatgccactggataaagagaatattgaacaggatttttcattattcttcaatatacaaactccttcccgtcaggcaaaggttattataggtgacagtaaagatgtgctccatcttttaccctctgttttttctgtaggtaatgaatgtggaattcgatgtaatgcggaaagatcgatatttctggaaatgttttccggtcttcccggaccattttctgactggcttggtatcgcgtttgctgtcgatgtttctgactttatttcctcgccaactataattatttcaaatttgggtgggtggattaatacagttattccagaaacgaaaaagaaaattttataa

SEQ ID NO: 383818 - DNA, 897 bp, Salmonella enterica
atgataacggttatagataatatccgcaggattttactattcggcatgatgtttctgctgttatctggttgtgataataagcaggaagaattaaaactggcaaatgaacaactgacggacatggtatttgttgaaggcgggagcttcatgatgggagattttggcccgacaatgggggaacgcttacctttcagtccagagatagatgatgatcatctgcacaaggtaacgcttgataattttagcatgtctaaatatcgggtgacctggggacaatttaatcattatctggaattgcagggaaaacctaaaacaaaagcgtatataaggcttaaatcactcggtaaggagtactctttttctcaatatgccggtgactcctatcctgcgatggctctctggcaggaggccaaggattattgcctgtgggtgagtaaaacgactggccggaaggtggatttacctactgaggcgcagtgggaatatgctgcacgcagtcgtggtcagctttttattatggcgaacaaggataacgtctggcataaggacgatagtgcttggagtgacgaggaaaatcggaaagacaagagttttgcaggcggtatcgagcctgttggaagttaccctcctaaccctctgggactttacgatatgatggggaatggttttgactggataaatgactggtacgatccggattattataaaatttctccagaagttaatcctataggcccggtcaaaggagataaaaaggtgttaaggggatctggtggtgcatcctactggagtaatctggttattttacgttttagtgataaaggaagtgtgcaggaagggagagctgatattggtgaaggttttcgctgcgtggttaatgagcctaagccattatga

SEQ ID NO: 383819 - DNA, 1062 bp, Salmonella enterica
atgaacaaaaaaactgaaattttccgtttgctttcctttgttatcattgtcataccaacaatgacgactgcaggaacggttcagaacaaaatagagtacaacacgcatctactgtctcggatgacagccgaaaaatatactgggtgtcagatttttaaaggtatctccaccccaatgcctgaaaatgttacagctatagacatgagcgaaactgggtgtaatttcggcaccttcccaccaggccttgagtccaccattgaatttaaccccgatactgattatatcaaattaaccgccactgattctggcatcacgtataccttcacggcaaaagcaaccaacataaaatcttatgcaagatgccccatcagcgataatcataacgcaacatgcacatggccgggagcggtcacactccctttaacgcttagcctggttaattcttctgcccgaataacagagcaatctgtcgcccttattgtaacccccggaggaaacagcaatagtgtaacggatcaatttgccaggctaactggcaatgtgcttatagaagagtcaaccaacaattacacaactgtaatcccctctgtagccgctactgatgatattagtatacgctggataaccagaataattggtgatacggaaggcgatatcggagattatcttggcaccctcacaaaaaccggggcctccgtcaccccaatccattattcccttcctgccgatgtactaaacgcgtccttctccccggatgcattaaatcagaatatcaacgtacagatgagcggcgtaaaaaccgacgcggaactggcatcgatttatatctttcacgagcaaacgccgtgcgatgactcaccattgtgtaactacaacctcattaatgcctccacgtcgattgtctgcggcgataataatgcccatttgaccttcaaccgctcgtgcagcggctcgtcttccacgacctgtgaaaacggcaaaataggcagcatcacgggcacctggggacgcgtcaatattgacaccacatgcgcggtgacggtgttaattccctatgagtaa

SEQ ID NO: 383820 - DNA, 534 bp, Salmonella enterica
atgaaagaaaaaacaacaccggttaagtatttactgtgcgctggattgctatgggcatgcaattcgcttcccgctgcggcggtaggcgtcgagtacagcggcgagctgattgccggcgcctgtacgttagtaattaacggcaacatgatggccacggtggattttcatacggtgagcagtggcgaattcattgccaccgggcagtcatcccgtgtgcctttcaccctcagcctgaaggagtgcagtagcgcgctggcaacaggtgtactggttacctttcagggtgttgaggacagtacactccccggcctactggcgctggaagcctcatcaaccgccagcgggtttgccattggcgtggaaaccaccgaccagaaacccttagcgatcaacgccccccagggggcgacgtttaccctgacggaagggctaaccaccattcgccttcaggcatggctgcaaaaacaccccaccgaggatatcgcccccggcgaatttacgggaacggcgacggtgagttttgagtatcagtaa

SEQ ID NO: 383821 - DNA, 486 bp, Salmonella enterica
atgatgagaaaaattattctgcctctgctgtttctacttcttattccactatctaatgcgtcgacgctgacatttaccggtattgtccacgcccactcagcagatccttacagatgtaaaattaatgacaacaaaaccatagaagttaattttggtaccattgttatcgacaaaattaatggcgtgaattacctgaaggatattccctggagttttacctgcgccaaacgtcaccccaaaaatctattagtccttcggtatctgggaaccgctgccagctttacggctgatgccattgcaaccagcgtagacgggctgggaattgaattacagcaaaacggagaaattttacacccaggcgatatcctgagcattgataacgatgcgcctccagcattaaaggcggtgccggtaaaacaggccgggaaagcgcttacggaaggcacctttgtagccaacgccgaactattgctggattatttatga

SEQ ID NO: 383822 - DNA, 528 bp, Salmonella enterica
atgacaaaatacggtttattcctggcggctgtgctgctattccctgtcacggggggcgttcaagctggggggacaaaaagcgtggagcttaagctgcatctggtcgtcacacaaccgcccccctgcgagataaatgacatgtcaacaaacataggactggaaaacatctatgatgatcaagttcctcctcttcctgtccaccccttcaccataagggtctactgtgaaaaggatgttgccgatacttacagctacctgaaattacagcttcagggggcgaccatcaccattgatggcgagcaagttttacagacaagtatagaaaacctgggcatccgcctgacatataacaacgcactggctccgattggtactggcgaatggctttatcttgataccagccaaagttctgacggcattctttacaattttaacctcacagcacagcccgtaaaaaaatacgcccacgactggattaatccggacaggtatacagccagcgcgtctctgattctggagtatgaatga

SEQ ID NO: 383823 - DNA, 771 bp, Salmonella enterica
atgaaaatgttacgcacctttacctgttacccggccattcttgccacgcttctaagcgtaccgctggtcgctcatagcgcgatcgccccggacagaacccgcattatttataatggtgaggaaaaatccgcgaccatctcgctgaaaaatagcaatacctctttgccttaccttgcgcaggtatggcttgaaaacgaaaaatttgcaaaagagaccacgttttttatcgctcaaccgcctctgcagcgcattgaagcaaattcatccggccagatcaaaattcagccgctgcccggtgcaacgcacttgccgcaggacagggaaacgctgctctacttcaacgtgcgcgaaattcccccgaagagtgataaaacgaacatcctgcaactagcgattcagacccgcattaagttcttctatcgtcctgcggcggtggcaaaacaggtagataaacagcatccctggcaggaaaaactctcgctgagctttcagggtggggaaaccattatcgacaaccccacgcccttctatgtggtgattagccgcgcgggtaataagcccgatacctccgcaactggcttcaaaaatatggtgctcgccccgcggtcgcaccaggcgctgggggtgaaacccggcgatctcggcagcacgccaacgcttacctatgtcgatgactatggtggccgccgcattctggtctttacctgtgcaggcaattcctgccatccggatgaagacaagagccgcgccgcagagaagaacgcgcgctga

SEQ ID NO: 383824 - DNA, 2676 bp, Salmonella enterica
atgaaaagcacatggaaacgtgtattttatcccgtcgcgcttggtgtcggcatcacgctgattgcctgcccttacgctgcgagagcgaaagatatccagttcaataccgattttctggacgtaaaaaatcgggacaacatcaaccttgatcaattctctcgccagggatttattctgccgggcatctataccttgcaggtgaaagtgaatggccgcgcgctgccgcaagagtttgtgcttgcgtgggtgacgccgccggacgaccccaaaggcagtgaactgtgcgccgagccggatctgattgcgcaactgggcatcaaacccgagctggctgaaaaatttagttggataaagcatcaggagcggcagtgccttgcgccacaggcgctggaaggcatggaaatgaaggccgaccttgggcaatctgcgctgctggtttccctcccccaggcctatctggaatataacgatgacacctgggatccccccgcgcgctgggataatggcattccaggaattatcgctgactacagtattaacagccagtttcaacgcgatgaggacgctggcggtaacaggcaaaacatcagcggcaacggtacgctgggggccaacatggggccatggcggctgagggccgactggcaggcgaactataaccatgacgacagcgatgatcacacggcgacagcccacgatcagggctggagccgcttctacgcctaccgcgcactacccgcattgggagcaaaactcacgctgggcgaaaattatctgacttcggatatcttcgatagttttaacttcgccggtgccagcatgatgtctgatgaccaaatgctgccccccaagctgcgcggttatgctccggaaatcgtaggtgttgcccataccaatgcgaaaatcgaggtctcctggcagggaagagtgctgtacgaaacccaggttcctgccgggccgtttcgtattcaggatctcaaccagtcggtctcaggcacattacacgtgcgggtgatagaacagaacggccaggtgcaggagttcgacgtcagtaccgcttcggtgcccttcctgactcgtccggggatgctgcgctacaagctggcgctggggcgcccggaggactgggatcatcacttaaccgcgtccccctttgcctctgcggaaatgtcgtggggggtcgccaatggttggtcactctatggtggggcgattggcgaaaaagattatcaggcgctggcgattggcaccggcaaagatttaggagtgattggcgcgctggcgatagatgtgacgcattcacacgcaacgctgccgcaggatgccggttattccgacaaggcgctgaacggcaactcttaccgcgttagttattcacgcgacttcgatgcgatcgatggccacctgaccttcgcgggttatcgcttctccgaaaaaaactttatgagcatgagcgattacctcgatgcccgtaagtattatcgaccgcgtaacgggcgtgacaaagagatgtataccgttacctggaaccagaacttccgtgaacaagggatcagcacctacctgagctattcgcgccacacatactgggacagcccggaacaaaccaactacaacctgatgatctcatggtatgtcgatttctggtcgctgaaaaacgtcgggatgtcggtgaatgcttaccgcaaccagtatgacgatgcgaaagacgacggcatctatttctcgatttcgcttccctggggaaataacggcacggtcagctataacggcacctataacgacactgaacacagtaataaagtcggttattcgaccacccgtgataatggcgacagttggcagatcaatgccggcgaaagcgataacggcgccaaaatggatggctattacagccacaagggaacgctggctgatgcagactacagtgccagctacgaagaaggaagctacagctccgtggggctttccctgcgaggtggaatgacgctcaccgcgcagggcggcgcgctacaccggggaagcacaatggggggaacacgactgctgcttgataccgatggcatcgctgacgttccggtaggcagctatagcacgcctgtttacagcaatatgtttggtaaagcggtgctccccgatatcagtagttattaccgcagccaggcacaaatcgatcttaatcacctgccggaaaaagccaccgccacgcagtctgtggtgcaggcaacgcttacggagggtgctatcggctatcgccgctttgatgtggtcagcggagagaaagtaatggccatattacggctggtcgatggcacttttccgccttttggcgcagaaatcagaaacgagcggcaaaaagcgctcggtctggtcagcgacgatggcaatgcgtggatcgcgggagttaaccctggagaaaaacttcaggtggtgtgggatggcgccgcgcagtgcgtagccgaattaccggacgcactaaccgaagcgatattggcgaccccgctgttattaccctgccgcttgcttaatgaacagtccccggcgacgcccaccacgtccccgaagagcaagaagccattaatacaagaaaacgtcctgacgccaggggaatctgcgttaccgggcctggccgctgacgggggaagaagacctgtgccgctggcggcaagcaactga

SEQ ID NO: 383825 - DNA, 573 bp, Salmonella enterica
atgaaattagtcaatatgtttaaaatggctgccgcggcgtctttggtactcggcgcggtgtcaggggcaaatgctgcgggaagcaacacagcaaaagttacctttgacggaacgatcgttgaatccccttgctctgtcacccgcgataccgaagaccagatagtatctatgggtaatagtatcggtaacggcaccctggcctctggcggcaaatcagaagcagtaccgttccatatcagcctgtatggctgcgtgttcaccacggaaaaagatatgaactacaccttcacccctggtgataacaccactaccgctacgggtgccataactaacctggcggtgatgaacaacggtactgaaatcagcaatgtaagtctggtgattgccgattcaaccggcgcagcgctgaaactaggcgaagcctatgttcagcctttagacaaggacggtaataatgtcggcaaagccactcaagagctgaaattccaggcctggctgcaaggtgcggctaccggtaccgtcggtataggtgaattcagtagcgttgcaaacataaccatttcttacctgtaa

SEQ ID NO: 383826 - DNA, 252 bp, Salmonella enterica
atgaaaatcatcacacatgtagtacccggttcagatatggctgaaatatatgatgatattgctgacagttcgcgttttgttattaaaggcaagttacgccatattgaaaacgatccgaaggagctgctgatatgtgttccgacgcgtagtgagtggctattctactggattaaaggagagaaacattgcacccggcgacgggtgcgaaaaagtgtcaaacagtatgtaaccagagtaaatttgaagaaataa

SEQ ID NO: 383827 - DNA, 1608 bp, Salmonella enterica
ttgaataatttaacattgtcttcattttcaaaacctggcgtaccgagtgatgcccgactatatattgctaaggaaaatactaataaggcatatgttgcgcctgaaaaattttcgtcaaaagtattaacctggcttgggaaaatgccattatttaaaaatacagaagtggtgcaaaaacatacggaaaataccaaaatacaggatcaaaagactttacaggtatttatccaggcattaacggaaaaatatggcgaaacagcggtcaaagacgcactgttaatgtcccgaataaatatgagcaaaccccttacccaacgtttagccgagcagattacggagtgtgtaaaagttgctgacaaagggtttataaaccttattaatcacaagggtaatgctggtgtcatgaattccgctttagtaataaaaggcggcgagacacaagtgatagaacaaaatggtgatgttgatgcagggatgaaacaacatttactcgatatcgcgctaaacggacttaagagaacaatacctcaactggaagaagtggacggaaatagcctgcgagaaaacttcaagaagatggcttcgggtagcggtacgctacgttcattaatgacgaatttacagaatttaaataaaattccagaggctaaaccacttaatgattatgctgaaacgttaacaaatattcaggtaggtgtagcccggttctcacaatggggaaccagcggaggagaggtcgagaagtggattggtaaagcctccagtcaggaattaacccaggctgcaaaaaaaattcacattattgttaacgaactgaaaaacattagaactgaacttgagaatataaaagctggcgcgtcaatgccacagacgatgagcggaccgacactgggtctggcacggtttcctgtcagtaacgtcccgattaatcagcaaactcaggtgaaattgaacgatggaacgcctgtgccaatgaatacgttaacttttgccggtaagcctgtggcattagccggttcgtacccaaaaaatacgccggaagcgctggaagcacatatgaaaacgcttcttgaaaaagagtgctcatgcctggtggtattaacggcggaagagcagatacaggcgagaaagttaccagcctacttcacagggcatcatacctttggcgaggtgcatatcaatagccaaaaagtgaactcaggcaatccgggagcagatgtagaccgatacaatatgcaactgtcctggggagaaaagcagtataccatcccggtattacatgtgaaaaattggccagatcaccagccgttaccgtctgcaactcaattagaaaatctggtagacagcgtaaaaagtattaaccaaaatggcgcgccggcgcgtagttcatcggataagcatttaccgatgattcattgtttgggcggagtgggaagaaccggaacgatggcggcggcccttgtgcttaaggataatcctcatagtaatctggagcagatacgtgcagattttcgggaatcacggaacaatagaatgctggaagatgcctcacaatttgaacagctaaaagtcatgcaagcccaattgcttaagacgacggcaagctga

SEQ ID NO: 383828 - DNA, 309 bp, Salmonella enterica
atgaatgcgctcatcaattttatcggccagcagcgtattgagcgttttgcccaacgttgcgccggaaatccgctatcccgttacctgctattaccgtgtatcgggacgtttgttttttgtaatccgatgaccctgagtctcggacgctttatgccggagaagtacaagccaagctattacgcggcggcctcctatagctgtcactccatgaacggtctgtttccgcatatcaatcccggcgaactgtttgtttatctggggatcgccagcgggcaaaacaacaggagcacattatggtttccaccctga

SEQ ID NO: 383829 - DNA, 435 bp, Salmonella enterica
atgacgatgcagcaaagtgatatggaaagatataatccattattgttaaaagaagtcatggcgcagacgccttatcagcataaacgccagagagaacgtaaatttcgctataaatttgtattacgttgccttattaacctcgtaacgacaattaaatacttcaatgaattatgtcatctgaatcagcccagagcgctgatcgttcatcgtccactattgccgacaaaaatccagcggccctgtttgtataccgagcttgcatacgttgccgggcaagagctattctggaacactaccagttcgttcagtcctttccggaaaataaaattaaaaaaagccgcctgtccggggaacaaaccttgttggctcgccgggaaggaaaaaacggtgctcattaaaccgtcgctttcactcatactgttatcaacactttaa

SEQ ID NO: 383830 - DNA, 192 bp, Salmonella enterica
atgagtgggatgagccctgaacgtagtattaaaatgaatatcgagtttattattttaaataatgttataagccagtatatttatttggttggtattatacccggaaaggacgggatggtagccggacagcaaagcgtcgtgatgcgtgattgtgcaaccagacgcaaagaggggtattcaccttatctctaa

SEQ ID NO: 383831 - DNA, 1062 bp, Salmonella enterica
atggaacgttcactcgatagtctggctggtatggctagttctgcttttggagcggggagttatgacgctatgcggcaagccacctctcccaaaactattctggaatttctcattaacatttttacctgtggagggatacgtcggcgaaatgaaagactctatcaggagttgatagagactatggctgagacattgaaaaatgcaatgtctgacagaggtgctccgttgccagaaaacatgatactggaggatatgggggagtgtcgtgtcgagtttagtcttcctggtggtaataacgaaactggaaacgtcattgtacgggtcagtaaaggcggcaattctgagacgagagaaattccgcttgcctcttttgaaaaaatatgtcgagcattactattcagaagcgagttttctctccctcaggaggctactatcttaactgcccagggaggtatgtatcttaaaggtgctgttctaaccaaagcaaatctgacggcagaaaatttatgtggtgcagacctgagcggcgcaagtttagagggggcttcactgtttatggcggattgtgaaggtgcaaattttaagggcgcaaatctgtcgggagcattattaggcgacagtaatttcacgaaagcctgtctggaagatgctattctgtgtggcgctatcctcgatagcgctaatcttactggcgccaatttacaacgcgcaagtctgttaacctgtagcatgatagaatgtaattgcaccggtgcaaatatggttctcactaatctttcaggcgcaaccatgatacgtgctaatatgagcggtgcgaaattaaataggactactatgatggccactaatatggaagaggctattttaactcgggcaaatctgcaaaaggcgagttgtatttctacgaactttgaaggggctgatttgtctcaggccgatctaaaaaatgccagttttaaagattgtacactaactcatttgcgtaccgaagaaaccagaatgtctacaagcacacaaacactttttaacgaattttatggtgaagactttagctccttttga

SEQ ID NO: 383832 - DNA, 312 bp, Salmonella enterica
atgcctggatgtataaatgcctgttcgtgtattaccaatccgacgcctccggcgcctaaggaccctcctaaacctaagtggatagagttaaagggctattgtattacaacctctccgctgcctgatcttcgcccaccaaaagaggatcaaccaaagaaaaaaatgacatctcaagagttagtgacgttacgacgacttttcaaagacttggggataacaggaaatccctggcaagactcgacagtaaaatccaataactgtgggttgccatttttcccggtagaatctggagaacgagaaagcgaggtttga

SEQ ID NO: 383833 - DNA, 246 bp, Salmonella enterica
atgaacggagtgatcgtgccccaaaatcagtgcggtgctaaatcacaaaaaggcttcataacgagtaacttctggcaaatctcagtagatttctgtagacgtaaaaaagcccgcaaggcttgcgccgtgcgggcttttaggacttcatcggatgactctggtaatcaccgatggagaattttggtggagctggcgggagttgaacccgcgtccgaaattcctacatcctcggtactacatgcttag

SEQ ID NO: 383834 - DNA, 282 bp, Salmonella enterica
atgttaagccgtgttttaacctttctggctgcgcttttgcttagcataacagcaacagcagccaccaaaataaataatcaccaggccagaaatatggatgatgtgcacagtttaggcgtgatttacatcaaccataatttcgccacggaaaatgaagccaatctggcgctgcatgaagaggccgaagcgcgaaacgcaatgtattatcacgtcatacttatccgggaaccgggtagcaacggcaatatacacgccagcgcggatatttatcgccaggattag

SEQ ID NO: 383835 - DNA, 771 bp, Salmonella enterica
atgatggatacttcattcatggatttcagctactttgcgattatgttcatggtcgctctggtcgctggctttatcaatgtggtttcgggcggcggcgggtttttatcaatcggtgcattgctaatttcgggtttaccgcctgctaacgcactggcaaccaataaaatccaggcgctgggcagctcattgacttccggaatctattttttgcgtcatggtcatattaatgtgcagcaacataaatatgtttttatggccgccttcattgggtcggcattgggcacgacgcttattcagtttattgagcctgagatgctgaaaaaactcctgcccgtgctgattattgcggttgccctttattttatttttgccccgaatctcagcgaaccgaaaaacaagccgcacacttcgttactccttttctctgtgatttgcggcggatgtgtcggtttttatgatggttttcttggcgccggagcgggttccttttatacgctggcctatatcctgctaaggggatacagcatcgataaagcgcaaattcactctaattttattaacctggcgtcgaattttgcctcaattgtgttcttcatctttggcggaaaaatgatctggtcattggggctggtgatgtttcttggtcagtcgcttggggcgcgtttagggacgacggtagtgctgactcgcggcaagaaagtcatcaggccgatgattgttattatctcaatttgcatcagtggcaaaatgctgctggatatgtatcagtaa

SEQ ID NO: 383836 - DNA, 402 bp, Salmonella enterica
atgctggatacctgcatctgttctttcattatgcgtgagcagccggaagctgtgctgagacgccttgagcaggcagtgctgcgccgccatcgtattgtggtgtcggcgattacctacgccgaaatgcgttttggctgtacgggcaaaaaggcctcgccgcgccatgcccaactggtcgatgccttctgtagccgtctggatgccgtgttggcctgggaccgggcggcagtggatgccaccacagagatccgtgccgtactggccgccgccggtacgccgattggatcaaacgatgcggctatcgccggccatgccattgcgtccggggcgatactggtcactaataacgtgagggagtttgagcgggtaccgggtttgcagtacgaagattgggtaaaataa

SEQ ID NO: 383837 - DNA, 231 bp, Salmonella enterica
atgcgaaccgtatctgtatttaaaaatggcaataaccgcgcgatccgccttccacgcgatctggattttgacggcgtcaacgaacttgaaatcttccgcgaaggcgacacgattattctgcgccccgcccgcccttcctggggatcgttccgtcatgaggaaaaagccagcccggactttctgacggaacgcgaagacatcatcagcgatgagggacgctttgaactatga

SEQ ID NO: 383838 - DNA, 396 bp, Salmonella enterica
gtggcgcttatctgcgaactcgacgagcaatggagctttgtcggtagtaaagcccggcagcaatggctctggtacgcatacaacacgaaaaccggcggcgtactggcctacacttttggcccccggaccgatgaaacctgtcgtgaattactggctctgcttaccccttttactatcggtatgttgaccactgacgaatggggcagctacgccagagagctaccgaaagagaagcatctgaccggcaagatttttactcagcgcatcgaacgcaacaatctgactctgagaacccggatcaaacgtctggctcgcagaactatctgtttctcacgctctgtagagctgcatgaaaaagtcattggtgcttttatcgaaaaatacatgttctactaa

SEQ ID NO: 383839 - DNA, 1674 bp, Salmonella enterica
atggcactaacagatcgcgctatagtccacgccaagccttgtggcaagccgtataagctcagtgactcgcatggactttacctgctggttaaccctaacggttcaaaacgctggtatatcaagtaccgctttgtaaacaaagagaaaaagctcgctttaggcccttatccgcttttgacgcttgcacaggcaagacgcatgcgtgaagaggcccaattactgctgatttccggcatcgatccgagtgcacaccgaaaggctgaacgccttgctgtaacgccggagcatacgtttgagtctgtggcacgcgaatgggtaaccagtaacgtgaactggtcggcggaacataagaagcgggtgctgcgttacttcgagctttatgtgttccccacgaacggcagctgtgacatcaccaaaatgaaggtcaaagatctgctggtgcccatcaaggaggtggagaaagcgggcaaactggatgttgcttcccggcttcagcagcgcactgcctgcgtgatgcgctatgcggtgcagaacggcattatcgagcataaccctgcatcagatttaaccggcgcggtctctacgcccaaagttcgtcaccacccggcgttggatctgaatcttatccctgattttctggatagaatcgacgatttcaaaggacgtaagctgactcaactggcggtaaagctggcgctattgctgtttattcgctccagcgaactgtgctttgcccgctgggatgaaattgacctgcataacgccatgtggaccatccccgctgagcgtgagccgatccccggcgttaagtactctgcgcgcggtgcgaagatgcgttctcctcacctagtccctctatcacatcaggccatcgaactgctccacgaggtgcggcagcactgccgaccgggaactgaattggtgttccccggcgatcataactaccgcaaaccgatgagtgaaaacactatcaacaaagcgctgcgtgtgatgggctacgacacccagaaagatgtctgcggtcacggttttcgcactatggcttgtagcgcgctggtggagtcaggcctgtggtcaagcgacgcggtagagcgccagatgagccatcaggagcgtaagcgcgtgcgggcggcgtatatccataaggcgcatcatctcgaagaacgtcgggagatgatgcagtggtgggcggattatctggatgcaaaccggttcaggcatgtggtgccgtatggctttaaaaagtcgccgggaggcacactcgaccatatgagcttcctggagcgtaatgaccggcagctagaggagctgaaagccataatactggccgactcggaatggctgacagcgtctgagttatcggcaaaagcgggtttccgttctgccgatcctgatgctggccccaaaggttggaaagccgccgggaagatattctcgctgaaggtcgatggtgaggatttgtatcctggctatgttcttgatgagaaagcgcggcctctcaaggttgtcaggctgattctctcgctgttcaaggagcgtaaaacgccgtgggggctggctatctggttcggttcggcaaaccgcaggttgagaggtgggaagccgaaagatctgctgatttcaaagtcagagttggtcctgatggcggcgcaggatgaggtggagttggggtga

SEQ ID NO: 383840 - DNA, 1503 bp, Salmonella enterica
atggaattacatgaaaaaatcgcgtggtacattgagaaagaagcagagaaattagctcttcgacatcatgcataccataatgccttacatgttgagaatgaaagaaagcatcaacggtcttcatcacctgcaaatctgaaagtgattacgaaaccaccacactggtcacaagataaaaaattcgacccgttttatgtaaaaaaacatgcaaagacaatagcacattcaattgccactaaaattaaatctcagacttatgaaccatttgagccagcgaaaaataaggttgcaaaatcatctggtgggtatagagaagtagtaatgtatcagatccctgatgctgccatatcaacctttttttatcatagattactcagtaaaaataagcatcgctttagttctttttcatatgcttatcgtgatgatcgaaatgtgcattttgcaatccaagatattgccgttgaattgtctcaaaactctaggttatttgttgcagaatttgatttttcgaaattttttgatgcaatttcacatcaatatttattcgagcaatttgatcagaatggttttttcatcagccaagaagagcgctctgtaattaaagctttcttaaaaggacgcgataaaggcataccccaaggtacatctatatcacttttcttagcaaacctggcttgctggaaactcgataaacagctagaaaaagagggattgcaatttgctagatatgccgacgataccatagtctggtcacaggattatacaaaaatcaccaaggccttagacatcatgagtcatttttctaaggaagttggtgttgcgctaaacgctgaaaaatctgaggggatcagtatattatgctctaacgcaatgaaatcagagtttcataaaagcaaagataaagtagatttcttaggttactcgatatctactgataaagtttcaataaaagactcatcggtcaaaaaaataaaaagagaaattacttatattttgtataaacatttaatccaacctcttaaaccttcgcctttaaaagccctaaaaatacctgctaataacatagatgaagcattactaagtgcaatctgtgaaatacgtaggtatatgtatggtaatctatctgaagatatgatatcagcgtatctcaatgggcgtagcaatcggatattctttaaaggagtaatgagtttttatcccctaattaacgatgaggcgcaaatgaaatcactagatggctggttagtcaatgctattttcaaagctgttcgatatcgttctattcttcttatatctcaccatcagcctagaactcatatttttccatttaacgtttcaagacgagaacttttgaaaggctgtaatcggacccgtattaataaaatgaagcttcttaagtttccaagttttttaactatatacaaagccatgaaaaaaggtcttgttgaggttggtattgcgggtgtaactgattctaaagccaacacttataactatatataa

SEQ ID NO: 383841 - DNA, 267 bp, Salmonella enterica
atgttaccccggacacaccgccagcttgtaagcgttgaagtgatgtggcctgctcagacgctaccgcttcccctgcaacaggtagtcgaagcattgaatcagggcgaaacgcccgatcagattattatccgcatgaaccaacagggtctgctggcgtggcgtgaggacgcatccttgcaggatacacacgatatctttcaagtacggctggacaaccagaatgaggcgcggtttctctgccgctacgttagtctgccgctgcactga

SEQ ID NO: 383842 - DNA, 486 bp, Salmonella enterica
atgatattcatagaaaaatccagccccgacacgccagaatctttgtatcttatcgaaatgctatccgcggcgctggctgagattactggtgatagcggaaagactaactttaacgtcgataccatgaaatctgatcgagcgctgtgggtagtggcaaaagatgaaaatggcgaggttatcggttgcggggcgatccggccaatatctgaagatattgccgaattgaaaagaatgttttccgtcaataaagcatccggaacaggtacagcattgctccggtatcttgaaggtgaagcaaagtcgcttggatataacgaaatcaggctagaaacccgtaaagttaatacccgcgcagttgctttttatgtaaagcataactatcaacgcatcgctaactatggcccgtatgtgggtaaagatgaggctgtttgcttctcaaagcacttatctctgaaggagaaaagcatcagtgcagcggcagactaa

SEQ ID NO: 383843 - DNA, 1596 bp, Salmonella enterica
atgctgaagtggctacaaagaccatcccagagccagccacctgcgccagacgctgcgctgccggagggttggtttgcgccacaatccgcagaacgattgctggcgacaccgttacgccagtcctgtttgcagcagttacggcaactgaccccgctgccggataccctgttcgttagctggatcctcacggcgattaatcgcttcgcagcactggtgcagctgctgcccgcctcacaaaatcatcaccattccattcccggcgggttattggatcattcgttggaagttgcctgcaacgccatccggttgcgcctgggttatctgttgccaccggaagcgggcgcggaagaacaggcccggcaggccagcgcatggacggtcgcagcggtctgcgcggcattgctgcacgatacgggaaaaatcgccgtggatatggagatttctcaacgtgatggcacccgctggcatccgtggcaagggaatctggcgcagccttatcgctggcaatacccgagccacggtcgcgactatcatctgcatccggcgtctgccgcaatgctgattaatcagttgataccctcgccattactggactggctggccggataccccacggcttttgcgtccctgatttatcagcttaccggacactacgaacgggctggcgcactggcggaactggtgcaacaggccgataaagcctctgtcgcccgatacctcggcggcgatatcaaaaccgcgctggcgcaaatgccctcttccttcccccagcaacttcttacagccttgcggtcgctggtacagaacgagtaccggctcaataatcccgaatgcggatcagatggctggttgacggaggatgcgctgtggcttatcagcaaaaccaccgccgaccgggttcgcgcctggctgctccagcatggcgtagccagcgtaccggaaaataataaccgcctgtttgacgaactgctggcacatcagcttatcgttgccaatgaggataaagcgatctggcgctgcattatccgatcggataagggctggtcgcccgttgaaccgctgacgctgctgcgcctgacgccgtctgcaatatgggaaccaggcgaacaacgtcccgcctgttttgccggtgatgtgacgccggtaagcgaagctgaacccgtccctgaacttagcgctcccactcaaccgctgccggagatagcagacgacccgaggcttggtgacaataacaatttcctgcagtggctgaagaaccacaccaacccttcaggcacggtgaatacccggaacggcaaagtacatgtggtggaaaaccatcttttcttgatttcgccggggatctttaagacatacgcagcagaaactacaggcgataccggcgacggctggaaactggcacagcgaatgtttcaggagtcagggctggccctgcgctgtaatgatgacagttttatctggacctgcgaggttcgggttccacaaaagaaaagtagtcagttgaaagggtttctgatggaagatccgaagcaggtgttgggggagaaagtgccggtgaataatccgtggctgaagctggtacccgcgatggaataa

SEQ ID NO: 383844 - DNA, 453 bp, Salmonella enterica
atggagcgagtgaaccacacaactctggatggaaaaatagcaggtaatttgcccactttgattgatgaggaagcactggcgcaggccagagggcaattggttgcacagggctggctgacagcagatgaaatatgcctacgcacagatttgtcttctgaacagttcgctaaatggaaatgcgagcactgtattttctcggtacataaaaatggtgtaggggaggtatttcctagttatgcgttagatgaaaacctgcggccattaccggtgatgaaatcgattctggatattctgacgaaggtgaaaacgccatggggcatagccgagtggtttgctacctcaaatgatttattggcaggcaagatgccggaggagatgctatcgcgctatccggccaatgtaattcaggcagcggaagctgaatccggatggatccgccatggcgcagaataa

SEQ ID NO: 383845 - DNA, 876 bp, Salmonella enterica
atggcgcagaataaacaagagcgatatacgttctgtactccatcgctggatacaattctggcgagccggattgtctttatcggtgaatcaattcacggcattgcagaattcagtcagtttaaaaaagaatttataaaacacattaatgggcaaaactggattgtgttgttcgaagcggatgcgctgggaatgaagctatcgcaactacgcggggatactgaggaacaatttcttgataattttccccgcattatgcagacgttcgagataagagaattgattgcactggttcagaaacagggttttccctgcttgggcattgatgttattcctcgccgtattgatgctgattttccacaggactggaaagccgacagatcgtcgtttatccatcacttcattacggcgcgtgagtctgataattggctatcgtggcggtcggcaaaaatggcgcaaaatatcagagatatagcctgtcgcaatccttcctcacagctactggttttcctgcataatatgcatattaaacgtgatggccgaagtgagcggtcagaactgaggttgatgtctgcacgggagcaccttgataaggattttgcaggccagatgtacagtattgcgcagtttgcccgtgctggcagggcatgccataacgatctaacagccttcgatttcgaaattaatgatccgcagtctattgaaacgctaattgatcagcaaagtagcggctggcgactgtttaaatgcgaaaagttggttcagatgaaagtggcttaccatcatgcgtttgagcgggaaggcattgatatcaggcggcaatatgagtatgcggtgctgtatggtcgggtaacacctccggagtttataaaaaagtga

SEQ ID NO: 383846 - DNA, 372 bp, Salmonella enterica
atgggactcgacatcttctttttcgaacgggcaaaaaacgcgcccaatgaaagccaatacgccagagtgggttatttccgcaaggtgaacccgctacttaaatgggtggataaacacgttgggctggtgcgcaaccaggtgctgttagaagtcacaaaagcacatttgcaggcgcttctgagcgacctgcagagcctgacgccggataactgcggagcggtttatcccacgattgacggctttttctatggatataccgattatggagaacactactggaaagacgttcgcgccgtcacccactgggtgaaggagacgctggagacgtttgattttgagcgagacaggctgatgttttatgcctggtggtaa

SEQ ID NO: 383847 - DNA, 906 bp, Salmonella enterica
atggaaagaagcaacgatatctaccagaaagtcaccgaccagattattgctgaactggaaaacggcaatgtgccgtggatccgcccgtggcgcgatggcgagccgccgttcccgatcaatgcgttatccggtcgtccgtatcacggcattaacgtgccgctgctgtggaatagcgccgacaagcagagttttgccagcgaccgctggctgacgttccaccaggtcagcgcgctcggcgggcaggtacgccggggggagaaatcctctctggcggtgttgtatctgccgcgcacacaggaagagaccgatgcactcggccagccgttgctggataaagacggcgagccgaaggtgcggcatttcgggattattcgtgaatttcggctgtttaacctgtcgcagtgcgacggcctgccgcagtcgttgtccgagcagtttacccggcccacaaagcctgtggagatggccgaagccattacgatgaatagcggcgtgacgctgcgccatcgccgtcagtcgaaagcgtattacaaacccgcgaccgacctggtgatgatgccgcacccgcaactgtttgaaagcagcgaggcgtactacgccacgctgttacatgaactgacgcacgccaccggtcacgcttcacgtctcaaccgccccggtattgccggagcggaacgcaccgaagcgctctacgccgctgaagaattagtggcggagatggggagcgccttcctgtgcgcccattgcggcattcagggcaggctccagcacgccagctatatcggctactggctggatatcctgcgccaggataagcgggcggtgatccgcgccagcggtatggcgcgccacgccagtgaatggctgctcaacgctgtaccacaaccctgtcagcttagcgcctga

SEQ ID NO: 383848 - DNA, 291 bp, Salmonella enterica
atgtcgcttttcgataaaaaaccgtcgttaatgccggtggttatcgcccctgatgtctggcaatccgctgtggaatttcccgccgacccgcagcaggtggaggaacggctgggcaatctgttgctcgccgtactgctaaccctgcgcaccgccgggacgtcccgcaagaaagtcacctttacgatctactgccagccgccgcagggcgatatgaaagtccctgtcgcattaccgctgtcgctcaactatcacggccactatgtgcaggtctcgatggctgaacaggcataa

SEQ ID NO: 383849 - DNA, 201 bp, Salmonella enterica; identical to SEQ ID NO: 232972

SEQ ID NO: 383850 - DNA, 873 bp, Salmonella enterica
atgatctctcctgaaacgctgcaatccgccatctctaacgtctctgtctggcgtcagggtgacgtatgcgcgccgcataaaccgctactgctgttgtatgtactgtcgcagtacaaagcaggccattcacgcctgtttaactatggcctggagatccacgaaccgcttactcgcctgctgaaagagtttggccctaaacggcgcaccgattaccccaatatgccgttctggcggctgcgaacagatggattctgggagatcgctaacgcagaaggttgcaaaccgcgtaagggcaatactcagccaacaaagaaagaactgattgataaccaggtggcgggcggcttcgatgaagcggcttatcaacaattgctggcacaccctgagatgatcgaccagttggcccagaagatccttaccgatcgcttcccggaaagtattcagcggatcctagccaaccaactgggattcgattttatcgatcgctccaggaaccgcgatccgcgtttcagggatatcgtgctccgggcttaccactcgcgatgtgctttctgcggttacgacctccgactcgatggtgcgctggttggtattgaagcggcgcatattcactggaaagcgtacggtggcccgtgcgtggtaaacaatggcctggcgctctgtacattacaccatgacgcatttgatatgggggcattcgggctggatgagagtatgaccatccacatctccggcggcgtcagtcgtagtccggtggtagaccatctgttctggcaccgggacggccagcagttattcctcccttatgataaaacgcagtggcctgctgaacagtatgtcggctggcaccgtaaacagattttcaaagcctga

SEQ ID NO: 383851 - DNA, 1008 bp, Salmonella enterica
atggctggcaagatgtggatgattcgtggcgatggtggaaaactatatgatgattttcgtgataaacaagttgcggcgatagggtggtcaccctttgcaccacatgtaaaaccggggttatccagagaacagttgtttgatttataccaagagcttgaacctcaaattaaaccgggaactgcacgttctggtacttctcagatttggcgatttgtgaacgaaatgcagaaaggtgactgggccattacgtattccccctcaaatcgaacctacctgttagggaagatcgtttcagattttgaatatcatgcagagtggcttgaagatggtatgggcattgcccgccaggtgaaatggaatacggaagaaattgatcgtgataacttgagtgatgccaccagaaatacattgggttcaacactgacggttttccgtgtgccggatttcgctgtgaatgaattattgcaggggaaaaaacctgcacctgacgttacgccagaagttcttggttcagttaacgaggaagacgccgtatctaaccccttacgcgatatggaaatgatcgcctttgaaggcatcaaagatcgtatcaatcgacttgattgggacgagatgcaaaatctggtggctggtgttttgcgcagtatgggatataaaactcaggtatcacctgctggcgcggataggggcaaagatattattgcttctccggatggtttcggttttgaaaacccacgtattattgttgaagtgaagcatcgccgtgaacagatgggtagccagcagatccgcagctttatcggtggccgccataaagacgatcgcgggttgtacgtcagcactggaggattcagcaaggatgctcgctatgaagccgatcgttcaacgatcccgctgacgttgtggacactcgacgatctggtgcgtgcgttggttgaaaactacgagcaggttgatattgaaaccaagttgttagttccattgaaaaaaacatatcgtccagcttag

SEQ ID NO: 383852 - DNA, 444 bp, Salmonella enterica
atggaaattaaaacttcagattttgaaatttctacaaaagatgttcgcaaagtattagttctccctaatattggcttaggtagcgaaaatatttttagcacagattctattagttttattaaatatctaaaaaaagaaattgatttggagttttatcatcaaccagaaggattttgggaacagcgaagtattgattggctaggacctacactctttcttacagggaaattattatatgataatcctgatttattgaacattttatttgagatgttgtcttcttatgtaagagaaaaacttcctaatcgagatagtagtaaaataaaaattaatgtgatttgtaaaaaagatgaaaataccaaaagcatggagataaattatgaaggtgatataaacggacttaatgagataaaaaatgctattgagttggcatttaaggattaa

SEQ ID NO: 383853 - DNA, 753 bp, Salmonella enterica
atgaatataaataaaataatcacatacaaaaatatacagcaagaaaatacagagtttgttgatgctgcaattaaagatctttttataacagcatcaagagatgtaattgctctttgggtaaaaagaatagatgaaaggatagtgaaaaataggggcttaaaattttggtttatgaaaaataatgatgaatatgcgtcaggaaccttcctttatagccattgcactctttcagcagtaaaatcaatatacttactattcgatttcataaagtcggatgaaggacaaaaagcttggatgtctttgattgatgcttatgattatattgatgttgcaaaaatattcttaaataaatataaaatacaaagcgaaggacttgatgcctttactcatcggatagaatctttagaaaaagttattttccctacccatcatttgtttttaagcccaggagccaaagaaactctggggaattgtaatatttgtggtagtgattactttgagtgtgagcatattgaacgggaaatatataatggtatgctttgcttgcgaattaatagaaagatattagaggccaatcatatagctttagtagaaaacccaagggataggcggtgcattattttaacgattcaaaatactgatggaactaaacttgaaatattcagccgtaaaagaacgattggtgaaaagaacgctgatgaaatgactttgaatgcaattatacataattttagacagccagtgtttaattga

SEQ ID NO: 383854 - DNA, 1494 bp, Salmonella enterica
atgaccgccaacagctatttcgagtacgtgctcaccctgctcggctggctggtaaacaacggcgtgtggcagacgctgaccgccaccgggctgttcgccctgcccctgctggcaaaactgattgccctgtggctgaaagcgcgcggccagggggcggatgaaggcaacgtcgcccgcctgctggtcgtctgggtggagcactcgctctacagcgccctgctggtgatcttcttcgcgggtgtgccgttcctcaatgtagatatcaataccattacatacgacagccagcgcacaaaacagtgcggctggtcggtggtacagcccggcgattccggctatgcgccgctgatcaacgaacttagcggccagagcgcctcggtgccggtgtggtggtacttcactcacgcgctcggcaaaggcatcaccagcgctgccgtcgcggtattgccctgcaaaccggatttgcgccagttgcgctttgaggtgcaacacacccggatcgccgatccggcgctggctcaggaattacaggatttcgttaacgactgctatggaccatcgcgcgcacggctgaaaaagctcggcagcggtatcagcgaggaacagagccgggaagtggactgggtgggatcgtctttttacctcgccacgccgggctattacgaccacgatcactcccgttcaccgcgcgccgcctggccttatgacgccagccgcgacgacggtctgagtgatacgggtggcggtggctatccaacatgccgggactggtgggccgatggcgatacagggctgaaaaatcagctaatgaaacaggtcgataccacgctctggcaacaactacaaaaactggggcagtcgaaagaggagtatgaagaggcggtactacgctcgctggtgagcccgcgcaatatgcaggtatcacagggtgggctggtatataacgggtttggtgggaatgcgggagataacttgaatgcatcgcaagcgttaagccggttggggagtatcgccggaatgtcgatttccagcctcgctttgttccctgctttcgacagcgtgcgccaagcgctgccaatggtacaggccttcctcgaaatggcgctggtcattttgataccagtagtcctgttattttcggcatgggagattaaaactgtcatcacgctgagctttgtgcagttcgccctgctctttcttaccttctggtgggagcttgctcgctggctggatagctggctgatggagataatttatagtgagaacggcgcttcacatttcaacctgtacggcttacagaacacttctgatgatctgatcgtcaatatggtgatggggacgatgtttgttgtgttgcccgcgttctggctaggaggactgatgtgggcaggggtgagagttggcggtgctgtggctagtatggtgtctacgggtctgggggatattaaaggagcaagagggaaagtagggagcgtattattcaaacgcccctga

SEQ ID NO: 383855 - DNA, 1041 bp, Salmonella enterica
atgattattcagcgtgctaatccgcagctttatgatttgctgaccaacggcgtgttgcagggacgcctggattttgataagtcgctactgaactgccagaaaatggcggagaagatgaccgatttagcgacagattccgcctggttttccggagccaaagcggagaattaccagtccctcgccgccagcgataatgacgccattcgcaccgaccagaaagcggcaaaagaggccgccgaaaagggtaaacgctgggtgggtggcgaaaagcgaggcggcaaaggccagccgccaatcaaggtagtccatgacgccaccgctgcaggctggaatatcctcaaccagcagcctgccaccagcaccacgtctcttacctcctccgaatgcaatggggaactttgtagcacctggacatcccctgaagaggccgccggatggatgacccgcgtggtgggtgagcagaccatcagcgtggcgcaggccaccgacgatccggacgcacgttccggcgcacaggcaaggatcggtctacatccgctgatcgacgaagaaaaggcgaggatcctgcccctcctgacagatctggttaatggcagtcagaaacccggcttcgacaatttggcgaaagcctccggcggatccatgcaactgacccgcggcgtggtcgaggcactgcgcgacgatccggacgccaccgtcctcaccgaacggctggcgggagaactggcgctggcccgcgtcaccgaacaggcgctgctggcccggcgcacgctgctcgcaggtatgcgtgaacccaatatcgccaacgtcaaagaagcgcaggacagcttaggcaaaaccaccgcccaactggatgaagagctgagccagcttaagctggaactcgatttccgccaggcgctgacgcgcaataccgccagccagatcctgcaacgcaaacagcagcgcgaccagcttcagggacaggcggtggaggtaccggacgacagcgatcgccgcctgcacaatctcaataatccacagccggacagtccgcgatga

SEQ ID NO: 383856 - DNA, 288 bp, Salmonella enterica
atgagagtcctttgcctggtcttactgtttttcgcctgggtttgcgtggcggcagacgactacagcttccgcacgcgaggcgcagttgacgacctgctttactaccagattggcggcggcgaggcggtcatgccgcctccggtacgccgcagcccctcgccgctcagcgtggggattggctggaacgccgatatgatgtgcggcaatttcgatatcgacaccacggtgcgcaaccagctaaacggcatcaccgatggcttccagcaactgatgggcaacgtcatctag

SEQ ID NO: 383857 - DNA, 933 bp, Salmonella enterica
atgccagaccgcccttctcttctgttgcccctgatgctgtgcgccgctttcccgctcagagccattaccacgccggaaattgccgcttccgccctgtcgccggactgcgtgaactatcgggttgtcggcttgtgctactggctgtactgctcgccgttcggctgtacggtgcgcacgtcggtgaaggtcagtcattttcgtccggatctggtggtctcggcttacagcaacaccgggcaaagtccgtggacggagatgtcgttactcagcccaccgttgcccggtgttgccgaaggcggcggcgatacgaatcctcgttctgccagccagcacagcaagatccgctttaagaatgccgatgctatcggcttcccggcgggtgatgaactggcaacgtttttcacccagtttggctatatctgctcgccctcttcccaaccttttcaaccgtattttctgagtcaactcgatacgctggcgtggcgcagcggtgtaccggaaatgacgtacccggaggcgctgacgccgggcgtgcgggaagtcggtcagaacggcgatatgtggggcaatatctaccctcgcgccggagccatcagccagacacacgactataaagccgccgccgttatcgcccagcgtgtggccgatctggtgacgcgtaccgggcaaccgcatctctacacgccgctgaccgcctcatcccgcgccgggtactggccgccctccccggttaccgaaggcgacagaaataaccatcgctggcagatgctcaccccgaaaaaatccgccgcctgttcggtgttcccggatggcagcgccaccgacacttacgccgacaagctggcggagaacggtgcgtacgcctggacgctatggcggccctataaatgctgtccgcgccgggggcaaaccttcctcggcagtacgggttaa

SEQ ID NO: 383858 - DNA, 591 bp, Salmonella enterica
atgccagtaaaacgaaaacatctgacccgccatgaagtggggcagatactgcttgcagcggacagagggatccattttgagcgggattactgcctgattcagatgtgttttttacacggtctacgggtcagtgaactgtgtgggatgcgactgtcggatatcgatttggtcgggcgttcggtgtatgtccgacggcttaaaaacagtctctcaacgcagcatccgctgtttgatgccgaattgcccgcgttgatgcgctggctaaaggtacgtcgccgctggcgggaggcagacagcgactggctttttctgtcgcagaaaggaggcccgctgtcgcgtcaccaggtcaggttattgctcagacgttacggcgacctgggcggcgtcagcatttcagcatatccccatatgctgaggcacggatgcggctacgcattggcggatctggggcgtgatacgcgtctgatacaggattatctggggcaccggaacatccggcatacggtgatttatacggcgacaaatacgcagagatttatgaatgtctgggggaatatgagagaaaaccacacaattagtgccagaatgtaa

SEQ ID NO: 383859 - DNA, 513 bp, Salmonella enterica; identical to SEQ ID NO: 112613

SEQ ID NO: 383860 - DNA, 681 bp, Salmonella enterica; identical to SEQ ID NO: 112614

SEQ ID NO: 383861 - DNA, 2523 bp, Salmonella enterica
atgaaaaatccaacttcccggctgatggtatttctgctggcgctgctgctggtgatggttctgctgctggggtatctccgtcacgcggaggcccgtgagatcttcaaccctcatgcattggagattgacaatcccggccagccggtggcggatttatccacctttgctgaagccgacggccagctacctggcacttaccgggtcacggtttatgtgaatggtgaacggcagggacaggcgcaggatattgcgtttatctccgggccggacaaaaagctcagcgcgcaggtcacgcccgcgatgctgaaagcctggggcgtcaaaacggacgtctttcccgcactggcggtgctgccccctgagaagccgctggaaaatattggccactacatcccgatggccaccaccgatctgcgtttcagccagctgcagctgaatgtgagtatcccgcaggcggcaatggatgccagcgccagaggcgcggtggatccgtccgaatgggacgaaggggtgcctgccgcgctgctgaactataacctcagcggcagcaatacctggcgcaacggggaaaacggttctgatgacaactactacgctaacctgcaaggcggcctgaacctcggcgcgtggcggctgcgcaactattccacttggaattacgatgatgaaaacggcagccactgggattcggtgaacacctatctccaacgggatatccagcgcctgaaagggcagctcacgctcggcgacagctacaccccgtcggacatctttgacagcgtgcagtttcgcggcgcgcagcttgcctctgacgacaacatgctgccggacagcctgcgcgggttcgccccggtgatccgcggtattgcgcagtcgaacgcccaggtgaccattaagcaaaacggctacatcatctaccagagctatgttgcgccgggggcgtttaccatcaccgacctgtacccgacctcgggcagcggtgacctggaagtgaccatcaaagaagccgatggcagcgaacgtaccttcattcagcctttttctgcggtaccgattatgcagcgcgaagggcatctgaaatatgccctcaccgccgggaagtaccggagtggaaatgaggacagcgacgaaccgcagttcggccaggtgaccgcgatttacggcctgccgcatgccatcaccgtttatggcggtacgctgtattcggaggattaccagtccggagcggcggggctgggttttggtcttggcgaactgggttcgctttcggccgatattaccgccgcgcataccaccctcaacaacgacgagacccatgatggtcagtcgtaccgggtacagtactcgaaggattttcagaccactgataccagcttcacgctcgcggcttaccgctattccacggagggtttctacacctttcaggaggcgaacgatctgcgctcggacagcgatgatggctggcggatgacatacaacaaacgccagcggcttcagctggatctcagccagagcgtaggcagctatggatcgatttttgtctccggctaccagcaggattactggaaagaggacggttatgaacgcaccctgagcaccggctggaacgggaatattaacgggatcagctacagcatcacctacagctacagcgattacccggaaagcacccagcctgccgatcagcaactggcttttaacatccaggtgccgctcagcaaattcctctccggcgaggcggcaaacaacgcctgggccagctacagcgtcaacaccgctaaacatggcgatactcgccagcaggccgggctcaacggcactctgcttgctgataacaacttaagctacagcctccagcagagctacaccaaccatggcgtcggtggttccggcaacatcaatgccgattacaagggcgggcagggggaaatcaccggcggctacaactatgacgacgatacgcagcaggtcaactatggcctgaagggcggcgtggtggtgcatccgcatgggctcaccctttcccagccgcttggcgagtcgctggcggtggtcagcgccccgggggcggatgaggcgaaggtgcagaacaacaccggcgtttacaccgacggacgcggctatgcggtggtgccgtacgtcaacccgtacaagaaaaaccgtattgcgctggataccagcacgctgggcgatgaggtggatatcgacaccgccgtgcagaccgtaacgccaacgcagggggcggtggtgatggcggagttcaacacgcgcgtcgggcgacgggtgctgatgacgctgctgtatcgcggactgccggtaccgttcggcgcacaggcgaagttgaaggaggggggcagcggcattgtcggcgacgacggccaggtatatctcactggcgtgccggaggcgggcgagatcgcggtgagctggaacggggcgcagcagtgcgtggtgcattaccaactgccggagagtgccggaaacgttccggtcgtggaaatagcgcaggagtgccggaaatga

SEQ ID NO: 383862 - DNA, 957 bp, Salmonella enterica
atgagtcgcttagctaaatcgggttgtgcgtttctgatcctgtggctgatgagctttggtgcccaggcggcctgcggattttcatccggtctgacttctgaagtcacgggctatctcagcttcggcaatgtgatagttcagcgggatgcaccggtgggtagtgtcctcgccacggtcacaacgggggcctataacggcagtcaaacgattgccggttgctcagaaccctggacctaccgctgggaactgagtaaatggggaacactgagtactcttggcagcaatatctataacactaatatttccggagtgggtatccgattaactaacaccactaccaataaagtgattccttacgaccagagtgtaggcgcgaatacttatatttacatcggtagtaatggcattaaagctgagcttatcaaaacgggggatattacaggcgggacgctgaataacggtatgcttgcgcgagcttccgtggtgaaccaattctattttgctaatgccaccctgaatggtacgaacaccattacgtcagttgcctgtagcgtcacgacaccggatgttaacgtgaagctggaccagcataaaaaatctgaattcacgggacctggctctgccacggcgtggcaggcattcaacattgcgctggattgtaacaagaattcccgcattaacgtccggatcgatgccactcaggatccgtcaaatgttgccggtgtgataaagctggacaacgcggcaggcgatctggccgcgacggggattggcgtccagttgtactttgtgccggataacagcgcggtgcagttcgggcaaacgaaattctattacacctcgccgaatggcggttctgaaacggtgcagcttaaggcgcgttattaccagacaacgtctgcgatcactgctggtgaggctaacgccacggcaaccttcacgctgacttaccagtaa

SEQ ID NO: 383863 - DNA, 978 bp, Salmonella enterica
atgaaaaaaatcatctgcttattattgctgataatggctattgcgccattggctgaggccagttgttccttttacagcggcgtgtccggagaagtgcccggctatctgaactttggcaatgtggttgtccagcgcgatgcgccgatcggcagcgtcatcgcgacgacggtgaccggcgcttataacaacggtaatgctattgcgggctgcaagcgggaggcatggaccgctcgctgggagctgacgcaatggggaacgctgagtggttatggcaacggcgtctacaataccaatctcgtcggagtgggtttacgtctgaccactgctcaatcggggaaagtactgccgtatgaagccagctatccctacaatgccgggggctcatgggcctccattccaggagatgggatcaagggggaactgataaaaaccggggatatcaccagtggcaccttaaccaacggggtactggcgcgcgcttcggtcgtcaaccagttttactttgctaacatcacgctaaacggaaccaacaccgtcacctctgccgcctgctcggtgacttcggtggatgagccggtccagcttggcgatcacaacaagcgggagttcagcggcgtcggctacaccacggactggaagggatttaatatcgtgctggactgcaataaaagcgcgcatatttatgtgcagattgatgccacccgggatgcgtcgaatgcgccaggcgtgatggccattgattccgaaagcggcagtaccgcagcgacgggcgttggggttcagctttacttcgcgccggacaacagcgcggcgcagttcgggcaggcggcgcagttcgggcaggtaaaggattattatacttcgcctaatggcgggatggagaccgttcagctcaaggcgcgttattaccagacggcttcagcggtgacggcagggcccgccaatgcgacggcgacgtttacactgacgtataaatag

SEQ ID NO: 383864 - DNA, 279 bp, Salmonella enterica
atggttccgaaacgtctgaggattgcgagagagttagccgatatgtcgcaagaagaattggctattgcagcagggctttctgaagaaacgggctattcgagaatgtcccattacgaaaatggtaggcataaacctaaattcgagctggtttgtcgatttgctgaagttctcaatgtgcctgaaggctacttctatacacaggatgatagatttgctgatgtaatgctgaagctttacgacgggaaacgggtccagtggaaaaagaggcgcttaagttaa

SEQ ID NO: 383865 - DNA, 261 bp, Salmonella enterica
atgatccccaagagactaaaagaagctcgtttgcgagcaaagctgacccaggaaaagcttggtgtacttgctggtatagaagaggctactgcttactcacgcttgtcacactatgagaatggtacgcataagccgacatttgagctggtgtgtgagtttgctagggtgctagatgtgccggagtgttatttttataccgtagatgatggattcgcagaagaagttttaaagctatatcagcgttacatggataaaacctaa

SEQ ID NO: 383866 - DNA, 1530 bp, Salmonella enterica
atgcctccaagaaataagagcattaccagtcaaaagattaactcgattacaattcagaaattaaaatgcataaataatttgaatgagattttttttcacccacatgcactaactgctattcttggtccaaatggaagcggtaaatccaccatcctccatgctctagcaagcatatatatgccagaagagggattttctggtgaggatcataagctaggtgattttttccctcgtagcccgcaagctgaatggaatggcagtaacttcaacatcaatatatcatatcgtcgtgatggtgttttaattgataatgagataaaaaattatggaaaagctggtgatagaggttctcgatggatccaaatatatgctagacggccaatgcgagaagtttattatttaggtatagataaatgcgtaccaatgattgagtcggagaagaaaaataacgtaaaatatgtaacgagcaatgtaagcaatgcattaatcaccacaatactcggcaaggcatcctatatattaaataaacgatacactagttttaaccatcatcaaaaacctaacggcactaaatttatcggcgtagaaactggtggccttgcttactcctctcttagcatgagcgcaggcgaacaaaaaatatttcttatccttgagactgttttcaaagcagataaaaacgccctgatcttgattgatgaacttgatctattattacatgacgaagcgttaaaaaaattaatctttgttttatctgaacatgctacggagaaaaacaaacaaattatctttactacgcatcgtgaattaataataagcatggcagataaagttaatatacgtcatattgtatctcttgatacccgctcatattgttttgaagaaactaaaccagacgctataaacagattaactggtgagcaagttacacctatagaaatatatatagaggatgatgttgcaagtgcgatcgccaggaaaatatgttcctcccttcaggctagcagatacgtcaaaatatatatgtttggcgctgcaattaacgcctttacactacttgccagttcactcatcagaggggaagatatctcccacaaaatttacattttagatggtgacgaatataatacagccgataaaaaagcagcagcactagacagggtcttaacaggcacagaagaaagaaccaggcagttaaagatcgcaggtgaagggaaaattatacagtttaatcttcctgtggatctgaaacctgaagcatatctccatcaattaataacaactattcctatcgcaggtctggaaaatgatgcgttggaaattatcacagttgcaaacagcatccgcttcgaaatggatccgcatagatatattacgaacattataaatagattaggtttggagcgttcatctgggctcgctaaaattattgatcttgcatcaaaacaccctgactggaacaattatacccaaagtatctctaactggttgactcctttaattaatcaattaagagaagataatggctaa

SEQ ID NO: 383867 - DNA, 360 bp, Salmonella enterica
atgaaatacaccatcctgatacttctgtttttactggccgggtgtagcacctcgcaggaggaactgatgccggtcgatcctgatgccagcatgctcacgctgtggcagcagcaaagtggcggcagtgccgccctgcttgatgcgcgcgcccagttgcgccgcccgccggatagcccgacaacgcaacctgaggcagagactatccgcagccagtttccgcgcctgcccaacccggatatggtgttgtacgttttcccgcacctcaatggcaacatgccggtgcctggctacagcactgtctttcccttttacacccgcccgcagtatgcgctgccgggcgagcgcctgacgccgccatga

SEQ ID NO: 383868 - DNA, 1296 bp, Salmonella enterica
atgatgccgcgccagagcctcctgctgaaaatcctgctgcccgtgattgtatttctcactgtctggttactgctgcgcccggccagcaaaaacaccactgagaaatccccgtcccgcagcgtggcagccttaacgccgcaggaactgcgcgatctgggtatcgatggcgacacccccgccgataccgtcgccacgctggtcggccagatgaaacagtaccgccgggagcttcaggctatccagagcgataatgaaagccagcaggcgcgcgagaagcgactgaaagcgcagcaggcgacgctggtatcggagttgcgcggcgatatgcgcaggcagcaggaccagatgcgcgacgagctactgaaaagccagcggggattgctggataaactcgaccgcctgatggcgaaacgccccgacgatatcccgcccggtctggggctcacgcccggcgaactacctgccgatgtgcagccggatatccgctggctggagccgctggatgcgcccccgcctgtggatgaaaaactgctgcgcgtccctctgaaagcgaccgacaaaccgccgccaaaacctgacgtgaaggtctacaccctgccgcagaacgccacgctgaccggatcggtggcgatgacggcgctgattggccgcgtgccgcttaacggcaccgtcagcgatccctacccgtttaaactgctgattggcgaggacaacctcaccgccaacggcatcgaactgccggacgtggcgggcgcggtggtctccggcatcgcttccggcgactggacgctctcctgtgtacgcgggcaaatcacctccatgacctttgtgttccacgacggcaccatccgcaccgtcccacagggcggcaaatctggcaacaaacagcaggagatcggctggctctcggataaccaggggctgccgtgtattcccggcgatcgcaaaagtaatgcgaaggagtacctggcctcgcagttcctcctggcgggttccggtgcggcggcgcaggccttcgccaatggcgaaagcaccaccgtggtggaagacggcagcatcaccagcgcagtgacgggcaacaacggccagtacgtactcggccaggccatcggcggcgggctgaaggagaccgccgactggatgaaacagcactacggccagatgttcgacgcggtgtatgtgccaccgggccacaaggtggcggtgcatctcaccgaaccgctgaccatcgactacgagccggaaggccgaaaagtgaaatatcagcaggccagcaccccggggggactggaatga

SEQ ID NO: 383869 - DNA, 768 bp, Salmonella enterica
atgaagtacatcttctttgctttattgttcagcctcccggccttcgccacggaagtggtactgtgggaaaacattcccctccccgttacgctgcatatcgggcaggagcggattgtcgacatgggtaaatcggtgcgcatcggttatcccgccacgctggaaggcaaagtacgcctgcaaagcgcgggcggaaaggtcttcctgctggcaaatacggcgttcccgtccacccgcattcaactacgagataccggcagcggcgagctgatcctgctggatattcaggccacacagggcacttcgccacttgaacccgtgcaaattagctatgcgccgcagacgcccgccacagcaaaaacgcccgtcccggtgacagcatcaacagagcccctgcccgtcctgctggtgcgctatgccgcgcagaacctgtatgtcccactgcgcaccgttgaagctctgcccggcgtcacgccagcccccgtccggctggcgaaacgcatcaccaccttattgccacagcagcctgttaccgccatcccgctggcgtcatggcaggtcaacgccaccaccgtcacagccatccgcctgcaaaaccaaagcggacagcacatcaccctcgatccacgcgagcttcaggggcagttcaccgccgccgcgttccagcatgactggctcggcccgcatggtatggcagaagacaccaccttggtgtacctggtgacggaaggcccggtttcccacgccctgctgccggagccgaaaccatga

SEQ ID NO: 383870 - DNA, 354 bp, Salmonella enterica
atggcgaccattccctttctccccgaccgcctcaaccgtgagcccgtggtctggcgcggcctgaccaccagtgagctgtttctggcgctggctctcggtcttggcggcggctgtgcgttcggtattgtgctggccctgataacccattactggccgttgatccccagttccgcgctggcaggcgcagcattactaattcagggcggcggacgcatcctggcccgcgccaagcgtggcaagcccgatagctggctaccgcaggcgatcctctcctggctggagcgccatcatcttcggggttcacaacttgtccagcacagtaccgtatgggtagtgcgcaggcgtccgcgatga

SEQ ID NO: 383871 - DNA, 309 bp, Salmonella enterica
atgcagcatcatatacttctatcactgattcttcttagcctcggagggccagcctacgcctccccggaatccacccagctcgccctcgcgctgaagcaactcgagggcgtaaaaacctcgctggagcgcgcccggagcagcgccagcagcgatccacagtcgcgctatttcttcgactatttacaggcacagcaggacatctccgacgttgaacagggcatccgccgctaccttagcccggcaagagcgcagccgcgcgccgtccagcccctgagcaccagctaccagcgggagaaccctgatgactga

SEQ ID NO: 383872 - DNA, 798 bp, Salmonella enterica
atggatggtttaattaaaaattgtcatgataggattgaaggggacaaacatctcaaatgtgatgcttccttaggtgatgattgtcttcaatgtagcagtaatatgtattttgatggcaatgatgtgaattacgaatgtgataataaaaggtatatctatattgcgcggtatttacctgttcattcttctgagatttctaatgcgctagaacagttgacgattagtttttatgatgagcttaaggataaagaaaaaatagtattcgcaagctttggtgctggtccaggaatagatacatatgcttttcatcgttggcttgataagcatcgtaatgatttatcctgtaaaaatattactgcatttaggatcgagtgttgcgatgaatggactgagttagctaaagaagttatgttttcaaatagccctcagggttttgagcgaaaatattatagaaatattgtggatgtcacgacggaggaagttaatatttctgaaaggttcgatattgcaacattatcatatattgtttctgaactcgatgagtctggtgttaataaattaattgaaaacattaaaaataataaaagtgaatgttcatacattgtaattaatgaccgaaatgaacctctcgtcaaagagaagataattaaaataatgactgcggtagcagatgctggttatcgtgattatcattatgatagtgaacattgtggtttctcctatcctgatgatatatactcaagtattagtcctaaagtttatcgtaaatctgtatattttgtaggtaaattgaaatga

SEQ ID NO: 383873 - DNA, 936 bp, Salmonella enterica
atgataatcagtgccagtagacgaacagatatccctgctttttaccatgactggtttatgaatcgaattaaagaagggtttctgttgatacgaaatccctataactaccatcaagtaaaaaggatatctttgcttcctgaagatatcgatgctatcgttttctggacgagaaaccccggtaagatgctatctgaactggatcttcttaaggagtttaaatattattttcagtataccataacaggttatccgaaaatactggatgctcatggattaaaccctcatcgtgcaatatcaacttttttagcgctaagcaagaaaattggccgtaataaagtaatatggcgctatgatccgataattatttcaagtgcaacgccagtttctgagcataaacggcttttccagaagatagcctctaatctggttggtcatactgaccgtgtagtgattagtttcgcagatttgtatcaaaaaacaaagcgaaacctcaatcttatccatgattttacatatagggatattactcattcccatgaggaactttatgatttatgctctttttttgcagatgtcgctcgggaatacgatatgcaaatatcaacatgtgcggaatcgcttgatctggaacaggttggaatcgttaagggtaaatgtattgatgataggttgctgaaggagttattcggactacatgtttcaggcataaaagattcagggcagcgagaagcatgtggatgtatcaaaagcattgatatcggacagtataatacttgtttacatggttgtaggtattgttatgcaacatttaatgaaaatatagtgaaagctaatatgaaaaaacataatccaatcagcccatttcttttaggtgatgcttctgatgtggataatgatcttttgaaaaatgtaattgttcaacaaaagctattttaa

SEQ ID NO: 383874 - DNA, 690 bp, Salmonella enterica
gtgagccagcaacaaccgacactcccttctcagccatcttccggcttggtaattggattattaagacttgtaggttatgtattggtaattattattgagggagtctttttacatctgttgctgacattatttctatattttttatggccgcaagacgatcttgagcatatttcgcgagcagtgctacacgaacaggcagcgctggagcaggatctacgtaggcatccgttgaaaactcatattctgggtttactacaatataaccaaatagtgttgagacatactgaagaaatagtactcaatctcttcagacaacgtgaactgacatcttcactgagtgaaggaatccgcagcataacgtacactatgttttattcgatgcaaagtgttataatgcgggtgctcagattgattataacttttccactatttttattttgtatgacaatgggaatgattgagggattggttctgcgagatctgcgacgatttggtgcgggttatgagtcaacgttgattcttaaccggctaacttccataatgggaaaaacatgtaagtacataattattataatcctctcagttccaaatgtttttttctcattaaaaatagattatttatcattcctatcggcaggggttatgatttattatcttcttttgtgtatgaatatccgaggaaggttataa

SEQ ID NO: 383875 - DNA, 657 bp, Salmonella enterica
atgaaacgactgctgccagccctgctcctgtttattttcaatggcgtggccgcctcccctgccatgccagaagtcgtccgctacgaccgctatctgctggtcagcacgtcaccgcaacagccgccactcgaacagcttaccgccctgtccgttccgcccggttttcacccgacggtcggagaagcgctgcagtacctgctacgcgacagcggctggagcctgtgtcttgccgatgcgcgccgggcgcagctttatagcctcccgttaccgctgagccagtatcacaccggcccgctgcgcctgaatgccgccctgcaactgctggcgggcccggcgtggcggatgacctccgacgaaaaccaccgcgaagtctgtttcgccagcgaccatgccctccccccgacggtggcttaccgtcatcccgtgtccctccgccctttggggccgttaacggccccgttttttctcgcagggaccgtacagcgtggcgatatccacctggcagtgattgtgccgcctgaggtcgtttacctccatcaggtggtgtggctgcgcacgggggaacagtggcgcggctggcgactggagcagtttgatgagcgccgggccgtgttccgtcatggcaaacatcaactgagagtgaggatgcaggagtaa

SEQ ID NO: 383876 - DNA, 384 bp, Salmonella enterica
atgatgaataccgtattgaactcacgtgaagaagcccttgaccggggcaaactgattaaccttgatgacgaggcgctggacgctggcttaccgctggatctggccattacccttccggcccacaagcactgtcttgaagaccggaatgacaacgccattagggacttgctgaaaggtgttgaaatggcagcagtagtggcttttatctcccaccaaccgccgcagcgcaccattcgtatcgactaccgctgggtactgtcgcaaaaaactaacggcagcacccagcagcaaaccgtcaggctgacgttacgcgttcatttttctgagcaaggcattcccattgccgccacgctggggctgatgggggaaagattcccttactga

SEQ ID NO: 383877 - DNA, 444 bp, Salmonella enterica
atgaacgatacccattacttcaacctctacaccagaggtctgggctacctcaaccggatccgggaagtgaccccgaaaaaaggcgaaccgttcctgtgctgcgacattaccgcactgcggggcgaagccagcaacgcggagcacacctggttcgactgccgcgtcagcggtaaggaagcgcagaaactggtgcgccgctgtatcgacgcctgcgagcagaaacgcaaggtgctgatccagttccgcctcggcgatctgtatgccgacacttttgtctacagcaaaggcgaccgtaaaggcgaaaccggcgtcagcctgaaagcccatctgctgcaaatcgggctcattaaaattgacggtgaagaggtttaccgggcagagcgcgaagcggaatcccagccagcgccagccgcaccgccagcagagcctgtaccgcagttctga

SEQ ID NO: 383878 - DNA, 294 bp, Salmonella enterica
gtgccgggctggaaagagagcgaactggaaattgaaaccgtcggcggtcagctgaacatcagcggtaaatgtgaagaggagaaaaccgaaaacggtgaagaagggtggatccatcggggtattagccgcagcgacttccgggccagctatagtctgccggagcatgtgaaagtgaccggcgcttcgctggaaaacggcttgctggcgattgaattacaccaggatatcccggaagaagagaaaccacagcgcatcgccatcaacaacaacccggcgattgaacataagtcgtaa

SEQ ID NO: 383879 - DNA, 1032 bp, Salmonella enterica
atggatgtcaccatccggcgggagaaaacgccgccaccgctggccttcaccctcagcgccctgcaacaggtctgctcaaaacagtggggcatgggcgcgcaggaggtactggatatcgcccagcgcctgtatgagacccataaggccaccacctatccgcgcaccgactgcggctggctgccgctttccatgcacgctgaagcgccgcaggtgctggccgcgctggttgccagcgacatgtcactccagcccctcgccacgcagcttaacctacagcagcgctcccgcctgtgggacgacagcaaaatcaccgcccaccacggcatcatcccgacccgtaaaacggtagatctgacacagatgaatgacagcgagcgcaaggtctacggcctggtacgtagccattttctggcgcagtttctaccggaccatgaggcggataaaaccgacctgcgcctgaactgcgccggggaaacgctggttgcccgtggctcagtcgtgattgtcagcggctggcgccaactgtttttgcgcgagatggcaacgcactcaccggaagaaacgcaggcacttcccactctgcaacaggggcaaacctgcctagtggaacaggtggacgttcgcgcccgccagccccagccaccggagcactacaccgaagggacgctgattgccgcgatgaaaaatgccgcccgttttgtcagcgatgagcgcctgaagcagcgactgaaagagaacgccggtattggcactgaagccacccgcgccgggattatccagacgctgcttaagcgcggttatctgattaagcagcgccgctttctgctggcaacggataccgccagcacgctaattgacgccctgccggaaaagctgaaagatccgggcaccactgcgctatgggagcagatgctggatgacatcgcgacggggaaaatggggctggaggcattcctggtgcagcagcaagaggccgttacagcgctcacggctcaaatagtcagaggccagaaaaacgcttcatcaggttag

SEQ ID NO: 383880 - DNA, 657 bp, Salmonella enterica
atgcaactttacctgtgcgaaaaaccctctcaggcgcgtgatatcgcccgcgttcttgacgcccgtaaccgcagcgacggctacctgcataacgccaccgtgaccatcacctggtgcttcggccatctgctgagcatggccgcgccggaggattacgatccggcgctgaaacactggcgggcagagcatctgccgtttattcccccggtatggcggctggtgatccgcccggaggtgcgcaagcagttccgcatcatcgagaagctgctgaaacaggcagatgcagtagtgattgccaccgacgccgatcgcgaaggcgaaaccatcgcccgcgaaattctggaacagtgccgctggcgcggcccggttcaacggctgtggctgtcggcgctggatgaggccagtatccacaaggcactcgccgcgctgcgtcccggcgacagcacgtttccgctgtatcaggctggactggcgcgcgcccgcgccgactggctggtcggcatcaacatgacccgcgccttcacgctgatgaaccggcggcacaagggcgtgctctccgtgggccgggtgcagacgccgaccctgcgtctggtggtggagcgcgaccgggagatcgctcgtttcacgccccgcccatggtggcgagtggatgcctga

SEQ ID NO: 383881 - DNA, 426 bp, Salmonella enterica
atgatcggtgaaaacgacgaagaaagcgccgcccgcaaaagctcgctaaagggccttttaaaggcctttaagggtaagggagagctgcgagcgctggtgcgggaattacagacgctgcgcatgcagttgcaactacgccagccgatgctgaaacaggcggtgtatgaactgccggggcgtaatgtaccgctgatcctgtgcagtaacccggcacgctccggcgtcagctatctgcgctggcgaaatctggacaacaaccgttcggggagcgtggcgttgcaggaagccattcaacagccggacgcgagtgatgaactgcgtgatgcgctgatggcgctcgaatggcggcgacaggtgctgaatacgcagctttcggtggtgatgtttatgctgcggcggatacgcccattaaccaccctgatttaa

SEQ ID NO: 383882 - DNA, 612 bp, Salmonella enterica
atgcctggcacaaccctgttcagcgatatccgcatcaccctgcacacccgcgtcgccgcccggctttggcaggcgcatcccaccggtatgctgctctgtctggcgttactcaggcgtctgctgcgcgccgaagaggccgacgatccgtgggccgcccactggctgaagcaactgcgcatccgcctgaacctgatcgcacatttattgaagcaaaaaaaccgtcggctggaccaggccttcgccagcctgccgggcgctatccacaccacgcaggtcagtaacccgtccccgaccgaattcatcctgccgctggcgctgttctcaccgcccggttcgcgcctgctgcaacagttgattgattacgatctgctggtccgccgcaccctgcttgcctggcacctcggccttatcacccaggcggagaagcgcgatttcattgccaccatcccacggctgatgctccaggtgttcagcttcgtgaaccgctttcgcaccaccggcgtgacccgcgccgacgtgagggcgaacagtccgctggcgcagacgatggcgcataagctcgggaatttgcccaaaaagatgcttgcggagatcctgcgtgatgatcggtga

SEQ ID NO: 383883 - DNA, 825 bp, Salmonella enterica
gtgccaaagcgcctgttgctggcgcgcaacctctctccgcgcgacaagttcgcatggcaactgctgcgcctgcacgcccgcgacgacggcagcggcatcttcccgtcatacaacgacctgcagggctggctctctgaccaacctgaaggcgagaaggcctcgcgcagtaccgtcagcaacgcgctgatgatgttgcggatcacccgctggctgagcctgtgccagcgactgcgcgacgagcaaagcggcaggatcaccggcaacctctacgccttgcatgatgcgccactgactcatgctgatgcctgccggatggacagcgaatatctggcgctgcttacggcctgttcccgccaccgcaaccggcgtatccgcaacatcgccatcgggctgctgctcaccctgcaacaacctgtggatagtggacgaacctgcactgagtctccattgaagaccgcccctggtcttaatcgaggactcagtaaaaaatgcccgagtcttcaattaagactcagtgatgtggcgggggctggcgggcagccggagccgcgttgcgtacatactggtacagatttaaacaataaacatcaaaagcgtacgcaactactgcactggcctgtggataatcccttcagcaccagcgaacgccgcaccgccgaacgcgccatgcgcaatctggatcccgacctctgccagcaggtgctggacgactgcctgtggcggatcgccgcccacgatatccaccgccccctcgcctatcttctggctacgctggagaaggccagacggggcgagttcaatcagcttcggcgcaggcgcagatag

SEQ ID NO: 383884 - DNA, 558 bp, Salmonella enterica
atgacgccctcagttaaccaggcagtgctcacccacatcgtccaggcgctgaaggatggacagatccgctactgcgaatcgctgggcttcagcccgcaggagctgtgcgagctgacgcgccttaccgccgacgacatcctgtttctcagcaacagcgcggtgcagttcatcaccacccacattgatcacgagatgctgggccggatgctggcgaggatggagcaggagcggctgttccagcagcgtctggaggaagccctatcgctgggcgcgtccatcgagttcatcaaccactactttggtctttccacgccggaagtttgtgcccggcggcggctgattggcctgtttgtccggcaagggcgcaacaatgctccggatgagcaggtggaaacgctggtatggaatgagtggcagaagacgggcgtgaacaagctcgactcacccgaaacgctgaccgccatgatggcaatggcccgagaacacgatctgtcgctgacggttatctggaacctgctgcgccagtggactcaggagaagctactgcatgaagagtaa

SEQ ID NO: 383885 - DNA, 621 bp, Salmonella enterica
atgccgctggaacgccagccggaatttgccgacctgttcagcaccgccctcgccaccttcaacggcgagccggaagctgtggtaccgcaactggtgcaggacgaactgctcggcgagatgagctgtcgcagcggcataagctggaatacgttgctggcggaactgaacgatggccagagcaagcggcaggttctgctggggcctccggtcgaaaaggtcctctggccgccaccgccggaagtggaaaaagcaccactaccagagcctgagcctgagccaccgactgaacccgccgcgcccgatgagccaaagccctcaccgctggtgcatacggcacagtcgctgtttgcctgctggggactggacgcctgtatccagccggacgacagcgctccggccggtttcaccctcgcgccttgccacgattttccccatccggcggcacggcgctgctatcaagtgctggccgccctgaatggcgacaccagcacgccgatgcccgccctcgaattgctgttgtcgccggactacgacaacgctcagatccagcaactgatgcagcttatcagcctgtgccgccagcggcggctgcgggaggttcgccatgacgccctcagttaa

SEQ ID NO: 383886 - DNA, 660 bp, Salmonella enterica
atgtgcgcttcacacctgctcaaccgctggcttcaaggtgccagcaatagcggagaacaggagatggtccaggccagtctggagcaaatccagccgttctccctcaatccccgcgtcacccgcaaccccggctatgacgtactgaaagcgtcaattctcgcccgcgggctggataacccgccggtgttgacccgtcgccccggtgatgaaaagtatatgctcgccagcggcgggaatacgcgcctcgccatcctcaatgaactgtggcaggagacgcaggatgagcgttaccaccgcgtctgctggccgttcagaccgtggccggaaacgctgtcaccgcagcaaggcgaagtccagtgcctgatcggccatctggcggaaagcgacctgcataacgggttgatgtttatcgaacgggcggaaggggtcctgcacctgcgcgatctttaccacgaggcaggcattgaatgcgtgacgcaactggcactggcggaacaactcacccgcgacggctatcccgtcagccagtcgcaaatcagccggatgctacagaccgtcgactggttgctgccctgcatccccaacgcgctgtatggcggtcttacccgcaaagtgatcgatcgcctgctggcgctacgcagcgcagcggaacaggtctag

SEQ ID NO: 383887 - DNA, 195 bp, Salmonella enterica
atgaatagcgacagatttttacgcttacgccaggtggaagacaaaatcggcttcggtaaatcgtggatttaccggcaaatccagttgcaacagtttccgccgtccatccgactcaacagccgccacgtcgcctggctggaaagcgaggtggatacttggatccaccagcgcatccggcttacccgcgatgtctga

SEQ ID NO: 383888 - DNA, 192 bp, Salmonella enterica
atgagtgatgaagtgctgaccatcaaagaagtggctgactacctcaaagtgaacgagcgcaccatttaccggttggcagcccgcggcgacttacccggctttcgcgttgggaacgcatggcgctttcggcgcggggacctcaatgtgtgggtttctagcaaaaccgggcaagccaaaaatcagggggcgtga

SEQ ID NO: 383889 - DNA, 384 bp, Salmonella enterica
atggaacatggcaggctaaacgcacaactacatcagttgattcatcggttgaaaacgacatccggcgctacagctaacttgtttagtgaacatcaggatctctggcgagagctcaattttagtgagagccaagtggctctatgggaggcctcactatcattgagaagtcgtctgtacgaatcagaagcgacctggcaagtcacacctgatattgccagtcatctaattgctttgttgcaacaagcaaacggacgtatgccattaactcaggtattaaaaaggcttcccgcaggcgtgacgactactgaacaacaaatacgcaaactggcgcaacaacatgcccaattagacattaaagggccgctattggtattgatcaattaa

SEQ ID NO: 383890 - DNA, 2145 bp, Salmonella enterica
atggcaaaagacaaaaaaaacacctcacaagaacaacttgacacgctttttaaccaactagtggcaaagcatcgggggtttgaccagcctttagttgagctaccagaacatgattttgttaaagcgggcttaattcagggaatggtagaaggcaacctaacgccgcctgtgatgctggtagccatgttggatggcaactgggaaaacgccgctgataccgccagatttgatgatctggcgtacacgttgctcagtagttatgaaggtgactggccagtatatgcagtggtgatggatagcagccatgatcgtactctggcgttgtttggtgccgacggagctgatggtactcatggagttgatgcattacctgggcttgaggagctgcgtaatgtcgaccgtttagagcgtgacccaactttccgttggtccatgcgtgtatatacccgattgatgcaacgttttgatgcttttcacgagagcgtataccgtgtgaccaaagacaaggtcaacgataaaaacgacatcattgaagaagttgcaaaacttctgtttctggaaagcttccgagtacatcacgacgaagagctgacctttaaggatcatgcaggaaatacacatcgttttcaggatgtcttcaactgggaatatgtgaaacagcatggtgacaaagcagtagagcaaatcaaagcggccttcgaatattttaaatgtcatgaggactatgttgtcatctctgacgatggttctcgtaatgctattttcccaccggagacccacctgcgtttgtcggtcgcgaaaaactacgaagacttgctggaagcaatgcaaaacctgggaccagtgactaacaatgatgggcgcccggtcaaacgtcagggcacgcttggtgacgtttcgggtgacttattgggtcgtgttttcgacgtattcttgcgcgccaattttgaatccaagggtggactaggggtgtatctaacccctaatcctgtcaaacaagccatgctcgaaattgctatgcatgatattgacgaagatgatgagatgcgctcacgtctggcgaacggtgattttcgtttttgtgacccgacctgcggttcctttggttttggttcagtggcgctaagccagattgataagtggattgacagtaaactggcactggacgacgacaagaaagaaagcctaaagcaacaattgcgtgatcacgcctttacgggggccgatgctgctccgcgcatggttatgttggcgcgcgtcaacatggcactgcaaggtgcccccaaggcaaagatcttctataccgataactccttggtaactagcgcgctgaaaccgaatagctttgatttgatttgtactaacccaccatttggtacaccaaaatttggtagtgataaaaaggggcaggagtcgaaaaaacactacgaagccaatatggagcaggttttgggtggttttcgccctgccgagaaagtagttgagagctataacgcttattatgatcacctcaagatgcgttggcacgatactggtaacttgtatcttgacgaagaggggaatccaaagtgggcaggattccgtaccgatctgcgtcgtactggtggttcagataaaaagcctgtttatagcctgtttcctacgacagaaggcctggcgcttgggagtaagcctgatagtaaagataattggcagcaagtgggagctaacattgacccggcagtgttgtttattgaccgttgcctgcaattgcttaagccaggtggccgattactgattgttctgcctgatggcattttgtgtaactcaggcgatcgttacgtacgtgagtacattatgggcaaaaaggatgagcaaaccggtgaatttgtcggtggcaaagcaattgttaaggcggtgatttcgttaccgagtgattgttttaaactttccggcacgggggcaaaaacgtcgattttgtatctacaaaagcgccatgctaatcctaatcaaccggagcagtttttgccagaaccgcaaacagatgtgtttatggctgtagctgaaaccttaggttatgtggtgaaaaacaatatcgaagattataacgccggcgtaccgaatgatctggataagattgtttctgcttataagcgaggtgagtaa

SEQ ID NO: 383891 - DNA, 1539 bp, Salmonella enterica
atgtctgttgatactttacgtgaaacctttcatgttaacagaattaagccgagcgcattagatgactttttaacagctcagacttataggcctgaaataacagatacctatcgcaaaatatctactctgcggcatcaaaaactgcaattttttgctgataataaaatcagtcaagggccaacccctgtctatgctaaagagggtaaacctgctttaaaatctaagcatacagttgatatgatcactgaattccccgaaggtgatttggttagccctgattgggctaaccaaaagataaagcaccttattaatagaaatgatctcgttattacaaggaaaggttcaggtactattggacgagcttcaattttttttgaaaaaatttctctcaatactgatgattccctgtttaaagttagcttaagcaaaatcgatccggcatatgttgtttcttacttaagatcatatcagggtgaaagactactcgaaaaaggtgtatatggaagtaccgggcagcttagcctctcagctgaacatattcgcaatctaccaatttatgagcctgatttcattactcaaaaatacattggcgataaagttcgccaagccgagaaacttcgcgtgtgggcgaaggtgcaacagataaaaattgatcagcttttaataagtgatgagtacttgcttgcctgcaaaactgttgtaacaaaaaccagccgcccacaattagctgatttatcaaatcggcttgatcctaagtattacagcaataaagcaatcactgttcagagatttactaaaaatagtggggttttactgtcaggtctaattaaatcaataagtaatggttttgaagagcgtaattttgttggggagggggtgccctatattactgtatcagaggtgtcttcagggcgtttaaatgttcaaggggcaccacatattggaattgatgttgatgtgccagcgaaagctataattcatgaatgctgtgttcttgttgttagaactggttcaattggtacggcaataaaagtaaatgctttagataaaggggctgcaataagcagtcatttaattcgtctggaatttaatgatgaagaaactgcagcggcagtcgctgtgtttttaaactcatcgctaggaaaggtattattacacaaaattagttatggtgcagttcaacctcagattggacaagaagaactgcttgctctttatattcctctttatgtccttaaacaaaaagatgcttatttgaagttattggtaaacttcgagcttgcgataagaacttcatcccaactcataaaatcagccaaaaccttagtcgaatccctaatcgaaggccagctcactgaagagcagcttgttcgtgctcaacaagcacttgatgacggcgacactagcctggatcgggatattttaagcaaacttagcaacgagggatatgccgtagaagaggctactccaatttttagcgatattgatgaactttatcgtttactggaaagtgcaaacgagacggaagaagaggagtaa

SEQ ID NO: 383892 - DNA, 1266 bp, Salmonella enterica
atggcggcaagcagcataaaggaattgccgcttgcggctagtgaagcgaccaagatctgtgcgcagctttggcagtctggtggggtaaaagctaaacaggcggaggagttatttgcattattgcccggcctacaagcattaatgcagcccgtgagtgaggttgcaggcaccgttgaaccccaagcatattgccttactgcgacgttaatcgatgcttataatgaattgagccagctaggtgaatggcaattagcattgttgggcctgaacccggattaccgtaatcattggctgaatttagccgccgcacgttgtcgcgaagcgggttgcatgagtaatcctctggttctagtcagattgattggtcaactagaacaggccagtgagtggattttgccgttgctgcaagataatcctgaaacaccggcactagccgctgggccattggctagtcaggagcgtgagctgattggtcatagcctcaatgataatgccgctattccggcgctgtgtcggatattgcgtgtgtgtttcaccctgaatgagtttgcatcggtaaatacatctacacctcttttaacacaaggcgcgattgctactgtggatttaacaggtagggctcttgagcgcaactggtgcgctggccgtgtcctggcattacccgatgtgcacttatttgaaagcctattagagctaaaaccgcaatcaaactggcttttgaccgaacgccctgttgtcagtagcctctcagactgtattgaacttttcagccaccagccttggctatatttattaagcttactggtatttgtgcaggatgcctgggccgccgagcagagaggtggtttactgtttagccttccagccggacaaaacgcttttgcgccaatggaaatcagtgtcgtcctagaaggacgcgaaggcgacgaagtgggtttaggcagtctggcggcatttttattacagatgttggataagctacatatcccgctgtatccgagaacgcccgatattgctgcttttaatctggccttaagcccattaatcgccagcctgctttcgcagcaactatggcaattcaaagagggcggacgtggagaatcgggtttttatcatatacatcctgatttttgcgattcctgttacagtctgcctctggctccgctgtttagctacaaaagtacgcatcttcagcaagttattaagcagtgcgcccaaagtgcaaggggcgtgaatccagcaataattcaaggaagttcactatga

SEQ ID NO: 383893 - DNA, 801 bp, Salmonella enterica
  misc_feature (778)..(787): n is a, c, g, or t
atgagttttcaattagacgaacaattggttgcctcccttgccaagcagcaccgttgggctgcaaccggtgtgtcagattatccacctcgtgatccactggtaggacaaagtcgcttttttaaacgttttcagacatttttgcacacggttgatcacgacgacgaccgttttgcgcatgtttttgccgttgaagctgagtggggacggggtaaatcacggttgggccatgaattggtagcccagattaacgattgttctaaaggttggtttgtacgtgatgacaaaggtgaattagaaaatcagcaactttttacgcctgaagcgcaggataagtacctcgcgctttatattcgctattcacaggttgcctctgattaccaaaattccgataactggttcgcctttggtttgtatcaggctcttttgcctctggcgactgagcagttcgatggttccattcaaagcgaaatcgccaaacaggcttttgagcgcttaatgccgttggggtttacctcaggcttgttggcagaagcactgcaattaaatgcgaatcatagtgaagaagatctctacatcgatcaaacgttggttgtcagcctggtacaggccgcttatgacgtattaaaacgctttggtgtgcactacgtgttagtggtgttagatgaactggagaccgtagcggaagcggctacgtttggtctggaggacgaggatagtaagcgtcttgatggtcaagctattcgtttaattggaaaagcgattaaggaagaagatcccnnnnnnnnnngacccccgccgtaa

SEQ ID NO: 383894 - DNA, 2550 bp, Salmonella enterica
  misc_feature (2504)..(2513): n is a, c, g, or t
gtggctcgtcgttttgaactggttgagcttgaacataacgcttttgcagatgtttctgactatgtggcaagcctactaagtgatggtaagctggcatttcattaccctgctggtttggtggaagccgcttatgctatgagcggagctaacttcggctggtttaacgtagtgatggcgaatgtggatgctattttaagccagtatcagcaggctggccgaagtgtgaataatgtaggggaactgtttgaagctgtattagcaagctccgggcgggtcgctaagcatgtactcgataaaggcgccatagagggtatccaaactcgcgatcagactttgttagcagattgccgcagtttgctgtacggtcaattgccagtacgtcttgaacaagttgccagggcacaggggctactggctctgcgtaatgaagatcaggaaccgatagctgcttgttaccgcaaattaagcattgatcggttgcaatgtcgccaggctttagaacaagccaaattccgccgtgagaaagacgagtggtattatccttccgtggagcaagcgttaagtctggatactttgctggataatttgcgcaccttttccataaaagaacaaacctatagcagtgatgggcatgtggtgttaataccactttctaaaggcgaatttaagtacctgctaaccttattgtatgaccacccggctatcgaatttgtcgccgatgcgctatggcataagctggtaggggaaacggctgaactagacgtcagcgaagcgacccatattggcccgagcgtggcgatgctcctacgccttgatctccgttatcgtagcgctcaacaaaactcattaatttttaaagatcctggcatgggagatggccatgaaatcgccatggctgaattggctcaacaaagcagccataaaccgattataaaatctctcacgcgtttaacggggttgatccgtctgctggacaataactggcattatgatgaatccctctttaggaataaagctggcactgatggttaccccctggcactgcttactgaaccccggggacgtcagggggggcttttgacgttggatgggtttaaattacacccagacggtaaagctctgtttgcctgggtaagcaacaaaaccgagctggataatttgcacgtatttacagccgaatatgcccgacaaaatggtcgtacaccagtgttagccataaccgcttctgctcatttgatggagcaatatagtcgtttggatgatgaactggagctacgcgatgggattctgttgcactatgttaaccctagcgaggcggatcaactcgagcgtataggtttaagtctggcattgtgtcaacaacatggtgttattttgactgctgagagttttaccgcgaagtttaagcataaacttcatgcgctaacgacttttgctatggatgccattcataaatggcgacatcgtctgcataagcgtgggttaattgcctggccacttagagccagtggtaaactatcgaccgttgagcgagaactgttatttaaagggtggtatcagcttgcgattgcgaatccgaatctccatggcttacttgacctacagcaacagcatggtatcgcagtagatgaactcagtagtttgcttgataaattgaaagttccaggcagcttgatggcaaaaggttatacggctgatgagcaggcggagctgtttactgaactccagaatgtacagcatagccaggcgcagatccctttgttcttagcccgtcttgcgcatcctaataaagcacatgcatggtcatttgacgcgtttaagcgacagttttatttcggctatgttgctgacaccagtatcacagctaagggtgttttcaacgattggatgtggtggtgtggcgagcttaatttattaacgttggctgatcctactgataaacaggctttatggcaaaattaccctcgtgcccgccttgaaaatgccattgctgaagcggagaactggtttaatggttcaggcagtgaatgttataaagcaaaagtagatatcatgagccgtgtgtatggctatggacgaatcactgaggtctttgctcctccgggacaaaaccaactgggttatgctacggtcgaagcgcaagagcagctgcaacaagcccgaaagttgtttaaagcgcttaagcaagaagaagagaaactggaaaatatctccgatgttggcgaaacgaggatattagctggtttaatctcaaaccgcgctcatatcttgacactagtggagagagttaaacctttacgttgtccgccaccgagcttgaaagacgcttatatactggatttagaggataaaaatacatcattattccaacgaattgagcaggcttgcttatttgctgagttagtagaacgcagcgcccaacgtattaacgcacgattgggagatttgattggcgatattgaaaccgacagtgcgaaaatcccgtattttccaaaatcactttnnnnnnnnnnataccaacacgcttcgaaccataggacatattcttga

SEQ ID NO: 383895 - DNA, 819 bp, Salmonella enterica
ttgcattatctgcgtaagctggatctgggaaaagcgcgagaaaagctcgctgcattagcatttgaagttggtttaaacctggatggtgttcagcaacttccgatgtcggaaattcaggggcacattctgacaagctatcgtagctgcaaggagcgtttcgaaaaactgctcgcaaatttaaacgctcagaagcagcgagctgagactttacagcaactcctcagtagcgcaggggcggattatgcctggcctgatgatgtggccgaattgcctaaggtagttaataaactgcaattaattgaagatgcagtcgaagatttgccaacagatgctgaaaataaacgtcagagcatacagattagtctgcgtaatggacaattctcagcactgcgagatttaccggaagaactattaaaaagtgcccgcggtcaaatcgctcccattcaagggcagttactcaaaatggaagagcgcctcaacgaggtaaaacgtgatgcgatcaatcaggttaatgcctggctaccagtgttaaagcctttattcctttcacaacagcaggatgagcctgtggcattacggtttatagatgtggaaacattgagagtaagtgatgtgcgactgttgtgtgagaaaaccatacaaaactggtgcggcaaaggcgaacaattacttgatggtacggacgtatcattagcaatctggcaggatacttacctggctcttagccaaaatcgggaacctaatatcacccatgcacagcaacaagcgttggttacgaagggaatcctgaagatgcgtttgacttttgcgatgagttag

SEQ ID NO: 383896 - DNA, 390 bp, Salmonella enterica
  misc_feature (366)..(375): n is a, c, g, or t
atgggcatctacatatcagcgtcgatgagtgcaaaccgcaagggacgatttttgcaaaatgtggttgaagctgagcctctcaaggaggattggcgtcaaattccccccgctaaaggtttattattggttcagggagaggaactaagtcagttcgaagactggaagcgtttatatagctggtccatacaaagcggatgcgctgcacttgtgattgctccgcttgcctgtaatgctgatagctggagtaaacagccactttcacttgattggcagttagtagctgtagagaaaatagtagctacagaaggacttgcagcgttagtttccgacgaaatatctctatgtctttcagggatggaaggaggnnnnnnnnnntccaacaccaggtga

SEQ ID NO: 383897 - DNA, 453 bp, Salmonella enterica
gtgaatggtgttgttcatacccgcttcatgcgcaaacacagcaacagcggtttgttagctgtcactactttgcctgtttggtcgctgaacctgttggatcacggcgatgtgctattaatgtggctgaattggttcattgcccatgcgggtgaagtcaaaacagaggcgagggatatcgtagcgtttgagcctgataaacaagacttgctagtgttactgcttgtctttgctgttcgaggtaagccgatacaagcaataatcgacaatcctgttgttaggatgctgtttgataccgcaatgctggatatgaatctccgctggccgatgttgcaacagaaagggtttattggcgatcatggtcttactgagaaaggccttgatgtgttaatgaactcaaattattggatttattccgggatattaacggagcagctaaacacaggagcgctttaa

SEQ ID NO: 383898 - DNA, 1182 bp, Salmonella enterica
  misc_feature (746)..(755): n is a, c, g, or t
atgagaaatatgaatctggcgcaatcattagcaattgatagccaactgcgcttacctggcagcgccggaagattattgaaacaaatccgtgatattgaacatgttgcaccattgttccgtgatgctggattgattaaagcggttcctaaaccatcaattgtcaatcttcgagtttcgggtatagcgaccaggtcctgtcttgacaaggctctgggcggttttatttatgccagtgcagcagttcgtactgacttgttgattgacgataacaaagtaagtactgctggaatcgattcggtttcagaattagatgacattgattttgaagcgcaacgccgacgtctggatttgattgagattcgccaggcttatcaattaatcgagaaacagctgcaaagtagtgaatcgtgcgatttgattttgcttgatacccccctgtttctggctcgtgatatggctcctcttgagcgcaatgttcgccataagcaggagtatgataaaacaaaacaggttatcgaacggttctggaaaaactatcgctccaggttatttccgtggaatcaaagtggtgtcgttctggccagcattttagcagaacgttttagcgctatcgttagcatcgccaaacaggatttacgtaccgaagatggccgtaagcaaattctcgccagtgatgggttctccagcgagttaatgacgagtctggacggtttaagtgaaagtttggctggagttggggatttgcnnnnnnnnnntttggctgcagttggggatttgcgctttattaatggaattttaggcaattattcacgaacaatcgcatttcgtttatccgagcgggaaaaccgcatagaaccgcttgctgaagcaggacaggggttaatcggttttcattttcgcagcgcccggagtgggcagattaaaatggtccagttggcaggggatgagccggattggaagagcgcagatcttgatttagtagcgtcacgccttatggtgcttgatatgcaaaacaggggcaatgtaatgcctctcccccaactgctcggttaccagcaattgtgtatattgcccaagtttgccgaattttatcgtcagggattgcatagcgctctaaagaataacgatattgaaacaggctggttggctggcctggatgaggggttaaataatggcttataa

SEQ ID NO: 383899 - DNA, 1686 bp, Salmonella enterica
atggcttataaagttttaggaaaactggttggtaacaccggtgatgccagccaattaacgatggttgttcaggattcattttccgttcgtcatggtgagtttgtacgaattatgcatcaggaacgtaaggatgaatgcctggttgcagtgttagggcgggtaataaaaataagccgcactaacatgctctataacgctgggtttggcgatggcgtgacggaacttgaattattacctggcgcgaatgtgaccggtgagaatatgttcgctcaagttgaattggttggatatcgcgatccaacttcacgtcagataaaaattcctcgcagacctttaaatcctggaacagcggttgaaactgtcgattttcaatttttgagtgatttttacgagtttaacgaacatacaagcctgcatcttggtaatctggttggatatgataaaggggataatacggttccagtatttatcgacgtcaataaattagtgactgaacacttggctgtgcttgcaatgacaggctcgggtaaatcttataccgttggacgtattattgagcgtttggtagcgataaataatggtactgttgtggtatttgatcctcatggtgaatacggtaaggcgcttgctggtggcaacttacagtttgcgaattctctgggggctgttgaagataagcgcgatcaagaggcgctgcagcagataaaactaacgtttgagaaactacaggcagctggcgcaggtattcacgtctattcacctcaacacgaatcgttccagcataaatatgcgagcaaaaataccccccttgcacttcagttcgatcattttgaaatggatgatattgctgaaattttgccgggtttaacagaaccacagcagcgagtgttagatgtggcgattcgttactggcgagtagtggataaggccgagcctagggatatcaaccggttacgatatttccttggtgatggaattgaagaactgaaagattgggacgatctttctgaggcagaagcgaaggcactctctggaagaagtgctgcagttgcttctatgaaattgtctcgggtgcttaatgaagctcaaagtttttatagtgcaaccatgtctgagccaactgacatttataaaatggttggacgtcccagtaatcagcaaggccgtctggtcgtagttgatttacaggggctaagtgatacggcaaagcaagtggtctgtgcactgttgtcgagtgaaatattgagagcggcatccagtaagaccgatccgttacgaccatgctttatcgtctatgaagaagggcatagttttgcccctgcgggcggtaatgcggtgagccatcgtattattaagaaaattgctggtgaaggccgtaagtttggcgtggggttcggtattgtcagtcagcgcccatccaagctcgattcggacgtgacttctcaatgtaatacactgattaccatgcgcctaaaaaatcctgatgatcaacgttttatagctaaagcatctgatatggttagtaaagccgatcttgatgaactaccaggtttatccacgggggaagcgctagtttgcggtcgttcaattcctgcacccctattagttaaagtaggtggtaaggcacttatacatggtggtgaatcgccagaagttttacgtgtctggggctcatttaatggctga

SEQ ID NO: 383900 - DNA, 603 bp, Salmonella enterica
atggtggtgaatcgccagaagttttacgtgtctggggctcatttaatggctgaactggcaaggcctgaactgaggtggatagcgaaaaatttcccattgttgacaagtaatctgctcgtcgatcaggatactttagtgcatagcttgggatgcagcgtgtggaatacttttggtcatgagcaaggctatatggcggtagtagagtgcccagcgccaggaacatttggcgcagatattcgttcagattcaggttggtttgagccaaatgcgacaaggccactgtgtttgattgaatttgagcgtttcgatggctcccgtcggggacaactcaagcttgaagaaaaactgcagaatttacttgaagccgctcaacgttggcagtattccccccaacaggttgttctgagcgtgtggagtcagggtgtcgtaagtacgcctgctacccaagaacttagagacatctgtcgttctggttttatttcatcgaccggcgttcatgtctcagcaagtccagaaatgactgttattttaagccgttttgtattcattaagaactcagcaacgattattctggatagaatttatgatgaggtgttggtatga

SEQ ID NO: 383901 - DNA, 1470 bp, Salmonella enterica
atgaatattaaatcagcacattttttgccggggacaaataagcgccttggtgataaatatttattgcttgagtgccttggtgatggtagtcatggctgggtatggcgtgcagagcgtttggttgatggacaaattgtcgcggtaaaaataccgaaagatataacccgggaagacaggcaactggccgaagggaaagagcttataaatgttgaagctcatcctaatattgtacaaatttttgatatgggccgaatcgataatgaatggttctatattgaaatggagtatttccctggccaaactctggctcaaaaattggatgatcgacaaagaaattttggtcaaacctatgagcgcttgttcaaaatttatcgacaggtattatcagcggttcaatatttagcagaactacccgtacctatctcgcatggtgatattaaaccacataatattttggttggtgagcgtgacttggtgaagcttactgattttggtagttcagctttacctgaagaaatttacgtccgtacgagagagaatggtggaaccgttctgtattcagctcctgagttttctaatgtagacagtcggaaaggtagtctggaagagttgctgttgggcgatatttacagtttaggggtattgttataccaattattaactggaaaattacctcacgatacgcctgcccaagttcagcgtcatgcgccgttcaaacatcctacggagatcaatagatccattcacagtgagttggaacatgtcatattaacttgtttgaataaattgcctgagcatcgttatcaatccgtatctcttttgatagaggcttttgaaaatgcggcaaaatgccagcttaagtcaggtgcggctgcccctgtttatcaaagcaaacccgatcaggattggtccagcgctgtactggatgctatgtctgagcagtcatatcagaaagcagctcagcttgcgggacaagagtttagccggagtaaagaccttcaagctttacatcagcaacttatcgccttatatcgagctaatcggttatttgagtttgaaagaatagtcgataataatgcagaaattttacttgacggaatatatcaacactctgcggatttatttgaattgatcgttaaagcaaacttacaattacgtaatattaatcaggctaggtactggttacaacaacggaagaacattaaagatgaaagtataatgaccatgtatcttgaatcatctatttttggtcttgaagctaaatatccagaagcgagagctttactggaaaaagttaatcaagagacgcctatgaaattcaatgtgctaagccaactggtgctggtttgtgaacagatgagagactattcaggtgctgctgcatatttaaaagcggctttgcgtgttgttcctcaagacactgctctgcgaaataagaaagagttgtatgtgaggttgggggtaatttga

SEQ ID NO: 383902 - DNA, 255 bp, Salmonella enterica
atgactcaaagaacttatgttcgtgttgctgactatattcgtcagctggcaagagacaacaatgttacggctaaccgtgatggcatgagtcgcatggcagtgaccattactgcgcttgctggtgactctgttgagctggataatatcgagcaattactggtaaatcttaaaaagaaaggtgttctgagtaaatctgaaattctgcagcttcagggcctctacctccgcgagcaaagtcatatccaaaggaagtaa

SEQ ID NO: 383903 - DNA, 1764 bp, Salmonella enterica
atggcggtggaaaaactgattgttgaccatatcgacacctggaccacggcgctgcaaacccgctccacggccgggcgcggcagttcgggtaagattgacctgtacgggattaagaagctgcgcgagctgattctggagctggcggtgcgcggcaagctggtgccgcaggatccgaacgacgaaccggcgtctgaactgctgaaacgcattgcggcggaaaaggccgagctggtgaagcaggggaaaattaaaaagcccaagccgctgccggagattagcgaggaggagaaaccgtttgagctaccggtggggtgggagtgggcgcggctgggcgttttatgtaagaaattgactgatgggtctcacaatcctcccaaagacgcaggcaatggttatcctatgctcagcagtcaaaatattcaggatggttatatagatatagagaacccatctcgatatgtaagtgaagatgattttgaaaaagaaaacaccaggacactcgtccaaaaaaatgatgttttattaacaattgtggggtcaatcggaagatccgcagttgttttagaagataaatcctttgtattgcaacgcagtgttgcggttatagacacatctttatattcacattttttatctaatttcttcaaggctattaccgcacaaaactattttatagaaaatggaaaaggaaccgcacaaaaaggaatttatttaggccaactgtctttgatgttaatacctgtaccttcattaggtgaacagaagcgtattagtgacagattgaatgaattaatgatcctctgcgaccaactggaacagcactccctgatcggtcaggacgcccatcaacagctggttgaaactctgctagccacgctaaccgacagccagaactccaatgaactggccgaaaactgggcgcgtatcagcgagcatttcgacacgctgtttaccaccgaagccagcattgacgccttaaaacagaccattctgcaactggcggtgatgggcaaactggtgccgcaggatccgaacgacgaaccggcctctgaactacttaaacgtattgcgcaggaaaaagcgcagctggtgaaagacgggaaaatgaaaaaacaaaaatcgttgccaccgattagtgatgaggaaaaaccgtttgaactgccggatggttgggaatggtgtaaatttggtttaatttctgagtttattaacggagatcggggaagtaactatcctaataaaaatgaatacgttgttcacggaatcccctggataaatacaggtcacatagagaaaaatggaactctatcaataacagatatgaatttcattactgagaaaaaatttaatgagttaagaagtggtaaaattcaaagcggagatttagtttattgtttacgcggtgctacattcggtaaaacagcattcgtaaaaccatatgaatctggtgctatcgcatcttctctaatgatcattagaccgtttattagagaaatgggagaatatatatataattatttaatcagtccatttggacgctcgcaaatttttcgttttgataatggttcagcgcagcctaatctatctgctaatagtgtgatgctttatgcttttgcatgtccaccattacaagaacaatttagaattcataaaaaaataactgagctatttcatatatgcgataatttgaaattacaaactcaatccgcccaacaaacccagctccacttggccgacgccctcaccgacgcagccatcaattaa

SEQ ID NO: 383904 - DNA, 141 bp, Salmonella enterica
atgattatccgctgtatgctgtttatactgaatagcgaattcagtgtatctgacgagttatttgaaaataccatgataataataaaagacgataaagatatcagaacggtatattgtgctacaggatgtgtaccacattag

SEQ ID NO: 383905 - DNA, 2352 bp, Salmonella enterica
atgaaaaagttttattccttaaccccgctggcctgcgcattactgtttaatcttccagcgcacgcggttacggcaactgattttaaaaatatcatcgatcgccacggttcgcctgattatatgcgtgacgccgaccatgatagccaccaacggtttaatccctttttcgatcttggtgcctggcatggacatctgttaccggatggcccggcgacgatgggcggtttccccggcgttgcgctactgactgaggaatatattaattttatggcgaccaattttgatcgccttacggtctaccagaacggtaaaaaaatcgccttcgcgatgcaggcatacagtcttcccggcgcgctggtacaaaaactgaccgctcccggcgttgaagtcaatatgacgctacgctttgcagattcacatacctcgcttctggaaactaaaatcatcactgatactccgctggatctcgtctgggagggggagctgctggaaaaaacggaggcaaaaaacggtcagccgatatctgataaaaccattgacgccgaatacccggattatcagcgaaaaatcatcgccacgcgcgatggcctgaaagtcacctttggtaaagtacgttctacctgggatctgctgacttccggcgagtcggaatatcaggtgcacaagtcgatccccatgacgacagagatccgcggtcatcgttttatcagcaaagcgcgtatcacgggctcgacaacgctctataccacttactctcacttacttaccgctttggacgtcagtaaagaacaagcgcaaatccgcgatatcctggcgcgcccctcctcttatatgcatgcgtcacaacagcgttgggacaactacctgaaaaaaggcttaaataatcctgacgctacgccagaacaaacccgggtagcggtgaaagcgattgagacgttaacaggaaactggcgagcgccaggtggggcggtgaaacataataccgttacgccttcggtgaccgcgcgctggttctccggcaatcagacctacgcctgggacagttggaaaatcgcctttgcgatggtgcatttcaatccggaaattgcaaaagacagcattcgcgctctgtttgactggcagattcagccaaacgatcccatacgtccgcaggatgccggtatgattcccgatttggttacctggaacactatcccggaacgcggcggcgacggcggtaactggaacgagcgtaataccaagcctagtctggcggcatggtcagtgatggaggtctataacgtcaccaaagacaacgcctggctacaggaaatgtatcccaagctggtggcctatcatgactggtggttgcgtaaccgcgaccataacggcaatggcgtaccagaatatggtgcaacccgggataaagcccataataccgccagcggcgagatgctgttcacggtgaaaaaaggcgacaaagaaaagacgctctccggcctgaaggcatacgaagacattgcgaccagcggccagtatgacagcctgacaatcccggcacaggaagctgccggatgggagtccgggcgcgacgacgcggcggtattcggtttcatcgataaagaccagttggataaatatgtcgccaatggcggaaaacgtagcgactggacggttaaattcgccgaaaaccgggatagcagtggcaaactggttggctactcgctgttacaggagtctgtggatcaggccagctatatgtatagcgacaaccattatctggcaaaaatagcggctatcctcggtaaaccggaagaggcaaaacattaccagacgctggcgaaacagctcgcagactacatcaacacctgtatgtttgatcgccaaagtggcttctactacgacattcgtattgaagacaaaccgctggctaacggttgcgcaggccaccctattattgaacgcggcaaggggccggaaggctggtcgccactatttaatggcgcggcgacgcaggcccacgctgatgcggtagttaaggtgatgttggatcccaaagagtttaacacttttgtaccactaggcaccgcagcgctctctaatccggcattcggcgcggatatctactggcgcgggcgcgtctgggtggaccagttctggtttggcttaaaaggcatggaacgctacggttatcgtgatgacgcgctgaaactggcggataccttctttaaacatgcgaaaggattgaccgccgacgggccgattcaggaaaactataatccgctgactggcgcccagcagggcgcgcctaacttctcctggagcgcggcgcacctgtacatgttgtataacgactttttccgcaagcagtag

SEQ ID NO: 383906 - DNA, 1071 bp, Salmonella enterica
atgatgaaattgaacattaatgcccataaggcactgatggcgttatccttttgccttgtattccctttggctgcccaagagacgcccccagcggagcacgacgatacacgtactccagatatcaccacggaagcgccttcatttcgtttttatggcgaaatgggtgtggggggatatatggacctggaaggcgactacaaacataaatacagtgacggcacctatattgaagggggcgttgaaggaaaatatggtcactggtttgggttaatttatggcgaaggctggaccgtacaggccgaccatcaaggcaatgcctgggttcctgaccatagttggggcggctttgaggggggtatcaaccgtttctacggtggttatcgtaccgataatggcaccgaaattatcttcggcctgcataacgactcatcgctggatgatctgcaatattgggccgactttacaccagaattcgggtatgaaatacctaacacccgcgatgtcgccattccgctaaaaatccagaatctcagcggtaatttccgttatagcgtcacggcagtacctgcaggtcattccgatgaaagtaaagcatggctgcatttcggtaaatacgatcgctactctgataaatatatctatccagccatgatgaacggttatatccagtacgatttaatgcaggatgtcacctggatgaacggtatagaaattacggacggcaccggacaactgttcctgaccggaattctgacgccgaatttcggcgctcgcgcctggcatcatactggtcgcggaaatgggctgggtaatcccggtagcgaaaccggcgcgatggtgagcgcgatgtacgaagcgtttaaaggcgtttacctctccacggcctacaactatgcaaagcatcatctggataatgccgatgatgaaaccacttcatatctgcaatttggtatctggtacgaatatggcggcggtaagctcgccaccgctttcgatagcaaatttaacctacagaacagtagcggcgacccgactgacaccctcttcctgatgcaatatttctactggtaa

SEQ ID NO: 383907 - DNA, 1500 bp, Salmonella enterica
atgtctgaaaaatccgattcaagatatcagatgtctttaataacatttttatttttctccatcgcgggtggcggttttgtacttaaaggtgtagtaagccaatatactgactgggggtataactcctggttactgtatgcttttgcatctttattttatgctattccttacacgtttatgatcattgaattttcttcaattaaaaagttgcgagaatcagagagtggttatcaaacgtggctaaatctccttcttggcaaaaagatgggatttattgcaggttttttctatttttacgtcaatattttttacttcgttgacttacttcctaacataattacatattttatctacacctgtactagcgatgttgcttacgttactcaattaaccaatcaaacctggtttaaacccattatcagtattacctccattattttattctggctcgcgacctgggtctcgatgaaagggccgaaatggttatcaagagcgctgtctttttccggttatgcgggattcgcgctgacaatgttatttattatcgccgccacctggaaactgtcatccggaaacgtaacattcaatggtcaacctatcgcgccagaatatttacaacatattgatttatcatggtccaaaatcgcctccatgtcctgggcattgcagtcattaggcggtctggaagcactggcggcgtataaacgaaacattcgtggcggcgataaaaatttcaggcttggcttaattcttaacgtttttattttctcaaccattattgtcgtttcatctctgttgatgaatatggtgttgcctgctgagcaagcgtctaatctcggcttgttatccgctatctacgttgcgttccagcagttaggattccctggttggtggacaaatgtgatcgcgcttttcctgatgattacaacattgtgtggttctttaatgttgtggactgcggcgccggtaaaaatgctctttgttgacgcgcctaaaggcatttttggtcataaattgtctgaggtaaatagcgagggaacccccgttaatgcgctcaaaatgcaaggtgtcgtcgttactattattattattttatttatgctgggtcagtttaactcagaaatgaataccattcttatcgcagtgaaaaatcttgatggtggcgcagcgacaatccctgtgctctttatggtggcaggttatattaaactacggatggatgcgcatcgccccgactatgcgcgtgatttttatttcctgggtaagggtcgcttctgggcacttttatccgtggcaccaatagtcattatttttacagcttcaacgattgccgcgctcattcctggccctgaggactggagcgcgaactttgtgggttcattaattcaggtcattcttggaccagtcagtattattgctgtcttctattattgcagcgtaatgttcaatcggtggagaataaaaaatccgcatgataattcgctttttaataagatttaa

SEQ ID NO: 383908 - DNA, 3141 bp, Salmonella enterica
atgagcgcggttgtttctgatcaacaaaaaatgaaagcgttatatgaagagcatgatcatattcctgccgttatggaagatcatcgtattaatgggataaataaggaaccgcctcgtccacctgctttcccttttacatcgacgtatcttgctatcatcaatgatataaaaaaagccagcaactacctttcattaaatggattatggcgctttaacaattcgataaaccctgcttcccgccccaaaaatttttaccaggagcactatgatgtctcagactgggagactatccaggtgccgggaaactgggaagcgcaaggttttgataaagccatttatattgatgaacgcttccctttcacgacccactggcctgaagtccctcgtgattataaccctgtcggttcatatcgccgaaattttcatttagatgatagctggtccggaaaagaaattttcctgcaactggccggagcaagaacggccacatttatctggataaatggactgcgtgtaggttatacgcagaacgcaaaatgcccggctgaatttaacattacgccatacatcaaacaaggcgataatattatcgcgctggaaatctacagatggtctaacgccagctatgttgagaaacaggacatgctggatatgtctggtctggaacgcgaggtttttatttatgcgacagcgaaaacacgtatttatgattttcattgccaaccagaagttaacgcatcttttacacaagggacaataaacgtcagcgttgatttacatcactatgatgaccgtacagaagagctggcgttgagtttacaaattctgaatgacgcatacaacttaactcccgtgatggaggatagaatcaacttccataaaaccggagcatcacaacaatttacatttacaggaattatcgatactccgcgtttgtggagcgcagagacgccaaacctttatactctgctacttacgctaacaaacaaagcaggcgatatcctggaggcgactagtcataaaataggcttccggcagatcaatatcgtcaacggacagctaacggttaatggtaaagcgataaaaattaaaggtgtcaatcgtcatgagctccatcctacgttaggccacgtggcaaccgaagaaaatatgctgaccgatatccgtttgatgaaagagcataacattaacgcggtacgtacaagccatttcccctgtcatccacgctggtatcagctatgtgatgaatatgggctgtatgtggtggatgaggccaatatcgagtcacacccgctggcgctaaaacctgaaactcaaatcggtgatacagaatcctggcttccggcacacctggatcgtgtccaggcaatggtagagcgtgataaaaaccatccgtgcgtcattatttggtcaatgggtaatgaagcgggtacgggattaatctttgaaacgctataccagtggataaaaaatagagatcccagccgcccggtacaatatgaacccgcgggtgaaaaaccttatagtgatattgtttgcccgatgtatccaacgcttgaacgtctggaacactttgcgcagcaaaaccacgatcgtccgatgattatgattgagtatgcgcacgcaatggggaattccgtcggtattctcaatgattactggcatatcatcgatcgctatcctacgctgcaaggtggctttatttgggagtggatggatcacgctcttgagcttaccaatgaacgcggccagaaatattggggttatggcaaagattatcaccctgataaacccagtgacggtaactttatgaatgatggtttagtcgctgccgatcgtaagccacatccacatatgaccgaggtaaaaaaggtttatcagcctgtccgttttcatgccgttgatcacgtagccggacggtttgctattgaaaaccgctatgattttatcagtctggaaaatctggacattcaataccatattaccgccgatggtaaagagatcgcgcacggtagtctgggcactttccccgtgcttccgggtaagcggcaagatattcaattaccgccaggtaagtttgccttcgaagaaggaaaagaatatatcctcactttaagcgctgtcacactgcatgacgaaccgatcattggtgaaaattatgaactggcctgggaacaattttcgcttacctccagaacacaatatcaacccgtctgtcaggaccatcatgcggccctgaaaatagcgacctcggcggaggcgataaatatcaccggggaggactttgtgctgacatttagccagaccaccgggatgatgacgcacttttacgttgctggcaaaaatctgatccaatccggtcttgaaccgaatttctggcgcggattgacggataacgatctgggcgcgaaagcctacgaatgggccgcagtctggaaaaatgctggccaggcacgcgtattatcagcctttaaaattgagcagccatcacaacatgtggtcactatcaccacaagctttactcttccgacggttgcctgtcactatctactgaaatacaccatttatgcgaacggcgatattctcgttgaaagcgattttattcctgaacatcccagccaggggattatcccacgcatgggaatgcggttaattatgcccgctgagttcagctacattcaatggtttggacgtggccccggtgaaacgtattgtgacagaaaaggcgccagggtcggcatttatggcggtaccacatgggaacaattccatgcctacccgcgcccgcaggaaagcgggaataaaaccgatgttcgctgggttcgtctcttaaaccagcaaggatttggcctggaagcgctggcggaagagcaattattaaataccagcgcctggccgtttgccgcggatgaactcgatttcatcgctgacactgccagcgatagcgcgtccgggttaaccccactttcacgtaaacatggcgtggatgtgcaaccgggcgatattactacgtggaatatcgacctcgcgcaaatgggaaccggcggacaaaattcatgggggtctttaccaccagaaaaatatcagcttcctattcaacattatcattacgcttattatctacgcccagtacgtccttaa

SEQ ID NO: 383909 - DNA, 447 bp, Salmonella enterica
atgaaggtttttgataatctggcgtattttaagtcgttttgtcagtgccgaaccccgtggcggcattgtctggaagcgatagcgaacattgatactctgaaacccggcgttcctcgttcgattgacaacgtgctgacttatcgcctggaaaaaaatgaggcgaccgatgcactttttattagtcgacgcaaatatattgatatttattatattttacagggacagcagagaattgagtatgcgactaaatcagtgctccagagcatctcatcttaccgtgatgagaccgaccgcgaatatctgaaaggatacggctccgttatccaaatacatgcaggacagttatttatttgtgataaccgggaagcttaccgctttatctgccgtacccccgttaagaagattgtatttagtgtcgttgccacaggttgcgtcataccagattag

SEQ ID NO: 383910 - DNA, 984 bp, Salmonella enterica
atggcaacacttaaagatatcgcgatcgaagctggcgtctctctggcgacggtgtcacgggttttaaatgatgaccctacactgaacgttaaagaagaaacgaaacatcgcattctggagattgcggaaaaactggaatacaagaccagtagcgcccgtaagcatcagagcagcacggtaaacctccagcatattcttgctgtttatagctaccaacaggatctggaaattaacgatccttactatttggctattcgacacggcattgaaactcagtgtgaaaaacttggcattgaactgacaaactgttatctcaacagcacgcttcctgagatcaaaaaagccacaggaatactgattgtcggcaagccgtccaacgcgcgacgcgaagtcgccttatcccttgcagataacgtctgctttatcgacttccatgagcccggtagtaaatttgattctgtagacattgatttaacaaggatctcaaaagaaattatcgactatttcatcgataatggcgcaacgcgtattggctacattggcggcgaagatgagccaggcaaggctgatattcgtgaattagtattcatggagtatggccggttaaaaggcgtcgtttcagaaaaggatatctggcgcggtagattttccagcgcttccgggtatcaactggcaaaaacgatgctggcgcgtggcgaccatccgaacgcgcttttcgtggcatcggattctatcgcgatcggcgttttacgagctatccatgaacagggactcgccattcctcatgacataacgcttatcagtgttaacgatatccccaccgcacgttttaccattcctccattgtctaccgtgcgcattcactcagagctaatgggaagccagggcgtcaatttgctcgttgaaaaagcccgtgacgggcgcgagcttccgctacaggtctttgtccccagccaattacaattacgcggaaccacgcgctaa

SEQ ID NO: 383911 - DNA, 333 bp, Salmonella enterica
atggaaaccgtcgcttttgctgactttgccagactggacatgcgcgttggaaagattgtacgcgttagacgccatgagaatgcagataaactctatatcgtacaggtggatattggcgaacggatagtgcaaaccgtgaccagtctggtgccctattatcgtgaagatgagctggcaggtaaaaccgtcgtggtactatgtaacctgcagaaagctaaaatgcgtggagtaatctccgaatgcatgctgctatgcgctgaaaccgatgatggtaatgaaagcgtattattaacagcggaacgagcgatgccgccgggggtgcggatcgtgtga

SEQ ID NO: 383912 - DNA, 564 bp, Salmonella enterica
atgcagcaaggatactattctctccccgcccttctttccgctctcgatgccgggaaaaaagtgaaatacctgtggttctggggtcatcaacctgccgcgaataacgaaattaccgcctcttgctttagtcagtggtggcagggttcaccttttacctatgatggtataacctacgccaccgcagaacactggatgatggcaggaaaagcgcggctgtttaacgacagtaaaacacttgccagaattctggcagcggcaaccccggctgaagcaaaaaagctggggcgacaggtgacaaactttgatgaacaacgctggcaagactgctgctttgagctggtcagtgaggggaattatcacaaatttagccaacattcggcattaaaaacattcttgctaaatacgcagcctcgcattctggttgaagccagtccggtggataaaatctggggaattggccttgcaaaagatcatccccatgccggtgtgccatctcactggaaggggaaaaatctgctgggatttgcgcttatggtagtcagagaccgtttggcggaagaataa

SEQ ID NO: 383913 - DNA, 294 bp, Salmonella enterica
atggctgaacacgatattacgccagaagtcaccatttccaaaacacagcgccactgtaccgtgggttatctgcccaaccgcagcgacacgccggtgatcaaaatcagcgccaaatggctgagagaagcgggatttgagatcggcacgggcgttaccgtgaagatctcggaaggatgcctgatcctgcttgcggatgacaacgaagtgcaggaactgcgcagggaactttatcaggttaaacaggctgttaaggggatgcgtgacgggatgtttagtgtgctgaacgaacattaa

SEQ ID NO: 383914 - DNA, 594 bp, Salmonella enterica
atgaagaaatatattatgtccgcggctacattactattttgcagccaggcgcttgccgcaccgcatctgtttattggggataatgtcagtgtactggcggcccgctcagcaaaagtcagcatttttagcaaagatgtcatgctaactgacggcacgcaaaaaatggtggttaaattcgatagcccggtcaacccggaatcggtaaataataaccggggcagggtcacgtctaatccgtatatcctctctttcaacgcctccggcaatactgatattcagttatcaacaggcaaaccactggatgaaaaagaagcaagcctgatggcgcaaaaaccggtattcacgctgaccgcaggcggaaaacctgtaccctttgatatcaaaattcttgatcgtgacagcatcactgtctttaccgatcttagcgccatcgtcaacgacgatgggactatgattccgtccccggcgcgcgctaccgctcctgaggcgacctccatctcttcacacgatcaactctctcagttgcagcaactgtatctgaaagctgacgattcccagaaaaaagcattcctgaaatgggcactaaacctgtaa

SEQ ID NO: 383915 - DNA, 897 bp, Salmonella enterica
atgcaacttgaaaaaatgattaccgaaagcgttaaccccgcgtctctggagattgatcgggtctccacgctcgcattatgccgcatcatcaatagcgaagataaaaccgttccgctcgccgtagagcaggttcttcccgaaattgctgcggccattgacactatttatgcccaggtcagcgcgggcggacggctgatttatactggcgccggaacatctggtcgcctgggtatccttgatgccagcgaatgtcctcccacctatggtgtagagccgggactggtcatcggcttgatcgccggtggcgatcaagcgcttcagcatgccattgaaggcgcagaagacgatggcgaacttgggatcaacgatctgaaaaaaatcgccttaaatggaaaagacgtcgtggtcggtatcgcggccagcggccgtacgccgtatgtcgttgccggtctagactatgcccgcacgcttggttgccggacgataggcatctcctgcaatcctggaagcgcggtatcagaagcggctgaaattgccatcaccccggtagtgggtgccgaagtggtaagcggttcctcgcgcatgaaggcaggcacggcccaaaaactggttctcaacatgctctccactggcctgatgatcaaatccggcaaagtatttggcaacctcatggtggacgtcgtctccactaaccacaagctcaatatgcgtcaggtcaatattgtgaaaggtgcaacaggttgcagcgcgcagcaggcagaagccgcgctgatcgcctgtggtcgccaatgtaaaaccgcgattgtcatgctactgaaaaatctcaacgcaacggaagccaatctgcgtcttgagcaacatggcggtttcattcgccaggtactggaaaaggaataa

SEQ ID NO: 383916 - DNA, 1305 bp, Salmonella enterica
atgaagataagattatgctttgcttctctattggctctaagcttaaccgccaacgctgcgccatttccggtattaaccgaaacgtctccggaaaatgcaggatttaatattaaacaacttaaccagttagatagctggatagcgcaacaggtggatgccggataccccagcgttaacctgctaattgttaaagacaatcatattgtttaccggaaggcctggggctacgcgaagaaatatgatggccacaccctgatgacccagccagtcaaggccacgacagataccttgtacgatctggcatcaaacaccaaaatgtacgcgacaaattttgcgctacaaaaactgatgtcagagggtaaattacgcccggacgatcttgtctcaaaatacattcctggttttggcgatcgccctgaagatatcattaaagggaaaagtaccctgagaatttcggatcttttacatcacgtcggtggcttcccggccgatccgcaatacccaaacaaagatgttgcaggcgaactatattcccaggataaaaccaccacgcttgagatgatcaaacgcacgccgttggaatatcctccaggcgctaaacatatctacagcgatgtggattatatgttgcttggctttattgtagagtccatcaccggtcagccgctcgatcgttatgttgaagaaacaatatatcgcccactcggattaacacataccgtctttaacccgcttcagaaagggttcaatcagcagcagatcgccgcaacggaactgaacggtaatacccgggatggcgtgatccatttcccgaatattcgcaccacaacattatggggtcaggtgcatgatgaaaaagcgttctactcgatgggcggcgtttccggtcatgcggggctgttttcaaacactggcgatattgcggtgttgatgcaaaccatgctgaatggcggaggttacggcaacgtcacgttgtttgatcctcagacggtaaaaatgttcacccaaagttcagtggaagatgccacatttggtcttggctggagagttaatggtaattcctccatgacgccaacatttggtacgctggccagttcgcaggcttatggacacaccggatggaccgggacgctgaccgttatcgatccggttaaccgaatggcgattgtcatgctgagcaataaaccacactcacctgtcgccgatccacaaaagaacccaaacatgtttaacagtggcttgctgccgattgctacctacggctgggtggtcgatcaggtgtatgcagcactcaaacacgagtaa

SEQ ID NO: 383917 - DNA, 426 bp, Salmonella enterica
atggaaatacgcgtttttcgccaggaagatttcgaagaggtgatcaccctttgggagcgttgcgacctgctgcgtccatggaacgatcctgaaatggatattgaacgcaaggtgacgcacgatgtcagtttgttcctcgttgcggaagttaacggcgaagttgtcggtacggtaatgggcggttatgacgggcatcgcggctcggcgtattacctgggcgttcacccggagttccgcgggcgcggcattgcgaatgcgctgcttaaccggctggaaaaaaaactcatcgcccgtggttgcccgaaaatccaaattatggtgcgtgatgataacgacgttgtgctgggcatgtatgaacgtctggggtatgagcattctgacgccctaagtctgggcaagcgcttgatcgaagatgaagagtactga

SEQ ID NO: 383918 - DNA, 1128 bp, Salmonella enterica
atgtcgtgcccggttattgagctgacacagcaacttattcgtcgcccctccctgagtccggatgacgcaggctgtcagacattaatgattgaacgcctgcgtaagattggttttaccattgagcatatggattttggcgacacgcaaaatttttgggcatggcgtgggcgtggcgaaacgctggcgttcgccgggcatactgacgtcgtgccggcaggcgatgtcgatcgctggatcaatccgccgtttgagcctacgattcgcgacggaatgttgttcggtcgcggcgcggcagatatgaaaggttcactggcggccatggtggtggctgctgagcgttttgttgcgcagcatcctcatcaccggggccgtcttgcgtttctgattacctctgacgaagaagccagcgcgaaaaatggcaccgtaaaggtggttgaagcgctgatggcccgtcacgagcggctggattactgtctggtcggcgaaccctccagtactgaaattgtaggcgatgtcgtcaaaaacgggcggcgcggttcgctcacctgtaacctcactattcatggcgttcagggacacgtcgcctatccgcatctggcgaataaccctgttcatcgcgccgcgccttttctcaatgaactggtcgctgtcgagtgggatcggggcaatgactttttcccggccaccagtatgcagatagccaatatccaggcaggcaccggcagcaataatgtcattcccggcgaactgttcgtgcagtttaacttccgtttcagcacggaactaaccgatgagatgatcaaagaacgggtacatgcgctgcttgagaagcatcagctacgctataccgtagactggtggctttccggtcagccgttcctgaccgcacgcggcaagttggtggacgcggtggtaaacgctattgagcactataatgagattaaaccgcaattactgacgacgggcggtacgtccgacggacgttttatcgcccgtatgggagcgcaggtggtagaactggggccggtgaacgccacaattcataaaattaatgaatgtgtgaatgccgccgatctccagctactggcccgtatgtatcaacgcattatggaacagctcgtcgcctga

SEQ ID NO: 383919 - DNA, 864 bp, Salmonella enterica
atgacttttcctggcgggaagcgcggcgcctggtgcgtttttatggcattcatcatcgcagtatgcgtttatttattgcctcgcgttgcgatcaacgctttttactatccggataacaaggtctatggacctgaaccctattccgccgagtctgtctttttcacggcaaaagatggcacgcgtctgcatggctggtttattccctcggctgtcggcgcgccggaaaacgccgtcgcgacagtgattcatgcgcatggcaatgccggaaatatgtcggcgcactggccgctggtcagctggctaccggagaaaaatgttaacctctttatgtttgattatcgcggatttggcgaatcgcaaggcgttccttcgcaagaagggctgtgcgacgatacccaaagcgcgattgcgtatgtgcgacagcgcagcgatgtggacccgcagcgactggtcttactgggacaaagtcttggcgggaataatattcttgccgcattgggccgtgggaaaagtcagctaaaccgcgccggcatcagagccatcatactggattccacattttattcttattcctccatcgctaatcagatgatccccggcagcggttttttgctggacgacagctacagcgccaatcgttatatcgccagcgtcagccccattccggtattgattcttcatggcacggcagaccatgttatttcctggcaggacagtgagaaattatatgccctcgcccgggagcccaaacaaaaaatcttcattcctgacggcgatcacattgatgctttttccagacgttatgcaaacctttatcgcaatgcaatgattaaatttattcagaccgcgctaccagccaaatag

SEQ ID NO: 383920 - DNA, 1290 bp, Salmonella enterica
atgataagtaaacttttatctcagtataaattaaatgttgaccttaaaaagatagtccacaacgctggatggctcctttttgacaagtttgtaaggttagcttttggtttatttgttggtgtatgggtggctagatatttggggccaaaaacatatggcgaacttacctatgtagtaacattgatcagtttctttcaggttatagccttattaggtctggattctattttggttagggatatagctaataacaaaagagaagcgaataaaatacttggttctgccttgtttatgcgtttaggagcaggcattttaagtctgttatcaattgtattttttgtatggatatttaacggctataatatcgcaatattaacactcttggctggtggtggtcttgtattccagtgtatagatactatagatatttggtttcaaagccagagccaaagtaaaagaacagttattgcaaaactatgctcctatactatcactaacatactacgggtgacatgtatactaactaactgtcctttgtggtcatttgcccttctgttgagtgtagatgcgatgctggcatcaatagctctttgctatgcatatagaacgtacaaaaccgcggagaaatggaagccagcgctgaaaaaatgtaaagatttactttcagaatcatggccatttctaataagcggagtctcggtaatattgtatatgcgagttgaccaaattattataagaaatattcttggtgagaaagagttgggtgtttatgctgcatcattgcaattttcagtgctgtggggtttcgtgccctttacattatcagttagtattgccccatatattatcagaaaaaagaaggaaggtttagatgtatactataatgctctaaaaaatacttttctccttttctctgctttgggatggggtataactttatttgttgctgctctttctccatttataataaatgctgtgttaggcgctgagtattctagtggaacatcagtacttgcagtgcatgtgattacaaacttatttatatgcttaggtgttgctcaaaatttgtggatagtaaatgaaaaaaaaggtttattgattttatataaatcaataactggattgattgtttgttttatatcaaattttattctaatacctatttatggaatagaaggggcagcaatatctgcagtcatatcacaactaagtgcttgcatattatctaatgcgcttttttgccgaaaaatattattaatgcaattaagagcgattatttttatcagataa

SEQ ID NO: 383921 - DNA, 324 bp, Salmonella enterica
atgagcaaagacacctggccagtatcagcttcttcgtatcgtattaactgggcgccacaaactgttgttgaagaagttctgcagaatgtctcgacaattctggccactcagactggtacggtcccctattcacgaaaactgggggtcacgtccggtctggtggatagccagacacctgtttttattgctatggccacgcgagagattattcagaaagtcagtgagtttgaacctcgcgcgattatccattcagtcagttttgacaaggcgaatgcttcagatggcgttatacggccgaaactggttataggaatcaaaagatga

SEQ ID NO: 383922 - DNA, 468 bp, Salmonella enterica
gtgattgttggcatgtatggatcaatgccgtttgtggcgtcgtcaatggtggtgaatacgttcgccaattttaaacgtacatcaaaacgccgcctggcccgacatgaagttatcggcctcaaaccggttctggaagatattgggccggatctcgatgaagtgagttttaccatgcgccttgatacaacgcttggtgtagtgccgctggctgcgttgtcattactgcgatttatgcataatgcacaggaggttaacccggttgtcattggtatccagtatttcggaaattttgtgatttctgacattgatgaaggctggacgtatctgggcccgacaggaaacccccgggtgattaatgtgggtatcaaactactggagtcgggtcaggcctcgctcgccgaagcgttggtagatattgcgggtgatgttgaatctaaaactaaaggtgcattaggaaaattattatga

SEQ ID NO: 383923 - DNA, 621 bp, Salmonella enterica
atgaacgatttagaaacattgattcgccagcttatccgggttggtgtggtgtctgatattgatgaaaaaggagtgacggccagagtcacttttgatgatcaggacaatgtgacctcagccagtttgcaggtcattgtgaaaaatacggatgagaatgctgattactggatgcctgatgttggtgagcaggttttatgcctgttttttcccgttggaccgcagcagggttttatccttggcagcttttacgatgaaacgcatacccctcctgcaaacaccgtaaacaagcgcgttatcagattcaggaacggaacccgtattgagaatgacagggaatcaaattcattgctggttgatgctgttggtgatgtgacggttaaagccacaggaaccgtcacgattgatgcgccggaaaccatcataacgggtaatgccacagtgaaaggtctgcttacctatcttggtggcctgaaaggtagctctgaaggtggaactgctgcggatattcagggtgagattaaggttacgagtggggatgtagtggtggacggtattggcgttaaaaaacaccaccatgacacacaaggggaatatgcccctacatcggaggcaaaagcgtga

SEQ ID NO: 383924 - DNA, 1002 bp, Salmonella enterica
gtgttacgtaaaactctttttgacgtgatttaccagaatatggatatcacggctgacatgcagcctgacattctctcaatatcgtataccgataatgaggacggccaggttgatgacatcgctattacgctgaagaacgacgacgggaaatggtctggcgactggtcacctgaaaaaggggactttattcgtcttgtctttaagccattcaatcagatagcgctggagtgtggcagttttcaggttgatggtatcacatcgtctggccctccttctgttgttgaggttagcgcggtatctgtacccgtagccgctggtgtacgccgtgatttgaaaagtaacgcctgggagaaaactacgctcagggatatagctacatcaatagcgaagctggccaaccttgagctgatgtttcttatcgatgagggcagcaatccatattacgaacgtgaagaccagatggaggaaagcgacttaaagtttctccatcgtctttgtcaggatgaaggcgtgtccttaaaagttacggatagtcagcttgtgatatttgctcaggaaatgtttgaggaaaaagagccaatagcaaccctgacgctgggtgttgatgaaattattcgttattccttcagtgctcaatcttctgatttgtataagagctgcacctgcaaatatcgggtacctaaaaaaagaaaatcactggcgtatacctgggaagatccttctgttgaagatggcgccaacctcaaaatcagaaaactggtcgcaaacctcgatgaggcgaagcgtaaagcgaaagcggcgttgagattaaaaaaccgatatcagaataccggttctttggtgttgcctggtgatacccgacttattgcaggcgtcacgctcaatttagccgggtttggtaaattttctggtaagtatctggtttcaaaagcaactcatgccattagtaacggtgggtataccacatcggcagatattcgtagagtcattgaaggatactga

SEQ ID NO: 383925 - DNA, 2457 bp, Salmonella enterica
atggccagcaataagaactttcagctggcttttgaaataggcggcaaagttgccgcctctctcccaaagagttttaacgttgctcatcaggcagtggcgaaacttaactctgagttaaccgatctcagaaaagaccagggcgaggttcaaaagcttcaggcgatgaaagccagggttgggcagacggcgcttgaataccataaagcggccgctcgcgtggaagagctgcagcggcagataagtaataccgagaacccaacccgggcgatgatccgggagtttgaaagggcaaaaacgcagtcatcaaatttacgcacatcgttacgttcacagcgtgacgaactcgcttcgctgaaaaacgcatacggtggggctgatacatcagctaaggggctgacagctcgtgaaaaagagctgaaactcagcattgatcgcaatcgtgaagctcagtctcgcagcgtagagcaggtaatccgctataaaacagcactggctcaggccaggactaatattctggatgcaaaacgggctcaggatgaactcaaccgttcgctggagaaacgccgcgagctgaaaatggaacagctcggagaagccaaaggccagttagtcagatccggtgtacagactacagctgtagctgccggggtatttgctgcggccaataacacggctaattttaaccgtgagaacaaaatgatcggcctgacagcagatatgaagccagctgaggttcaggctatgggccaggcgatgcttgtcaccggggctgcgacaaaccagtttgcgtctgatattcaggcggctcagggcttcctggttgcagctggtcaggattacaaagaagctcaggctaaccttctgacaatagggcgtactgcgactgcaaccggctcagacatactcgatgtttccaaagcatcctttacactcagcgatgctcttaaaatcgatccctctcaaatgaaaacagctatggggattctggttcaggcgggtaaagaggggaacttcgaatttaaggatatggccaaaaatcttcctgttcttggcgcccagttccaggccttgaaaatgggagggaatgaggctgcagcaacaatgggggctgcactacagatagcccgtaagggggcatcaacctctgatgaagccgccaacaacatgaataactttatggcgaaaatcctttcgcctgaaacgctgaagaaggctcaaaagaactttggcgttgatatgtacaaaatcgttacttccgcacaaaagaaaggacagaacccgtttgaagcggcaatgaagtctgtcatcaaaatgaccaaaaatggcgatcagaaattactgggtgagctttttggtgatatgcaggtgcagaactttatccggccaatgatccagaactgggaagaataccgacggattaaggaaacctctcttggtgctggtggtgctgttgttgatcgcgattttgcgaatatcaccaaagataatgcggagcgtttaaagcagctccgcattcaggccagtaatgccgcactgagctttggccaggcactacaaccagcattaaacgcggcgcttggtgtcctggtgccattgcttactaaagtcagtgagtttgtcgcaaataaccccaatctggtatcgcagattgtattgacggccggggcgttactgacaatgagaaccgcagttattgcctgtcgtgtggcgatgctggcgctgtctgtagcaacaaaaatgactccttttggctggatacagctggctatatcagctctcgttgcggccggggttttgctctatcagaactgggacaagatcaaggcctgtgcggtaaaggtgtggccaacaatcagggaatatggcgttaaggctcttgaaggactgaaatttgtattcatgaattttacgcctgttggctggctggtacaggccttcaaagcgggggctgacatacttaacaccatcaactggagcgactcaggggctaaaattattgaaaccctgatcaccggtattaaatcgaaagccaatgctctggttgatgaggtgaagggtatttttgcgaccgttcgtgagtacctgccattttctgacgcaaagcgcgggccattctctcaactgactaaatccggtggcgcaataatggccacgctggcctctggagttaacgggagtaacagcctccagactgcaatttcaggtaagttcgggcagacccgcttttctcctcatggaatatcagttgcaggaggcctgtcatctcgctcgggagcctccgggggcgccgtcataccacctggtgggattacatacgcaccagtgattaatcttccccctggttcaccaaaggaaacagaagcggctgtacagagggcgctggacgcgggttactcagattttgagaagaaaatgagcgcccacctttttcagagtcggaggttaagctttggataa

SEQ ID NO: 383926 - DNA, 282 bp, Salmonella enterica
atggaaattattgaattaagtaaagagtatcgttttgaagattatgaaccaacgtcaaaaatagttcttaacctggacgagttgaagggggcggatattttagaagtgactgacgtattacaggctcaggggcatgtttctgcttcagctgcattagataacaaagtccaggctgcgttagctgctcgctgtctggatcgtccggttgagtatattaacggcttgccagcgcgtgacttcgtgaaaatctgccagagggtacaaagttttttgttggcgtag

SEQ ID NO: 383927 - DNA, 522 bp, Salmonella enterica
ttgagtaatcaaattccagaacgtttaattaacttcaccgtttatggtgaaggtagccgtattattggcatagctgatgctaaattaccttccattgaaatgatgacagaaacagtttcaggtgccggaattgcaggtgaaattgaaaccgggacgctcggacacttcaaatcaatgagtgtttcgctgaaatggcgaacattaacagctgatggtacaaacctgtttctttcttcatcgcatcaggtggatttcagggggagtcagcaggtctacgatgcgggaaccggtaaatataaaaccgtaccaatccgcgcttcaatgaagctgaatcctaagaaattagatcttggttcgttacaggtatcaaaagcgactgatactgaaaatgaatttgaggttctgtatctcaaattatttattaacggaaaggaagttcttgaaatagataagttgaactatatctgcatctttaatggcgaagatatccttcagactgttcgtgatgatttagggctctaa

SEQ ID NO: 383928 - DNA, 1470 bp, Salmonella enterica
atgggctaccgtcacggtatttatacatctgaaatacctacttcaattacacctccagtaaacgttagtgcggggttaattgttgcgtttggaacttctccagtaaaccagcttgataatccatcatctgcggttaataaaccggttattgcatacacctatgccgaagccgtttcaaagataggtttcagcactaactttgaaaaatatactttgagcgaagtgattaaggtcgcttttggtatctatggcgtggctccggttgtgtttatcaatgtactggacccgacaaaacacaaagcagacgttgtcgatgaagccgtcaaactttcaggcggtaaggcaacgctggctaaggatggggttctctacgactctgttgttgtaaaaagtgctgcgcccgatgcggccgttcttgttgttgataccgactatattcttgctcttgatgacgatgggtatacggtcattaccgcaatcactggtggggctatcaagggtaaagatgcagcgctaaccgtaagttatacacaccttgatcctgatgcagtgaccaaagatgacattatcggcggtgttgatcttaacactaagttaagtaccggccttgagctgcttgctgacgtttacccgcgctttaaactggttcccggccaggtgattgcgcctggatttagtacggacagtgaagttggccagttaatggcgactaaatccgcgatgataagcgagctgtttaaagctgaagcgttaactgacgccccaaccgatacggcgataatcagtgattactcagcggtaccggaatggaagcagaacaataaccagctcgccgcgaaccagactgtatgttggccgatggtgaagctgggagacaccatttattaccactccactcatctggcagctgcaacatgtctgatggacagtaaaaacggtgatgttccttcacgttctccgtcgaatatcacattgcaaatggatggtgctgttcgtaaagatggctcagaggtttggttgaataacagtcaggccaactatctgaacggtcaggggatcgtaaccagccttaattttgatggctggaaatcctggggaaaccgcaccgcaatttatccaaaaaatacagacccgaaagacgcgtttcgtgtcgggcgccgaatgtttaactggacagggaatacgctaattttgacacactggtcaaaaatagatgaccctgctaaccgacggcttattgagtcagtcgttaccagcgctaatatctggtttaacggtcttaccgggaatctggacattgctggcggtaaggtcgaatttaatcaggctgaaaatccgacgacggcgttgatggatgggatcgttaaattccatgtgaaatttactccatactctccggcgcgagatatagagtttattatggaatataaccccgactatttattgaatctgtttggctcagctaattaa

SEQ ID NO: 383929 - DNA, 300 bp, Salmonella enterica
atgactactgagaaaaaaaccgcgaaagcggcgggcgcggctacgccaaaaaaagaaaatatcccgacattaatttatatcgggccaacaattcctcaaatttcattgctgaagcacagaatatatcggaatggtttgtcggtggagtgtgaaaagctgataagcgttattcctggtgctaaacaactctttgttactactgctgattttgctgatgcagaaaagcggcttagcgataaaaccagtgttgaagctgtgatgtattcgcgtgtttttgcagcgatgaaggagattaattaa

SEQ ID NO: 383930 - DNA, 486 bp, Salmonella enterica
ttgagcaatctgttgattgatgcaataaaaagtcggttagagaaagagatttgccctaacctgttgatacaggggcattcagaggatgagagggatacagacgttaagttgtatgttcccactatcttcaaaggttttttaccaccaaaatcagccccagacccaaataaacctccagagtttcctcacattataatccgtcccacagaagggggaatgcagcctgacatggatactgttcgggtgaaattcctgctgggtggtttttgtgaagatccaaccggatatgaatggttaatgattgttcttggccgaatggctaaggattttcaggaaaaccctgttctggatatgcagtatgaatttcagaacgatatccactggaagttgttcgatgatcagccatatcctttttgggtaatggaggcgattggttcctggtcagtaattaaacctcaaaatactcaatttcaggacgatctctaa

SEQ ID NO: 383931 - DNA, 345 bp, Salmonella enterica
atgaactcttttaaagagataatggcgcaggatatttctgcggtatttatgaatgagaaagagtttgctgacatctacaacattgacggcaaggacatccttgccgttctggatacagacctcgttcacgaacgtaataagcgctcatatgctgagtttgctgagggtgtaaatcaggggcaaataacgctatttgcttcgcgtaatgattttgctcacgttcctgttaaggaccaattaatggttattaacggtcgtagctatgttgtgaatgaggccgcagataattcaggggtgttagaaataactctgactatcaatacgaacagaggtatgccaatttga

SEQ ID NO: 383932 - DNA, 456 bp, Salmonella enterica
atggcccgtttagttaaaaacatcgatacccgtcaatacggctcgcttaaagcgggccgtttgcttgatggggttttgccagaatcaaaaattgctgagctaatcgcttcaggtcacgctaaagcgactgatggcgacgaacccctcactgataacggaaaaaacgctgagaacgccgctgaagcgtttgaaatggcattcaagcggggttatcggcatggttatgctgctgcagtaaatgatgctgttgatgaggggctaatcagtgcggaagaggctggcacttgtattttcaatgttagcgagatcgatacagatatcgctaacacgaatatcagtacaagtgtttctggtggagataacaccaattattccgatagcgttgcagaggaaggcataaagccagaaaaggaccaggctaaggcttctgcgaaggaaaaaaaatcaaaggcgtaa

SEQ ID NO: 383933 - DNA, 1044 bp, Salmonella enterica
atgccaaatattgatatttttgaacgtcgcacgatgctggagccggtcatacagaactttgaaccacgccgcttccttctgcgtacatttttccctggtatttcgaccttcaacactgaaaaagtggatctcgactttgttcgcggtggtcgcactatggcgccatttgttggtaaagggtatggctcaaaaacggttgagcgccacggttttgaaacaaaaacgttacggccaccgctcgttgcacctgatttagttactactgcagagcatcttcttaatcgcctgccaggtgagaatatctataactctaaatcgccacaggaacgcgccgctgagcaattaggtaaagatctggttgaactggatgatatggtcaaccgtcgcgaagaatggatgtgttctcaggttcttttcagcggtatggttgaaatcgtcggtactggtgtagaagaaacagtatatttctggccggataatgatgctgataaaccgtatcttgaactgactggtgatgacctctggacatcggctgcatctgatccactggtcaatgtgcgcaactggaagcgtaaggtgtcattaacatctggttttaccccgcgcgttgcagtcatgggggctaaagttgttgatgccttcgttgcaaacgaagctatcagtaagtacctggataaccgccgtaaggagttaggtaagattgagcctaaagatctggaagagggcgttacattttacggtaccatcgaaggcgttgatttctatggctacgatgaactggtttacaacgacgtaagcggaaaaacagaaccgttggtacctgaagataaaattcttctcggtgcgccgggacgcggtgaaatgctctatggggcggttgtactggccgatgaagcggaaaaaagcttcacgctggtggaatcacctcgtgttcccgatacctgggtaagccgaaaaccagaagggcgttttgtcgcgatgaagtccgcgccgttgcctaaccccggcgtggcggatgcttatctggttgctaaggtggtgtaa

SEQ ID NO: 383934 - DNA, 387 bp, Salmonella enterica
atgcaggaaacttttactcatgaaccagacaacctggttatatctggcgccatgccagctgtaccagtcaatatcaatgtagccagcggtgttattgagcgcggcacgttgctttccttcgtcagtattgatcccgcaaccaacgtagttacggttgcagcgattgacctgaccggtgcgaatgcggaagaaaaattgccgttctgtattgcacagcatcgtatcgatgcttctaaaaaagcatgtcgtggaactgcgtgggcgaccggagtattcaatagtcgcaaagtgattctgccagctggtgtaaaggttgctgatgtatatctggcctgccgtaaggtcggtttattcctcaacgatgctatgcctgaccctgtggcctaa

SEQ ID NO: 383935 - DNA, 1065 bp, Salmonella enterica
atgtctaactggtggaatatcaaaaactcagcgggggaagatgataccccggctgaaatgcaactctacggctatatcggggaatgggatgatatttcttccgctgaagtcgttaagcaactgaaggacatcacggctaaaaccattgttgtccgcatcaacagctatggcggctcagtttttaccgcgcaagcgatactctcttccctgaagcgtcacccggctaatgtcaccgtctatatcgatggtatagctgcatcggccgcaaccatcattgcgatggccggggataaaatcatcataccggctaacgcaatgatgatgatccataacccgtggacgcttgccgctggtgactcagaagagcttcgtagcatcgctgaaatgatggataaagtcagaaatagcatcctggccgcttatcgtgaaaaaacggggctttctgacgaaaaacttattgagttgatggacgccgaaacctggttcagtgccgatgaagctgttgagctgggctttgccgatgaagtggaacagccaatgcgcctggccgcatctcttaacaacggcgttttctccctgaatggtatgagctttgacgcttcccgctttgctcacctacctgattcactcgccaaattaacagtaccagataacaaacaatctgcggtgccgaccgcgcataacgaggaggagatcgtggatctcgaaaccctgaaaaacaaacatcctggtttatataaccaggtattcaatgcaggtaaagatgacggtgtgaaggccgaacgtgagcgaattaagcaaattgaggattcagttattcccgggcatgacgaattggtcaacaaagccaaattcgaaacaggggtatctgctgaagcattggctctggaaattatgaacgcggagcgcggccgtaatgccgcgtatctgcagaacagaatggatgatgccgatccgctgaaaaaagccgttgatacccgggaaccacagaataagggtgagcaagaggttgaagcagtgaaaaacagcattggttcggcatttcaaaatcgtaacaagcgttga

SEQ ID NO: 383936 - DNA, 1563 bp, Salmonella enterica
atgaacattctggataaggtcattgcaccgttttcacctcaaagagcgctaaacagggctgtggcaaggaagaaactggaagccattaataatttaggttacgaccgccacggtgcaagtacgcataagaaatcaatgcgcggctggtttagtcgagctggctcgccggatgacgatatcgttaagccactgaatatattgcgggaacgttcgcgtgatctttttatgggtaatcctcttgcgacaggagccataaaaacgatccgaaccaatgttgttggttcagggctaaagctcaacgctaacatcgatgctgagtttctgggcttgtcaccggaagaagcgagattatgggaaaagaatacggagcgtgagttccgtctatgggctgattcagtgaactgtgacgcatcaagaatgtgtacatttggtcagcttcaatcactggtccagatatcggcgttgtcgtctggtgatgtgtttgccacgcttcctgtaataaaacggaaaggggttatctatgatttgtgcgtttacctcatagaaggtgatcgcgtttgtaatcccgataccactgttatccctgatatgtatggcggtattgaactaggtgaatacggcgatccggttgcttactggattgctaagcaccaccccgcgagtacatccagctttgtccagaggaagtgggaacgaataccggcttatggcaagaaaacggggcgacgtaatgttctccatgtcatgcaggattgggagcggcctggacagcggcgcggtgttcctgtcttggctccagttattgaagcgctgaagcagttgggtcgctacacagatgcggaactggtcgctgcggttgtttctgggttatttactgtattcgttaaaacggaggctcctgaagggccaataggtgaggctggtattcctcaatatgagcagatcgataatcacgatgaaaatacgatcgaaatggggtctggatctgtcattagccttggtgatggggagtcagtagacacagctaatcctgggcgacctaacactgcatttgatggttttgtcgtggctatttgccgccagattggtgctgcgcttgaattgccatacgaactgctggttaaacacttcacagccagctatagcgctagtcgtgcagctcttctggaagcctggaagatgttcaggatgcggcgagagtggatggtgttgtcgttctgccagcccatttatgaggaatggttatctgaagcagtggcgaaaggccgggttatcgcacccggctttttttatgggcctgaatataaggcggcctggtgtggcgctcagtggtatggcccatctcagggacagctcgatcctctgaaggaagtgaaggcggcgaaaatgcgtgtagaagaaacgttctctacacgagagaaagaagccgctgaaatgtccggtttgaactgggaagaggccgcgcagattagcggaagagaagaagctacgcgacgagatctgaagctggctagtacgcctgatgtacctgaaaaacctgatgaagaggaactaaatgtctaa

SEQ ID NO: 383937 - DNA, 240 bp, Salmonella enterica
atgggttatgaggccatttcgctaactgaagctcaagaaatgctgtcggtctggaaagaggcataccgggctatcgcaatcggtggacagtcctataagttgggaacaaggcagttaaacagagcggatctttcagaagtgagagagcagcttgacttctggcgtaatgaggtcgagcggataactgccggtactcgccgcggaccgcgtgttaaacgcgttgtagtgagagatttatga

SEQ ID NO: 383938 - DNA, 1860 bp, Salmonella enterica
atgggcgaaacagtatggagcaccgcgtttttccgtgcgcttcgcccaaaatcacggctaaccgtttctgagtgggccgataaatatcgtcatgtggcgccgggaacttctcccgagccggggccgtggcgcaccagtcgagtaccttacctgcgtgaaccgatggatgttattggcgatgctgatactgaaacggtagtcatgcagtgtagttcgcagattggtaagtcagaaatgcagctcaacgtgatggggtattttaccgatcaggaaccctcaccacagctgatgatttacccgacagttgaagcagctgaagccttttcgaaagagcgtatcgatcccacctttaagtattctccgggattaaagaataagctccgtgaagggaaagaaggtcgtggcgcggctaaaaagtccagcactacgatccgtatgaaacactatgcgggggggtatgtggcgctggttggcgctaactcgccagctggtcttgcttcccgtccaattcgaatattgttagctgatgaaatcgaccgttacggtgtgacgcaggaaggcgatccattaaagctgggtattcaacgaacgacaaacttccataaccgcaaaaaagtgtttgtttctacccctgtgttagaaaaaacgagcaacattcataagtggttcaagctctcggatcagcgttattaccatgtgccttgcccctgctgcggggctatgcaggtactgaaatggtcgcaagtgaaatgggataagaacgacatgggggaagcgttgcctgaaacggctcgctacgaatgtcgtgagtgcggcgatgttatccgtggaccagggaagccagatgttgactggctggctaaaggggtctggatcccggagcaccccgaaataaaaggtattgttgggttccatatcagcagtctttattctccgtgggtagcattgtctgagctcgtagctgagttcgccgaagcgacaaaaaaccgcgataaaaacggcttaatggaattcatcaacctgaagttgggtgaaccgtggaaagaggacgcgaaagaagaaattgaccatgagtatcttctgcagcgtcgtgttcggtatgaggattttttacctgacggcgtattgcttctgaccgcgggtgttgatgtgcaggatagttatctggtcgctgaagttgtgggatgggggaaaggcaaagaatcctgggggattgaatacaaaatattcatgggggaccctgctcaatctgctgtctggcagcagctggatgagtttcttctccggtcgtggcaattccgtgacggccagcgcctgtcgatagccgctgcatgtgttgactccggcggtcacttcacaacagaaacttaccggttcacaaaatctcgcgaatctcgtcgaatttactcaattagagggcgcggcggtgtggggctgccattcattggcaaaccgaataataacaatcgcattggtgcaatgctgttcaatctcggcgtggatgatgggaaaggcactattatcgctcgcatcaaacttcacgacccaggccccggttatatgcacttcccggtcgattcagagcgagggtatgacactgaatacttcaaaggtttgctctcagagaagaaggtctttgaatacaaaaatggtcagacaaaagagaaatgggaaaagatttacaaccgaaatgagccactcgactgccgtaactatgcgtctgcggcgatggaaatactaaaccccaactttgactggcttgccgagcaggaacaacgaggaaacgtttatgttcaacagcaacagcaaagcacgcaaaaaaaacggcgacgagtcagaagtcgcggagttaccgcatag

SEQ ID NO: 383939 - DNA, 546 bp, Salmonella enterica
atggccatcgtcagtaagtcagaatttgcgaggcgaaaaggcatctctccggcgatggtcacaaagttatgtgcgtctggccggatacctgtactgaaaagcggaaaactggattttgatacagccagtactgcgtatgaggcgagtaaacaggttggccgggaagcctcagccattaacggtaaaaaaggccacagatcaaccgagcctgaactacccggtgatgatgctggattagctggtggtgcgactgccgtcgctgcacagttcaataaggccaagaccgcagaaaaggtttatcaggcgaaattaaaaaagctggagtacgaagaaaaagaaggatcgcttatagctaaatataccgttgctgatgatgcttttctcgctgcaaacgagttgagaagtcggttgtttagtattgctccccgtgccgccccgcgctgtgagggaaaaacggcaagggagattgaacgcatcattgaggatgagattaattttgcgcttcaggcgcttcaggaatcccgatttattaagcaggaagaataa

SEQ ID NO: 383940 - DNA, 591 bp, Salmonella enterica
atgatgctaaaaatcgaatatttgccgcgtggcaaactgcttcgttacgctaaaaattcacgaactcactctgatgagcaggtggatcaaatcgtcaacagcatccgggagtttggatttacgaacccggtgctgatcgacgaggacaatgaaattattgcggggcatggacgtctgactgctgctgaagttctggagatagagaagatacctgtcatcaggctaacgggtcttacaccaaagcaaaaaaaagcctatcgcattgctgataacaagctggcattaaatgccggatgggatatgcagctgcttgccgaagaagtcagtgagctggttgatagcgattttgacattgagttactcggatttagcgattctgagattgacgatatgttaaatgttgagcctcccccatctgaggaagatgacgcaccgccgatcgttcagattaagtatctcaccattgataaagaccgtatcccggcaactgatacagagattgctctgttactggatgtataccgccagtaccacgatgcgcatgagacccatgaagggtttgtgaaatacctcgctgacaggtgccagtga

SEQ ID NO: 383941 - DNA, 774 bp, Salmonella enterica
gtgagtgctaaaaggcgtctgtacttcgtggaccatatgattaagcagggggagctggtggctgacaatattgaagttaagttggattttgacgctcaggtcattcagcgccagctcatacgtctggaagaacgtgaaataccgtttgcgatggcacttacggcaaccagaacagctaaggcggcgcagatggcactgaaggatgaaatcggccgtgtgttcgacaacccgacgccgtggattttgaactcaacatatattctggccgctaaaaaaaacaatcccaaagctgttgtttatgctcgggagtggggcggtacacctgcgccaactacgctaacgccgcagattgaagggggagagcgccaatataagcgctctgaaggtgcattgagggctggtggttatctgccgaacggctggcaggttgcccctggccccggcgcaaagcgggataaatacgggaatattaaccgggggcaattgcagcaagtgctgtccggtctgcgtgtgcagcgcgatgtgcatcagaaccgccgtcagggcaagcctacggagttctttgttattcgtcctggtacgagtaaccctctacagcctggcgtgtggcagcgcgttgggcggcgtcctacgctgatccttacattcattcaacgacctaactattcgcaacggcttgactggcatggtgttgctctgcgggctggtgaagcggccttcactgatgagattgcaaaggctattgatgagttacttgctaagaagttcgactaa

SEQ ID NO: 383942 - DNA, 537 bp, Salmonella enterica
atgactatctattacacagtagaccgtgctggtcatcatggtatgccaaacccactttccgctggcttagtgattacagcatcggagagcttcaaccatttgcctcccaatattgctacacatctgtcagcattgcttccaggtgattattctcgtcatgggaagcaatatttgattgacaacattgccatgactaatcacgcaggacatccaatggagataatactcgagttgattagacaaagagattatccaaccaagccatcaaggttacagtctgcctttggttgcttatccttatcagatgcagattctttcagaaagctaaacaacagattttccagcgctcctatttttgagatttcgccattaaatcagcaagctcatgttgctgatatgcacttgttgagtatcgcttgcccagctcatgaatatctcaataaatgtcatctttattggcggggattgcctgggcaaaaccctttttgggaggcagttattccattaccagcaacagtaggaaatcaagtggcttga

SEQ ID NO: 383943 - DNA, 183 bp, Salmonella enterica
atgccggatatgaaggatatcgtcaccgacgacatggtgaaaaacgtcctcaaatcagacgttgttaccatcgcagttaaaacgcagattaaatccactctggatcagcagattgacaccgctgtcgataccgcgttgaccgatatcctcggtagtggtactgataatacgattacgcagtag

SEQ ID NO: 383944 - DNA, 177 bp, Salmonella enterica
atgcaatcgcaggacggcttcctcacctgtctgatggccgctgccctccgggccgttgctgcgcaacgtgcaaatccgctcccggcggatttgtcatccccggaagagctcttcaccggcagacaatcgataaaacaaaaggccctgtcgcaagacagggccttttgttttgtttga

SEQ ID NO: 383945 - DNA, 867 bp, Salmonella enterica
atgtctgatattcatggaagtaagttaactacacatggttctagtaagtttttatttatcggcctcttaatctgctctgttatatttatagggtttggtatcttttgtttgacgcttatgaatatgccaacctcaaaagaggaggccggtggcggtatttattttgccgttgaacccggtggtataagcccaatggtgctgttctcactcgttggcggtgggctaatcatccttggattaattgcggcggcaatagcattcatgcaaaaaaatgttcccgtatttatgattaccgaaaatggtatcagctgtaaatataaagggaaagagaccttttccctctttaaggacattgctgatgtatacctcttttcagtgggcagaaccagctataaaggtactataaactctctggcatatagaaaaaataagagtgatgcctggactttcatctctccaagaaattcaggctacagtaagctgatttctaccttcaggagcctgtattcacaacaaagagtgaaggatttacgtgcgcaactggaacagggagctacattagaatttaattatgtggacgcaaagatggtctgggttaaaagggctttttcactcaacgtagctggcgcagctaaaatagattcctcattgcggaagttttatctgaccaaaaacagtatcattaaagatgataagatcatcactattaataaatcagacagcattaatgctggtggctggaatgataatttataccttcttgatagtgatggtaataaaaaattctcaatgatgttcccgtctatcatatcggcagatgtgtttcgtgagctattacaggacgttatcgaacgagtggaaaactaa

SEQ ID NO: 383946 - DNA, 597 bp, Salmonella enterica
atgcaaggcgtcacccgccagacgggtattatcagcgatatcgatgaggctgtcgtgcgcgtcagagtcaccctgcctgagtgcgacaacctgcgcagtaactggcttcccgtgctccaacgcaatacgcagaacaacaaagactactggctgccggatatcggcgagcaggtcgaggttttgctcgacgacaatggcgaagacggtgtggtgctgggcgcggtctactccagcgtggataccgcgccgctggcctcacgcgacaaacgttacgtgcagttttccgacggcgcggcctttgaatatgaccgcgcgttacaccagctcaccatcaacggcggcatagaaaaaatcgtcattgaggtgaaagagagtacccgtctcacctcgacgcaggttgaagtgaaggcgcagcaggtgacggtgacctctgagacagtgaacgtggtctcaaacaacgtcgcggtgaaagcgatgaatatcaccgttgacgcgccgataagtcattttaccggcaatatcaatgtactgggtaacattagcgccagcggcgtcatcatggatggcggcggtaactcaaaccaccactctcactaa

SEQ ID NO: 383947 - DNA, 210 bp, Salmonella enterica
atgcgctaccttgaacatatcaccacccagggcgagcgttgggataatctcgcctggcgttattacggcgatgcgctctcttatgaacgtatcatcgccgccaatccgcacgtcgccgtcattccggttttaccctccggcgtacggctcattatacccgttatcagcgtcacgcaaaccacatcggagctaccgccatggctgagataa

SEQ ID NO: 383948 - DNA, 954 bp, Salmonella enterica
atgtatgccgtattaggagaaatagaatttgacgtcgtcgcttattgggacggctttgacaatacgatgggcgtggattatgccagccatgcccgtatcgaaggtaaaccaggcgtacagtttatcggcgataagctggataaaatcaccctgcaattcagcttccatagccagttttgccagccgaccacggcgttaaatcgtctgcgtgaagccatgaccgcgcaccaggccatggcgctggtgtttggcaacggcgattatcgcggctggttcgtgataaccgatctgaccacgagccatcagcacaccgatccttacggcaatgtgattgccctgagcggcagcctgtcgctacaggagtacatcggcgatccgaagaatccgttactgcctccggctatcaccgcccaggaacctaacatcgacgaaatgctggatgatttccctgaactcagcgattcgtggttcgatgcgctgatgagcgccgctgaggacggaatgcgcgacgccaaagagaagctggaggaaatggccgacgccatagatgacatcaaaaaaacgatcacccaggcgaaagcactggtgaaagaagccaaagccttaaaggagaaatgtagcgacattatcgattcgctgaaaaaaaccattagctcggtagacgcgcttttccagcagccgctggatctgtcaacgttggcagggatgccgaaagcgctggcggcaaaaatgcaggcgctgatcgacagcctgccggggattcgcgaatgcgccgacgataccgctacgctcatcgggcacgccgaatcgctgtttgacgccatcaccagcagcgtggcggaggcgacttacgatcgcgcggcgacgctggtatatcaggcgcgcggcaccctacagacaacgacatctgcagtcagccgacttgccgctgccgatatcacaaggagtttgtaa

SEQ ID NO: 383949 - DNA, 2286 bp, Salmonella enterica
ttggccaacgatattattacccagcttcaggcgcgtaatgagacgttgacgcaggcaatagcccgttacggctccctcaacgccagcacgctgcaaacgctcagtatggagcaagcaaaaatcgccaggctcacgcaacagcttgccagttccgcccttcgccgggaagaaaacgccaaacagcgtactaacttcctggcaagaacgcagacctttgccgggcagctcggcaaatttcttaacgtcgaagcccctgcccggaagttgcctgatgaatttcaggacaatatggtggatatggcggtaaaaggcggtctggacgccgccgcgcgggacgccctgagcctgaatattcgcgactggagccttaattttaatcaggatcaaagcgcgctgcaaagcgccgccagcgtcatgatcgaaggcggcgttcacgctttacaggagctcagcgtctacatgccggatatcgccaaagccgccaccgcgacccgcgacagcgcgcagatctgggcgcaggcggcgattgccactcacggcaagctgaacatcgcgcctgaaaacttccattccgcgcaaaatatcatggccagcgtcacgaagaacggtggcgtttctattgcggaacaaacgcagtggattaatcgctttgccgccaggaccggcgttcagggtacggaaggccttgcggaactgaccgcaacaatgcaaatcgccatgaagaacaccacaggagcaagcgaggcagcagagaatttcgagcacttcctgaaatcgactttttccgaaaagacggaccgttggttcgccagccagggtgtggatctgcaaggatcgttgctggaacatcagcaaaacggcattgggatcaccgacgcgatgacgcacatcgtgcagatgcaactggaaaaaatgaatccacagatcctcgaaaccttcaagcaaacgatgaagatagaagatctttccgcacgcagcgacgcgctacgcgcaatggcggcgacgttcagcctcaacgagatgttcggtgattcgcaaacactggattttctcgcaccgatgctggcgcataaagaggagtatcgtcagctacgatccgccgccatgcaggccgcgggacaacatcttatcgctgataatttcaccgagagaatgacctcgccagacgaacagacgaaagcgctacagttgacgctgaacgatctgtggctaaccgtagggctggcgctgatacccgcgattaacgagctggcgcaaagtatcgcgccgcttgtacggcagttcagcgcctggctacgggaaaacccggcgctggttcaggggcttgccagggttatcggcgttatctggctgtttaacggggcgctgaacctcctgaagctgggggcaagcctgctcgtatcgccgtttattcgcctggtcgatattgtcctgaaggtaaaagccagcctggcgctgggcggcgccgccaactctgcgctgtcgatgctaaaaacgtttggcaagagcgcgacaagcctggcgcagctactgggacgcggcctggcgggcgggctaaaacgggtcgggcagacgtttatctggctgggccggacgctactgatgaaccctattggcctggtcatcaccgccatcgccggaacggcgtatctgatctatcgctactgggaaccgatttccggtttcttctccggggtctggtcgcaggtgcaaaccgccttcaacgggggaatcacaggcataacccgcctgataatgaactggtcgccgctggggctgttttaccgcgcgttcgccagcgtactggactggtttggtattgatctgccgacaactttcagcgaatttggcggcaatattctttccagcttaatcaacggcattatgaatgcgcttccttttttgaatggggcgattgagaaaatcaaaagcgtaatccctgactgggcgaaaagcgcgctgggcatcaccgcagaaaaaacggctgccgccagcctctccggggtggccggcgcaacgctgaaaccaccggtaacaggcgcaaagcctgccgtatcctcgccccctctcaccgtggcgcccggaaaaggcggaatcaaaccctattcgttgccctcacgcgctcagagtgctatccaggttcacttttccccacaagtcacggttcaggggaatagcgccaacgccgccggagatattaaccgcgtgttgtcgttgagcaaacgcgagctggaaagaatgattaacgacctaatggcgcaacaacggcgccgggagtacgcctga

SEQ ID NO: 383950 - DNA, 318 bp, Salmonella enterica
atgacccagaaatatactttacagtttccgtttacctctgccgccggtgaacgtattgacgccctgatgctgcgtcgcctgaaagtcaaagacatgcgcgccgcgcgacggaccagtgataaacccgaagagtgggatgaaccgttaatggcggccatgaccgggctggtgccggaagatctggcggagatggatttgctggactatcaggccttgcagaaacgatttcaatccatgcttaacgtggttacagaaccctcagcggctatggcaggcgatggcgctactggcgagatggtttcgctttccgcccagtga

SEQ ID NO: 383951 - DNA, 738 bp, Salmonella enterica
atgatgaaaaggacgataagcgcgctggcgctggcctttatcgcgtcatccgcctttgccagcggcactgttacggtttttaccaaaggtaataacgagcctaaaacgctgacagacgctgagcgtctgctcgatttagtcggacagccgcgcctggcaacgagctggtggcctgcggcggtgataggcgaagaacaggcgaccgtgacggcacgtcagcaacagcaggaactcctcgggcgactgacggcgctcagcgctgaggaagacggcgatgctgcggctgcgataaacatactgcgccgacagattcaggcgctgaaagtaacgggcagacaattagtgaatcttgatcctgacatggttcgcgtgagcgaacgtggtaacccgccgctgcaaggtaaatatacgctctgggtcggaccgcaacccacgcaggtgacgctttttggcttgattagccagccgggcagccagccgttcgtccctgggcgggacgttgccagctatcttgagggacaacgcttactcagcggcgcggatcgtagctatgcctgggtggtttaccctgatggacgcagccaaaaagcgccgttggcttactggaataagcgtcatatcgagccgatgcctggcagcatcatttttgtcggttttgccgattccttttggcgcggcacgccggaggcgatgaatgccgacattcttcatactctgacgcagcggataccggaataa
